United States Patent Application Publication US 2020/0163878 A1 - sequence listing, part 7

SEQ ID NO: 34656 - RNA, 1698 nt, Artificial Sequence
  derived and/or modified CDS sequence (wt) from hemagglutinin__InfluenzaA__ACO95415
augaaaguaaaacuacugguccuguuaugcacauuuacagcuacauaugcggacacaauauguauaggcuaccaugcuaacaacucgaccgacacuauugacacaguacuugaaaagaaugugacagugacacacucugucaaccugcuugagaacagucacaauggaaaacuaugucuauuaaaaggaauagccccacuacaauuggguaauugcagcguugccggauggaucuuaggaaacccagaaugcgaauuacugauuuccaaggagucauggucuuacauuguagaaaaaccaaauccugagaauggaacauguuacccagggcauuucgcugacuaugaggaacugagggagcaauugaguucaguaucuucauuugagagguucgaaauauuccccaaagaaagcucauggcccaaccacaccguaaccggagugucagcaucaugcucccacaauggggaaagcaguuuuuacagaaauuugcuauggcugacggggaagaaugguuuguacccaaaccugagcaaguccuaugcaaacaacaaaggaaaagaaguccuuguacuaugggguguucaucacccgccaaacauaggugaccaaaauacccucuaucauacagaaaaugcuuauguuucuguagugucuucacauuauagcagaaaauucaccccagaaauagccaaaagacccaaaguaagagaucaagaaggaagaaucaacuacuacuggacucugcuugaacccggggauacaauaauauuugaggcaaauggaaaucuaauagcaccaagauaugcuuucgcacugaguagaggcuuuggaucaggaaucaucaacucaaaugcaccaauggauaaaugugaugcgaagugccaaacaccucagggagcuauaaacagcagucuuccuuuccagaacguacacccagucacaauaggagaguguccaaaguaugucaggagugcaaaauuaaggaugguuacaggacuaaggaacaucccauccauucaauccagagguuuguuuggagccauugccgguuucauugaagggggguggacuggaaugguagaugguugguaugguuaucaucaucagaaugagcaaggaucuggcuaugcugcagaucaaaaaagcacacaaaaugccauuaaugggauuacaaacaaggugaauucuguaauugagaaaaugaacacucaauucacagcagugggcaaagaauucaacaaauuggaaagaaggauggaaaacuugaauaaaaaaguugaugauggguuuauagacauuuggacauauaaugcagaacuguugguucuacuggaaaaugaaaggacuuuggauuuccaugacuccaaugugaagaaucuguaugagaaaguaaaaagccaguugaagaauaaugcuaaagaaauaggaaauggguguuuugaauucuaucacaaguguaacgaugaaugcauggagaguguaaagaauggaacuuaugacuauccaaaauauuccgaagaaucaaaguuaaacagggagaaaauugauggagugaaauuggaaucaaugggagucuaucagauucuggcgaucuacucaacagucgccaguucucugguucuuuuggucucccugggggcaaucagcuucuggauguguuccaaugggucuuugcaguguagaauaugcaucuaa

SEQ ID NO: 34657 - RNA, 1701 nt, Artificial Sequence
  derived and/or modified CDS sequence (wt) from hemagglutinin__InfluenzaA__ACO95426
augaagacuaucauugcuuugagcuacauccuaugucugguuuucgcucaaaaacuucccggaaaugacaacagcacggcaacgcugugccuugggcaccaugcaguaccaaacggaacgauagugaaaacaaucacgaaugaccaaauugaaguuacuaaugcuacugagcugguucagaguuccucaacagguggaauaugcgacaguccucaucagauccuugauggagaaaauugcacacuaauagaugcucuauugggagacccucagugugauggcuuccaaaauaagaaaugggaccuuuuuguugaacgcagcaaagccuacagcaacuguuacccuuaugaugugccggauuaugccucccuuaggucacuaguugccucauccggcacacuggaguuuaacaaugaaagcuucgauuggacuggagucacucagaauggaacaagcucuucuugcaaaaggagaucuaauaacaguuucuuuaguagauugaauugguugacccacuuaaaauacaaauacccagcauugaacgugacuaugccaaacaaugaaaaauuugacaaauuguacauuugggggguucaccacccggguacggacagugaccaaaucagccuauaugcucaagcaucaggaagaaucacagucucuaccaaaagaagccaacaaacuguaaucccgaauaucggaucuagacccaggguaagggaugucuccagccggauaagcaucuauuggacaauaguaaaaccgggagacauacuuuugauuaacagcacagggaaucuaauagcuccucgggguuacuucaaaauacgaagugggaaaagcucaauaaugagaucagaugcacccauuggcaaaugcaauucugaaugcaucacuccaaauggaagcauucccaaugacaaaccauuucaaaauguaaacaggaucacauauggggccugucccagauauguuaagcaaaacacucugaaauuggcaacagggaugcgaaauguaccagagaaacaaacuagaggcauauuuggcgcaaucgcggguuucauagaaaaugguugggagggaaugguggacgguugguacgguuucaggcaucaaaauucugagggcacaggacaagcagcagaucucaaaagcacucaagcagcaaucaaccaaaucaaugggaaacugaauagguuaauagggaaaacaaacgagaaauuccaucagauugaaaaagaauucucggaaguagaagggagaauucaggaccucgagaaauauguugaggacacuaaaauagaucucuggucauacaacgcggagcuucuuguugcccuggagaaccaacauacaauugaucuaacugacucagaaaugaacaaacuguuugaaagaacaaagaagcaacugagggaaaaugcugaggauaugggcaaugguuguuucaaaauauaccacaaaugugacaaugccugcauagggucaaucagaaauggaacuuaugaccaugauguguacagagaugaagcauuaaacaaccgguuccagaucaaagguguugagcugaagucaggauacaaagauuggauccuauggauuuccuuugccauaucauguuuuuugcuuuguguugcuuuguugggguucaucaugugggccugccaaaaaggcaacauuaggugcaacauuugcauuuga

SEQ ID NO: 34658 - RNA, 1701 nt, Artificial Sequence
  derived and/or modified CDS sequence (wt) from hemagglutinin__InfluenzaA__ACO95437
augaagacuaucauugcuuugagcuacauucuaugucugguuuucgcucaaaaacuucccggaaaugacaacagcacggcaacgcugugccuugggcaccaugcaguaccaaacgggacaauagugaaaacaaucacgaaugaccaaauugaaguuacuaaugcuacugagcugguucagaguuccucaacagguggaauaugcgacaguccucaucagauccuugauggagaaaacugcacacuaauagaugcucuauugggagacccucagugugauggcuuccaaaauaagaaaugggaccuuuuuguugaacgcagcaaagccuacagcaacuguuacccuuaugaugugccggauuaugccucccuuaggucacuaguugccucauccggcacacuggaguuuaacaaugaaagcuucaauuggacuggagucacucaaaauggaacaagcucugcuugcaaaaggagaucuaauaaaaguuucuuuaguagauugaauugguugacccacuuaaaauucaaauacccagcauugaacgugacuaugccaaacaaugaaaaauuugacaaauuguacauuugggggguucaccacccggguacggacaaugaccaaaucagccuauaugcucaagcaucaggaagaaucacagucucuaccaaaagaagccaacaaacuguaaucccgaauaucggaucuagacccaggguaagggauguccccagcagaauaagcaucuauuggacaauaguaaaaccgggagacauacuuuugauuaacagcacagggaaucuaauugcuccucgggguuacuucaaaauacgaagugggaaaagcucaauaaugagaucagaugcacccauuggcaaaugcaauucugaaugcaucacuccaaauggaagcauucccaaugacaaaccauuucaaaauguaaacaggaucacauauggggccugucccagauauguuaagcaaaacacucugaaauuggcaacaggaaugcgaaacguaccagagaaacaaacuagaggcauauuuggcgcaaucgcggguuucauagaaaaugguugggagggaaugguggacgguugguacgguuucaggcaucaaaauucugagggaacaggacaagcagcagaucucaaaagcacucaagcagcaaucaaccaaaucaaugggaagcugaauagguugaucgggaaaacaaacgagaaauuccaucagauugaaaaagaauucucagaaguagaagggagaauucaggaccucgagaaauauguugaggacacuaaaauagaucucuggucauacaacgcggagcuucuuguugcccuggagaaccaacauacaauugaucuaacugacucagaaaugaacaaacuguuugaaagaacaaagaagcaacugagggaaaaugcugaggauaugggcaaugguuguuucaaaauauaccacaaaugugacaaugccugcauagggucaaucagaaauggaacuuaugaccaugauguauacagagaugaagcauuaaacaaccgguuccagaucaaagguguugagcugaagucaggauacaaagauuggauccuauggauuuccuuugccauaucauguuuuuugcuuuguguugcuuuguugggguucaucaugugggccugccaaaaaggcaacauuaggugcaacauuugcauuuga

SEQ ID NO: 34659 - RNA, 1701 nt, Artificial Sequence
  derived and/or modified CDS sequence (wt) from hemagglutinin__InfluenzaA__ACO95448
augaagacuaucauugcuuugagcuacauucuaugucugguuuucgcucaaaaacuucccggaaaugacaacagcacggcaacgcugugccuugggcaccaugcaguaccaaacggaacgauagugaaaacaaucacgaaugaccaaauugaaguuacuaaugcuacugagcugguucagaguuccucaacagguggaauaugcgacaguccucaucagauccuugauggagaaaacugcacacuaauagaugcucuauugggagacccucagugugauggcuuccaaaauaagaaaugggaccuuuuuguugaacgcagcaaagccuacagcaacuguuacccuuaugaugugccggauuaugccucccuuaggucacuaauugccucauccggcacacuggaguuuaacaaugaaagcuucaauuggacuggagucacucaaaauggaacaagcucugcuugcaaaaggagaucuaauaacaguuucuuuaguagauugaauugguugacccacuuaaaauucaaauacccagcauugaacgugacuaugccaaacaaugaagaauuugacaaauuguacauuugggggguucaccacccggguacggacaaugaccaaaucaaccuauaugcucaagcaucaggaagaaucacagucucuaccaaaagaagccaacaaacuguaaucccgaauaucggaucuagacccaggguaagggauauccccagcagaauaagcaucuacuggacaauaguaaaaccgggagacauacuuuugauuaacagcacagggaaucuaauugcuccucgggguuacuucaaaauacgaagugggaaaagcucaauaaugagaucagaugcacccauuggcaaaugcaauucugaaugcaucacuccaaauggaagcauucccaaugacaaaccauuucaaaauguaaacaggaucacauauggggccugucccagauauguuaagcaaaacacucugaaauuggcaacaggaaugcgaaauguaccagagaaacaaacuagaggcauauuuggcgcaaucgcggguuucauagaaaaugguugggagggaaugguggaugguugguacgguuucaggcaucaaaauucugagggaauaggacaagcagcagaucucaaaagcacucaagcagcaaucgaccaaaucaaugggaagcugaauagguugaucgggaaaaccaacgagaaauuccaucagauugaaaaagaauucucagaaguagaagggagaauucaggaccuugagaaauauguugaggacacuaaaauagaucucuggucauacaacgcggagcuucuuguugcccuggagaaccaacauacaauugaucuaacugacucagaaaugaacaaacuguuugaaagaacaaagaagcaacugagggaaaaugcugaggauaugggcaaugguuguuucaaaauauaccacaaaugugacaaugccugcauagggucaaucagaaauggaacuuaugaccaugauguauacagagaugaagcauuaaacaaccgguuccagaucaaagguguugagcugaagucaggauacaaagauuggauccuauggauuuccuuugccauaucauguuuuuugcuuuguguugcuuuguugggguucaucaugugggccugccaaaaaggcaacauuaggugcaacauuugcauuuga

SEQ ID NO: 34660 - RNA, 1701 nt, Artificial Sequence; identical to SEQ ID NO: 32647
  derived and/or modified CDS sequence (wt) from hemagglutinin__InfluenzaA__ACO95459

SEQ ID NO: 34661 - RNA, 1701 nt, Artificial Sequence
  derived and/or modified CDS sequence (wt) from hemagglutinin__InfluenzaA__ACO95470
augaagacuaucauugcuuugagcuacauucuaugucugguuuucgcucaaaaacuucccggaaaugacaacagcacggcaacgcugugccuugggcaccaugcaguaccaaacggaacgauagugaaaacaaucacgaaugaccaaauugaaguuacuaaugcuacugagcugguucagaguuccucaacagguggaauaugcgacaguccucaucagauccuugauggagaaaacugcacacuaauagaugcucuauugggagacccucagugugauggcuuccaaaauaagaaaugggaccuuuuuguugaacgcagcaaagccuacagcaacuguuacccuuaugaugugccggauuaugccucccuuaggucacuaguugccucauccggcacacuggaguuuaacaaugaaagcuucaauuggacuggagucacucaaaacggaacaagcucugcuugcaaaaggagaucuaauaacaguuucuuuaguagauugaauugguugacccacuuaaaauucaaauacccagcauugaacgugacuaugccaaacaaugaaaaauuugacaaauuguacauuugggggguucaccacccggguacggacaaugaccaaaucuuccuguaugcucaagcaucaggaagaaucacagucucuaccaaaagaagccaacaaacuguaaucccgaauaucggaucuagacccagaguaaggaauauccccagcagaauaagcaucuauuggacaauaguaaaaccgggagacauacuuuugauuaacagcacagggaaucuaauugcuccuagggguuacuucaaaauacgaagugggaaaagcucaauaaugagaucagaugcacccauuggcagaugcaauucugaaugcaucacuccaaauggaagcauucccaaugacaaaccauuucaaaauguaaacaggaucacauauggggccugucccagauauguuaagcaaaacacucugaaauuggcaacagggaugcgaaauguaccagagaaacaaacuagaggcauauuuggcgcaaucgcggguuucauagaaaaugguugggagggaaugguggaugguugguacgguuucaggcaucaaaauucugagggaauaggacaagcagcagaucucaaaagcacucaagcagcaaucaaucaaaucaaugggaagcugaauagguugaucgggaaaaccaacgagaaauuccaucagauugaaaaagaauucucagaaguagaagggagaauucaggaccucgagaaauauguugaggacacuaaaauagaucucuggucauacaacgcggagcuucuuguugcccuggagaaccaacauacaauugaucuaacugacucagaaaugaacaaacuguuugaaagaacaaagaagcaacugagggaaaaugcugaggauaugggcaaugguuguuucaaaauauaccacaaaugugacaaugccugcauaggaucaaucagaaauggaacuuaugaccaugauguauacagagaugaagcauuaaacaaccgguuccagaucaaaggcguugagcugaagucaggauacaaagauuggauccuauggauuuccuuugccauaucauguuuuuugcuuuguguugcuuuguugggguucaucaugugggccugccaaaaaggcaacauuaggugcaacauuugcauuuga

SEQ ID NO: 34662 - RNA, 1701 nt, Artificial Sequence
  derived and/or modified CDS sequence (wt) from hemagglutinin__InfluenzaA__ACO95481
augaagacuaucauugcuuugagcuacauucuaugucugguuuucgcucaaaaacuucccggaaaugacaacagcacggcaacgcugugccuugggcaccaugcaguaccaaacggaacgauagugaaaacaaucacgaaugaccaaauugaaguuacuaaugcuacugagcugguucagaguuccucaacagguggaauaugcgacaguccucaucagauccuugauggagaaaacugcacacuaauagaugcucuauugggagacccucagugugauggcuuccaaaauaagaaaugggaccuuuuuguugaacgcagcaaagccuacagcaacuguuacccuuaugaugugccggauuaugccucccuuaggucacuaguugccucauccggcacacuggaguuuaacaaugaaagcuucaauuggacuggagucacucaaaauggaacaagcucugcuugcaaaaggagaucuaauaacaguuucuuuaguagauugaauugguugacccacuuaaaauucaaauacccagcauugaacgugacuaugccaaacaaugaaaaauuugacaaauuguacauuugggggguucaccacccggguacggacaaugaccaaaucuuccuguaugcucaagcaucaggaagaaucacagucucuaccaaaagaagccaacaaacuguaaucccgaauaucggaucuagacccagaguaaggaauauccccagcagaauaagcaucuauuggacaauaguaaaaccgggagacauacuuuugauuaacagcacagggaaucuaauugcuccuagggguuacuucaaaauacgaagugggaaaagcucaauaaugagaucagaugcacccauuggcaaaugcaauucugaaugcaucacuccaaauggaagcauucccaaugacaaaccauuucaaaauguaaacaggaucacauauggggccugucccagauauguuaagcaaaacacucugaaauuggcaacagggaugcgaaauuuaccagagaaacaaacuagaggcauauuuggcgcaaucgcggguuucauagaaaaugguugggagggaaugguggaugguugguacgguuucaggcaucaaaauucugagggaauuggacaagcagcagaucucaaaagcacucaagcagcaaucaaucaaaucaaugggaagcugaauagguugaucgggaaaaccaacgagaaauuccaucagauugaaaaagaauucucagaaguagaagggagaauucaggaccucgagaaauauguugaggacacuaaaauagaucucuggucauacaacgcggagcuucuuguugcccuggagaaccaacauacaauugaucuaacugacucagaaaugaacaaacuguuugaaagaacaaaaaagcaacugagggaaaaugcugaggauaugggcaaugguuguuucaaaauauaccacaaaugugacaaugccugcauaggaucaaucagaaauggaacuuaugaccaugauguauacagagaugaagcauuaaacaaccgguuccagaucaaaggcguugagcugaagucaggauacaaagauuggauccuauggauuuccuuugccauaucauguuuuuugcuuuguguugcuuuguugggguucaucaugugggccugccaaaaaggcaacauuaggugcaacauuugcauuuga

SEQ ID NO: 34663 - RNA, 1701 nt, Artificial Sequence
  derived and/or modified CDS sequence (wt) from hemagglutinin__InfluenzaA__ACO95492
augaagacuaucauugcuuugagcuacauucuaugucugguuuucgcucaaaaacuucccggaaaugacaacagcacggcaacgcugugccuugggcaccaugcaguaccaaacggaacgauagugaaaacaaucacgaaugaccaaauugaaguuacuaaugcuacugagcugguucagaguuccucaacagguggaauaugcgacaguccucaucagauccuugauggagaaaacugcacacuaauagaugcucuauugggugacccucagugugauggcuuccaaaauaagaaaugggaccuuuuuguugaacgcagcaaagccuacagcaacuguuacccuuaugaugugccggauuaugccucccuuaggucacuaguugccucauccggcacacuggaguuuaacaaugaaagcuucaauuggacuggagucacucaaaauggaacaagcucugcuugcaaaaggagaucuaauaacaguuucuuuaguagauugaauugguugacccacuuaaaauucaaauacccagcauugaacgugacuaugccaaacaaugaaaaauuugacaaauuguacauuugggggguucaccacccggguacggacaaugaccaaaucuuccuguaugcucaagcaucaggaagaaucacagucucuaccaaaagaagccaacaaacuguaaucccgaauaucggaucuagacccagaguaaggaauauccccagcagaauaagcaucuauuggacaauaguaaaaccgggagacauacuuuugauuaacagcacagggaaucuaauugcuccuagggguuacuucaaaauacgaagugggaaaagcucaauaaugagaucagaugcacccauuggcaaaugcaauucugaaugcaucaccccaaauggaagcauucccaaugacaaaccauuucaaaauguaaacaggaucacauauggggccugucccagauauguuaagcaaaacacucugaaauuggcaacagggaugcgaaauguaccagagaaacaaacuagaggcauauuuggcgcaaucgcggguuucauagaaaaugguugggagggaaugguggaugguugguacgguuucaggcaucaaaauucugagggaauaggacaagcagcagaucucaaaagcacucaagcagcaaucaaucaaaucaaugggaagcugaauagguugaucgggaaaaccaacgagaaauuccaucagauugaaaaagaauucucagaaguagaagggagaauucaggaccucgagaaauauguugaggacacuaaaauagaucucuggucauacaacgcggagcuucuuguugcccuggagaaccaacauacaauugaucuaacugacucagaaaugaacaaacuguuugaaagaacaaagaagcaacugagggaaaaugcugaggauaugggcaaugguuguuucaaaauauaccacaaaugugacaaugccugcauaggaucaaucagaaauggaacuuaugaccaugauguauacagagaugaagcauuaaacaaccgguuccagaucaaaggcguugagcugaagucaggauacaaagauuggauccuauggauuuccuuugccauaucauguuuuuugcuuuguguugcuuuguugggguucaucaugugggccugccaaaaaggcaacauuaggugcaacauuugcauuuga

SEQ ID NO: 34664 - RNA, 1701 nt, Artificial Sequence; identical to SEQ ID NO: 34663
  derived and/or modified CDS sequence (wt) from hemagglutinin__InfluenzaA__ACO95503

SEQ ID NO: 34665 - RNA, 1701 nt, Artificial Sequence
  derived and/or modified CDS sequence (wt) from hemagglutinin__InfluenzaA__ACO95514
augaagacuaucauugcuuugagcuacauucuaugucugguuuucgcucaaaaacuucccggaaaugacaacagcacggcaacgcugugccuugggcaccaugcaguaccaaacggaacgauagugaaaacaaucacgaaugaccaaauugaaguuacuaaugcuacugagcugguucagaguuccucaacagguggaauaugcgacaguccucaucagauccuugauggagaaaacugcacacuaauagaugcucuauugggagacccucagugugauggcuuccaaaauaagaaaugggaccuuuuuguugaacgcagcaaagccuacagcaacuguuacccuuaugaugugccggauuaugccucccuuaggucacuaguugccucauccggcacacuggaguuuaacaaugaaagcuucaauuggacuggagucacucaaaauggaacaagcucugcuugcaaaaggagaucuaauaacaguuucuuuaguagauugaauugguugacccacuuaaaauucaaauacccagcauugaacgugacuaugccaaacaaugaaaaauuugacaaauuguacauuugggggguucaccacccggguacggacaaugaccaaaucuuccuguaugcucaagcaucaggaagaaucacagucucuaccaaaagaagccaacaaacuguaaucccgaauaucggaucuagacccagaguaaggaauauccccagcagaauaagcaucuauuggacaauaguaaaaccgggagacauacuuuugauuaacagcacagggaaucuaauugcuccuagggguuacuucaaaauacgaagugggaaaagcucaauaaugagaucagaugcacccauuggcaaaugcaauucugaaugcaucaccccaaauggaagcauucccaaugacaaaccauuucaaaauguaaacaggaucacauauggggccugucccagauauguuaagcaaaacacucugaaauuggcaacagggaugcgaaauguaccagagaaacaaacuagaggcauauuuggcgcaaucgcggguuucauagaaaaugguugggagggaaugguggaugguugguacgguuucaggcaucaaaauucugagggaauaggacaagcagcagaucucaaaagcacucaagcagcaaucaaucaaaucaaugggaagcugaauagguugaucgggaaaaccaacgagaaauuccaucagauugaaaaagaauucucagaaguagaagggagaauucaggaccucgagaaauauguugaggacacuaaaauagaucucuggucauacaacgcggagcuucuuguugcccuggagaaccaacauacaauugaucuaacugacucagaaaugaacaaacuguuugaaagaacaaagaagcaacugagggaaaaugcugaggauaugggcaaugguuguuucaaaauauaccacaaaugugacaaugccugcauaggaucaaucagaaauggaacuuaugaccaugauguauacagagaugaagcauuaaacaaccgguuccagaucaaaggcguugagcugaagucaggauacaaagauuggauccuauggauuuccuuugccauaucauguuuuuugcuuuguguugcuuuguugggguucaucaugugggccugccaaaaaggcaacauuaggugcaacauuugcauuuga

SEQ ID NO: 34666 - RNA, 1701 nt, Artificial Sequence
  derived and/or modified CDS sequence (wt) from hemagglutinin__InfluenzaA__ACO95536
augaagacuaucauugcuuugagcuacauucuaugucugguuuucgcucaaaaacuucccggaaaugacaacagcacggcaacgcugugccuugggcaccaugcaguaccaaacggaacgauagugaaaacaaucacgaaugaccaaauugaaguuacuaaugcuacugagcugguucagaguuccucaacagguggaauaugcgacaguccucaucagauccuugauggagaaaacugcacacuaauagaugcucuauugggagacccucagugugauggcuuccaaaauaagaaaugggaccuuuuuguugaacgcagcaaagccuacagcaacuguuacccuuaugaugugccggauuaugccucccuuaggucacuaguugccucauccggcacacuggaguuuaacaaugaaagcuucaauuggacuggagucacucaaaauggaacaagcucugcuugcaaaaggagaucuaauaacagcuucuuuaguagauugaauugguugacccacuuaaaauucaaauacccagcauugaacgugacuaugccaaacaaugaaaaauuugacaaauuguacauuugggggguucaccacccggguacggacaaugaccaaaucuuccuguaugcucaagcaucaggaagaaucacagucucuaccaaaagaagccaacaaacuguaaucccgaauaucggaucuagacccagaguaaggaauauccccagcagaauaagcaucuauuggacaauaguaaaaccgggagacauacuuuugauuaacagcacagggaaucuaauugcuccuagggguuacuucaaaauacgaagugggaaaagcucaauaaugagaucagaugcacccauuggcaaaugcaauucugaaugcaucacuccaaauggaagcauucccaaugacaaaccauuucaaaauguaaacaggaucacauauggggccugucccagauauguuaagcaaaacacucugaaauuggcaacagggaugcgaaauguaccagagaaacaaacuagaggcauauuuggcgcaaucgcggguuucauagaaaaugguugggagggaaugguggaugguugguacgguuucaggcaucaaaauucugagggaauaggacaagcagcagaucucaaaagcacucaagcagcaaucaaucaaaucaaugggaagcugaauagguugaucgggaaaaccaacgagaaauuccaucagauugaaaaagaauucucagaaguagaagggagaauucaggaccucgagaaauauguugaggacacuaaaauagaucucuggucauacaacgcggagcuucuuguugcccuggagaaccaacauacaauugaucuaacugacucagaaaugaacaaacuguuugaaagaacaaagaagcaacugagggaaaaugcugaggauaugggcaaugguuguuucaaaauauaccacaaaugugacaaugccugcauaggaucaaucagaaauggaacuuaugaccaugauguauacagagaugaagcauuaaacaaccgguuccagaucaaaggcguugagcugaagucaggauacaaagauuggauccuauggauuuccuuugccauaucauguuuuuugcuuuguguugcuuuguugggguucaucaugugggccugccaaaaaggcaacauuaggugcaacauuugcauuuga

SEQ ID NO: 34667 - RNA, 1701 nt, Artificial Sequence
  derived and/or modified CDS sequence (wt) from hemagglutinin__InfluenzaA__ACO95547
augaagacuaucauugcuuugagcuacauucuaugucugguuuucgcucaaaaacuucccggaaaugacaacagcacggcaacgcugugccuugggcaccaugcaguaccaaacggaacgauagugaaaacaaucacgaaugaccaaauugaaguuacuaaugccacugagcugguucagaguuccucaacagguggaauaugcgacaguccucaucagauccuugauggagaaaacugcacacuaauagaugcucuauugggagacccucagugugauggcuuccaaaauaagaaaugggaccuuuuuguugaacgcagcaaagccuacagcaacuguuacccuuaugaugugccggauuaugccucccuuaggucacuaguugccucauccggcacacuggaguuuaacaaugaaagcuucaauuggacuggagucacucaaaauggaacaagcucugcuugcaaaaggagaucuaauaacaguuucuuuaguagauugaauugguugacccacuuaaaauucaaauacccagcauugaacgugacuaugccaaacaaugaaaaauuugacaaauuguacauuugggggguucaccacccggguacggacaaugaccaaaucuuccuguaugcucaagcaucaggaagaaucacagucucuaccaaaagaagccaacaaacuguaaucccgaauaucggaucuagacccagaguaaggaauauccccagcagaauaagcaucuauuggacaauaguaaaaccgggagacauacuuuugauuaacagcacagggaaucuaauugcuccuagggguuacuucaaaauacgaagugggaaaagcucaauaaugagaucagaugcacccauuggcaaaugcaauucugaaugcaucacuccaaauggaagcauucccaaugacaaaccauuucaaaauguaaacaggaucacauauggggccugucccagauauguuaagcaaaacacucugaaauuggcaacagggaugcgaaauguaccagagaaacaaacuagaggcauauuuggcgcaaucgcggguuucauagaaaaugguugggagggaaugguggaugguugguacgguuucaggcaucaaaauucugagggaauaggacaagcagcagaucucaaaagcacucaagcagcaaucaaucaaaucaaugggaagcugaauagguugaucgggaaaaccaacgagaaauuccaucagauugaaaaagaauucucagaaguagaagggagaauucaggaccucgagaaauauguugaggacacuaaaauagaucucuggucauacaacgcggagcuucuuguugcccuggagaaccaacauacaauugaucuaacugacucagaaaugaacaaacuguuugaaagaacaaagaagcaacugagggaaaaugcugaggauaugggcaaugguuguuucaaaauauaccacaaaugugacaaugccugcauaggaucaaucagaaauggaacuuaugaccaugauguauacagagaugaagcauuaaacaaccgguuccagaucaaaggcguugagcugaagucaggauacaaagauuggauccuauggauuuccuuugccauaucauguuuuuugcuuuguguugcuuuguugggguucaucaugugggccugccaaaaaggcaacauuaggugcaacauuugcauuuga

SEQ ID NO: 34668 - RNA, 1701 nt, Artificial Sequence
  derived and/or modified CDS sequence (wt) from hemagglutinin__InfluenzaA__ACP41963
augaaggcaauacuaguaguucugcuauauacauuugcaaccgcaaaugcagacacauuauguauagguuaucaugcgaacaauucaacagacacuguagacacaguacuagaaaagaauguaacaguaacacacucuguuaaccuucuagaagacaagcauaacgggaaacuaugcaaacuaagagggguagccccauugcauuuggguaaauguaacauugcuggcuggauccugggaaauccagagugugaaucacucuccacagcaagcucaugguccuacauuguggaaacaucuaguucagacaauggaacguguuacccaggagauuucaucgauuaugaggagcuaagagagcaauugagcucagugucaucauuugaaagguuugagauauuccccaagacaaguucauggcccaaucaugacucgaacaaagguguaacggcagcauguccucaugcuggagcaaaaagcuucuacaaaaauuuaauauggcuaguuaaaaaaggaaauucauacccaaagcucagcaaauccuacauuaaugauaaagggaaagaaguccucgugcuauggggcauucaccauccaucuacuagugcugaccaacaaagucucuaucagaaugcagaugcauauguuuuuguggggucaucaagauacagcaagaaguucaagccggaaauagcaauaagacccaaagugagggaucaagaagggagaaugaacuauuacuggacacuaguagagccgggagacaaaauaacauucgaagcaacuggaaaucuagugguaccgagauaugcauucgcaauggaaagaaaugcuggaucugguauuaucauuucagauacaccaguccacgauugcaauacaacuugucagacacccaagggugcuauaaacaccagccucccauuucagaauauacauccgaucacaauuggaaaauguccaaaauauguaaaaagcacaaaauugagacuggccacaggauugaggaaugucccgucuauucaaucuagaggccuauuuggggccauugccgguuucauugaagggggguggacagggaugguagauggaugguacgguuaucaccaucaaaaugagcaggggucaggauaugcagccgaccugaagagcacacagaaugccauugacgaaauuacuaacaaaguaaauucuguuauugaaaagaugaauacacaguucacagcaguagguaaagaguucaaccaccuggaaaaaagaauagagaauuuaaauaaaaaaguugaugaugguuuccuggacauuuggacuuacaaugccgaacuguugguucuauuggaaaaugaaagaacuuuggacuaccacgauucaaaugugaagaacuuauaugaaaagguaagaagccagcuaaaaaacaaugccaaggaaauuggaaacggcugcuuugaauuuuaccacaaaugcgauaacacgugcauggaaagugucaaaaaugggacuuaugacuacccaaaauacucagaggaagcaaaauuaaacagagaagaaauagaugggguaaaacuggaaucaacaaggauuuaccagauuuuggcgaucuauucaacugucgccaguucauugguacugguagucucccugggggcaaucaguuucuggaugugcucuaaugggucucuacaguguagaauauguauuuaa

SEQ ID NO: 34669 - RNA, 1698 nt, Artificial Sequence
  derived and/or modified CDS sequence (wt) from hemagglutinin__InfluenzaA__ACP44192
augaaaguaaaacuacugguccuguuaugcacauuuacagcuacauaugcagacacaauauguauaggcuaccaugcuaacaacucgaccgacacuguugacacaguacuugaaaagaaugugacagugacacacucugucaaccugcuugagaacagucacaauggaaaacuaugucuauuaaaaggaauagccccacuacaauuggguaauugcagcguugccggguggaucuuaggaaacccagaaugcgaauuacugauuuccaaggagucaugguccuacauuguagaaaaaccaaauccugagaauggaacauguuacccagggcauuucgcugacuaugaggaacugagggagcaauugaguucaguaucuucguuugagagguucgaaauauuccccaaagaaggcucauggcccaaccacaccguaaccggagugucagcaucaugcucccauaauggggaaagcaguuuuuacagaaauuugcuauggcugacggggaagaaugguuuguacccaaaccugagcaaguccuaugcaaacaacaaagaaaaagaaguccuuguacuaugggguguucaucacccgccaaacauaggugaccaaaaggcccucuaucauacagaaaaugcuuaugucucuguagugucuucacauuauagcagaaaauucaccccagaaauagccaagagacccaaaguaagagaucaagaaggaagaaucaacuacuacuggacucugcuugaacccggggauacuauaauauuugaggcaaauggaaaucuaauagcgccaagauaugcuuucgcacugaguagaggcuuuggaucaggaaucaucaacucaaaugcuccaauggauaaaugugaugcgaagugccaaacaccucagggagcuauaaacagcagucuuccuuuccagaacguacacccagucacaauaggagaguguccaaaguaugucaggagugcaaaauuaaggaugguuacaggacuaaggaacaucccauccauucaauccagagguuuguuuggagccauugccgguuucauugaagggggguggacugggaugguagaugguugguaugguuaucaucaucagaaugagcaaggaucuggcuaugcugcagaucaaaaaagcacacaaaaugccauuaaugggauuacaaacaaggugaauucuguuauugagaaaaugaacacucaauucacagcagugggcaaagaauucaacaaauuggaaagaaggauggaaaacuugaauaaaaagguugaugauggguuuauagacauuuggacauauaaugcagaacuguugguucuacuggaaaaugaaaggacuuuggauuuccaugacuccaaugugaagaaucuguaugagaaaguaaaaagccaguuaaagaauaaugcuaaagaaauaggaaauggguguuuugaauucuaucacaaguguaacgaugaaugcauggagaguguaaagaauggaacuuaugacuauccaaaauauuccgaagaaucaaaguuaaacagggagaaaauugauggagugaaauuggaaucaaugggagucuaucagauucuagcgaucuacucaacagucgccaguucucugguucuuuuggucucccugggggcaaucagcuucuggauguguuccaaugggucuuugcaguguagaauaugcaucuaa

SEQ ID NO: 34670 - RNA, 1698 nt, Artificial Sequence; identical to SEQ ID NO: 34655
  derived and/or modified CDS sequence (wt) from hemagglutinin__InfluenzaA__ACP44203

SEQ ID NO: 34671 - RNA, 1698 nt, Artificial Sequence
  derived and/or modified CDS sequence (wt) from hemagglutinin__InfluenzaA__ACP44225
augaaaguaaaacuacugguccuguuaugcacauuuacagcuacauaugcagacacaauauguauaggcuaccaugcuaacaacucaaccgacacuguugacacaguacuugaaaagaaugugacagugacacauucugucaaccugcuugagaacagucacaauggaaaacuaugucuauuaaaaggaauagccccacuacaauuggguaauugcagcguugccggauggaucuuaggaaacccagaaugcggauugcugauuuccaaggagucaugguccuacauuguagaaaaaccaaacccugagaauggaacauguuacccagggcauuucgcugacuaugaggaacugagggagcaauugaguucaguaucuucauuugagagguucgaaauauuccccaaagaaagcucauggcccaaccacaccguaaccggagugucagcaucaugcucccauaauggggaaagcaguuuuuacagaaauuugcuauggcugacggggaagaaugguuuguacccaaaccugagcaaguccuaugcaaacaacaaagaaaaagaaguccuuguacuaugggguguucaucacccgccaaacauaggugaccaaaaggcccucuaucauacagaaaaugcuuauguuucuguagugucuucacauuauagcagaaaauucaccccagaaauagccaaaagacccaaaguaagagaucaagaaggaagaaucaacuacuacuggacucuacuugaacccggggauacaauaauauuugaggcaaauggaaaucuaauagcgccaagauaugcuuucgcacugaguagaggcuuuggaucaggaaucaucaacucaaaugcaccaauggauaaaugugaugcgaagugccaaacaccucagggagcuauaaacagcagucuuccuuuccagaacguacacccagucacaauaggagaguguccaaaguaugucaggagugcaaaauuaaggaugguuacaggacuaaggaacaucccauccauucaauccagagguuuguuuggagccauugccgguuucauugaagggggguggacuggaaugguagaugguugguaugguuaucaucaucagaaugagcaaggaucuggcuaugcugcagaucaaaaaagcacacaaaaugccauuaaugggauuacaaacaaggugaauucuguaauugagaaaaugaacacucaauucacagcagugggcaaagaauucaacaaauuggaaagaaggauggaaaacuugaauaaaaaaguugaugauggguuuauagacauuuggacauauaaugcagaacuguugguucuacuggaaaaugaaaggacuuuggauuuccaugacuccaaugugaagaaucuguaugagaaaguaaaaagccaguuaaagaauaaugcuaaagaaauaggaaauggguguuuugaauucuaucacaaguguaacgaugaaugcauggagaguguaaagaauggaacuuaugacuauccaaaauauuccaaagaaucaaaguuaaacagggagaaaauugauggggugaaauuggaaucaaugggagucuaucagauucuggcgaucuacucaacagucgccaguucucugguucuuuuggucucccugggggcaaucagcuucuggauguguuccaaugggucuuugcaguguagaauaugcaucuaa

SEQ ID NO: 34672 - RNA, 1701 nt, Artificial Sequence
  derived and/or modified CDS sequence (wt) from hemagglutinin__InfluenzaA__ACP44236
augaagacuaucauugcuuugagcuacauucuaugucugguuuucgcucaaaaacuucccggaaaugacaacagcacggcaacgcugugccuugggcaccaugcaguaccaaacggaacgauagugaaaacaaucacgaaugaccaaauugaaguuacuaaugcuacugagcugguucagaguuccucaacagguggaauaugcgacaguccucaucagauccuugauggagaaaacugcacacuaauagaugcucuauugggagacccucagugugauggcuuccaaaauaagaaaugggaccuuuuuguugaacgcagcaaagccuacagcaacuguuacccuuaugaugugccggauuaugccucccuuaggucacuaguugccucauccggcacacuggaguuuaacaaugaaagcuucaauuggacuggagucacucaaaauggaacaagcucugcuugcaaaaggagaucugauaaaaguuucuuuaguagauugaauugguugacccacuuaaaauucaaauacccagcauugaacgugacuaugccaaacaaugaaaaauuugacaaauuguacauuugggggguucaccacccggguacggacaaugaccaaaucagccuauaugcucaagcaucaggaagaaucacagucucuaccaaaagaagccaacaaacuguaaucccgaauaucggaucuagacccaggguaagggauguccccagcagaauaagcaucuauuggacaauagugaaaccgggagacauacuuuugauuaacagcacagggaaucuaauugcuccucgggguuacuucaaaauacgaagugggaaaagcucaauaaugagaucagaugcacccauuggcaaaugcaauucugaaugcaucacuccaaauggaagcauucccaaugacaaaccauuucaaaauguaaacaggaucacauauggggccugucccagauauguuaagcaaaacacucugaaauuggcaacagggaugcgaaauguaccagagaaacaaacuagaggcauauuuggcgcaaucgcggguuucauagaaaaugguugggagggaaugguggacgguugguacgguuucaggcaucaaaauucugagggaacaggacaagcagcagaucucaaaagcacucaagcagcaaucaaccaaaucaaugggaagcugaauagguugaucgggaaaacaaacgagaaauuccaucagauugaaaaagaauucucagaaguagaagggagaauucaggaccucgagaaauauguugaggacacuaaaauagaucucuggucauacaacgcggagcuucuuguugcccuggagaaccaacauacaauugaucuaacugacucagaaaugaacaaacuguuugaaagaacaaagaagcaacugagggaaaaugcugaggauaugggcaaugguuguuucaaaauauaccacaaaugugacaaugccugcauagggucaaucagaaauggaacuuaugaccaugauguauacagagaugaagcauuaaacaaccgguuccagaucaaagguguugagcugaagucaggauacaaagauuggauccuauggauuuccuuugccauaucauguuuuuugcuuuguguugcuuuguugggguucaucaugugggccugccaaaaaggcaacauuaggugcaacauuugcauuuga

SEQ ID NO: 34673 - RNA, 1701 nt, Artificial Sequence; identical to SEQ ID NO: 34609
  derived and/or modified CDS sequence (wt) from hemagglutinin__InfluenzaA__ACP44247

SEQ ID NO: 34674 - RNA, 1701 nt, Artificial Sequence
  derived and/or modified CDS sequence (wt) from hemagglutinin__InfluenzaA__ACP44258
augaagacuaucauugcuuugagcuacauucuaugucugguuuucgcucaaaaacuucccggaaaugacaacagcacggcaacgcugugccuugggcaccaugcaguaccaaacggaacgauagugaaaacaaucacgaaugaccaaauugaaguuacuaaugcuacugagcugguucagaguuccucaacagguggaauaugcgacaguccucaucagauccuugauggagaaaacugcacacuaauagaugcucuauugggagacccucagugugauggcuuccaaaauaagaaaugggaccuuuuuguugaacgcagcaaagccuacagcaacuguuacccuuaugaugugccggauuaugccucccuuaggucacuaguugccucauccggcacacuggaguuuaacaaugaaagcuucaauuggacuggagucacucaaaauggaacaagcucugcuugcaaaaggagaucuaauaacaguuucuuuaguagauugaauugguugacccacuuaaaauucaaauacccagcauugaacgugacuaugccaaacaaugaaaaauuugacaaauuguacauuugggggguucaccacccggguacggacaaugaccaaaucuuccuguaugcucaagcaucaggaagaaucacagucucuaccaaaagaagccaacaaacuguaaucccgaauaucggaucuagacccagaguaaggaauauccccagcagaauaagcaucuauuggacaauaguaaaaccgggagacauacuuuugauuaacagcacagggaaucuaauugcuccuagggguuacuucaaaauacgaagugggaaaagcucaauaaugagaucagaugcacccauuggcaaaugcaauucugaaugcaucacuccaaauggaagcauucccaaugacaaaccauuucaaaauguaaacaggaucacauauggggccugucccagauauguuaagcaaaacacucugaaauuggcaacagggaugcgaaauguaccagagaaacaaacuagaggcauauuuggcgcaaucgcggguuucauagaaaaugguugggagggaaugguggaugguugguaugguuucaggcaucaaaauucugagggaauaggacaagcagcagaucucaaaagcacucaagcagcaaucaaucaaaucaaugggaagcugaauagguugaucgggaaaaccaacgagaaauuccaucagauugaaaaagaauucucagaaguagaagggagaauucaggaccucgagaaauauguugaggacacuaaaauagaucucuggucauacaacgcggagcuucuuguugcccuggagaaccaacauacaauugaucuaacugacucagaaaugaacaaacuguuugaaagaacaaagaagcaacugagggaaaaugcugaggauaugggcaaugguuguuucaaaauauaccacaaaugugacaaugccugcauaggaucaaucagaaauggaacuuaugaccaugauguauacagagaugaagcauuaaacaaccgguuccagaucaaaggcguugagcugaagucaggauacaaagauuggauccuauggauuuccuuugccauaucauguuuuuugcuuuguguugcuuuguugggguucaucaugugggccugccaaaaaggcaacauuaggugcaacauuugcauuuga

SEQ ID NO: 34675 - RNA, 1701 nt, Artificial Sequence
  derived and/or modified CDS sequence (wt) from hemagglutinin__InfluenzaA__ACP44269
augaagacuaucauugcuuugagcuacauucuaugucugguuuucgcucaaaaacuucccggaaaugacaacagcacggcaacgcugugccuugggcaccaugcaguaccaaacggaacgauagugaaaacaaucacgaaugaccaaauugaaguuacuaaugcuacugagcugguucagaguuccucaacagguggaauaugcgacaguccucaucagauccuugauggagaaaacugcacacuaauagaugcucuauugggagacccucagugugauggcuuccaaaauaagaaaugggaccuuuuuguugaacgcagcaaagccuacagcaacuguuacccuuaugaugugccggauuaugccucccuuaggucacuaguugccucauccggcacacuggaguuuaacaaugaaagcuucaauuggacuggagucacucaaaauggaacaagcucugcuugcaaaaggagaucuaauaacaguuucuuuaguagauugaauugguugacccacuuaaaauucaaauacccagcauugaacgugacuaugccaaacaaugaaaaauuugacaaauuguacauuugggggguucaccacccggguacggacaaugaccaaaucuuccuguaugcucaagcaucaggaagaaucacagucucuaccaaaagaagccaacaaacuguaaucccgaauaucggaucuagacccagaguaaggaauauccccagcagaauaagcaucuauuggacaauaguaaaaccgggagacauacuuuugauuaacagcacagggaaucuaauugcuccuagggguuacuucaaaauacgaagugggaaaagcucaauaaugagaucagaugcacccauuggcaaaugcaauucugaaugcaucacuccaaauggaagcauucccaaugacaaaccauuucaaaauguaaacaggaucacauauggggccugucccagauauguuaagcaaaacacucugaaauuggcaacagggaugcgaaauguaccagagaaacaaacuagaggcauauuuggcgcaauagcggguuucauagaaaaugguugggagggaaugguggaugguugguacgguuucaggcaucaaaauucugagggaauaggacaagcagcagaucucaaaagcacucaagcagcaaucaaucaaaucaaugggaagcugaauagguugaucgggaaaaccaacgagaaauuccaucagauugaaaaagaauucucagaaguagaagggagaauucaggaccucgagaaauauguugaggacacuaaaauagaucucuggucauacaacgcggagcuucuuguugcccuggagaaccaacauacaauugaucuaacugacucagaaaugaacaaacuguuugaaagaacaaagaagcaacugagggaaaaugcugaggauaugggcaaugguuguuucaaaauauaccacaaaugugacaaugccugcauaggaucaaucagaaauggaacuuaugaccaugauguauacagagaugaagcauuaaacaaccgguuccagaucaaaggcguugagcugaagucaggauacaaagauuggauccuauggauuuccuuugccauaucauguuuuuugcuuuguguugcuuuguugggguucaucaugugggccugccaaaaaggcaacauuaggugcaacauuugcauuuga

SEQ ID NO: 34676 - RNA, 1701 nt, Artificial Sequence
  derived and/or modified CDS sequence (wt) from hemagglutinin__InfluenzaA__ACQ44554
augaaggcaauacuaguaguucugcuauauacauuugcaaccgcaaaugcagacacauuauguauagguuaucaugcgaacaauucaacagacacuguagacacaguacuagaaaagaauguaacaguaacacacucuguuaaccuucuagaagacaagcauaacgggaaacuaugcaaacuaagagggguagccccauugcauuuggguaaauguaacauugcuggcuggauccugggaaauccagagugugaaucacucuccacagcaagcucaugguccuacauuguggaaacaucuaguucagacaauggaacguguuacccaggagauuucaucgauuaugaggagcuaagagagcaauugagcucagugucaucauuugaaagguuugagauauuccccaagacaaguucauggcccaaucaugacucgaacaaagguguaacggcagcauguccucaugcuggagcaaaaagcuucuacaaaaauuuaauauggcuaguuaaaaaaggaaauucauacccaaagcucagcaaauccuacauuaaugauaaagggaaagaaguccucgugcuauggggcauucaccauccaucuacuagugcugaccaacaaagucucuaucagaaugcagaugcauauguuuuuguggggucaucaagauacagcaagaaguucaagccggaaauagcaauaagacccaaagugagggaucaagaagggagaaugaacuauuacuggacacuaguagagccgggagacaaaauaacauucgaagcaacuggaaaucuagugguaccgagauaugcauucgcaauggaaagaaaugcuggaucugguauuaucauuucagauacaccaguccacgauugcaauacaacuugucagacacccaagggugcuauaaacaccagccucccauuucagaauauacauccgaucacaauuggaaaauguccaaaauauguaaaaagcacaaaauugagacuggccacaggauugaggaaugucccgucuauucaaucuagaggccuauuuggggccauugccgguuucauugaagggggguggacagggaugguagauggaugguacgguuaucaccaucaaaaugagcaggggucaggauaugcagccgaccugaagagcacacagaaugccauugacgagauuacuaacaaaguaaauucuguuauugaaaagaugaauacacaguucacagcaguagguaaagaguucaaccaccuggaaaaaagaauagagaauuuaaauaaaaaaguugaugaugguuuccuggacauuuggacuuacaaugccgaacuguugguucuauuggaaaaugaaagaacuuuggacuaccacgauucaaaugugaagaacuuauaugaaaagguaagaagccagcuaaaaaacaaugccaaggaaauuggaaacggcugcuuugaauuuuaccacaaaugcgauaacacgugcauggaaagugucaaaaaugggacuuaugacuacccaaaauacucagaggaagcaaaauuaaacagagaagaaauagaugggguaaagcuggaaucaacaaggauuuaccagauuuuggcgaucuauucaacugucgccaguucauugguacugguagucucccugggggcaaucaguuucuggaugugcucuaaugggucucuacaguguagaauauguauuuaa

SEQ ID NO: 34677 - RNA, 1701 nt, Artificial Sequence; identical to SEQ ID NO: 34676
  derived and/or modified CDS sequence (wt) from hemagglutinin__InfluenzaA__ACQ44556

SEQ ID NO: 34678 - RNA, 1701 nt, Artificial Sequence; identical to SEQ ID NO: 34676
  derived and/or modified CDS sequence (wt) from hemagglutinin__InfluenzaA__ACQ45338

SEQ ID NO: 34679 - RNA, 1701 nt, Artificial Sequence
  derived and/or modified CDS sequence (wt) from hemagglutinin__InfluenzaA__ACQ55359
augaaggcaauacuaguaguucugcuauauacauuugcaaccgcaaaugcagacacauuauguauagguuaucaugcgaacaauucaacagacacuguagacacaguacuagaaaagaauguaacaguaacacacucuguuaaccuucuagaagacaagcauaacgggaaacuaugcaaacuaagagggguagccccauugcauuuggguaaauguaacauugcuggcuggauccugggaaauccagagugugaaucacucuccacagcaagcucaugguccuacauuguggaaacaccuaguucagacaauggaacguguuacccaggagauuucaucgauuaugaggagcuaagagagcaauugagcucagugucaucauuugaaagguuugagauauuccccaagacaaguucauggcccaaucaugacucgaacaaagguguaacggcagcauguccucaugcuggagcaaaaagcuucuacaaaaauuuaauauggcuaguuaaaaaaggaaauucauacccaaagcucagcaaauccuacauuaaugauaaagggaaagaaguccucgugcuauggggcauucaccauccaucuacuagugcugaccaacaaagucucuaucagaaugcagaugcauauguuuuuguggggucaucaagauacagcaagaaguucaagccggaaauagcaauaagacccaaagugagggaucaagaagggagaaugaacuauuacuggacacuaguagagccgggagacaaaauaacauucgaagcaacuggaaaucuagugguaccgagauaugcauucgcaauggaaagaaaugcuggaucugguauuaucauuucagauacaccaguccacgauugcaauacaacuugucaaacacccaagggugcuauaaacaccagccucccauuucagaauauacauccgaucacaauuggaaaauguccaaaauauguaaaaagcacaaaauugagacuggccacaggauugaggaauaucccgucuauucaaucuagaggccuauuuggggccauugccgguuucauugaagggggguggacagggaugguagauggaugguacgguuaucaccaucaaaaugagcaggggucaggauaugcagccgaccugaagagcacacagaaugccauugacgagauuacuaacaaaguaaauucuguuauugaaaagaugaauacacaguucacagcaguagguaaagaguucaaccaccuggaaaaaagaauagagaauuuaaauaaaaaaguugaugaugguuuccuggacauuuggacuuacaaugccgaacuguugguucuauuggaaaaugaaagaacuuuggacuaccacgauucaaaugugaagaacuuauaugaaaagguaagaagccagcuaaaaaacaaugccaaggaaauuggaaacggcugcuuugaauuuuaccacaaaugcgauaacacgugcauggaaagugucaaaaaugggacuuaugacuacccaaaauacucagaggaagcaaaauuaaacagagaagaaauagaugggguaaagcuggaaucaacaaggauuuaccagauuuuggcgaucuauucaacugucgccaguucauugguacugguagucucccugggggcaaucaguuucuggaugugcucuaaugggucucuacaguguagaauauguauuuaa

SEQ ID NO: 34680 - RNA, 1701 nt, Artificial Sequence; identical to SEQ ID NO: 34668
  derived and/or modified CDS sequence (wt) from hemagglutinin__InfluenzaA__ACQ55361

SEQ ID NO: 34681 - RNA, 1701 nt, Artificial Sequence
  derived and/or modified CDS sequence (wt) from hemagglutinin__InfluenzaA__ACQ63223
augaaggcaauacuaguaguucugcuauauacauuugcaaccgcaaaugcagacacauuauguauagguuaucaugcgaacaauucaacagacacuguagacacaguacuagaaaagaauguaacaguaacacacucuguuaaccuucuagaagacaagcauaacgggaaacuaugcaaacuaagagggguagccccauugcauuuggguaaauguaacauugcuggcuggauccugggaaauccagagugugaaucacucuccacagcaagcucaugguccuacauuguggaaacaucuaguucagacaauggaacguguuacccaggagauuucaucgauuaugaggagcuaagagagcaauugagcucagugucaucauuugaaagguuugagauauuccccaagacaaguucauggcccaaucaugacucgaacaaagguguaacggcagcauguccucaugcuggagcaaaaagcuucuacaaaaauuuaauauggcuaguuaaaaaaggaaauucauacccaaagcucagcaaauccuacauuaaugauaaagggaaagaaguccucgugcuauggggcauucaccauccaucuacuagugcugaccaacaaagucucuaucagaaugcagaugcauauguuuuuguggggacaucaagauacagcaagaaguucaagccggaaauagcaauaagacccaaagugagggaucaagaagggagaaugaacuauuacuggacacuaguagagccgggagacaaaauaacauucgaagcaacuggaaaucuagugguaccgagauaugcauucgcaauggaaagaaaugcuggaucugguauuaucauuucagauacaccaguccacgauugcaauacaacuugucagacacccaagggugcuauaaacaccagccucccauuucagaauauacauccgaucacaauuggaaaauguccaaaauauguaaaaagcacaaaauugagacuggccacaggauugaggaaugucccgucuauucaaucuagaggccuauuuggggccauugccgguuucauugaagggggguggacagggaugguagauggaugguacgguuaucaccaucaaaaugagcaggggucaggauaugcagccgaccugaagagcacacagaaugccauugacgagauuacuaacaaaguaaauucuguuauugaaaagaugaauacacaguucacagcaguagguaaagaguucaaccaccuggaaaaaagaauagagaauuuaaauaaaaaaguugaugaugguuuccuggacauuuggacuuacaaugccgaacuguugguucuauuggaaaaugaaagaacuuuggacuaccacgauucaaaugugaagaacuuauaugaaaagguaagaagccaguuaaaaaacaaugccaaggaaauuggaaacggcugcuuugaauuuuaccacaaaugcgauaacacgugcauggaaagugucaaaaaugggacuuaugacuacccaaaauacucagaggaagcaaaauuaaacagagaagaaauagaugggguaaagcuggaaucaacaaggauuuaccagauuuuggcgaucuauucaacugucgccaguucauugguacugguagucucccugggggcaaucaguuucuggaugugcucuaaugggucucuacaguguagaauauguauuuaa

SEQ ID NO: 34682 - RNA, 1701 nt, Artificial Sequence; identical to SEQ ID NO: 34681
  derived and/or modified CDS sequence (wt) from hemagglutinin__InfluenzaA__ACQ63239

SEQ ID NO: 34683 - RNA, 1701 nt, Artificial Sequence
  derived and/or modified CDS sequence (wt) from hemagglutinin__InfluenzaA__ACQ63244
augaaggcaauacuaguaguucugcuauauacauuugcaaccgcaaaugcagacacauuauguauagguuaucaugcgaacaauucaacagacacuguagacacaguacuagaaaagaauguaacaguaacacacucuguuaaccuucuagaagacaagcauaacgggaaacuaugcaaacuaagagggguagccccauugcauuuagguaaauguaacauugcuggcuggauccugggaaauccagagugugaaucacucuccacagcaagcucaugguccuacauuguggaaacaucuaguucagacaauggaacguguuacccaggagauuucaucgauuaugaggagcuaagagagcaauugagcucagugucaucauuugaaagguuugagauauuccccaagacaaguucauggcccaaucaugacucgaacaaagguguaacggcagcauguccucaugcuggagcaaaaagcuucuacaaaaauuuaauauggcuaguuaaaaaaggaaauucauacccaaagcucagcaaauccuacauuaaugauaaagggaaagaaguccucgugcuauggggcauucaccauccaucuacuagugcugaccaacaaagucucuaucagaaugcagaugcauauguuuuuguggggacaucaagauacagcaagaaguucaagccggaaauagcaauaagacccaaagugagggaucaagaagggagaaugaacuauuacuggacacuaguagagccgggagacaaaauaacauucgaagcaacuggaaaucuagugguaccgagauaugcauucgcaauggaaagaaaugcuggaucugguauuaucauuucagauacaccaguccacgauugcaauacaacuugucagacacccaagggugcuauaaacaccagccucccauuucagaauauacauccgaucacaauuggaaaauguccaaaauauguaaaaagcacaaaauugagacuggccacaggauugaggaaugucccgucuauucaaucuagaggccuauuuggggccauugccgguuucauugaagggggguggacagggaugguagauggaugguacgguuaucaccaucaaaaugagcaggggucaggauaugcagccgaccugaagagcacacagaaugccauugacgagauuacuaacaaaguaaauucuguuauugaaaagaugaauacacaguucacagcaguagguaaagaguucaaccaccuggaaaaaagaauagagaauuuaaauaaaaaaguugaugaugguuuccuggacauuuggacuuacaaugccgaacuguugguucuauuggaaaaugaaagaacuuuggacuaccacgauucaaaugugaagaacuuauaugaaaagguaagaagccaguuaaaaaacaaugccaaggaaauuggaaacggcugcuuugaauuuuaccacaaaugcgauaacacgugcauggaaagugucaaaaaugggacuuaugacuacccaaaauacucagaggaagcaaaauuaaacagagaagaaauagaugggguaaagcuggaaucaacaaggauuuaccagauuuuggcgaucuauucaacugucgccaguucauugguacugguagucucccugggggcaaucaguuucuggaugugcucuaaugggucucuacaguguagaauauguauuuaa

SEQ ID NO: 34684 - RNA, 1701 nt, Artificial Sequence; identical to SEQ ID NO: 34681
  derived and/or modified CDS sequence (wt) from hemagglutinin__InfluenzaA__ACQ63257

SEQ ID NO: 34685 - RNA, 1701 nt, Artificial Sequence
  derived and/or modified CDS sequence (wt) from hemagglutinin__InfluenzaA__ACQ65691
augaagacuaucauugcuuugagcuacauucuaugucugguuuucgcucaaaaacuucccggaaaugacaacagcacggcaacgcugugccuugggcaccaugcaguaccaaacggaacgauagugaaaacaaucacgaaugaccaaauugaaguuacuaaugcuacugagcugguucagaguuccucaacagguggaauaugcgacaguccucaucagauccuugauggagaaaacugcacacuaauagaugcucuauugggagacccucagugugauggcuuccaaaauaagaaaugggaccuuuuuguugaacgcagcaaagccuacagcaacuguuacccuuaugaugugccggauuaugccucccuuaggucacuaguugccucaucuggcacacuggaguuuaacaaugaaagcuucaauuggacgggagucacucaaaauggaacaagcucuucuugcaaaaggggaucugauaacaguuucuuuaguagauugaauugguugacccacuuaaaauucaaauacccagcauugaacgugacuaugccaaacaaugaaaaauuugacaaauuguacauuugggggguucaccacccggguacggacaaugaccaaaucuucccguaugcucaagcaucaggaagaaucacagucucuaccaaaagaagccaacaaacuguaaucccgaauaucggaucuagacccagaguaagggauauccccagcagaauaagcaucuauuggacaauaguaaaaccgggagacauacuuuugauuaacagcacagggaaucuaauugcuccuagggguuacuucaaaauacgaagugggaaaagcucaauaaugagaucagaugcacccauuggcaaaugcaauucugaaugcaucacuccaaauggaagcauucccaaugacaaaccauuucaaaauguaaacaggaucacauauggggccugucccagauauguuaagcagaacacccugaaauuggcaacagggaugcgaaauguaccagagaaacaaacuagaggcauauuuggcgcaaucgcggguuucauagaaaaugguugggagggaaugguggaugguugguacgguuucaggcaucaaaauucugagggaauaggacaagcagcagaucucaaaagcacucaagcagcaaucaaucaaaucaaugggaagcugaauagguugaucgggaaaaccaacgagaaauuccaucagauugaaaaagaauucucagaaguagaagggagaauucaggaccucgagaaauauguugaggacacuaaaauagaucucuggucauacaacgcggagcuucuuguugcccuggagaaccaacauacaauugaucuaacugacucagaaaugaacaaacuguuugaaagaacaaagaagcaacugagggaaaaugcugaggauaugggcaaugguuguuucaaaauauaccacaaaugugacaaugccugcauaggaucaaucagaaauggaacuuaugaccaugauguauacagagaugaagcauuaaacaaccgguuccagaucaaaggcguugagcugaagucaggcuacaaagauuggauccuauggauuuccuuuaccauaucauguuuuuugcuuuguguugcuuuguugggguucaucaugugggccugccaaaaaggcaacauuaggugcaacauuugcauuuaa

SEQ ID NO: 34686 - RNA, 1701 nt, Artificial Sequence; identical to SEQ ID NO: 34535
  derived and/or modified CDS sequence (wt) from hemagglutinin__InfluenzaA__ACQ65713

SEQ ID NO: 34687 - RNA, 1701 nt, Artificial Sequence
  derived and/or modified CDS sequence (wt) from hemagglutinin__InfluenzaA__ACQ65724
augaagacuaucauugcuuugagcuacauucuaugucugguuuucgcucaaaaacuuccuggaaaugacaacagcacggcaacgcugugccuugggcaccaugcaguaccaaacggaacgauagugaaaacaaucacgaaugaccaaauugaaguuacuaaugcuacugagcugguucagaguuccucaacaggugaaauaugcgacaguccucaucagauccuugauggagaaaacugcacacuaauagaugcucuauugggagacccucagugugauggcuuccaaaauaagaaaugggaccuuuuuguugaacgcagcaaagccuacagcaacuguuacccuuaugaugugccggauuaugccucccuuaggucacuaguugccucauccggcacacuggaguuuaacaaugaaagcuucaauugggcuggagucacucaaaacggaacaagcucugcuugcauaaggagaucuaauaacaguuucuuuaguagauugaauugguugacccacuuaaaauucaaauacccagcauugaacgugacuaugccaaacaaugaacaauuugacaaauuguacauuugggggguucaccacccggguacggacaaugaccaaaucuuccuguaugcucaagcaucaggaagaaucacagucucuaccaaaagaagccaacaaacuguaaucccgaauaucggaucuagacccagaguaaggaauaucccuagcagaauaagcaucuauuggacaauaguaaaaccgggagacauacuuuugauuaacagcacagggaaucuaauugcuccuagggguuacuucaaaauacgaagugggaaaagcucaauaaugagaucagaugcacccauuggcaaaugcaauucugaaugcaucacuccaaauggaagcauucccaaugacaaaccauuccaaaauguaaacaggaucacauacggggccugucccagauauguuaagcaaaacacucugaaauuggcaacagggaugcgaaauguaccagagaaacaaacuagaggcauauuuggcgcaaucgcggguuucauagaaaaugguugggagggaaugguggaugguugguacgguuucaggcaucaaaauucugagggaagaggacaagcagcagaucucaaaagcacucaagcagcaaucgaucaaaucaaugggaagcugaauagauugaucgggaaaaccaacgagaaauuccaucagauugaaaaagaauucucagaagucgaagggagaauucaggaccuugagaaauauguugaggacaccaaaauagaucucuggucauacaacgcggagcuucuuguugcccuggagaaccaacauacaauugaucuaacugacucagaaaugaacaaacuguuugaaaaaacaaagaagcaacugagggaaaaugcugaggauaugggcaaugguuguuucaaaauauaccacaaaugugacaaugccugcauaggaucaaucagaaauggaacuuaugaccacgauguauacagagaugaagcauuaaacaaccgguuccagaucaagggaguugagcugaagucaggguacaaagauuggauccuauggauuucuuuugccauaucauguuuuuugcuuuguguugcuuuguugggguucaucaugugggccugccaaaaaggcaacauuaggugcaacauuugcauuuga

SEQ ID NO: 34688 - RNA, 1701 nt, Artificial Sequence
  derived and/or modified CDS sequence (wt) from hemagglutinin__InfluenzaA__ACQ65747
augaagacuaucauugcuuugagcuacauucuaugucugguuuucgcucaaaaacuuccuggaaaugacaacagcacggcaacgcugugccuugggcaccaugcaguaccaaacggaacgauagugaaaacaaucacgaaugaccaaauugaaguuacuaaugcuacugagcugguucagaguuccucaacaggugaaauaugcgacaguccucaucagauccuugauggagaaaacugcacacuaauagaugcucuauugggagacccucagugugauggcuuccaaaauaagaaaugggaccuuuuuguugaacgcagcaaagccuacagcaacuguuacccuuaugaugugccggauuaugccucccuuaggucacuaguugccucauccggcacacuggaguuuaacaaugaaagcuucaauuggacuggagucacucaaaacggaacaagcucugcuugcauaaggagaacuaauaacaguuucuuuaguagauugaauugguugacccacuuaaaauucaaauacccagcauugaacgugacuaugccaaacaaugaaaaauuugacaaauuguacauuugggggguucaccacccggguacggacaaugaccaaaucuuccuguaugcucaagcaucaggaagaaucacagucucuaccaaaagaagccaacaaacuguaaucccgaauaucggaucuagacccagaguaaggaauauccccagcagaauaagcaucuauuggacaauaguaaaaccgggagacauacuuuugauuaacagcacagggaaucuaauugcuccuagggguuacuucaaaauacgaagugggaaaagcucaauaaugagaucagaugcacccauuggcaaaugcaauucugaaugcaucacuccaaauggaagcauucccaaugacaaaccauuccaaaauguaaacaggaucacauacggggccugucccagauauguuaagcaaaacacucugaaauuggcaacagggaugcgaaauguaccagagaaacaaacuagaggcauauuuggcgcaaucgcggguuucauagaaaaugguugggagggaaugauggaugguugguacgguuucaggcaucaaaauucugagggaauaggacaagcagcagaucucaaaagcacucaagcagcaaucgaucaaaucaaugggaagcugaauggguugaucgggaaaaccaacgagaaauuccaucagauugaaaaagaauucucagaagucgaagggaggauucaggaccuugagaaauauguugaggacaccaaaauagaucucuggucauacaacgcggagcuucuuguugcccuggagaaccaacauacaauugaucuaacugacucagaaaugaacaaacuguuugaaaaaacaaagaagcaacugagggaaaaugcugaggauaugggcaaugguuguuucaaaauauaccacaaaugugacaaugccugcauaggaucaaucagaaauggaacuuaugaccacgauguauacagagaugaagcauuaaacaaccgguuccagaucaagggcguugagcugaagucaggauacaaagauuggauccuauggauuuccuuugccauaucauguuuuuugcuuuguguugcuuuguugggguucaucaugugggccugccaaaaaggcaacauuaggugcaacauuugcauuuga

SEQ ID NO: 34689 - RNA, 1698 nt, Artificial Sequence
  derived and/or modified CDS sequence (wt) from hemagglutinin__InfluenzaA__ACQ65758
augaaaguaaaacuacugguccuguuaugcacauuuacagcuacauacgcggacacaauauguauaggcuaccaugcuaacaacucgaccgacacuguugacacaguacuugaaaagaaugugacagugacacacucugucaaccugcuugagaacagucacaauggaaaacuaugucuauuaaaaggaauagccccacuacaauuggguaauugcagcguugccggauggaucuuaggaaacccagaaugcgaauuacugauuuccaaggagucauggucuuacguuguagaaaaaccaaauccugagaauggaacauguuacccagggcauuucgcugacuaugaggaacugagggagcaauugaguucaguaucuucauuugagagguucgaaauauuccccaaagaaagcucauggcccaaccacaccguaaccggagugucagcaucaugcucccacaauggggaaagcaguuuuuacagaaauuugcuauggcugacggggaagaaugguuuguacccaaaccugagcaaguccuaugcaaacaacaaaggaaaagaaguccuuguacuaugggguguucaucacccgccaaacauaggugaccaaaauacccucuaucauacagaaaaugcuuauguuucuguagugucuucacauuauagcagaaaauucaccccagaaauagccaaaagacccaaaguaagagaucaagaaggaagaaucaacuacuacuggacucugcuugaacccggggauacaauaauauuugaggcaaauggaaaucuaauagcaccaagauaugcuuucgcacuuaguagaggcuuuggaucaggaaucaucaacucaaaugcaccaauggauaaaugugaugcgaagugccaaacaccucagggagcuauaaacagcagucuuccuuuccagaacguacacccagucacaauaggagaguguccaaaguaugucaggagugcaaaauuaaggaugguuacaggacuaaggaacaucccauccauucaauccagagguuuguuuggagccauugccgguuucauugaagggggguggacuggaaugguagaugguugguaugguuaucaucaucagaaugagcaaggaucuggcuaugcugcagaucaaaaaagcacacaaaaugccauuaaugggauuacaaacaaggugaauucuguaauugagaaaaugaacacucaauucacagcagugggcaaagaauucaacaaauuggaaagaaggauggaaaacuugaauaaaaaaguugaugauggguuuauagacauuuggacauauaaugcagaacuguugguucuacuggaaaaugaaaggacuuuggauuuccaugacuccaaugugaagaaucuguaugagaaaguaaaaagccaguugaagaauaaugcuaaagaaauaggaaauggguguuuugaauucuaucacaaguguaacgaugaaugcauggagaguguaaagaauggaacuuaugacuauccaaaauauuccgaagaaucaaaguuaaacagggagaaaauugauggagugaaauuggaaucaaugggagucuaucagauucuggcgaucuacucaacagucgccaguucucugguucuuuuggucucccugggggcaaucagcuucuggauguguuccaaugggucuuugcaguguagaauaugcaucuaa

SEQ ID NO: 34690 - RNA, 1701 nt, Artificial Sequence; identical to SEQ ID NO: 34676
  derived and/or modified CDS sequence (wt) from hemagglutinin__InfluenzaA__ACQ73386

SEQ ID NO: 34691 - RNA, 1701 nt, Artificial Sequence; identical to SEQ ID NO: 34681
  derived and/or modified CDS sequence (wt) from hemagglutinin__InfluenzaA__ACQ73387

SEQ ID NO: 34692 - RNA, 1701 nt, Artificial Sequence
  derived and/or modified CDS sequence (wt) from hemagglutinin__InfluenzaA__ACQ73555
augaagacuaucauugcuuugagcuacauucuaugucugguuuucgcucaaaaacuucccggaaaugacaacagcacggcaacgcugugccuugggcaccaugcaguaccaaacggaacgauagugaaaacaaucacgaaugaccaaauugaaguuacuaaugcuacugagcugguucagaguuccucaacagguggaauaugcgacagcccucaucagauccuugauggagaaaacugcacacuaauagaugcucuauugggagacccucagugugauggcuuccaaaauaagaaaugggaccuuuuuguugaacgcagcaaagccuacagcaacuguuacccuuaugaugugccggauuaugccucccuuaggucacuaguugccucauccggcacacuggaguuuaacaaugaaagcuucaauuggacuggagucacucaaaauggaacaagcucugcuugcaaaaggagaucuaauaacaguuucuuuaguagauugaauugguugacccacuuaaaauucaaauacccagcauugaacgugacuaagccaaacaaugaaaaauuugacaaauuguacauuugggggguucaccacccggguacggacaaugaccaaaucuuccuguaugcucaagcaucaggaagaaucacagucucuaccaaaagaagccaacaaacuguaaucccgaauaucggaucuagacccagaguaaggaauauccccagcagaauaagcaucuauuggacaauaguaaaaccgggagacauacuuuugauuaacagcacagggaaucuaauugcuccuagggguuacuucaaaauacgaagugggaaaagcucaauaaugagaucagaugcacccauuggcaaaugcaauucugaaugcaucaccccaaauggaagcauucccaaugacaaaccauuucaaaauguaaacaggaucacauauggggccugucccagauauguuaagcaaaacacucugaaauuggcaacagggaugcgaaauguaccagagaaacaaacuagaggcauauuuggcgcaaucgcggguuucauagaaaaugguugggagggaaugguggaugguugguacgguuucaggcaucaaaauucugagggaauaggacaagcagcagaucucaaaagcacucaagcagcaaucaaucaaaucaaugggaagcugaauagguugaucgggaaaaccaacgagaaauuccaucagauugaaaaagaauucucagaaguagaagggagaauucaggaccucgagaaguauguugaggacacuaaaauagaucucuggucauacaacgcggagcuucuuguugcccuggagaaccaacauacaauugaucuaacugacucagaaaugaacaaacuguuugaaagaacaaagaagcaacugagggaaaaugcugaggauaugggcaaugguuguuucaaaauauaccacaaaugugacaaugccugcauaggaucaaucagaaauggaacuuaugaccaugauguauacagagaugaagcauuaaacaaccgguuccagaucaaaggcguugagcugaagucaggauacaaagauuggauccuauggauuuccuuugccauaucauguuuuuugcuuuguguugcuuuguugggguucaucaugugggccugccaaaaaggcaacauuaggugcaacauuugcauuuga

SEQ ID NO: 34693 - RNA, 1701 nt, Artificial Sequence; identical to SEQ ID NO: 34681
  derived and/or modified CDS sequence (wt) from hemagglutinin__InfluenzaA__ACQ76294

SEQ ID NO: 34694 - RNA, 1701 nt, Artificial Sequence; identical to SEQ ID NO: 34681
  derived and/or modified CDS sequence (wt) from hemagglutinin__InfluenzaA__ACQ76314

SEQ ID NO: 34695 - RNA, 1701 nt, Artificial Sequence; identical to SEQ ID NO: 34681
  derived and/or modified CDS sequence (wt) from hemagglutinin__InfluenzaA__ACQ76317

SEQ ID NO: 34696 - RNA, 1701 nt, Artificial Sequence
  derived and/or modified CDS sequence (wt) from hemagglutinin__InfluenzaA__ACQ76318
augaaggcaauacuaguaguucugcuauauacauuugcaaccgcaaaugcagacacauuauguauagguuaucaugcgaacaauucaacagacacuguagacacaguacuagaaaagaauguaacaguaacacacucuguuaaccuucuagaagacaagcauaacgggaaacuaugcaaacuaagagggguagccccauugcauuuggguaaauguaacauugcuggcuggauccugggaaauccagagugugaaucacucuccacagcaagcucaugguccuacauuguggaaacaccuaguucagacaauggaacguguuacccaggagauuucaucgauuaugaggagcuaagagagcaauugagcucagugucaucauuugaaagguuugagauauuccccaagacaaguucauggcccaaucaugacucgaacaaagguguaacggcagcauguccucaugcuggagcaaaaagcuucuacaaaaauuuaauauggcuaguuaaaaaaggaaauucauacccaaagcucagcaaauccuacauuaaugauaaagggaaagaaguccucgugcuauggggcauucaccauccaucuacuagugcugaccaacaaagucucuaucagaaugcagauacauauguuuuuguggggucaucaagauacagcaagaaguucaagccggaaauagcaauaagacccaaagugagggaucaagaagggagaaugaacuauuacuggacacuaguagagccgggagacaaaauaacauucgaagcaacuggaaaucuagugguaccgagauaugcauucgcaauggaaagaaaugcuggaucugguauuaucauuucagauacaccaguccacgauugcaauacaacuugucaaacacccaagggugcuauaaacaccagccucccauuucagaauauacauccgaucacaauuggaaaauguccaaaauauguaaaaagcacaaaauugagacuggccacaggauugaggaauaucccgucuauucaaucuagaggccuauuuggggccauugccgguuucauugaagggggguggacagggaugguagauggaugguacgguuaucaccaucaaaaugagcaggggucaggauaugcagccgaccugaagagcacacagaaugccauugacgagauuacuaacaaaguaaauucuguuauugaaaagaugaauacacaguucacagcaguagguaaagaguucaaccaccuggaaaaaagaauagagaauuuaaauaaaaaaguugaugaugguuuccuggacauuuggacuuacaaugccgaacuguugguucuauuggaaaaugaaagaacuuuggacuaccacgauucaaaugugaagaacuuauaugaaaagguaagaagccagcuaaaaaacaaugccaaggaaauuggaaacggcugcuuugaauuuuaccacaaaugcgauaacacgugcauggaaagugucaaaaaugggacuuaugacuacccaaaauacucagaggaagcaaaauuaaacagagaagaaauagaugggguaaagcuggaaucaacaaggauuuaccagauuuuggcgaucuauucaacugucgccaguucauugguacugguagucucccugggggcaaucaguuucuggaugugcucuaaugggucucuacaguguagaauauguauuuaa

SEQ ID NO: 34697 - RNA, 1701 nt, Artificial Sequence; identical to SEQ ID NO: 34668
  derived and/or modified CDS sequence (wt) from hemagglutinin__InfluenzaA__ACQ76326

SEQ ID NO: 34698 - RNA, 1701 nt, Artificial Sequence; identical to SEQ ID NO: 34668
  derived and/or modified CDS sequence (wt) from hemagglutinin__InfluenzaA__ACQ76336

SEQ ID NO: 34699 - RNA, 1701 nt, Artificial Sequence; identical to SEQ ID NO: 34676
  derived and/or modified CDS sequence (wt) from hemagglutinin__InfluenzaA__ACQ76347

SEQ ID NO: 34700 - RNA, 1701 nt, Artificial Sequence; identical to SEQ ID NO: 34681
  derived and/or modified CDS sequence (wt) from hemagglutinin__InfluenzaA__ACQ76365

SEQ ID NO: 34701 - RNA, 1701 nt, Artificial Sequence; identical to SEQ ID NO: 34681
  derived and/or modified CDS sequence (wt) from hemagglutinin__InfluenzaA__ACQ76370

SEQ ID NO: 34702 - RNA, 1701 nt, Artificial Sequence
  derived and/or modified CDS sequence (wt) from hemagglutinin__InfluenzaA__ACQ76376
augaaggcaauacuaguaguucugcuauauacauuugcaaccgcaaaugcagacacauuauguauagguuaucaugcgaacaauucaacagacacuguagacacaguacuagaaaagaauguaacaguaacacacucuguuaaccuucuagaagacaagcauaacgggaaacuaugcaaacuaagagggguagccccauugcauuuggguaaauguaacauugcuggcuggauccugggaaauccagagugugaaucacucuccacagcaagcucaugguccuacauuguggaaacaucuaguucagacaauggaacguguuacccaggagauuucaucgauuaugaggagcuaagagagcaauugagcucagugucaucauuugaaagguuugagauauuccccaagacaaguucauggcccaaucaugacucgaacaaagguguaacggcagcauguccucaugcuggagcaaaaagcuucuacaaaaauuuaauauggcuaguuaaaaaaggaaauucauacccaaagcucagcaaauccuacauuaaugauaaagggaaagaaguccucguacuauggggcauucaccauccaucuacuagugcugaccaacaaagucucuaucagaaugcagaugcauauguuuuuguggggucaucaagauacagcaagaaguucaagccggaaauagcaauaagacccaaagugagggaucaagaagggagaaugaacuauuacuggacacuaguagagccgggagacaaaauaacauucgaagcaacuggaaaucuagugguaccgagauaugcauucgcaauggaaagaaaugcuggaucugguauuaucauuucagauacaccaguccacgauugcaauacaacuugucagacacccaagggugcuauaaacaccagccucccauuucagaauauacauccgaucacaauuggaaaauguccaaaauauguaaaaagcacaaaauugagacuggccacaggauugaggaaugucccgucuauucaaucuagaggccuauuuggggccauugccgguuucauugaaggaggguggacagggaugguagauggaugguacgguuaucaccaucaaaaugagcaggggucaggauaugcagccgaccugaagagcacacagaaugccauugacgagauuacuaacaaaguaaauucuguuauugaaaagaugaauacacaguucacagcaguagguaaagaguucaaccaccuggaaaaaagaauagagaauuuaaauaaaaaaguugaugaugguuuucuggacauuuggacuuacaaugccgaacuguugguucuauuggaaaaugaaagaacuuuggacuaccacgauucaaaugugaagaacuuauaugaaaagguaagaagccagcuaaaaaacaaugccaaggaaauuggaaacggcugcuuugaauuuuaccacaaaugcgauaacacgugcauggaaagugucaaaaaugggacuuaugacuacccaaaauacucagaggaagcaaaauuaaacagagaagaaauagaugggguaaagcuggaaucaacaaggauuuaccagauuuuggcgaucuauucaacugucgccaguucauugguacugguagucucccugggggcaaucaguuucuggaugugcucuaaugggucucuacaguguagaauauguauuuaa

SEQ ID NO: 34703 - RNA, 1701 nt, Artificial Sequence
  derived and/or modified CDS sequence (wt) from hemagglutinin__InfluenzaA__ACQ76383
augaaggcaauacuaguaguucugcuauauacauuugcaaccgcaaaugcagacacauuauguauagguuaucaugcgaacaauucaacagacacuguagacacaguacuagaaaagaauguaacaguaacacacucuguuaaccuccuagaagacaagcauaacgggaaacuaugcaaacuaagagggguagccccauugcauuuggguaaauguaacauugcuggcuggauccugggaaauccagagugugaaucacucuccacagcaagcucaugguccuacauuguggaaacaucuaguucagacaauggaacguguuacccaggagauuucaucgauuaugaggagcuaagagagcaauugagcucagugucaucauuugaaagguuugagauauuccccaagacaaguucauggcccaaucaugacucgaacaaagguauaacggcagcauguccucaugcuggagcaaaaagcuucuacaaaaauuuaauauggcuaguuaaaaaaggaaauucauacccaaagcucagcaaauccuacauuaaugauaaagggaaagaaguccucgugcuauggggcauucaccauccaucuacuagugcugaccaacaaagucucuaucagaaugcagaugcauauguuuuuguggggucaucaagauacagcaagaaguucaagccggaaauagcaauaagacccaaagugagggaucaagaagggagaaugaacuauuacuggacacuaguagagccgggagacaaaauaacauucgaagcaacuggaaaucuagugguaccgagauaugcauucgcaauggaaagaaaugcuggaucugguauuaucauuucagauacaccaguccacgauugcaauacaacuugucagacacccaagggugcuauaaacaccagccucccauuucagaauauacauccgaucacaauuggaaaauguccaaaauauguaaaaagcacaaaauugagacuggccacaggauugaggaaugucccgucuauucaaucuagaggccuauuuggggccauugccgguuucauugaagggggguggacagggaugguagauggaugguacgguuaucaccaucaaaaugagcaggggucaggauaugcagccgaccugaagagcacacagaaugccauugacgagauuacuaacaaaguaaauucuguuauugaaaagaugaauacacaguucacagcaguagguaaagaguucaaccaccuggaaaaaagaauagagaauuuaaauaaaaaaguugaugaugguuuccuggacauuuggacuuacaaugccgaacuguugguucuauuggaaaaugaaagaacuuuggacuaccacgauucaaaugugaagaacuuauaugaaaagguaagaagccagcuaaaaaacaaugccaaggaaauuggaaacggcugcuuugaauuuuaccacaaaugcgauaacacgugcauggaaagugucaaaaaugggacuuaugacuacccaaaauacucagaggaagcaaaauuaaacagagaagaaauagaugggguaaagcuggaaucaacaaggauuuaccagauuuuggcgaucuauucaacugucgccaguucauugguacugguagucucccugggggcaaucaguuucuggaugugcucuaaugggucucuacaguguagaauauguauuuaa

SEQ ID NO: 34704 - RNA, 1701 nt, Artificial Sequence; identical to SEQ ID NO: 34681
  derived and/or modified CDS sequence (wt) from hemagglutinin__InfluenzaA__ACQ76389

SEQ ID NO: 34705 - RNA, 1701 nt, Artificial Sequence
  derived and/or modified CDS sequence (wt) from hemagglutinin__InfluenzaA__ACQ76401
augaaggcaauacuaguaguucugcuauauacauuugcaaccgcaaaugcagacacauuauguauagguuaucaugcgaacaauucaacagacacuguagacacaguacuagaaaagaauguaacaguaacacacucuguuaaccuucuagaagacaagcauaacgggaaacuaugcaaacuaagagggguagccccauugcauuuggguaaauguaacauugcuggcuggauccugggaaauccagagugugaaucacucuccacagcaagcucaugguccuacauuguggaaacaucuaguucagacaauggaacguguuacccaggagauuucaucgauuaugaggagcuaagagagcaauugagcucagugucaucauuugaaagguuugagauauuccccaagacaaguucauggcccaaucaugacucgaacaaagguguaacggcagcauguccucaugcuggagcaaaaagcuucuacaaaaauuuaauauggcuaguuaaaaaaggaaauucauacccaaagcucagcaaauccuacauuaaugauaaagggaaagaaguccucgugcuauggggcauucaccauccaucuacuagugcugaccaacaaagucucuaucagaaugcagaugcauauguuuuuguggggucaucaagauacagcaagaaguucaagccggaaauagcaauaagacccaaagugagggaucaagaagggagaaugaacuauuacuggacacuaguagagccgggagacaaaauaacauucgaagcaacuggaaaucuagugguaccgagauaugcauucgcaauggaaagaaaugcuggaucugguauuaucauuucagauacaccaguccacgauugcaauacaacuugucagacacccaagggugcuauaaacaccagccucccauuucagaauauacauccgaucacaauuggaaaauguccaaaauauguaaaaagcacaaaauugagacuggccacaggauugaggaaugucccgucuauucaaucuagaggccuauuuggggccauugccgguuucauugaagggggguggacagggaugguagauggaugguacgguuaucaccaucaaaaugagcaggggucaggauaugcagccgaccugaagagcacacagaaugccauugacgagauuacuaacaaaguaaauucuguuauugaaaagaugaauacacaguucacagcaguagguaaagaguucaaccaccuggaaaaaagaauagagaauuuaaauaaaaaaguugaugaugguuuccuggacauuuggacuuacaaugccgaacuguugguucuauuggaaaaugaaagaacuuuggacuaccacgauucaaaugugaagaacuuauaugaaaagguaagaagccaguuaaaaaacaaugccaaggaaauuggaaacggcugcuuugaauuuuaccacaaaugcgauaacacgugcauggaaagugucaaaaaugggacuuaugacuacccaaaauacucagaggaagcaaaauuaaacagagaagaaauagaugggguaaagcuggaaucaacaaggauuuaccagauuuuggcgaucuauucaacugucgccaguucauugguacugguagucucccugggggcaaucaguuucuggaugugcucuaaugggucucuacaguguagaauauguauuuaa

SEQ ID NO: 34706 - RNA, 1701 nt, Artificial Sequence; identical to SEQ ID NO: 34681
  derived and/or modified CDS sequence (wt) from hemagglutinin__InfluenzaA__ACQ76405

SEQ ID NO: 34707 - RNA, 1701 nt, Artificial Sequence
  derived and/or modified CDS sequence (wt) from hemagglutinin__InfluenzaA__ACQ76408
augaaggcaauacuaguaguuaugcuauauacauuugcaaccgcaaaugcagacacauuauguauagguuaucaugcgaacaauucaacagacacuguagacacaguacuagaaaagaauguaacaguaacacacucuguuaaccuucuagaagacaagcauaacgggaaacuaugcaaacuaagagggguagccccauugcauuuggguaaauguaacauugcuggcuggauccugggaaauccagagugugaaucacucuccacagcaagcucaugguccuacauuguggaaacaucuaguucagacaauggaacguguuacccaggagauuucaucgauuaugaggagcuaagagagcaauugagcucagugucaucauuugaaagguuugagauauuccccaagacaaguucauggcccaaucaugacucgaacaaagguguaacggcagcauguccucaugcuggagcaaaaagcuucuacaaaaauuuaauauggcuaguuaaaaaaggaaauucauacccaaagcucagcaaauccuacauuaaugauaaagggaaagaaguccucgugcuauggggcauucaccauccaucuacuagugcugaccaacaaagucucuaucagaaugcagaugcauauguuuuuguggggucaucaagauacagcaagaaguucaagccggaaauagcaauaagacccaaagugagggaucaagaagggagaaugaacuauuacuggacacuaguagagccgggagacaaaauaacauucgaagcaacuggaaaucuagugguaccgagauaugcauucgcaauggaaagaaaugcuggaucugguauuaucauuucagauacaccaguccacgauugcaauacaacuugucagacacccaagggugcuauaaacaccagccucccauuucagaauauacauccgaucacaauuggaaaauguccaaaauauguaaaaagcacaaaauugagacuggccacaggauugaggaaugucccgucuauucaaucuagaggccuauuuggggccauugccgguuucauugaagggggguggacaggaaugguagauggaugguacgguuaucaccaucaaaaugagcaggggucaggauaugcagccgaccugaagagcacacagaaugccauugacgagauuacuaacaaaguaaauucuguuauugaaaagaugaauacacaguucacagcaguagguaaagaguucaaccaccuggaaaaaagaauagagaauuuaaauaaaaaaguugaugaugguuuccuggacauuuggacuuacaaugccgaacuguugguucuauuggaaaaugaaagaacuuuggacuaccacgauucaaaugugaagaacuuauaugaaaagguaagaagccagcuaaaaaacaaugccaaggaaauuggaaacggcugcuuugaauuuuaccacaaaugcgauaacacgugcauggaaagugucaaaaaugggacuuaugacuacccaaaauacucagaggaagcaaaauuaaacagagaagaaauagaugggguaaagcuggaaucaacaaggauuuaccagauuuuggcgaucuauucaacugucgccaguucauugguacugguagucucccugggggcaaucaguuucuggaugugcucuaaugggucucuacaguguagaauauguauuuaa

SEQ ID NO: 34708 - RNA, 1701 nt, Artificial Sequence
  derived and/or modified CDS sequence (wt) from hemagglutinin__InfluenzaA__ACQ77601
augaagacuaucauugcuuugagcuacauuuuaugucuggcuuucgcucaaaaacuucccggaaaugacaacagcacggcaacgcugugccugggacaccaugcagugccaaacggaacgcuagugaaaacaaucacgaaugaccaaauugaagugacuaaugcuacugagcugguucagaguuccucaacagguagaauaugcgacaguccucaccaaauccuugauggagaaaacugcacacugauagaugcucuauugggagacccacauugugauggcuuccaaaauaaggaaugggaccuuuuuguugaacgcagcaaagccuacagcgacuguuacccuuaugaugugccggauuaugccucccuuaggucacuaguugccucauccggcacccuggaguuuaacaaugaaagcuucaauuggacuggagucgcucagaauggaacaagcucugcuugcaaaaggagaucuauuaaaaguuucuuuaguagauugaauugguugcaccaauuagaaaacagauauccagcaccgaacgugacuaugccaaacaaugacaaauuugacaaauuguacauuugggggguucaccacccgaguacggacagugaccaaaucagcguauaugcccaagcaucagggagagucacagucucuaccaaaagaagccaacaaacuguaaucccgaauaucggauccagacccuggguaagggguaucuccagcagaauaagcaucuauuggacaauaguaaaaccgggagacauacuuuugauuaacagcacagggaaucuaauugcuccucgggguuacuucaaaauacgaagugggaaaagcucaauaaugaggucagaugcacccauuggcaaaugcaauucugaaugcaucacuccaaauggaagcauucccaaugacaaaccauuucaaaauguaaacaggaucacauauggggccugucccagauauguuaagcaaaacacucugaaauuggcaacagggaugcggaauguaccagagaaacaaacuagaggcauauucggcgcaaucgcggguuucauagaaaaugguugggagggaaugauggacgguugguacgguuucaggcaucaaaauucugagggcacaggacaagcagcagaucuuaaaagcacucaagcagcaaucaaccaaaucaacgggaaacugaauaaguuaaucgagaaaacgaacgagaaauuccaucaaauugaaaaagaauucucagaaguagaagggagaauucaggaccucgagaaauauguugaggacacuaaaauagaucucuggucguacaacgcggagcuucuuguugcccuggagaaccaacauacaauugaucuaacugacucagaaaugaacaaacuguuugaaagaacaaggaagcaacugagagaaaaugcugaggauaugggcaaugguuguuucaaaauauaccacaaaugugacaaugccugcauagggucaaucagaaauggaacuuaugaccaugauguauacagagacgaagcauuaaacaaccgguuccagaucaaagguguugagcugaagucaggauacaaagauuggauccuauggauuuccuuugccauaucauguuuuuugcuuuguguuguuuugcugggguucauuaugugggccugccaaaaaggcaacauuaggugcaacauuugcauuuga

SEQ ID NO: 34709 - RNA, 1701 nt, Artificial Sequence
  derived and/or modified CDS sequence (wt) from hemagglutinin__InfluenzaA__ACQ83310
augaaggcaauacuaguaguucugcuauauacauuugcaaccgcaaaugcagacacauuauguauagguuaucaugcgaacaauucaacagacacuguagacacaguacuagaaaagaauguaacaguaacacacucuguuaaccuucuagaagacaagcauaacgggaaacuaugcaaacuaagagggguagccccauugcauuuggguaaauguaacauugcuggcuggauccugggaaauccagagugugaaucacucuccacagcaagcucaugguccuacauuguggaaacaucuaguucagacaauggaacguguuacccaggagauuucaucgauuaugaggagcuaagagagcaauugagcucaaugucaucauuugaaagguuugagauauuccccaagacaaguucauggcccaaucaugacucgaacaaagguguaacggcagcauguccucaugcuggagcaaaaagcuucuacaaaaauuuaauauggcuaguuaaaaaaggaaauucauacccaaagcucagcaaauccuacauuaaugauaaagggaaagaaguccucgugcuauggggcauucaccauccaucuacuagugcugaccaacaaagucucuaucagaaugcagaugcauauguuuuuguggggucaucaagauacagcaagaaguuaaagccggaaauagcaauaagacccaaagugagggaucaagaagggagaaugaacuauuacuggacacuaguagagccgggagacaaaauaacauucgaagcaacuggaaaucuagugguaccgagauaugcauucgcaauggaaagaaaugcuggaucugguauuaucauuucagauacaccaguccacgauugcaauacaacuugucagacacccaagggugcuauaaacaccagccucccauuucagaauauacauccgaucacaauuggaaaauguccaaaauauguaaaaagcacaaaauugagacuggccacaggauugaggaaugucccgucuauucaaucuagaggccuauuuggggccauugccgguuucauugaagggggguggacagggaugguagauggaugguacgguuaucaccaucaaaaugagcaggggucaggauaugcagccgaccugaagagcacacagaaugccauugacgagauuacuaacaaaguaaauucuguuauugaaaagaugaauacacaguucacagcaguagguaaagaguucaaccaccuggaaaaaagaauagagaauuuaaauaaaaaaguugaugaugguuuccuggacauuuggacuuacaaugccgaacuguugguucuauuggaaaaugaaagaacuuuggacuaccacgauucaaaugugaagaacuuauaugaaaagguaagaagccagcuaaaaaacaaugccaaggaaauuggaaacggcugcuuugaauuuuaccacaaaugcgauaacacgugcauggaaagugucaaaaaugggacuuaugacuacccaaaauacucagaggaagcaaaauuaaacagagaagaaauagaugggguaaagcuggaaucaacaaggauuuaccagauuuuggcgaucuauucaacugucgccaguucauugguacugguagucucccugggggcaaucaguuucuggaugugcucuaaugggucucuacaguguagaauauguauuuaa

SEQ ID NO: 34710 - RNA, 1701 nt, Artificial Sequence
  derived and/or modified CDS sequence (wt) from hemagglutinin__InfluenzaA__ACQ84451
augaaggcaauacuaguaguucugcuauauacauuugcaaccgcaaaugcagacacauuauguauagguuaucaugcgaacaauucaacagacacuguagacacaguacuagaaaagaauguaacaguaacacacucuguuaaccuucuagaagacaagcauaacgggaaacuaugcaaacuaagagggguagccccauugcauuuggguaaauguaacauugcuggcuggauccugggaaauccagagugugaaucacucuccacagcaagcucaugguccuacauuguggaaacaucuaguucagacaauggaacguguuacccaggagauuucaucgauuaugaggagcuaagagagcaauugagcucagugucaucauuugaaagguuugagauauuccccaagacaaguucauggcccaaucaugacucgaacaaagguguaacggcagcauguccucaugcuggagcaaaaagcuucuacaaaaauuuaauauggcuaguuaaaaaaggaaauucauacccaaagcucagcaaauccuacauuaaugauaaagggaaagaaguccucgugcuauggggcauucaccauccaucuacuagugcugaccaacaaagucucuaucagaaugcagaugcauauguuuuuguggggucaucaagauacagcaagaaguucaagccggaaauagcaauaagacccaaagugagggaucaagaagggagaaugaacuauuacuggacacuaguagagccgggagacaaaauaacauucgaagcaacuggaaaucuagugguaccgagauaugcauucgcaauggaaagaaaugcuggaucugguauuaucauuucagauacaccaguccacgauugcaauacaacuugucagacacccaagggugcuauaaacaccagccucccauuucagaauauacauccgaucacaauuggaaaauguccaaaauauguaaaaagcacaaaauugagacuggccacaggauugaggaaugucccgucuauucaaucuagaggccuauuuggggccauugccgguuucauugaagggggguggacagggaugguagauggaugguacgguuaucaccaucaaaaugagcaggggucaggauaugcagccgaccugaagagcacacagaaugccauugacgagauuacuaacaaaguaaauucuguuauugaaaagaugaauacacaguucacagcaguagguaaagaguucaaccaccuggaaaaaagaauagagaauuuaaauaaaaaaguugaugaugguuuccuggacauuuggacuuacaaugccgaacuguugguucuauuggaaaaugaaagaacuuuggacuaccacgauucaaaugugaagaacuuauaugaaaagguaagaagccagcuaaaaaacaaugccaaggaaauuggaaacggcugcuuugaauuuuaccacaaaugcgauaacacgugcauggaaagugucaaaaaugggacuuaugacuacccaaaauacucagaggaagcaaaauuaaacagagaagaaauagaugggguaaagcuggaaucaacaaggauuuaccagauuuuggcgaucuauucaacugucgccaguucauugguacugguagucucccugggggcaaucaguuucuggaugugcucuaaugggucucuacaguguaggauauguauuuaa

SEQ ID NO: 34711 - RNA, 1701 nt, Artificial Sequence; identical to SEQ ID NO: 34676
  derived and/or modified CDS sequence (wt) from hemagglutinin__InfluenzaA__ACQ84457

SEQ ID NO: 34712 - RNA, 1701 nt, Artificial Sequence
  derived and/or modified CDS sequence (wt) from hemagglutinin__InfluenzaA__ACQ84477
augaaggcaauacuauuagucuugcuauauacauucacagccgcaaaugcagacacauuauguauagguuaucaugcaaauaauucaacugacacuguugauacaguacuagaaaagaauguaacaguaacacacucuguuaaccuucuagaagacagacauaacggaaaacuauguaaacuaagggggguggccccauugcauuuggguaaauguaacauugcuggauggcuccugggaaacccagaaugugaauuacuauucacagcaagcucauggucuuacauuguggaaacaucuaacucagacaaugggacauguuacccaggagauuucaucaauuaugaagagcuaagagagcaguugagcucagugucaucauuugaaagguuugagauauuccccaaggcaaguucauggcccgaucaugaaacgaacagaggugugacggcagcauguccuuaugcuggagcaaacagcuucuacagaaauuuaauauggcugguaaaaaaaggaaauucauacccaaagcucagcaaauccuauguuaacaauaaggagaaggaaguccucgugcuauggggcauucaccauccaccuaccaguacugaccaacaaagucucuaccagaaugcagaugccuauguuuuuguggggucaucaaaguacaacaagaaauucaagccagagauagcaacaagacccaaggugagaggucaagcagggagaaugaacuauuacuggacacuaguugagccuggagacacaauaacauucgaagcaacuggaaaucuaguggugccaagauaugccuucgcaaugaaaagagguucuggaucugguauuaucauuucagauacaccaguccacgauuguaauacgacuugucaaacacccaaaggugcuauaaacaccagccucccauuucagaauauacauccagucacaauuggagaauguccaaaauaugucaaaaguacaaaauugagaauggcuacaggauuaaggaauaucccgucuauucaaucuagaggucuguuuggagccauugcuggcuuuauugaggggggauggacaggaaugauagauggaugguacgguuaucaccaucaaaaugagcagggaucaggauaugcagccgaccaaaagagcacacagaaugccauugacgggaucacuaacaaaguaaacucuguuauugaaaagaugaacacacaauucacagcaguggguaaagaauucaaccaccuggaaaaaagaauagagaauuuaaauaaaaagguugaugaugguuuucuggauguuuggacuuacaaugccgaauuguugguucuauuggaaaaugaaagaacuuuggauuaccaugacucaaaugugaagaaccuauaugagaagguaagaagccagcuaaaaaacaaugccaaggaaauuggaaauggcugcuuugaauuuuaccacaaaugugaugacacgugcauggagagcgucaaaaaugggacuuaugauuaccccaaauacucagaagaaucaaaacuaaacagagaggaaauagauggaguaaagcuggaaucaacaaggauuuaccagauuuuggcgaucuauucaacugucgccaguucauugguacuguuagucucccugggggcaaucaguuucuggaugugcuccaaugggucuuuacagugcagaauauguauuuaa

SEQ ID NO: 34713 - RNA, 1701 nt, Artificial Sequence
  derived and/or modified CDS sequence (wt) from hemagglutinin__InfluenzaA__ACQ89900
augaaggcaauacuaguaguucugcuauauacauuugcaaccgcaaaugcagacacauuauguauagguuaucaugcgaacaauucaacagacacuguagacacaguacuagaaaagaauguaacaguaacacacucuguuaaccuucuagaagacaagcauaacgggaaacuaugcaaacuaagagggguagccccauugcauuuggguaaauguaacauugcuggcuggauccugggaaauccagagugugaaucacucuccacagcaagcucaugguccuacauuguggaaacaucuaguucagacaauggaacguguuacccaggagauuucaucgauuaugaggagcuaagagagcaauugagcucagugucaucauuugaaagguuugagauauuccccaagacaaguucauggcccaaucaugacucgaacaaagguguaacggcagcauguccucaugcuggagcaaaaagcuucuacaaaaauuuaauauggcuaguuaaaaaaggaaauucauacccaaagcucagcaaauccuacauuaaugauaaagggaaagaaguccucgugcuauggggcauucaccauccaucuacuagugcugaccaacaaagucucuaucagaaugcagaugcauauguuuuuguggggucaucaagauacagcaagaaguucaagccggaaauagcaauaagacccaaagugagggaucaagaagggagaaugaacuauuacuggacacuaguagagccgggagacaaaauaacauucgaagcaacuggaaaucuagugguaccgagauaugcauucgcaauggaaagaaaugcugggucugguauuaucauuucagauacaccaguccacgauugcaauacaacuugucagacacccaagggugcuauaaacaccagccucccauuucagaauauacauccgaucacaauuggaaaauguccaaaauauguaaaaagcacaaaauugagacuggccacaggauugaggaaugucccgucuauucaaucuagaggccuauuuggggccauugccgguuucauugaagggggguggacagggaugguagauggaugguacgguuaucaccaucaaaaugagcaggggucaggauaugcagccgaccugaagagcacacagaaugccauugacgagauuacuaacaaaguaaauucuguuguugaaaagaugaauacacaguucacagcaguagguaaagaguucaaccaccuggaaaaaagaauagagaauuuaaauaaaaaaguugaugaugguuuccuggacauuuggacuuacaaugccgaacuguugguucuauuggaaaaugaaagaacuuuggacuaccacgauucaaaugugaagaacuuauaugaaaagguaagaagccagcuaaaaaacaaugccaaggaaauuggaaacggcugcuuugaauuuuaccacaaaugcgauaacacgugcauggaaagugucaaaaaugggacuuaugacuacccaaaauacucagaggaagcaaaauuaaacagagaagaaauagaugggguaaagcuggaaucaacaaggauuuaccagauuuuggcgaucuauucaacugucgccaguucauugguacugguagucucccugggggcaaucaguuucuggaugugcucuaaugggucucuacaguguagaauauguauuuaa

SEQ ID NO: 34714 - RNA, 1701 nt, Artificial Sequence
  derived and/or modified CDS sequence (wt) from hemagglutinin__InfluenzaA__ACQ89902
augaaggcaauacuaguaguucugcuauauacauuugcaaccgcaaaugcagacacauuauguauagguuaucaugcgaacaauucaacagacacuguagacacaguacuagaaaagaauguaacaguaacacacucuguuaaccuucuagaagacaagcauaacgggaaacuaugcaaacuaagagggguagccccauugcauuuggguaaauguaacauugcuggcuggauccugggaaauccagagugugaaucacucuccacagcaagcucaugguccuacauuguggaaacaucuaguucagacaauggaacguguuacccaggagauuucaucgauuaugaggagcuaagagagcaauugagcucagugucaucauuugaaagguuugagauauuccccaagacaaguucauggcccaaucaugacucgaacaaagguguaacggcagcauguccucaugcuggagcaaaaagcuucuacaaaaauuuaauauggcuaguuaaaaaaggaaauucauacccaaagcucagcaaauccuacauuaaugauaaagggaaagaaguccucgugcuauggggcauucaccauccaucuacuagugcugaccaacaaagucucuaucagaaugcagaugcauauguuuuuguggggacaucaagauacagcaagaaguucaagccggaaauagcaauaagacccaaagugagggaucaagaagggagaaugaacuauuacuggacacuaguagagccgggagacaaaauaacauucgaagcaacuggaaaucuagugguaccgagauaugcauucgcaauggaaagaaaugcuggaucugguauuaucauuucagauacaccaguccacgauugcaauacaacuugucagacacccaagggugcuauaaacaccagccucccauuucagaauauacauccgaucacaauuggaaaauguccaaaauauguaaaaagcacaaaauugagacuggccacaggauugaggaaugucccgucuauucaaucuagaggccuauuuggggccauugccgguuucauugaagggggguggacagggaugguagauggaugguacgguuaucaccaucaaaaugagcaggggucaggauaugcagccgaccugaagagcacacagaaugccauugacgagauuacuaacaaaguaaauucuguuauugaaaagaugaauacacaguucacagcaguagguaaagaguucaaccaccuggaaaaaagaauagagaauuuaaauaaaaagguugaugaugguuuccuggacauuuggacuuacaaugccgaacuguugguucuauuggaaaaugaaagaacuuuggacuaccacgauucaaaugugaagaacuuauaugaaaagguaagaagccaguuaaaaaacaaugccaaggaaauuggaaacggcugcuuugaauuuuaccacaaaugcgauaacacgugcauggaaagugucaaaaaugggacuuaugacuacccaaaauacucagaggaagcaaaauuaaacagagaagaaauagaugggguaaagcuggaaucaacaaggauuuaccagauuuuggcgaucuauucaacugucgccaguucauugguacugguagucucccugggggcaaucaguuucuggaugugcucuaaugggucucuacaguguagaauauguauuuaa

SEQ ID NO: 34715 - RNA, 1701 nt, Artificial Sequence
  derived and/or modified CDS sequence (wt) from hemagglutinin__InfluenzaA__ACQ89904
augaaggcaauacuaguaguucugcuauauacauuugcaaccgcaaaugcagacacauuauguauagguuaucaugcgaacaauucaacagacacuguagacacaguacuagaaaagaauguaacaguaacacacucuguuaaccuucuagaagacaagcauaacgggaaacuaugcaaacuaagagggguagccccauugcauuuggguaaauguaacauugcuggcuggauccugggaaauccagagugugaaucacucuccacagcaagcucaugguccuacauuguggaaacaucuaguucagacaagggaacguguuacccaggagauuucaucgauuaugaggagcuaagagagcaauugagcucagugucaucauuugaaagguuugagauauuccccaagacaaguucauggcccaaucaugacucgaacaaagguguaacggcagcauguccucaugcuggagcaaaaagcuucuacaaaaauuuaauauggcuaguuaaaaaaggaaauucauacccaaagcucagcaaauccuacauuaaugauaaagggaaagaaguccucgugcuauggggcauucaccauccaucuacuagugcugaccaacaaagucucuaucagaaugcagaugcauauguuuuuguggggacaucaagauacagcaagaaguucaagccggaaauagcaauaagacccaaagugagggaucaagaagggagaaugaacuauuacuggacacuaguagagccgggagacaaaauaacauucgaagcaacuggaaaucuagugguaccgagauaugcauucgcaauggaaagaaaugcuggaucugguauuaucauuucagauacaccaguccacgauugcaauacaacuugucagacacccaagggugcuauaaacaccagccucccauuucagaauauacauccgaucacaauuggaaaauguccaaaauauguaaaaagcacaaaauugagacuggccacaggauugaggaaugucccgucuauucaaucuagaggccuauuuggggccauugccgguuucauugaagggggguggacagggaugguagauggaugguacgguuaucaccaucaaaaugagcaggggucaggauaugcagccgaccugaagagcacacagaaugccauugacgagauuacuaacaaaguaaauucuguuauugaaaagaugaauacacaguucacagcaguagguaaagaguucaaccaccuggaaaaaagaauagagaauuuaaauaaaaaaguugaugaugguuuccuggacauuuggacuuacaaugccgaacuguugguucuauuggaaaaugaaagaacuuuggacuaccacgauucaaaugugaagaacuuauaugaaaagguaagaagccaguuaaaaaacaaugccaaggaaauuggaaacggcugcuuugaauuuuaccacaaaugcgauaacacgugcauggaaagugucaaaaaugggacuuaugacuacccaaaauacucagaggaagcaaaauuaaacagagaagaaauagaugggguaaagcuggaaucaacaaggauuuaccagauuuuggcgaucuauucaacugucgccaguucauugguacugguagucucccugggggcaaucaguuucuggaugugcucuaaugggucucuacaguguagaauauguauuuaa

SEQ ID NO: 34716 - RNA, 1701 nt, Artificial Sequence; identical to SEQ ID NO: 34713
  derived and/or modified CDS sequence (wt) from hemagglutinin__InfluenzaA__ACQ89905

SEQ ID NO: 34717 - RNA, 1701 nt, Artificial Sequence
  derived and/or modified CDS sequence (wt) from hemagglutinin__InfluenzaA__ACQ99607
augaaggcaauacuaguaguucugcuauauacauuugcaaccgcaaaugcagacacauuauguauagguuaucaugcgaacaauucaacagacacuguagacacaguacuagaaaagaauguaacaguaacacacucuguuaaccuucuagaagacaagcauaacgggaaacuaugcaaacuaagagggguagccccauugcauuuggguaaauguaacauugcuggcuggauccugggaaauccagagugugaaucacucuccacagcaagcucaugguccuacauuguggaaacaucuaguucagacaauggaacguguuacccaggagauuucaucgauuaugaggagcuaagagagcaauugagcucagugucaucauuugaaagguuugagauauuccccaagacaaguucauggcccaaucaugacucgaacaaagguguaacggcagcauguccucaugcuggagcaaaaagcuucuacaaaaauuuaauauggcuaguuaaaaaaggaaauucauacccaaagcucagcaaauccuacauuaaugauaaagggaaagaaguccucgugcuauggggcauucaccauccaucuacuagugcugaccaacaaagucucuaucagaaugcagaugcauauguuuuuguggggucaucaagauacagcaagaaguucaagccggaaauagcaauaagacccaaagugagggaucaagaagggagaaugaacuauuacuggacacuaguagagccgggagacaaaauaacauucgaagcaacuggaaaucuagugguaccgagauaugcauucgcaauggaaagaaaugcuggaucugguauuaucauuucagauacaccaguccacgauugcaauacaacuugucagacacccaagggugcuauaaacaccagccucccauuucagaauauacauccgaucacaauuggaaaauguccaaaauauguaaaaagcacaaaauugagacuggccacaggauugaggaauguuccgucuauucaaucuagaggccuauuuggggccauugccgguuucauugaagggggguggacaggaaugguagauggaugguacgguuaucaccaucaaaaugagcaggggucaggauaugcagccgaccugaagagcacacagaaugccauugacgagauuacuaacaaaguaaauucuguuauugaaaagaugaauacacaguucacagcaguagguaaagaguucaaccaccuggaaaaaagaauagagaauuuaaauaaaaaaguugaugaugguuuccuggacauuuggacuuacaaugccgaacuguugguucuauuggaaaaugaaagaacuuuggacuaccacgauucaaaugugaagaacuuauaugaaaagguaagaagccaguuaaaaaacaaugccaaggaaauuggaaacggcugcuuugaauuuuaccacaaaugcgauaacacgugcauggaaagugucaaaaaugggacuuaugacuacccaaaauacucagaggaagcaaaauuaaacagagaagaaauagaugggguaaagcuggaaucaacaaggauuuaccagauuuuggcgaucuauucaacugucgccaguucauugguacugguagucucccugggggcaaucaguuucuggaugugcucuaaugggucucuacaguguagaauauguauuuaa

SEQ ID NO: 34718 - RNA, 1701 nt, Artificial Sequence; identical to SEQ ID NO: 34705
  derived and/or modified CDS sequence (wt) from hemagglutinin__InfluenzaA__ACQ99608

SEQ ID NO: 34719 - RNA, 1701 nt, Artificial Sequence; identical to SEQ ID NO: 34705
  derived and/or modified CDS sequence (wt) from hemagglutinin__InfluenzaA__ACQ99609

SEQ ID NO: 34720 - RNA, 1701 nt, Artificial Sequence; identical to SEQ ID NO: 34717
  derived and/or modified CDS sequence (wt) from hemagglutinin__InfluenzaA__ACQ99611

SEQ ID NO: 34721 - RNA, 1701 nt, Artificial Sequence
  derived and/or modified CDS sequence (wt) from hemagglutinin__InfluenzaA__ACQ99614
augaaggcaauacuaguaguucugcuauauacauuugcaaccgcaaaugcagacacauuauguauagguuaucaugcgaacaauucaacagacacuguagacacaguacuagaaaagaauguaacaguaacacacucuguuaaccuucuagaagacaagcauaacgggaaacuaugcaaacuaagagggguagccccauugcauuuggguaaauguaacauugcuggcuggauccugggaaauccagagugugaaucacucuccacagcaagcucaugguccuacauuguggaaacaucuaguucagacaauggaacguguuacccaggagauuucaucgauuaugaggagcuaagagagcaauugagcucagugucaucauuugaaagguuugagauauuccccaagacaaguucauggcccaaucaugacucgaacaaagguguaacggcagcauguccucaugcuggagcaaaaagcuucuacaaaaauuuaauauggcuaguuaaaaaaggaaauucauacccaaagcucagcaaauccuacauuaaugauaaagggaaagaaguccucgugcuauggggcauucaccauccaucuacuagugcugaccaacaaagucucuaucagaaugcagaugcauauguuuuuguggggucaucaagauacagcaagaaguucaagccggaaauagcaauaagacccaaagugagggaucaagaagggagaaugaacuauuacuggacacuaguagagccgggagacaaaauaacauucgaagcaacuggaaaucuagugguaccgagauaugcauucgcaauggaaagaaaugcuggaucugguauuaucauuucagauacaccaguccacgauugcaauacaacuugucagacacccaagggugcuauaaacaccagccucccauuucagaauauacauccgaucacaauuggaaaauguccaaaauauguaaaaagcacaaaauugagacuggccacaggauugaggaaugucccgucuauucaaucuagaggccuauuuggggccauugccgguuucauugaagggggguggacagggaugguagauggaugguacgguuaucaccaucaaaaugagcaggggucaggauaugcagccgaccugaagagcacacagaaugccauugacgaaauuacuaacaaaguaaauucuguuauugaaaagaugaauacacaguucacagcaguagguaaagaguucaaccaccuggaaaaaagaauagagaauuuaaauaaaaaaguugaugaugguuuccuggacauuuggacuuacaaugccgaacuguugauucuauuggaaaaugaaagaacuuuggacuaccacgauucaaaugugaagaacuuauaugaaaagguaagaagccagcuaaaaaacaaugccaaggaaauuggaaacggcugcuuugaauuuuaccacaaaugcgauaacacgugcauggaaagugucaaaaaugggacuuaugacuacccaaaauacucagaggaagcaaaauuaaacagagaagaaauagaugggguaaagcuggaaucaacaaggauuuaccagauuuuggcgaucuauucaacugucgccaguucauugguacugguagucucccugggagcaaucaguuucuggaugugcucuaaugggucucuacaguguagaauauguauuuaa

SEQ ID NO: 34722 - RNA, 1701 nt, Artificial Sequence; identical to SEQ ID NO: 34721
  derived and/or modified CDS sequence (wt) from hemagglutinin__InfluenzaA__ACQ99616

SEQ ID NO: 34723 - RNA, 1701 nt, Artificial Sequence; identical to SEQ ID NO: 34705
  derived and/or modified CDS sequence (wt) from hemagglutinin__InfluenzaA__ACQ99617

SEQ ID NO: 34724 - RNA, 1701 nt, Artificial Sequence; identical to SEQ ID NO: 34705
  derived and/or modified CDS sequence (wt) from hemagglutinin__InfluenzaA__ACQ99618

SEQ ID NO: 34725 - RNA, 1701 nt, Artificial Sequence; identical to SEQ ID NO: 34705
  derived and/or modified CDS sequence (wt) from hemagglutinin__InfluenzaA__ACQ99619

SEQ ID NO: 34726 - RNA, 1701 nt, Artificial Sequence; identical to SEQ ID NO: 34705
  derived and/or modified CDS sequence (wt) from hemagglutinin__InfluenzaA__ACQ99620

SEQ ID NO: 34727 - RNA, 1701 nt, Artificial Sequence; identical to SEQ ID NO: 34721
  derived and/or modified CDS sequence (wt) from hemagglutinin__InfluenzaA__ACQ99621

SEQ ID NO: 34728 - RNA, 1701 nt, Artificial Sequence; identical to SEQ ID NO: 34676
  derived and/or modified CDS sequence (wt) from hemagglutinin__InfluenzaA__ACQ99622

SEQ ID NO: 34729 - RNA, 1701 nt, Artificial Sequence
  derived and/or modified CDS sequence (wt) from hemagglutinin__InfluenzaA__ACR01014
augaaggcaauacuaguaguucugcuauauacauuugcaaccgcaaaugcagacacauuauguauagguuaucaugcgaacaauucaacagacacuguagacacaguacuagaaaagaauguaacaguaacacacucuguuaaccuucuagaagacaagcauaacgggaaacuaugcaaacuaagagggguagccccauugcauuuggguaaauguaacauugcuggcuggauccugggaaauccagagugugaaucacucuccacagcaagcucaugguccuacauuguggaaacaucuaguucagacaauggaacguguuacccaggagauuucaucgauuaugaggagcuaagagagcaauugagcucagugucaucguuugaaagguuugagauauuccccaagacaaguucauggcccaaucaugacucgaacaaagguguaacggcagcauguccucaugcuggagcaaaaagcuucuacaaaaauuuaauauggcuaguuaaaaaaggaaauucauacccaaagcucagcaaauccuacauuaaugauaaagggaaagaaguccucgugcuauggggcauucaccauccaucuacuagugcugaccaacaaagucucuaucagaaugcagaugcauauguuuuuguggggucaucaagauacagcaagaaguucaagccggaaauagcaauaagacccaaagugagggaucaagaagggagaaugaacuauuacuggacacuaguagagccgggagacaaaauaacauucgaagcaacuggaaaucuagugguaccgagauaugcauucgcaauggaaagaaaugcuggaucugguauuaucauuucagauacaccaguccacgauugcaauacaacuugucagacacccaagggugcuauaaacaccagccucccauuucagaauauacauccgaucacaauuggaaaauguccaaaauauguaaaaagcacaaaauugagacuggccacaggauugaggaaugucccgucuauucaaucuagaggccuauuuggggccauugccgguuucauugaagggggguggacagggaugguagauggaugguacgguuaucaccaucaaaaugagcaggggucaggauaugcagccgaccugaagagcacacagaaugccauugacgagauuacuaacaaaguaaauucuguuauugaaaagaugaauacacaguucacagcaguagguaaagaguucaaccaccuggaaaaaagaauggagaauuuaaauaaaaaaguugaugaugguuuccuggacauuuggacuuacaaugccgaacuguugguucuauuggaaaaugaaagaacuuuggacuaccacgauucaaaugugaagaacuuauaugaaaagguaagaagccagcuaaaaaacaaugccaaggaaauuggaaacggcugcuuugaauuuuaccacaaaugcgauaacacgugcauggaaagugucaaaaaugggacuuaugacuacccaaaauacucagaggaagcaaaauuaaacagagaagaaauagaugggguaaagcuggaaucaacaaggauuuaccagauuuuggcgaucuauucaacugucgccaguucauugguacugguagucucccugggggcaaucaguuucuggaugugcucuaaugggucucuacaguguagaauauguauuuaa

SEQ ID NO: 34730 - RNA, 1701 nt, Artificial Sequence; identical to SEQ ID NO: 34681
  derived and/or modified CDS sequence (wt) from hemagglutinin__InfluenzaA__ACR08419

SEQ ID NO: 34731 - RNA, 1701 nt, Artificial Sequence
  derived and/or modified CDS sequence (wt) from hemagglutinin__InfluenzaA__ACR08429
augaaggcaauacuaguaguucugcuauauacauuugcaaccgcaaaugcagacacauuauguauagguuaucaugcgaacaauucaacagacacuguagacacaguacuagaaaagaauguaacaguaacacacucuguuaaccuucuagaagacaagcauaacgggaaacuaugcaaacuaagagggguagccccauugcauuuggguaaauguaacauugcuggcuggauccugggaaauccagagugugaaucacucuccacagcaagcucaugguccuacauuguggaaacaucuaguucagacaauggaacguguuacccaggagauuucaucgauuaugaggagcuaagagagcaauugagcucagugucaucauuugaaagguuugagauauuccccaagacaaguucauggcccaaucaugacucgaacaaagguguaacggcagcauguccucaugcuggagcaaaaagcuucuacaaaaauuuaauauggcuaguuaaaaaaggaaauucauacccaaagcucagcaaauccuacauuaaugauaaagggaaagaaguccucgugcuauggggcauucaccauccaucuacuagugcugaccaacaaagucucuaucagaaugcagaugcauauguuuuuguggggacaucaagauacagcaagaaguucaagccggaaauagcaauaagacccaaagugagggaucaagaagggagaaugaacuauuacuggacacuaguagagccgggagacaaaauaacauucgaagcaacuggaaaucuagugguaccgagauaugcauucgcaauggaaagaaauacuggaucugguauuaucauuucagauacaccaguccacgauugcaauacaacuugucagacacccaagggugcuauaaacaccagccucccauuucagaauauacauccgaucacaauuggaaaauguccaaaauauguaaaaagcacaaaauugagacuggccacaggauugaggaaugucccgucuauucaaucuagaggccuauuuggggccauugccgguuucauugaagggggguggacagggaugguagauggaugguacgguuaucaccaucaaaaugagcaggggucaggauaugcagccgaccugaagagcacacagaaugccauugacgagauuacuaacaaaguaaauucuguuauugaaaagaugaauacacaguucacagcaguagguaaagaguucaaccaccuggaaaaaagaauagagaauuuaaauaaaaaaguugaugaugguuuccuggacauuuggacuuacaaugccgaacuguugguucuauuggaaaaugaaagaacuuuggacuaccacgauucaaaugugaagaacuuauaugaaaagguaagaagccaguuaaaaaacaaugccaaggaaauuggaaacggcugcuuugaauuuuaccacaaaugcgauaacacgugcauggaaagugucaaaaaugggacuuaugacuacccaaaauacucagaggaagcaaaauuaaacagagaagaaauagaugggguaaagcuggaaucaacaaggauuuaccagauuuuggcgaucuauucaacugucgccaguucauugguacugguagucucccugggggcaaucaguuucuggaugugcucuaaugggucucuacaguguagaauauguauuuaa

SEQ ID NO: 34732 - RNA, 1701 nt, Artificial Sequence; identical to SEQ ID NO: 34681
  derived and/or modified CDS sequence (wt) from hemagglutinin__InfluenzaA__ACR08439

SEQ ID NO: 34733 - RNA, 1701 nt, Artificial Sequence; identical to SEQ ID NO: 34681
  derived and/or modified CDS sequence (wt) from hemagglutinin__InfluenzaA__ACR08449

SEQ ID NO: 34734 - RNA, 1701 nt, Artificial Sequence
  derived and/or modified CDS sequence (wt) from hemagglutinin__InfluenzaA__ACR08459
augaaggcaauacuaguaguucugcuauauacauuugcaaccgcaaaugcagacacauuauguauagguuaucaugcgaacaauucaacagacacuguagacacaguacuagaaaagaauguaacaguaacacacucuguuaaccuucuagaagacaagcauaacgggaaacuaugcaaacuaagagggguagccccauugcauuuggguaaauguaacauugcuggcuggauccugggaaauccagagugugaaucacucuccacagcaagcucaugguccuacauuguggaaacaucuaguucagacaauggaacguguuacccaggagauuucaucgauuaugaggagcuaagagagcaauugagcucagugucaucauuugaaagguuugagauauuccccaagacaaguucauggcccaaucaugacucgaacaaagguguaacggcagcauguccucaugcuggagcaaaaagcuucuacaaaaauuuaauauggcuaguuaaaaaaggaaauucauacccaaagcucagcaaauccuacauuaaugauaaagggaaagaaguccucgugcuauggggcauucaccauccaucuacuagugcugaccaacaaagucucuaucagaaugcagaugcauauguuuuuguggggucaucaagauacagcaagaaguucaagccugaaauagcaauaagacccaaagugagggaucaagaagggagaaugaacuauuacuggacacuaguagagccgggagacaaaauaacauucgaagcaacuggaaaucuagugguaccgagauaugcauucgcaauggaaagaaaugcuggaucugguauuaucauuucagauacaccaguccacgauugcgauacaacuugucagacacccaagggugcuauaaacaccagccucccauuucagaauauacauccgaucacaauuggaaaauguccaaaauauguaaaaagcacaaaauugagacuggccacaggauugaggaaugucccgucuauucaaucuagaggccuauuuggggccauugccgguuucauugaagggggguggacagggaugguagauggaugguacgguuaucaccaucaaaaugagcaggggucaggauaugcagccgaccugaagagcacacagaaugccauugacgaaauuacuaacaaaguaaauucuguuauugaaaagaugaauacacaguucacagcaguagguaaagaguucaaccaccuggaaaaaagaauagagaauuuaaauaaaaaaguugaugaugguuuccuggacauuuggacuuacaaugccgaacuguugguucuauuggaaaaugaaagaacuuuggacuaccacgauucaaaugugaagaacuuauaugaaaagguaagaagccagcuaaaaaacaaugccaaggaaauuggaaacggcugcuuugaauuuuaccacaaaugcgauaacacaugcauggaaagugucaaaaaugggacuuaugacuacccaaaauacucagaggaagcaaaauuaaacagagaagaaauagaugggguaaagcuggaaucaacaaggauuuaccagauuuuggcgaucuauucaacugucgccaguucauugguacugguagucucccugggggcaaucaguuucuggaugugcucuaaugggucucuacaguguagaauauguauuuaa

SEQ ID NO: 34735 - RNA, 1701 nt, Artificial Sequence
  derived and/or modified CDS sequence (wt) from hemagglutinin__InfluenzaA__ACR08528
augaaggcaauacuaguaguucugcuauauacauuugcaaccgcaaaugcagacacauuauguauagguuaucaugcgaacaauucaacagacacuguagacacaguacuagaaaagaauguaacaguaacacacucuguuaaccuucuagaagacaagcauaacgggaaacuaugcaaacuaagagggguagccccauugcauuuggguaaauguaacauugcuggcuggauccugggaaauccagagugugaaucacucuccacagcaagcucaugguccuacauuguggaaacaucuaguucagacaauggaacguguuacccaggagauuucaucgauuaugaggaacuaagagagcaauugagcucagugucaucauuugaaagguuugagauauuccccaagacaaguucauggcccaaucaugacucgaacaaagguguaacggcagcauguccucaugcuggagcaaaaagcuucuacaaaaauuuaauauggcuaguuaaaaaaggaaauucauacccaaagcucagcaaauccuacauuaaugauaaagggaaagaaguccucgugcuauggggcauucaccauccaucuacuagugcugaccaacaaagucucuaucagaaugcagaugcauauguuuuuguggggucaucaagauacagcaagaaguucaagccggaaauagcaauaaggcccaaagugagggaucaagaagggagaaugaacuauuacuggacacuaguagagccgggagacaaaauaacauucgaagcaacuggaaaucuggugguaccgagauaugcauucgcaauggaaagaaaugcuggaucugguauuaucauuucagauacaccaguccacgauugcaauacaacuugucagacacccaagggugcuauaaacaccagccucccauuucagaauauacauccgaucacaauuggaaaauguccaaaauauguaaaaagcacaaaauugagacuggccacaggauugaggaaugucccgucuauucaaucuagaggccuauuuggggccauugccgguuucauugaagggggguggacagggaugguagauggaugguacgguuaucaccaucaaaaugagcaggggucaggauaugcagccgaccugaagagcacacagaaugccauugacgagauuacuaacaaaguaaauucuguuauugaaaagaugaauacacaguucacagcaguagguaaagaguucaaccaccuggaaaaaagaauagagaauuuaaauaaaaaaguugaugaugguuuccuggacauuuggacuuacaaugccgaacuguugguucuauuggaaaaugaaagaacuuuggacuaccacgauucaaaugugaagaacuuauaugaaaagguaagaagccagcuaaaaaacaaugccaaggaaauuggaaacggcugcuuugaauuuuaccacaaaugcgauaacacgugcauggaaagugucaaaaaugggacuuaugacuacccaaaauacucagaggaagcaaaauuaaacagagaagaaauagaugggguaaagcuggaaucaacaaggauuuaccagauuuuggcgaucuauucaacugucgccaguucauugguacugguagucucccugggggcaaucaguuucuggaugugcucuaaugggucucuacaguguagaauauguauuuaa

SEQ ID NO: 34736 - RNA, 1701 nt, Artificial Sequence; identical to SEQ ID NO: 34676
  derived and/or modified CDS sequence (wt) from hemagglutinin__InfluenzaA__ACR08530

SEQ ID NO: 34737 - RNA, 1701 nt, Artificial Sequence
  derived and/or modified CDS sequence (wt) from hemagglutinin__InfluenzaA__ACR08531
augaaggcaauacuaguaguucugcuauauacauuugcaaccgcaaaugcagacacauuauguauagguuaucaugcgaacaauucaacagacacuguagacacaguacuagaaaagaauguaacaguaacacacucuguuaaccuucuagaagacaagcauaacgggaaacuaugcaaacuaagagggguagccccauugcauuuggguaaauguaacauugcuggcuggauccugggaaauccagagugugaaucacucuccacagcaagcucaugguccuacauuguggaaacaucuaguucagacaauggaacguguuacccaggagauuucaucgauuaugaggagcuaagagagcaauugagcucagugucaucauuugaaagguuugagauauuccccaagacaaguucauggcccaaucaugacucgaacaaagguguaacggcagcauguccucaugcuggagcaaaaagcuucuacaaaaauuuaauauggcuaguuaaaaaaggaaauucauacccaaagcucagcaaauccuacauuaaugauaaagggaaagaaguccucgugcuauggggcauucaccauccaucuacuagugcugaccaacaaagucucuaucagaaugcagaugcauauguuuuuguggggucaucaagauacagcaagaaguucaagccugaaauagcaauaagacccaaagugagggaucaagaagggagaaugaacuauuacuggacacuaguagagccgggagacaaaauaacauucgaagcaacuggaaaucuagugguaccgagauaugcauucgcaauggaaagaaaugcuggaucugguauuaucauuucagauacaccaguccacgauugcgauacaacuugucagacacccaagggugcuauaaacaccagccucccauuucagaauauacauccgaucacaauuggaaaauguccaaaauauguaaaaagcacaaaauugagacuggccacaggauugaggaaugucccgucuauucaaucuagaggccuauuuggggccauugccgguuucauugaagggggguggacagggaugguagauggaugguacgguuaucaccaucaaaaugagcaggggucaggauaugcagccgaccugaagagcacacagaaugccauugacgaaauuacuaacaaaguaaauucuguuauugaaaagaugaauacacaguucacagcaguagguaaagaguucaaccaccuggaaaaaagaauagagaauuuaaauaaaaaaguugaugaugguuuccuggacauuuggacuuacaaugccgaacuguugguucuauuggaaaaugaaagaacuuuggacuaccacgauucaaaugugaagaacuuauaugaaaagguaagaagccagcuaaaaaacaaugccaaggaaauuggaaacggcugcuuugaauuuuaccacaaaugcgauaacacgugcauggaaagugucaaaaaugggacuuaugacuacccaaaauacucagaggaagcaaaauuaaacagagaagaaauagaugggguaaagcuggaaucaacaaggauuuaccagauuuuggcgaucuauucaacugucgccaguucauugguacugguagucucccugggggcaaucaguuucuggaugugcucuaaugggucucuacaguguagaauauguauuuaa

SEQ ID NO: 34738 - RNA, 1701 nt, Artificial Sequence; identical to SEQ ID NO: 34681
  derived and/or modified CDS sequence (wt) from hemagglutinin__InfluenzaA__ACR08533

SEQ ID NO: 34739 - RNA, 1701 nt, Artificial Sequence; identical to SEQ ID NO: 34737
  derived and/or modified CDS sequence (wt) from hemagglutinin__InfluenzaA__ACR08535

SEQ ID NO: 34740 - RNA, 1701 nt, Artificial Sequence; identical to SEQ ID NO: 34681
  derived and/or modified CDS sequence (wt) from hemagglutinin__InfluenzaA__ACR08536

SEQ ID NO: 34741 - RNA, 1701 nt, Artificial Sequence; identical to SEQ ID NO: 34737
  derived and/or modified CDS sequence (wt) from hemagglutinin__InfluenzaA__ACR08537

SEQ ID NO: 34742 - RNA, 1701 nt, Artificial Sequence; identical to SEQ ID NO: 34737
  derived and/or modified CDS sequence (wt) from hemagglutinin__InfluenzaA__ACR08538

SEQ ID NO: 34743 - RNA, 1701 nt, Artificial Sequence; identical to SEQ ID NO: 34681
  derived and/or modified CDS sequence (wt) from hemagglutinin__InfluenzaA__ACR08539

SEQ ID NO: 34744 - RNA, 1701 nt, Artificial Sequence
  derived and/or modified CDS sequence (wt) from hemagglutinin__InfluenzaA__ACR08540
augaaggcaauacuaguaguucugcuauauacauuugcaaccgcaaaugcagacacauuauguauagguuaucaugcgaacaauucaacagacacuguagacacaguacuagaaaagaauguaacaguaacacacucuguuaaccuucuagaagacaagcauaacgggaaacuaugcaaacuaagagggguagccccauugcauuuggguaaauguaacauugcuggcuggauccugggaaauccagagugugaaucacucuccacagcaagcucaugguccuacauuguggaaacaucuaguucagacaauggaacguguuacccaggagauuucaucgauuaugaggagcuaagagagcaauugagcucagugucaucauuugaaagguuugagauauuccccaagacaaguucauggcccaaucaugacucgaacaaagguguaacggcagcauguccucaugcuggagcaaaaagcuucuacaaaaauuuaauauggcuaguuaaaaaaggaaauucauacccaaagcucagcaaauccuacauuaaugauaaagggaaagaaguccucgugcuauggggcauucaccauccaucuacuagugcugaccaacaaagucucuaucagaaugcagaugcauauguuuuuguggggacaucaagauacagcaagaaguucaagccggaaauagcaauaagacccaaagugagggaucaagaagggagaaugaacuauuacuggacacuaguagagccgggagacaaaauaacauucgaagcaacuggaaaucuagugguaccgagauaugcauucgcaauggaaagaaaugcuggaucugguauuaucauuucagauacaccaguccacgauugcaauacaacuugucagacacccaagggugcuauaaacaccagccucccauuucagaauauacauccgaucacaauuggaaaauguccaaaauauguaaaaagcacaaaauugagacuggccacaggauugaggaaugucccgucuauucaaucuagaggccuauuuggggccauugccgguuucauugaagggggguggacagggaugguagauggaugguacgguuaucaccaucaaaaugagcaagggucaggauaugcagccgaccugaagagcacacagaaugccauugacgagauuacuaacaaaguaaauucuguuauugaaaagaugaauacacaguucacagcaguagguaaagaguucaaccaccuggaaaaaagaauagagaauuuaaauaaaaaaguugaugaugguuuccuggacauuuggacuuacaaugccgaacuguugguucuauuggaaaaugaaagaacuuuggacuaccacgauucaaaugugaagaacuuauaugaaaagguaagaagccaguuaaaaaacaaugccaaggaaauuggaaacggcugcuuugaauuuuaccacaaaugcgauaacacgugcauggaaagugucaaaaaugggacuuaugacuacccaaaauacucagaggaagcaaaauuaaacagagaagaaauagaugggguaaagcuggaaucaacaaggauuuaccagauuuuggcgaucuauucaacugucgccaguucauugguacugguagucucccugggggcaaucaguuucuggaugugcucuaaugggucucuacaguguagaauauguauuuaa

SEQ ID NO: 34745 - RNA, 1701 nt, Artificial Sequence; identical to SEQ ID NO: 34668
  derived and/or modified CDS sequence (wt) from hemagglutinin__InfluenzaA__ACR08542

SEQ ID NO: 34746 - RNA, 1701 nt, Artificial Sequence; identical to SEQ ID NO: 34676
  derived and/or modified CDS sequence (wt) from hemagglutinin__InfluenzaA__ACR08543

SEQ ID NO: 34747 - RNA, 1701 nt, Artificial Sequence
  derived and/or modified CDS sequence (wt) from hemagglutinin__InfluenzaA__ACR08544
augaaggcaauacuaguaguuaugcuauauacauuugcaaccgcaaaugcagacacauuauguauagguuaucaugcgaacaauucaacagacacuguagacacaguacuagaaaagaauguaacaguaacacacucuguuaaccuucuagaagacaagcauaacgggaaacuaugcaaacuaagagggguagccccauugcauuuggguaaauguaacauugcuggcuggauccugggaaauccagagugugaaucacucuccacagcaagcucaugguccuacauuguggaaacaucuaguucagacaauggaacguguuacccaggagauuucaucgauuaugaggagcuaagagagcaauugagcucagugucaucauuugaaagguuugagauauuccccaagacaaguucauggcccaaucaugacucgaacaaagguguaacggcagcauguccucaugcuggagcaaaaagcuucuacaaaaauuuaauauggcuaguuaaaaaaggaaauucauacccaaagcucagcaaauccuacauuaaugauaaagggaaagaaguccucgugcuauggggcauucaccauccaucuacuagugcugaccaacaaagucucuaucagaaugcagaugcauauguuuuuguggggucaucaagauacagcaagaaguucaagccggaaauagcaauaagacccaaagugagggaucaagaagggagaaugaacuauuacuggacacuaguagagccgggagacaaaauaacauucgaagcaacuggaaaucuagugguaccgagauaugcauucgcaauggaaagaaaugcuggaucugguauuaucauuucagauacaccaguccacgauugcaauacaacuugucagacacccaagggugcuauaaacaccagccucccauuucagaauauacauccgaucacaauuggaaaauguccaaaauauguaaaaagcacaaaauugagacuggccacaggauugaggaaugucccgucuauucaaucuagaggccuauuuggggccauugccgguuucauugaagggggguggacagggaugguagauggaugguacgguuaucaccaucaaaaugagcaggggucaggauaugcagccgaccugaagagcacacagaaugccauugacgagauuacuaacaaaguaaauucuguuauugaaaagaugaauacacaguucacagcaguagguaaagaguucaaccaccuggaaaaaagaauagagaauuuaaauaaaaaaguugaugaugguuuccuggacauuuggacuuacaaugccgaacuguugguucuauuggaaaaugaaagaacuuuggacuaccacgauucaaaugugaagaacuuauaugaaaagguaagaagccagcuaaaaaacaaugccaaggaaauuggaaacggcugcuuugaauuuuaccacaaaugcgauaacacgugcauggaaagugucaaaaaugggacuuaugacuacccaaaauacucagaggaagcaaaauuaaacagagaagaaauagaugggguaaagcuggaaucaacaaggauuuaccagauuuuggcgaucuauucaacugucgccaguucauugguacugguagucucccugggggcaaucaguuucuggaugugcucuaaugggucucuacaguguagaauauguauuuaa

SEQ ID NO: 34748 - RNA, 1701 nt, Artificial Sequence; identical to SEQ ID NO: 34737
  derived and/or modified CDS sequence (wt) from hemagglutinin__InfluenzaA__ACR08545

SEQ ID NO: 34749 - RNA, 1701 nt, Artificial Sequence
  derived and/or modified CDS sequence (wt) from hemagglutinin__InfluenzaA__ACR08546
augaaggcaauacuaguaguucugcuauauacauuugcaaccgcaaaugcagacacauuauguauagguuaucaugcgaacaauucaacagacacuguagacacaguacuagaaaagaauguaacaguaacacacucuguuaaccuucuagaagacaagcauaacgggaaacuaugcaaacuaagagggguagccccauugcauuuggguaaauguaacauugcuggcuggauccugggaaauccagagugugaaucacucuccacagcaagcucaugguccuacauuguggaaacaucuaguucagacaauggaacguguuacccaggagauuucaucgauuaugaggagcuaagagagcaauugagcucagugucaucauuugaaagguuugagauauuccccaagacaaguucauggcccaaucaugacucgaacaaagguguaacggcagcauguccucaugcuggagcaaaaagcuucuacaaaaauuuaauauggcuaguuaaaaaaggaaauucauacccaaagcucagcaaauccuacauuaaugauaaagggaaagaaguccucgugcuauggggcauucaccauccaucuacuagugcugaccaacaaagucucuaucagaaugcagaugcauauguuuuuguggggucaucaagauacagcaagaaguucaagccggaaauagcaauaagacccaaagugagggaucaagaagggagaaugaacuauuacuggacacuaguagagccgggagacaaaauaacauucgaagcaacuggaaaucuagugguaccgagauaugcauucgcaauggaaagaaaugcuggaucugguauuaucauuucagauacaccaguccacgauugcaauacaacuugucagacacccaagggugcuauaaacaccagccucccauuucagaauauacauccgaucacaauuggaaaauguccaaaauauguaaaaagcacaaaauugagacuggccacaggauugaggaaugucccgucuauucaaucuagaggccuauuuggggccauugccgguuucauugaagggggguggacagggaugguagauggaugguacgguuaucaccaucaaaaugagcaggggucaggauaugcagccgaccugaagagcacacagaaugccauugacgaaauuacuaacaaaguaaauucuguuauugaaaagaugaauacacaguucacagcaguagguaaagaguucaaccaccuggaaaaaagaauagagaauuuaaauaaaaaaguugaugaugguuuccuggacauuuggacuuacaaugccgaacuguugguucuauuggaaaaugaaagaacuuuggacuaccacgauucaaaugugaagaacuuauaugaaaaggugagaagccagcuaaaaaacaaugccaaggaaauuggaaacggcugcuuugaauuuuaccacaaaugcgauaacacgugcauggaaagugucaaaaaugggacuuaugacuacccaaaauacucagaggaagcaaaauuaaacagagaagaaauagaugggguaaaacuggaaucaacaaggauuuaccagauuuuggcgaucuauucaacugucgccaguucauugguacugguagucucccugggggcaaucaguuucuggaugugcucuaaugggucucuacaguguagaauauguauuuaa

SEQ ID NO: 34750 - RNA, 1701 nt, Artificial Sequence; identical to SEQ ID NO: 34681
  derived and/or modified CDS sequence (wt) from hemagglutinin__InfluenzaA__ACR08547

SEQ ID NO: 34751 - RNA, 1701 nt, Artificial Sequence; identical to SEQ ID NO: 34737
  derived and/or modified CDS sequence (wt) from hemagglutinin__InfluenzaA__ACR08548

SEQ ID NO: 34752 - RNA, 1701 nt, Artificial Sequence; identical to SEQ ID NO: 34681
  derived and/or modified CDS sequence (wt) from hemagglutinin__InfluenzaA__ACR08549

SEQ ID NO: 34753 - RNA, 1701 nt, Artificial Sequence; identical to SEQ ID NO: 34681
  derived and/or modified CDS sequence (wt) from hemagglutinin__InfluenzaA__ACR08550

SEQ ID NO: 34754 - RNA, 1701 nt, Artificial Sequence; identical to SEQ ID NO: 34681
  derived and/or modified CDS sequence (wt) from hemagglutinin__InfluenzaA__ACR08551

SEQ ID NO: 34755 - RNA, 1701 nt, Artificial Sequence; identical to SEQ ID NO: 34705
  derived and/or modified CDS sequence (wt) from hemagglutinin__InfluenzaA__ACR08552

SEQ ID NO: 34756 - RNA, 1701 nt, Artificial Sequence
  derived and/or modified CDS sequence (wt) from hemagglutinin__InfluenzaA__ACR08553
augaaggcaauacuaguaguuaugcuauauacauuugcaaccgcaaaugcagacacauuauguauagguuaucaugcgaacaauucaacagacacuguagacacaguacuagaaaagaauguaacaguaacacacucuguuaaccuucuagaagacaagcauaacgggaaacuaugcaaacuaagagggguagccccauugcauuuggguaaauguaacauugcuggcuggauccugggaaauccagagugugaaucacucuccacagcaagcucaugguccuacauuguggaaacaucuaguucagacaauggaacguguuacccaggagauuucaucgauuaugaggagcuaagagagcaauugagcucagugucaucauuugaaagguuugagauauuccccaagacaaguucauggcccaaucaugacucgaacaaagguguaacggcagcauguccucaugcuggagcaaaaagcuucuacaaaaauuuaauauggcuaguuaaaaaaggaaauucauacccaaagcucagcaaauccuacauuaaugauaaagggaaagaaguccucgugcuauggggcauucaccauccaucuacuagugcugaccaacaaagucucuaucagaaugcagaugcauauguuuuuguggggucaucaagauacagcaagaaguucaagccggaaauagcaauaagacccaaagugagggaucaagaagggagaaugaacuauuacuggacacuaguagagccgggagacaaaauaacauucgaagcaacuggaaaucuagugguaccgagauaugcauucgcaauggaaagaaaugcuggaucugguauuaucauuucagauacaccaguucacgauugcaauacaacuugucagacacccaaaggugcuauaaacaccagccucccauuucagaauauacauccgaucacaauuggaaaauguccaaaauauguaaaaagcacaaaauugagacuggccacaggauugaggaaugucccgucuauucaaucuagaggccuauuuggggccauugccgguuucauugaagggggguggacagggaugguagauggaugguacgguuaucaccaucaaaaugagcaggggucaggauaugcagccgaccugaagagcacacagaaugccauugacgagauuacuaacaaaguaaauucuguuauugaaaagaugaauacacaguucacagcaguagguaaagaguucaaccaccuggaaaaaagaauagagaauuuaaauaaaaaaguugaugaugguuuccuggacauuuggacuuacaaugccgaacuguugguucuauuggaaaaugaaagaacuuuggacuaccacgauucaaaugugaagaacuuauaugaaaagguaagaagccagcuaaaaaacaaugccaaggaaauuggaaacggcugcuuugaauuuuaccacaaaugcgauaacacgugcauggaaagugucaaaaaugggacuuaugacuacccaaaauacucagaggaagcaaaauuaaacagagaagaaauagaugggguaaagcuggaaucaacaaggauuuaccagauuuuggcgaucuauucaacugucgccaguucauugguacugguagucucccugggggcaaucaguuucuggaugugcucuaaugggucucuacaguguagaauauguauuuaa

SEQ ID NO: 34757 - RNA, 1701 nt, Artificial Sequence; identical to SEQ ID NO: 34747
  derived and/or modified CDS sequence (wt) from hemagglutinin__InfluenzaA__ACR08554

SEQ ID NO: 34758 - RNA, 1701 nt, Artificial Sequence
  derived and/or modified CDS sequence (wt) from hemagglutinin__InfluenzaA__ACR09365
augaaggcaauacuaguaguucugcuauauacauuugcaaccgcaaaugcagacacauuauguauagguuaucaugcgaacaauucaacagacacuguagacacaguacuagaaaagaauguaacaguaacacacucuguuaaccuucuagaagacaagcauaacgggaaacuaugcaaacuaagagggguagccccauugcauuuggguaaauguaacauugcuggcuggauccugggaaauccagagugugaaucacucuccacagcaagcucaugguccuacauuguggaaacaucuaguucagacaauggaacguguuacccaggagauuucaucgauuaugaggagcuaagagagcaauugagcucagugucaucauuugaaagguuugagauauuccccaagacaaguucauggcccaaucaugacucgaacaaagguguaacggcagcauguccucaugcuggagcaaaaagcuucuacaaaaauuuaauauggcuaguuaaaaaaggaaauucauacccaaagcucagcaaauccuacauuaaugauaaagggaaagaaguccucgugcuauggggcauucaccauccaucuacuagugcugaccaacaaagucucuaucagaaugcagaugcauauguuuuuguggggucaucaagauauagcaagaaguucaagccggaaauagcaauaagacccaaagugagggaucaagaagggagaaugaacuauuacuggacacuaguagagccgggagacaaaauaacauucgaagcaacuggaaaucuagugguaccgagauaugcauucgcaauggaaagaaaugcuggaucugguauuaucauuucagauacaccaguccacgauugcaauacaacuugucagacacccaagggugcuauaaacaccagccucccauuucagaauauacauccgaucacaauuggaaaauguccaaaauauguaaaaagcacaaaauugagacuggccacaggauugaggaaugucccgucuauucaaucuagaggccuauuuggggccauugccgguuucauugaagggggguggacagggaugguagauggaugguacgguuaucaccaucaaaaugagcaggggucaggauaugcagccgaccugaagagcacacagaaugccauugacgagauuacuaacaaaguaaauucuguuauugaaaagaugaauacacaguucacagcaguagguaaagaguucaaccaccuggaaaaaagaauagagaauuuaaauaaaaaaguugaugaugguuuccuggacauuuggacuuacaaugccgaacuguugguucuauuggaaaaugaaagaacuuuggacuaccacgauucgaaugugaagaacuuauaugaaaagguaagaagccagcuaaaaaacaaugccaaggaaauuggaaacggcugcuuugaauuuuaccacaaaugcgauaacacgugcauggaaagugucaaaaaugggacuuaugacuacccaaaauacucagaggaagcaaaauuaaacagagaagaaauagaugggguaaagcuggaaucaacaaggauuuaccagauuuuggcgaucuauucaacugucgccaguucauugguacugguagucucccugggggcaaucaguuucuggaugugcucuaaugggucucuacaguguagaauauguauuuaa

SEQ ID NO: 34759 - RNA, 1701 nt, Artificial Sequence; identical to SEQ ID NO: 34676
  derived and/or modified CDS sequence (wt) from hemagglutinin__InfluenzaA__ACR09366

SEQ ID NO: 34760 - RNA, 1701 nt, Artificial Sequence; identical to SEQ ID NO: 34676
  derived and/or modified CDS sequence (wt) from hemagglutinin__InfluenzaA__ACR09367

SEQ ID NO: 34761 - RNA, 1701 nt, Artificial Sequence
  derived and/or modified CDS sequence (wt) from hemagglutinin__InfluenzaA__ACR09368
augaaggcaauacuaguaguucugcuauauacauuugcaaccgcaaaugcagacacauuauguauagguuaucaugcgaacaauucaacagacacuguagacacaguacuagaaaagaauguaacaguaacacacucuguuaaccuucuagaagacaagcauaacgggaaacuaugcaaacuaagagggguagccccauugcauuuggguaaauguaacauugcuggcuggauccugggaaauccagagugugaaucacucuccacagcaagcucaugguccuacauuguggaaacaucuaguucagacaauggaacguguuacccaggagauuucaucgauuaugaggagcuaagagagcaauugagcucagugucaucauuugaaagguuugagauauuccccaagacaaguucauggcccaaucaugacucgaacaaagguguaacggcagcauguccucaugcuggagcaaaaagcuucuacaaaaauuuaauauggcuaguuaaaaaaggaaauucauacccaaagcucagcaaauccuacauuaaugauaaagggaaagaaguccucgugcuauggggcauucaccauccaucuacuagugcugaccaacaaagucucuaucagaaugcagaugcauauguuuuuguggggucaucaagauacagcaagaaguucaagccggaaauagcaauaagacccaaagugagggaucaagaagggagaaugaacuauuacuggacacuaguagagccgggagacaaaauaacauucgaagcaacuggaaaucuagugguaccgagauaugcauucgcaauggaaagaaaugcuggaucugguauuaucauuucagauacaccaguccacgauugcaauacaacuugucagacacccaagggugcuauaaacaccagccucccauuucagaauauacauccgaucacaauuggaaaauguccaaaauauguaaaaagcacaaaauugagacuggccacaggauugaggaaugucccgucuauucaaucuagaggccuauuuggggccauugccgguuucauugaagggggguggacagggaugguagauggaugguacgguuaucaccaucaaaaugagcaggggucaggauaugcagccgaccugaagagcacacagaaugccauugacgaaauuacuaacaaaguaaauucuguuauugaaaagaugaauacacaauucacagcaguagguaaagaguucaaccaccuggaaaaaagaauagagaauuuaaauaaaaaaguugaugaugguuuccuggacauuuggacuuacaaugccgaacuguugguucuauuggaaaaugaaagaacuuuggacuaccacgauucaaaugugaagaacuuauaugaaaagguaagaagccagcuaaaaaacaaugccaaggaaauuggaaacggcugcuuugaauuuuaccacaaaugcgauaacacgugcauggaaagugucaaaaaugggacuuaugacuacccaaaauacucagaggaagcaaaauuaaacagagaagaaauagaugggguaaagcuggaaucaacaaggauuuaccagauuuuggcgaucuauucaacugucgccaguucauugguacugguagucucccugggggcaaucaguuucuggaugugcucuaaugggucucuacaguguagaauauguauuuaa

SEQ ID NO: 34762 - RNA, 1701 nt, Artificial Sequence; identical to SEQ ID NO: 34717
  derived and/or modified CDS sequence (wt) from hemagglutinin__InfluenzaA__ACR09369

SEQ ID NO: 34763 - RNA, 1701 nt, Artificial Sequence; identical to SEQ ID NO: 34705
  derived and/or modified CDS sequence (wt) from hemagglutinin__InfluenzaA__ACR09370

SEQ ID NO: 34764 - RNA, 1701 nt, Artificial Sequence; identical to SEQ ID NO: 34705
  derived and/or modified CDS sequence (wt) from hemagglutinin__InfluenzaA__ACR09371

SEQ ID NO: 34765 - RNA, 1701 nt, Artificial Sequence
  derived and/or modified CDS sequence (wt) from hemagglutinin__InfluenzaA__ACR09373
augaaggcaauacuaguaguucugcuauauacauuugcaaccgcaaaugcagacacauuauguauagguuaucaugcgaacaauucaacagacacuguagacacaguacuagaaaagaauguaacaguaacacacucuguuaaccuucuagaagacaagcauaacgggaaacuaugcaaacuaagagggguagccccauugcauuuggguaaauguaacauugcuggcuggauccugggaaauccagagugugaaucacucuccacagcaagcucaugguccuacauuguggaaacaucuaguucagacaauggaacguguuacccaggagauuucaucgauuaugaggagcuaagagagcaauugagcucagugucaucauuugaaagguuugagauauuccccaagacaaguucauggcccaaucaugacucgaacaaagguguaacggcagcauguccucaugcuggagcaaaaagcuucuacaaaaauuuaauauggcuaguuaaaaaaggaaauucauacccaaagcucagcaaauccuacauuaaugauaaagggaaagaaguccucgugcuauggggcauucaccauccaucuacuagugcugaccaacaaagucucuaucagaaugcagaugcauauguuuuuguggggucaucaagauacagcaagaaguucaagccggaaauagcaauaagacccaaagugagggaucaagaagggagaaugaacuauuacuggacacuaguagagccgggagacaaaauaacauucgaagcaacuggaaaucuagugguaccgagauaugcauucgcaauggaaagaaaugcuggaucugguauuaucauuucagauacaccaguccacgauugcaauacaacuugucagacacccaagggugcuauaaacaccagccucccauuucagaauauacauccgaucacaauuggaaaauguccaaaauauguaaaaagcacaaaauugagacuggccacaggauugaggaaugucccgucuauucaaucuagaggccuauuuggggccauugccgguuucauugaagggggguggacagggaugguagauggaugguacgguuaucaccaucaaaaugagcaggggucaggauaugcagccgaccugaagagcacacagaaugccauugacgagauuacuaacaaaguaaauucuguuauugaaaagaugaauacacaguucacagcaguagguaaagaguucaaccaccuggaaaaaagaauagagaauuuaaauaaaaaaguugaugaugguuuucuggacauuuggacuuacaaugccgaacuguugguucuauuggaaaaugaaagaacuuuggacuaccacgauucaaaugugaagaacuuauaugaaaagguaagaagccaguuaaaaaacaaugccaaggaaauuggaaacggcugcuuugaauuuuaccacaaaugcgauaacacgugcauggaaagugucaaaaaugggacuuaugacuacccaaaauacucagaggaagcaaaauuaaacagagaagaaauagaugggguaaagcuggaaucaacaaggauuuaccagauuuuggcgaucuauucaacugucgccaguucauugguacugguagucucccugggggcaaucaguuucuggaugugcucuaaugggucucuacaguguagaauauguauuuaa

SEQ ID NO: 34766 - RNA, 1701 nt, Artificial Sequence; identical to SEQ ID NO: 34705
  derived and/or modified CDS sequence (wt) from hemagglutinin__InfluenzaA__ACR09374

SEQ ID NO: 34767 - RNA, 1701 nt, Artificial Sequence
  derived and/or modified CDS sequence (wt) from hemagglutinin__InfluenzaA__ACR09375
augaaggcaauacuaguaguucugcuauauacauuugcaaccgcaaaugcagacacauuauguauagguuaucaugcgaacaauucaacagacacuguagacacaguacuagaaaagaauguaacaguaacacacucuguuaaccuucuagaagacaagcauaacgggaaacuaugcaaacuaagagggguagccccauugcauuuggguaaauguaacauugcuggcuggauccugggaaauccagagugugaaucacucuccacagcaagcucaugguccuacauuguggaaacaucuaguucagacaauggaacguguuacccaggagauuucaucgauuaugaggagcuaagagagcaauugagcucagugucaucauuugaaagguuugagauauuccccaagacaaguucauggcccaaucaugacucgaacaaagguguaacggcagcauguccucaugcuggagcaaaaagcuucuacaaaaauuuaauauggcuaguuaaaaaaggaaauucauacccaaagcucagcaaauccuacauuaaugauaaagggaaagaaguccucgugcuauggggcauucaccauccaucuacuagugcugaccaacaaagucucuaucagaaugcagaugcauauguuuuuguggggucaucaagauacagcaagaaguucaagccggaaauagcaauaagacccaaagugagggaucaagaagggagaaugaacuauuacuggacacuaguagagccgggagacaaaauaacauucgaagcaacuggaaaucuagugguaccgagauaugcauucgcaauggaaaaaaaugcuggaucugguauuaucauuucagauacaccaguccacgauugcaauacaacuugucagacacccaagggugcuauaaacaccagccucccauuucagaauauacauccgaucacaauuggaaaauguccaaaauauguaaaaagcacaaaauugagacuggccacaggauugaggaaugucccgucuauucaaucuagaggccuauuuggggccauugccgguuucauugaagggggguggacagggaugguagauggaugguacgguuaucaccaucaaaaugagcaggggucaggauaugcagccgaccugaagagcacacagaaugccauugacgagauuacuaacaaaguaaauucuguuauugaaaagaugaauacacaguucacagcaguagguaaagaguucaaccaccuggaaaaaagaauagagaauuuaaauaaaaaaguugaugaugguuuccuggacauuuggacuuacaaugccgaacuguugguucuauuggaaaaugaaagaacuuuggacuaccacgauucaaaugugaagaacuuauaugaaaagguaagaagccaguuaaaaaacaaugccaaggaaauuggaaacggcugcuuugaauuuuaccacaaaugcgauaacacgugcauggaaagugucaaaaaugggacuuaugacuacccaaaauacucagaggaagcaaaauuaaacagagaagaaauagaugggguaaagcuggaaucaacaaggauuuaccagauuuuggcgaucuauucaacugucgccaguucauugguacugguagucucccugggggcaaucaguuucuggaugugcucuaaugggucucuacaguguagaauauguauuuaa

SEQ ID NO: 34768 - RNA, 1701 nt, Artificial Sequence; identical to SEQ ID NO: 34717
  derived and/or modified CDS sequence (wt) from hemagglutinin__InfluenzaA__ACR09376

SEQ ID NO: 34769 - RNA, 1701 nt, Artificial Sequence; identical to SEQ ID NO: 34676
  derived and/or modified CDS sequence (wt) from hemagglutinin__InfluenzaA__ACR09377

SEQ ID NO: 34770 - RNA, 1701 nt, Artificial Sequence; identical to SEQ ID NO: 34676
  derived and/or modified CDS sequence (wt) from hemagglutinin__InfluenzaA__ACR09395

SEQ ID NO: 34771 - RNA, 1701 nt, Artificial Sequence; identical to SEQ ID NO: 34676
  derived and/or modified CDS sequence (wt) from hemagglutinin__InfluenzaA__ACR09396

SEQ ID NO: 34772 - RNA, 1701 nt, Artificial Sequence
  derived and/or modified CDS sequence (wt) from hemagglutinin__InfluenzaA__ACR10186
augaaggcaauacuaguaguucugcuauauacauuugcaaccgcaaaugcagacacauuauguauagguuaucaugcgaacaauucaacagacacuguagacacaguacuagaaaagaauguaacaguaacacacucuguuaaccuucuagaagacaagcauaacgggaaacuaugcaaacuaagagggguagccccauugcauuuggguaaauguaacauugcuggcuggauccugggaaauccagagugugaaucacucuccacagcaagcucaugguccuacauuguggaaacaucuaguucagacaauggaacguguuacccaggagauuucaucgauuaugaggagcuaagagagcaauugagcucagugucaucauuugaaagguuugagauauuccccaagacaaguucauggcccaaucaugacucgaacaaagguguaacggcagcauguccucaugcuggagcaaaaagcuucuacaaaaauuuaauauggcuaguuaaaaaaggaaauucauacccaaagcucagcaaauccuacauuaaugauaaagggaaagaaguccucgugcuauggggcauucaccauccaucuacuagugcugaccaacaaagucucuaucagaaugcagaugcauauguuuuuguggggacaucaagauacagcaagaaguucaagccggaaauagcaauaagacccaaagugagggaucaagaagggagaaugaacuauuacuggacacuaguagagccgggagacaaaauaacauucgaagcaacuggaaaucuagugguaccgagauaugcauucgcaauggaaagaaaugcuggaucugguauuaucauuucagauacaccaguccacgauugcaauacaacuugucagacacccaagggugcuauaaacaccagccucccauuucagaauauacauccgaucacaauuggaaaauguccaaaauauguaaaaagcacaaaauugagacuggccacaggauugaggaaugucccgucuauucaaucuagaggccuauuuggggccauugccgguuucauugaagggggguggacagggaugguagauggaugguacgguuaucaccaucaaaaugagcaggggucaggauaugcagccgaccugaagagcacacagaaugccauugacgagauuacuaacaaaguaaauucuguuauugaaaagaugaauacacaguucacagcaguagguaaagaguucaaccaccuggaaaaaagaauagagaauuuaaauaaaaaaauugaugaugguuuccuggacauuuggacuuacaaugccgaacuguugguucuauuggaaaaugaaagaacuuuggacuaccacgauucaaaugugaagaacuuauaugaaaagguaagaagccaguuaaaaaacaaugccaaggaaauuggaaacggcugcuuugaauuuuaccacaaaugcgauaacacgugcauggaaagugucaaaaaugggacuuaugacuacccaaaauacucagaggaagcaaaauuaaacagagaagaaauagaugggguaaagcuggaaucaacaaggauuuaccagauuuuggcgaucuauucaacugucgccaguucauugguacugguagucucccugggggcaaucaguuucuggaugugcucuaaugggucucuacaguguagaauauguauuuaa

SEQ ID NO: 34773 - RNA, 1701 nt, Artificial Sequence; identical to SEQ ID NO: 34772
  derived and/or modified CDS sequence (wt) from hemagglutinin__InfluenzaA__ACR10222

SEQ ID NO: 34774 - RNA, 1701 nt, Artificial Sequence
  derived and/or modified CDS sequence (wt) from hemagglutinin__InfluenzaA__ACR10223
augaaggcaauacuaguaguucugcuauauacauuuacaaccgcaaaugcagacacauuauguauagguuaucaugcgaacaauucaacagacacuguagacacaguacuagaaaagaauguaacaguaacacacucuguuaaccuucuagaagacaagcauaacgggaaacuaugcaaacuaagagggguagccccauugcauuuggguaaauguaacauugcuggcuggauccugggaaauccagagugugaaucacucuccacagcaagcucaugguccuacauuguggaaacaucuaguucagacaauggaacguguuacccaggagauuucaucgauuaugaggagcuaagagagcaauugagcucagugucaucauuugaaagguuugagauauuccccaagacaaguucauggcccaaucaugacucgaacaaagguguaacggcagcauguccucaugcuggagcaaaaagcuucuacaaaaauuuaauauggcuaguuaaaaaaggaaauucauacccaaagcucagcaaauccuacauuaaugauaaagggaaagaaguccucgugcuauggggcauucaccauccaucuacuagugcugaccaacaaagucucuaucagaaugcagaugcauauguuuuuguggggucaucaagauacagcaagaaguucaagccggaaauagcaauaagacccaaagugagggaucaagaagggagaaugaacuauuacuggacacuaguagagccgggagacaaaauaacauucgaagcaacuggaaaucuagugguaccgagauaugcauucgcaauggaaagaaaugcuggaucugguauuaucauuucagauacaccaguccacgauugcaauacaacuugucagacacccaagggugcuauaaacaccagccucccauuucagaauauacauccgaucacaauuggaaaauguccaaaauauguaaaaagcacaaaauugagacuggccacaggauugaggaaugucccgucuauucaaucuagaggccuauuuggggccauugccgguuucauugaagggggguggacagggaugguagauggaugguacgguuaucaccaucaaaaugagcaggggucaggauaugcagccgaccugaagagcacacagaaugccauugacgagauuacuaacaaaguaaauucuguuauugaaaagaugaauacacaguucacagcaguagguaaagaguucaaccaccuggaaaaaagaauagagaauuuaaauaaaaaaguugaugaugguuuccuggacauuuggacuuacaaugccgaacuguugguucuauuggaaaaugaaagaacuuuggacuaccacgauucaaaugugaagaacuuauaugaaaagguaagaagccagcuaaaaaacaaugccaaggaaauuggaaacggcugcuuugaauuuuaccacaaaugcgauaacacgugcauggaaagugucaaaaaugggacuuaugacuacccaaaauacucagaggaagcaaaauuaaacagagaagaaauagaugggguaaagcuggaaucaacaaggauuuaccagauuuuggcgaucuauucaacugucgccaguucauugguacugguagucucccugggggcaaucaguuucuggaugugcucuaaugggucucuacaguguagaauauguauuuaa

SEQ ID NO: 34775 - RNA, 1701 nt, Artificial Sequence
  derived and/or modified CDS sequence (wt) from hemagglutinin__InfluenzaA__ACR15183
augaagacuaucauugcuuugagcuacauucuaugucugguuuucgcucaaaaacuucccggaaaugacaacagcacggcaacgcugugccuugggcaccaugcaguaccaaacggaacgauagugaaaacaaucacgaaugaccaaauugaaguuacuaaugcuacugagcugguucagaguuccucaacagguggaauaugcgacaguccucaucagauccuugauggagaaaacugcacacuaauagaugcucuauugggagacccucagugugauggcuuccaaaauaagaaaugggaccuuuuuguugaacgcagcaaagccuacagcaacuguuacccuuaugaugugccggauuaugccucccuuaggucacuaguugccucaucuggcacacuggaguuuaacaaugaaagcuucaauuggacgggagucacucaaaauggaacaagcucugcuugcaaaaggggaucugauaacaguuucuuuaguagauugaauugguugacccacuuaaaauucaaauacccagcauugaacgugacuaugccaaacaaugaaaaauuugacaaauuguacauuugggggguucaccacccggguacggacaaugaccaaaucuucccguaugcucaagcaucaggaagaaucacagucucuaccaaaagaagccaacaaacuguaaucccgaauaucggaucuagacccagaguaaggaauauccccagcagaauaagcaucuauuggacaauaguaaaaccgggagacauacuuuugauuaacagcacagggaaucuaauugcuccuagggguuacuucaaaauacgaagugggaaaagcucaauaaugagaucagaugcacccaucggcaaaugcaauucugaaugcaucacuccaaauggaagcauucccaaugacaaaccauuucaaaauguaaacaggaucacauauggggccugucccagauauguuaagcagaacacccugaaauuggcaacagggaugcgaaauguaccagagaaacaaacuagaggcauauuuggcgcaaucgcggguuucauagaaaaugguugggagggaaugguggaugguugguacgguuucaggcaucaaaauucugagggaauaggacaagcagcagaucucaaaagcacucaagcagcaaucaaucaaaucaaugggaagcugaauagguugaucgggaaaaccaacgagaaauuccaucagauugaaaaagaauucucagaaguagaagggagaauucaggaccucgagaaauauguugaggacacuaaaauagaucucuggucauacaacgcggagcuucuuguugcccuggagaaccaacauacaauugaucuaacugacucagaaaugaacaaacuguuugaaagaacaaagaagcaacugagggaaaaugcugaggauaugggcaaugguuguuucaaaauauaccacaaaugugacaaugccugcauaggaucaaucagaaauggaacuuaugaccaugauguauacagagaugaagcauuaaacaaccgguuccagaucaaaggcguugagcugaagucaggcuacaaagauuggauccuauggauuuccuuugccauaucauguuuuuugcuuuguguugcuuuguugggguucaucaugugggccugccaaaaaggcaacauuaggugcaacauuugcauuuaa

SEQ ID NO: 34776 - RNA, 1698 nt, Artificial Sequence
  derived and/or modified CDS sequence (wt) from hemagglutinin__InfluenzaA__ACR15194
augaaaguaaaacuacugguccuguuaugcacauuuacagcuacauaugcagacacaauauguauaggcuaccaugcuaacaacucgaccgacacuguugacacaguacuugaaaagaaugugacagugacacacucugucaaccugcuugagaacagucauaauggaaaacuaugucuauuaaaaggaauagccccacuacaauuggguaauugcagcguugccggguggaucuuaggaaacccagaaugcgaauuacugauuuccaaggagucaugguccuacauuguagaaaaaccaaauccugagaauggaacauguuacccagggcauuucgcugacuaugaggaacugagggagcaauugaguucaguaucuucauuugagagguucgaaauauuccccaaagaaagcucauggcccaaccacaccguaaccggagugucagcaucaugcucccauaauggggaaagcaguuuuuacagaaauuugcuauggcugacggggaagaaugguuuguacccaaaccugagcaaguccuaugcaaacaacaaagaaaaagaaguccuuguacuaugggguguucaucacccgccaaacauagguaaccaaaaggcccucuaucauacagaaaaugcuuaugucucuguagugucuucacauuauagcagaaaauucaccccagaaauagccaaaagacccaaaguaagagaucaagaaggaagaaucaacuacuacuggacucugcuugaacccggggauacaauaauauuugaggcaaauggaaaucuaauagcgccaagauaugcuuucgcacugaguagaggccuuggaucaggaaucaucaacucaaaugcaccaauggauaaaugugaugcgaagugccaaacaccucagggagcuauaaacagcagucuuccuuuccagaacguacacccagucacaauaggagaguguccaaaguaugucaggagugcaaaauuaaggaugguuacaggacuaaggaacaucccauccauucaauccagagguuuguuuggagccauugccgguuucauugaagggggguggacuggaaugguagaugguugguaugguuaucaucaucagaaugagcaaggaucuggcuaugcugcagaucaaaaaagcacacaaaaugccauuaaugggauuacaaacaaggugaauucuguaauugagaaaaugaacacucaauucacagcagugggcaaagaauucaacaaauuggaaagaaggauggaaaacuugaauaaaaaaguugaugaugguuuuauagacauuuggacauauaaugcagaacuguugguuuuacuggaaaaugaaaggacuuuggauuuccaugacuccaaugugaagaaucuguaugagaaaguaaaaagccaguuaaagaauaaugcuaaagaaauaggaaauagguguuuugaauucuaucacaaguguaacgaugaaugcauggagaguguaaagaauggaacuuaugacuauccaaaauauuccgaagaaucaaaguuaaacagggagaaaauugauggagugaaauuggaaucaaugggagucuaucagauucuggcgaucuacucaacagucgccaguucucugguucuuuuggucucccugggggcaaucagcuucuggauguguuccaaugggucuuugcaguguagaauaugcaucuaa

SEQ ID NO: 34777 - RNA, 1698 nt, Artificial Sequence
  derived and/or modified CDS sequence (wt) from hemagglutinin__InfluenzaA__ACR15216
augaaagcaaaacuacugguccuguuauguacauuuacagcuacauacgcagacacaauauguauaggcuaccaugccaacaacucaaccgacacuguugacacaguacuugagaagaaugugacagugacacacucugucaaccuacuugaggacagucacaauggaaaacuaugucuacuaaaaggaauagccccacuacaauuggguaauugcagcguugccggauggaucuuaggaaacccagaaugcgaauuacugauuuccaaggaaucaugguccuacauuguagaaacaccaaaucccgagaauggaacauguuacccaggguauuucgccgacuaugaggaacugagggagcaauugaguucaguaucuucauuugagagauucgaaauauuccccaaaggaagcucauggcccaaccacaccgugaccggaguaucagcaucaugcucccauaaugggaaaagcaguuuuuacagaaauuugcuauggcugacggggaaaaaugguuuguacccaaaccugagcauguccuauguaaacaacaaagagaaagaaguccuugugcuaugggguguucaucacccaccuaacauagggaaccaaagggcccucuaccauacagaaaaugcuuaugucucuguagugucuucacauuauagcagaagauucaccccagaaauagccaaaagacccaaaguaagagaucaggaaggaagaaucaacuacuacuggacucugcuggaacccggggacacaauaauauuugaggcaaauggaaaucuaauagcgccaugguaugcuuucgcacugaguagaggcuuuggaucaggaaucaucaccucaaaugcaccaaugggugaaugugaugcgaagugucaaacaccucagggagcuauaaacaguagucuuccuuuccagaauguacacccaguuacaauaggagaguguccaaaguaugucaggagugcaaaauuaaggaugguuacaggacuaaggaacaucccauccauucaauccagagguuuguuuggagccauugccgguuucauugaaggaggguggacuggaaugguagaugggugguaugguuaucaucaucagaaugagcaaggaucuggcuaugcugcagaucaaaaaagcacacaaaaugccauuaacgggauuacaaacaaggugaauucuguaauugagaaaaugaacacucaauucacagcugugggcaaagaauucaacaaauuagaaagaaggauggaaaacuuaaauaaaaaaguugaugauggguuucuagacauuuggacauauaaugcagaauuguugguucuacuggaaaaugaaaggacuuuggauuuucaugacuccaaugugaagaaucuguaugagaaaguaaaaagccaauuaaagaauaaugccaaagaaauaggaaacggguguuuugaauucuaucacaaguguaacaaugaaugcauggaaagugugaaaaauggaacuuaugacuauccaaaauauuccgaagaaucaaaguuaaacagggagaaaauugauggaguaaaauuggaaucaaugggagucuaucagauucuggcgaucuacucaacugucgccaguucccugguucuuuuggucucccugggggcaaucagcuucuggauguguuccaaugggucuuugcaguguagaauaugcaucuga

SEQ ID NO: 34778 - RNA, 1701 nt, Artificial Sequence
  derived and/or modified CDS sequence (wt) from hemagglutinin__InfluenzaA__ACR15227
augaagacuaucauugcuuugagcuacauucuaugucugguuuucgcucaaaaacuucccggaaaugacaacagcacggcaacgcugugccuugggcaccaugcaguaccaaacggaacgauagugaaaacaaucacgaaugaccaaauugaaguuacuaaugcuacugagcugguucagaguuccucaacagguggaauaugcgacaguccucaucagauccuugauggagaaaacugcacacuaauagaugcucuauugggagacccucagugugauggcuuccaaaauaagaaaugggaccuuuuuguugaacgcagcaaagccuacagcaacuguuacccuuaugaugugccggauuaugccucccuuaggucacuaguugccucauccggcacacuggaguuuaacaaugaaagcuucaauuggacuggagucacucagaauggaacaagcucugcuugccaaaggagaucuaauaaaaguuucuuuaguagauugaauugguugacccacuuaaaauucaaauacccagcauugaacgugacuaugccaaacaaugaaaaauuugacaaauuguacauuugggggguucaccacccggguacggacaaugaccaaaucagccuauaugcucaaacaucaggaagaaucacagucucuaccaaaagaagccaacaaacuguaaucccgaauaucggaucuagacccaggguaagggauguccccagcagaauaagcaucuauuggacaauaguaaaaccgggagacauacuuuugauuaacagcacagggaaucuaauugcuccucgggguuacuucaaaauacgaagugggaaaagcucaauaaugagaucagaugcacccauuggcaaaugcaauucugaaugcaucacuccaaauggaagcauucccaaugacaaaccauuucaaaauguaaacaggaucacauauggggccugccccagauauguuaagcaaaacacucugaaauuggcaacagggaugcgaaauguaccagagagacaaacuagaggcauauuuggcgcaaucgcggguuucauagaaaaugguugggagggaaugauggacgguugguacgguuucaggcaucaaaauucugagggcacaggacaagcagcagaucucaaaagcacucaagcagcaaucaaccaaaucaaugggaaacugaauagguuaaucgggaaaacaaacgagaaauuccaucagauugaaaaagaauucucagaaguagaagggagaauucaggaccucgagaaauauguugaggacacuaaaauagaucucuggucauacaacgcggagcuucuuguugcccuggagaaccaacauacaauugaucuaacugacucagaaaugaacaaacuguuugaaagaacaaagaagcaacugagggaaaaugcugaggauaugggcaaugguuguuucaaaauauaccacaaaugugacaaugccugcauagggucaaucagaaauggaacuuaugaccaugauguauacagagaugaagcauuaaacaaccgguuccagaucaaagguguugagcugaagucaggauacaaagauuggauccuauggauuuccuuugccauaucauguuuuuugcuuuguguugcuuuguugggguucaucaugugggccugccaaaaaggcaacauuaggugcaacauuugcauuuga

SEQ ID NO: 34779 - RNA, 1698 nt, Artificial Sequence
  derived and/or modified CDS sequence (wt) from hemagglutinin__InfluenzaA__ACR15238
augaaaguaaaacuacugguccuguuaugcacauuuacagcuacauaugcagacacaauauguauaggcuaccaugcuaacaacucgaccgacacuguugacacaguacuugaaaagaaugugacagugacacacucugucaaccugcuugagaacagucacaaugggaaacuaugucuauuaaaaggaauagccccacuacaauuggguaauugcagcguugccggguggaucuuaggaaacccagaaugcgaauuacugauuuccaaggagucaugguccuacauuguagaaaaaccaaauccugagaauggaacauguuacccagggcauuucgcugacuaugaggaacugagggagcaauugaguucaguaucuucauuugagagguucgaaauauuccccaaagaaagcucauggcccaaccacaccguaaccggagugucagcaucaugcucccauaauggggaaagcaguuuuuacagaaauuugcuauggcugacggggaagaaugguuuguacccaaaccugagcaaguccuaugcaaacaacaaagaaaaagaaguccuuguacuaugggguguucaucacccgccaaacauagguguccaaaaggcccucuaucauacagaaaaugcuuaugucucuguagugucuucacauuauagcagaaaauucaccccagaaauagccaaaagacccaaaguaagagaucaagaaggaagaaucaauuacuacuggacucugcuugaacccggggauacaauaauauuugaggcaaauggaaaucuaauagcgccaagauaugcuuucgcacugaguagaggcuuuggaucaggaaucaucaacucaaaugcaccaauggauaaaugugaugcgaagugccaaacaccucagggagcuauaaacagcagucuuccuuuccagaacguacacccagucacaauaggagaguguccaaaguaugucaggagugcaaaauuaaggaugguuacaggacuaaggaacaucccauccauucaauccagagguuuguuuggagccauugccgguuucauugaagggggguggacuggaaugguagaugguugguaugguuaucagcaucagaaugagcaaggaucuggcuaugcugcagaucaaaaaagcacacaaaaugccauuaaugggauuacaaacaaggugaauucuguaauugagaaaaugaacacucaauucacagcagugggcaaagaauucaacaaauuggaaagaaggauggaaaacuugaauaaaaaaguugaugauggguuuauagacauuuggacauauaaugcagaacuguugguucuacuggaaaaugaaaggacuuuggauuuccaugacuccaaugugaagaaucuguaugagaaaguaaaaagccaguuaaagaauaaugcuaaagaaauaggaaauggguguuuugaauucuaucacaaguguaacgaugaaugcauggagaguguaaagaauggaacuuaugacuauccaaaauauuccgaagaaucaaaguuaaacagggagaaaauugauggagugaaauuggaaucaaugggagucuaucagauucuggcgaucuacucaacagucgccaguucucugguucuuuuggucucccugggggcaaucagcuucuggauguguuccaaugggucuuugcaguguagaauaugcaucuaa

SEQ ID NO: 34780 - RNA, 1701 nt, Artificial Sequence
  derived and/or modified CDS sequence (wt) from hemagglutinin__InfluenzaA__ACR15249
augaagacuaucauugcuuugagcuacauucuaugucugguuuucgcucaaaaacuuccuggaaaugacaacagcacggcaacgcugugccuugggcaccaugcaguaccaaacggaacgauagugaaaacaaucacgaaugaccaaauugaaguuacuaaugcuacugagcugguucagaguuccucaacaggugaaauaugcgacaguccucaucagauccuugauggagaaaacugcacacuaauagaugcucuauugggagacccucagugugauggcuuccaaaauaagaaaugggaccuuuuuguugaacgcagcaaagccuacagcaacuguuacccuuaugaugugccggauuaugccucccuuaggucacuaguugccucauccggcacacuggaguuuaacaaugaaagcuucaauuggacuggagucacucaaaacggaacaagcucugcuugcauaaggagaucuaauaacaguuucuuuaguagauugaauugguugacccacucaaaauucaaauacccagcauugaacgugacuaugccaaacaaugaaaaauuugacaaauuguacauuugggggguucaccacccggguacggacaaugaccaaaucuuccuguaugcucaagcaucaggaagaaucacagucucuaccaaaagaagccaacaaacuguaaucccgaauaucggaucuagacccagaguaaggaauaucccuagcagaauaagcaucuauuggacaauaguaaaaccgggagacauacuuuugauuaacagcacagggaaucuaauugcuccuagggguuacuucaaaauacgaagugggaaaagcucaauaaugagaucagaugcacccauuggcaaaugcaauucugaaugcaucacuccaaauggaagcauucccaaugacaaaccauuccaaaauguaaacaggaucacauacggggccugucccagauauguuaagcaaaacacucugaaauuggcaacagggaugcgaaauguaccagagaaacaaacuagaggcauauuuggcgcaaucgcggguuucauagaaaaugguugggagggaaugguggaugguugguacgguuucaggcaucaaaauucugagggaauaggacaagcagcagaucucaaaagcacucaagcagcaaucgaucaaaucaaugggaagcugaauagguugaucgggaaaaccaacgagaaauuccaucagauugaaaaagaauucucagaagucgaagggagaauucaggaccuugagaaauauguugaggacaccaaaauagaucucuggucauacaacgcggagcuucuuguugcccuggagaaccaacauacaauugaucuaacugacucagaaaugaacaaacuguuugaaaaaacaaaaaagcaacugagggaaaaugcugaggauaugggcaaugguuguuucaaaauauaccacaaaugugacaaugccugcauaggaucaaucagaaauggaacuuaugaccacgauguauacagagaugaagcauuaaacaaccgguuccagaucaagggcguugagcugaagucaggauacaaagauuggauccuauggauuuccuuugccauaucauguuuuuugcuuuguguugcuuuguugggguucaucaugugggccugccaaaaaggcaacauuagaugcaacauuugcauuuga

SEQ ID NO: 34781 - RNA, 1701 nt, Artificial Sequence
  derived and/or modified CDS sequence (wt) from hemagglutinin__InfluenzaA__ACR15282
augaagacuaucauugcuuugagcuacauucuaugucugguuuucgcucaaaaacuuccuggaaaugacaacagcacggcaacgcugugccuugggcaccaugcaguaccaaacggaacgauagugaaaacaaucaugaaugaccaaauugaaguuacuaaugcuacugagcugguucagaguuccucaacaggugaaauaugcgacaguccucaucagauccuugauggagaaaacugcacacuaauagaugcucuauugggagacccucagugugauggcuuccaaaauaagaaaugggaccuuuuuguugaacgcagcaaagccuacagcaacuguuacccuuaugaugugccggauuaugccucccuuaggucacuaguugccucauccggcacacuggaguuuaacaaugaaagcuucaauuggacuggagucacucaaaacggaacaagcucugcuugcauaaggagaucuaauaacaguuucuuuaguagauugaauugguugacccacucaaaauucaaauacccagcauugaacgugacuaugccaaacaaugaaaaauuugacaaauuguacauuugggggguucaccacccggguacggacaaugaccaaaucuuccuguaugcucaagcaucaggaagaaucacagucucuaccaaaagaagccaacaaacuguaaucccgaauaucggaucuagacccagaguaaggaauaucccuagcagaauaagcaucuauuggacaauaguaaaaccgggagacauacuuuugauuaacagcacagggaaucuaauugcuccuagggguuacuucaaaauacgaagugggaaaagcucaauaaugagaucagaugcacccauuggcaaaugcaauucugaaugcaucacuccaaauggaagcauucccaaugacaaaccauuccaaaauguaaacaggaucacauacggggccugucccagauauguuaagcaaaacacucugaaauuggcaacagggaugcgaaauguaccagagaaacaaacuagaggcauauuuggcgcaaucgcggguuucauagaaaaugguugggagggaaugguggaugguugguacgguuucaggcaucaaaauucugagggaauaggacaagcagcagaucucaaaagcacucaagcagcaaucgaucaaaucaaugggaagcugaauagguugaucgggaaaaccaacgagaaauuccaucagauugaaaaagaauucucagaagucgaagggagaauucaggaccuugagaaauauguugaggacaccaaaauagaucucuggucauacaacgcggagcuucuuguugcccuggagaaccaacauacaauugaucuaacugacucagaaaugaacaaacuguuugaaaaaacaaagaagcaacugagggaaaaugcugaggauaugggcaaugguuguuucaaaauauaccacaaaugugacaaugccugcauaggaucaaucagaaauggaacuuaugaccacgauguauacagagaugaagcauuaaacaaccgguuccagaucaagggcguugagcugaagucaggauacaaagauuggauccuauggauuuccuuugccauaucauguuuuuugcuuuguguugcuuuguugggguucaucaugugggccugccaaaaaggcaacauuaggugcaacauuugcauuuga

SEQ ID NO: 34782 - RNA, 1701 nt, Artificial Sequence
  derived and/or modified CDS sequence (wt) from hemagglutinin__InfluenzaA__ACR15293
augaagacuaucauugcuuugagcuacauucuaugucugguuuucgcucaaaaacuucccggaaaugacaacagcacggcaacgcugugccuugggcaccaugcaguaccaaacggaacgauagugaaaacaaucacgaaugaccaaauugaaguuacuaaugcuacugagcugguucagaguuccucaacagguggaauaugcgacaguccucaucagauccuugauggagaaaacugcacacuaauagaugcucuauuaggagacccucagugugauggcuuccaaaauaagaaaugggaccuuuuuguugaacgcagcaaagccuacagcaacuguuacccuuaugaugugccggauuaugccucccuuaggucacuaauugccucaucuggcacacuggaguuuaacaaugaaaacuucaauuggacgggagucacucaaaauggaacaagcucugcuugcaaaaggggaucugauaacaguuucuuuaguagauugaauugguugacccacuuaaaauucaaauacccagcauugaaagugacuaugccaaacaaugaaaaauuugacaaauuguacauuugggggguucaucacccggguacggacaaugaccaaaucuuccuguaugcucaagcaucaggaagaaucacagucucuaccaaaagaagccaacaaacuguaaucccgaauaucggaucuagacccagaguaaggaauauccccagcagaauaagcaucuauuggacaauaguaaaaccgggagacauacuuuugauuaacagcacagggaaucuaauugcuccuagggguuacuucaaaauacgaagugggaaaagcucaauaaugagaucagaugcacccauuggcaaaugcaauucugaaugcaucacuccaaauggaagcauucccaaugacaaaccauuucaaaauguaaacaggaucacauauggggccugucccagauauguuaagcagaacacccugaaauuggcaacagggaugcgaaauguaccagagaaacaaacuagaggcauauuuggcgcaaucgcggguuucauagaaaaugguugggaggggaugguggaugguugguacgguuucaggcaucaaaauucugagggaauaggacaagcagcagaucucaaaagcacucaagcagcaaucaaucaaaucaaugggaagcugaauagguugaucgggaaaaccaacgagaaauuccaucagauugaaaaagaauucucagaaguagaagggagaauucaggaccucgagaaauauguugaggacacuaaaauagaucucuggucauacaacgcggagcuucuuguugcccuggagaaccaacauacaauugaucuaacugacucagaaaugaacaaauuguuugaaagaacaaagaagcaacugagggaaaaugcugaggauaugggcaaugguuguuucaaaauauaccacaaaugugacaaugccugcauaggaucaaucagaaauggaacuuaugaccaugauguauacagagaugaagcauuaaacaaccgguuccagaucaaaggcguugagcugaagucaggcuacaaagauuggauccuauggauuuccuuugccauaucauguuuuuugcuuuguguugcuuuguugggguucaucaugugggccugccaaaaaggcaacauuaggugcaacauuugcauuuaa

SEQ ID NO: 34783 - RNA, 1698 nt, Artificial Sequence
  derived and/or modified CDS sequence (wt) from hemagglutinin__InfluenzaA__ACR15304
augaaagcaaaacuacugguccuguuauguacauuuacagcuacauaugcagacacaauauguauaggcuaccaugccaacaacucaaccgacacuguugacacaguacuugagaagaaugugacagugacacacucugucaaccuacuugaggacagucacaaugggaagcuaugucuacuaaaaggaauagccccacuacaauuggguaauugcagcguugccggauggaucuuaggaaacccagaaugcgaauuacugauuuccaaggaaucaugguccuacauuguagaaacaccaaauccugagaauggaacauguuacccaggguauuucgccgacuaugaggaacugagggagcaauugaguucaguaucuucauuugagagauucgaaauauuccccaaagagagcucauggcccaaccacaccguaaccggaguaucagcaucaugcucccauaaugggaaaagcaguuuuuacagaaauuugcuauggcugacggggaagaaugguuuguacccaaaccugagcaaguccuaugcaaacaacaaagagaaagaaguccuuguacuaugggguguucaucacccgccuaacacagggaaccaaagggcccucuaucauacagaaaaugcuuaugucucuguagugucuucacauuauagcagaagauucaccccagaaauagccaaaagacccaaaguaagagaucaggaaggaagaaucaacuacuacuggacucugcuggaacccggggauacaauaauauuugaggcaaauggaaaucuaauagcgccaugguaugcuuucgcacugaguagaggcuuuggaucaggaaucaucaccucaaaugcaccaauggaugaaugugaugcgaagugucaaacaccucagggagcuauaaacagcagucuuccuuuccagaauguacacccagucacaauaggagaguguccaaaguaugucaggagugcaaaauuaaggaugguuacaggacuaaggaacaucccauccauucaauccagagguuuguuuggagccauugccgguuucauugaagggggguggacuggaaugguagaugggugguaugguuaucaucaccagaaugagcaaggaucuggcuaugcugcagaucaaaaaagcacacaaaaugccauuaacgggauuacaaacaaggugaauucuguaauugagaaaaugaacacucaauucacagcugugggcaaagaauucaacagauuggaaagaaggauggaaaacuuaaauaaaaaaguugaugauggguuucuagacauuuggacauauaaugcagaauuguugguucuacuggaaaaugaaaggacuuuggauuuccaugacuccaaugugaagaaucuguaugagaaaguaaaaagccaauuaaagaauaaugccaaagaaauaggaaacggguguuuugaauucuaucacaaguguaacaaugaaugcauggagagugugaaaaauggaacuuaugacuauccaaaauauuccgaagaaucaaaguuaaacagggagaaaauugauggaguaaaauuggaaucaaugggagucuaucagauucuggcgaucuacucaacugucgccaguucccugguucuuuuggucucccugggggcaaucagcuucuggauguguuccaaugggucuuugcaguguagaauaugcaucuga

SEQ ID NO: 34784 - RNA, 1698 nt, Artificial Sequence
  derived and/or modified CDS sequence (wt) from hemagglutinin__InfluenzaA__ACR15315
augaaagcaaaacuacugguccuguuauguacauuuacagcuacauacgcagacacaauauguauaggcuaccaugccaacaacucaaccgacacuguugacacaguacuugagaagaaugugacagugacacacucugucaaccuacuugaggacagucacaauggaaaacuaugucuacuaaaaggaauagccccacuacaauuggguaauugcagcguugccggauggaucuuaggaaacccagaaugcgaauuacugauuuccaaggaaucaugguccuacauuguagaaacaccaaaucccgagaauggaacauguuacccaggguauuucgccgacuaugaggaacugagggagcaauugaguucaguaucuucauuugagagauucgaaauauuccccaaaggaagcucauggcccaaccacaccgugaccggaguaucagcaucaugcucccauaaugggaaaagcaguuuuuacagaaauuugcuauggcugacggggaaaaaugguuuguacccaaaccugagcauguccuauguaaacaacaaagagaaagaaguccuugugcuaugggguguucaucacccaccuaacauaagggaccagagggcccucuaccauacagaaaaugcuuaugucucuguagugucuucacauuauagcagaagauucaccccagaaauagccaaaagacccaaaguaagagaucaggaaggaagaaucaacuacuacuggacucugcuggaacccggggacacaauaauauuugaggcaaauggaaaucuaauagcgccaugguaugcuuucgcacugaguagaggcuuuggaucaggaaucaucaccucaaaugcaccaaugggugaaugugaugcgaagugucaaacaccucagggagcuauaaacaguagucuuccuuuccagaauguacacccaguuacaauaggagaguguccaaaguaugucaggagugcaaaauuaaggaugguuacaggacuaaggaacaucccauccauucaauccagagguuuguuuggagccauugccgguuucauugaaggaggguggacuggaaugguagaugggugguaugguuaucaucaucagaaugagcaaggaucuggcuaugcugcagaucaaaagagcacacaaaaugccauuaacgggauuacaaacaaggugaauucuguaauugaaaaaaugaacacucaauucacagcugugggcaaagaauucaacaaauuagaaagaaggauggaaaacuuaaauaaaaaaguugaugauggguuucuagacauuuggacauauaaugcagaauuguugguucuacuggaaaaugaaaggacuuuggauuuucaugacuccaaugugaagaaucuguaugagaaaguaaaaagccaauuaaagaauaaugccaaagaaauaggaaacggguguuuugaauucuaucacaaguguaacaaugaaugcauggaaagugugaaaaauggaacuuaugacuauccaaaauauuccgaagaaucaaaguuaaacagggagaaaauugauggaguaaaauuggaaucaaugggagucuaucagauucuggcgaucuacucaacugucgccaguucccugguucuuuuggucucccugggggcaaucagcuucuggauguguuccaaugggucuuugcaguguagaauaugcaucuga

SEQ ID NO: 34785 - RNA, 1698 nt, Artificial Sequence
  derived and/or modified CDS sequence (wt) from hemagglutinin__InfluenzaA__ACR15326
augaaagcaaaacuacugguccuguuauguacauuuacagcuacauacgcagacacaauauguauaggcuaccaugccaacaacucaaccgacacuguugacacaguacuugagaagaaugugacagugacacacucugucaaccuacuugaggacagucacaauggaaaacuaugucuacuaaaaggaauagccccacuacaauuggguaauugcagcguugccggauggaucuuaggaaacccagaaugcgaauuacugauuuccaaggaaucaugguccuacauuguagaaacaccaaaucccgagaauggaacauguuacccaggguauuucgccgacuaugaggaacugagggagcaauugaguucaguaucuucauuugagagauucgaaauauuccccaaaggaagcucauggcccaaccacaccgugaccggaguaucagcaucaugcucccauaaugggaaaagcaguuuuuacagaaauuugcuauggcugacggggaaaaaugguuuguacccaaaccugagcauguccuauguaaacaacaaagaaaaagaaguccuugugcuaugggguguucaucacccaccuaacauagggaaccaaagggcccucuaccauacagaaaaugcuuaugucucuguagugucuucacauuauagcagaagauucaccccagaaauagccaaaagacccaaaguaagagaucaggaaggaagaaucaacuacuacuggacucugcuggaacccggggacacaauaauauuugaggcaaauggaaaucuaauagcgccaugguaugcuuucgcacugaguagaggcuuuggaucaggaaucaucaccucaaaugcaccaaugggugaaugugaugagaagugucaaacaccucagggagcuauaaacaguagucuuccuuuccagaauguacacccaguuacaauaggagaguguccaaaguaugucaggagugcaaaauuaaggaugguuacaggacuaaggaacaucccauccauucaauccagagguuuguuuggagccauugccgguuucauugaaggaggguggacuggaaugguagaugggugguaugguuaucaucaucagaaugagcaaggaucuggcuaugcugcagaucaaaaaagcacacaaaaugccauuaacgggauuacaaacaaggugaauucuguaauugagaaaaugaacacucaauucacagcugugggcaaagaauucaacaaauuagaaagaaggauggaaaacuuaaauaaaaaaguugaugauggguuucuagacauuuggacauauaaugcagaauuguugguucuacuggaaaaugaaaggacuuuggauuuccaugacuccaaugugaagaaucuguaugagaaaguaaaaagccaauuaaagaauaaugccaaagaaauaggaaacggguguuuugaauucuaucacaaguguaacaaugaaugcauggaaagugugaaaaauggaacuuaugacuauccaaaauauuccgaagaaucaaaguuaaacagggagaaaauugauggaguaaaauuggaaucaaugggagucuaucagauucuggcgaucuacucaacugucgccaguucccugguucuuuuggucucccugggggcaaucagcuucuggauguguuccaaugggucuuugcaguguagaauaugcaucuga

SEQ ID NO: 34786 - RNA, 1698 nt, Artificial Sequence
  derived and/or modified CDS sequence (wt) from hemagglutinin__InfluenzaA__ACR15359
augaaaguaaaacuacugguccuguuaugcacauuuacagcuacauaugcagacacaauauguauaggcuaccaugcuaacaacucaaccgacacuguugacacaguacuugaaaagaaugugacagugacacauucugucaaccugcuugagaacagucacaauggaaaacuaugucuauuaaaaggaauagccccacuacaauuggguaauugcagcguugccggauggaucuuaggaaacccagaaugcggauuacugauuuccaaggagucaugguccuacauuguagaaaaaccaaacccugagaauggaacauguuacccagggcauuucgcugacuaugaggaacugagggagcaauugaguucaguaucuucauuugagagguucgaaauauuccccaaagaaagcucauggcccaaccacaccguaaccggagugucagcaucaugcucccauaauggggaaagcaguuuuuacagaaauuugcuauggcugacggggaagaaugguuuguacccaaaccugagcaaguccuaugcaaacaacaaagaaaaagaaguccuuguacuaugggguguucaucacccgccaaacauaggugaccaaaaggcccucuaucauacagaaaaugcuuauguuucuguagugucuucacauuauagcagaaaauucaccccagaaauagccaaaagacccaaaguaagagaucaagaaggaagaaucaacuacuacuggacucuacuugaacccggggauacaauaauauuugaggcaaauggaaaucuaauagcgccaagauaugcuuucgcacugaguagaggcuuuggaucaggaaucauuaacucaaaugcaccaauggauaaaugugaugcgaagugccaaacaccucagggagcuauaaacagcagucuuccuuuccagaacguacacccagucacaauaggagaguguccaaaguaugucaggagugcaaaauuaaggaugguuacaggacuaaggaacaucccauccauucaauccagagguuuguuuggagccauugccgguuucauugaagggggguggacuggaaugguagaugguugguaugguuaucaucaucagaaugagcaaggaucuggcuaugcugcagaucaaaaaagcacacaaaaugccauuaaugggauuacaaacaaggugaauucuguaauugagaaaaugaacacucaauucacagcagugggcaaagaauucaacaaauuggaaagaaggauggaaaacuugaauaaaaaaguugaugauggguuuauagacauuuggacauauaaugcagaacuguugguucuacuggaaaaugaaaggacuuuggauuuccaugacuccaaugugaagaaucuguaugagaaaguaaaaagccaguuaaagaauaaugcuaaagaaauaggaaauggguguuuugaauucuaucacaaguguaacgaugaaugcauggagaguguaaagaauggaacuuaugacuauccaaaauauuccgaagaaucaaaguuaaacagggagaaaauugauggggugaaauuggaaucaaugggagucuaucagauucuggcgaucuacucaacagucgccaguucucugguucuuuuggucucccugggggcaaucagcuucuggauguguuccaaugggucuuugcaguguagaauaugcaucuaa

SEQ ID NO: 34787 - RNA, 1698 nt, Artificial Sequence
  derived and/or modified CDS sequence (wt) from hemagglutinin__InfluenzaA__ACR15370
augaaaguaaaacuacugguccuguuaugcacacuuacagcuacauaugcagacacaauauguauaggcuaccaugcuaacaacucgaccgacacuguugacacaguacuugaaaagaaugugacagugacacacucugucaaccugcuugagaacagucacaauggaaaacuaugucuauuaaaaggaauagccccacuacaauuggguaauugcagcguugccggguggaucuuaggaaacccagaaugcgaauuacugauuuccaaggagucaugguccuacauuguagaaaaaccaaauccugagaauggaacauguuacccagggcauuucgcugacuaugaggaacugagggagcaauugaguucaguaucuucauuugagagguucgaaauauuccccaaagaaagcucauggcccaaccacaccguaaccggagugucagcaucaugcucccauaauggggaaagcaguuuuuacagaaauuugcuauggcugacggggaagaaugguuuguacccaaaccugagcaaguccuaugcaaacaacaaagaaaaagaaguccuuguacuaugggguguucaucacccgccaaacauaggugaccaaaaggcccucuaucauacagaaaaugcuuauguuucuguagugucuucacauuauagcagaaaauucaccccagaaauagccaaaagacccaaaguaagagaucaagaaggaagaaucaacuacuacuggacucugcuugaacccggggauacaauaauauuugaggcaaauggaaaucuaauagcgccaagauaugcuuucgcacugaguagaggcuuuggaucaggaaucaucaacucaaaugcaccaauggauaaaugugaugcgaagugccaaacaccucagggagcuauaaacagcagucuuccuuuccagaacguacacccagucacaauaggagaguguccaaaauaugucaggagugcaaaauuaaggaugguuacaggacuaaggaacaucccauccauucaauccagagguuuguuuggagccauugccgguuucauugaagggggguggacuggaaugguagaugguugguaugguuaucaucaucagaaugagcaaggaucuggcuaugcugcagaucaaaaaagcacacaaaaugccauuaaugggauuacaaacaaggugaauucuguaauugagaaaaugaacacucaauucacagcagugggcaaagaauucaacaaauuggaaagaaggauggaaaaccugaauaaaaaaguugaugauggguuuauagacauuuggacauauaaugcagaacuguugguucuacuggaaaaugaaaggacuuuggauuuccaugacuccaaugugaagaaucuguaugagaaaguaaaaagccaguuaaagaauaaugcuaaagaaauaggaaauggguguuuugaauucuaucacaaguguaacgaugaaugcauggagaguguaaagaauggaacuuaugacuauccaaaauauuccgaagaaucaaaguuaaacagggagaaaauugauggagugaaauuggaaucaaugggagucuaucagauucuggcgaucuacucaacagucgccaguucucugauucuuuuggucucccugggggcaaucagcuucuggauguguuccaaugggucuuugcaauguagaauaugcaucuaa

SEQ ID NO: 34788 - RNA, 1701 nt, Artificial Sequence; identical to SEQ ID NO: 34314
  derived and/or modified CDS sequence (wt) from hemagglutinin__InfluenzaA__ACR15381

SEQ ID NO: 34789 - RNA, 1701 nt, Artificial Sequence; identical to SEQ ID NO: 34320
  derived and/or modified CDS sequence (wt) from hemagglutinin__InfluenzaA__ACR15392

SEQ ID NO: 34790 - RNA, 1701 nt, Artificial Sequence
  derived and/or modified CDS sequence (wt) from hemagglutinin__InfluenzaA__ACR15403
augaagacuaucauugcuuugagcuacauucuaugucugguuuucgcucaaaaacuuccuggaaaugacaacagcacggcaacgcugugccuugggcaccaugcaguaccaaacggaacgauagugaaaacaaucacgaaugaccaaauugaaguuaccaaugcuacugagcugguucagaguuccucaacaggugaaauaugcgacaguccucaucagauccuugauggagaaaacugcacacuaauagaugcucuauugggagacccucagugugauggcuuccaaaauaagaaaugggaccuuuuuguugaacgcagcaaagccuacagcaacuguuacccuuaugaugugccggauuaugccucccuuaggucacuaguugccucauccggcacacuggaguuuaacaaugaaagcuucaauuggacuggagucacucaaaacggaacaagcucugcuugcauaaggagaucuaauaacaguuucuuuaguagauugaauugguugacccacuuaaaauucaaauacccagcauugaacgugacuaugccaaacaaugaaaaauuugacaaauuguauauuugggggguucaccacccggguacggacaaugaccaaaucuuccuguaugcucaagcaucaggaagaaucacagucucuaccaaaagaagccaacaaacuguaaucccgaauaucggaucuagacccagaguaaggaauauccccagcagaauaagcaucuauuggacaauaguaaaaccgggagacauacuuuugauuaacagcacagggaaucuaauugcuccuagggguuacuucaaaauacgaagugggaaaagcucaauaaugagaucagaugcacccauuggcaaaugcaauucugaaugcaucacuccaaauggaagcauucccaaugacaaaccauuccaaaauguaaacaggaucacauacggggccugucccagauauguuaagcaaaacacucugaaauuggcaacagggaugcgaaauguaccagagaaacaaacuagaggcauauuuggcgcaaucgcggguuucauagaaaaugguugggagggaaugguggaugguugguacgguuucaggcaucaaaauucugagggaauaggacaagcagcagaucucaaaagcacucaagcagcaaucgaucaaaucaaugggaagcugaauagguugaucgggaaaaccaacgagaaauuccaucagauugaaaaagaauucucagaagucgaagggaggauucaggaccuugagaaauauguugaggacaccaaaauagaucucuggucauacaacgcggagcuucuuguugcccuggagaaccaacauacaauugaucuaacugacucagaaaugaacaaacuguuugaaaaaacaaagaagcaacugagggaaaaugcugaggauaugggcaaugguuguuucaaaauauaccacaaaugugacaaugccugcauaggaucaaucagaaauggaacuuaugaccacgauguauacagagaugaagcauuaaacaaccgguuccagaucaagggcguugagcugaagucaggauacaaagauuggauccuauggauuuccuuugccauaucauguuuuuugcuuuguguugcuuuguugggguucaucaugugggccugccaaaaaggcaacauuaggugcaacauuugcauuuga

SEQ ID NO: 34791 - RNA, 1701 nt, Artificial Sequence; identical to SEQ ID NO: 33953
  derived and/or modified CDS sequence (wt) from hemagglutinin__InfluenzaA__ACR15414

SEQ ID NO: 34792 - RNA, 1698 nt, Artificial Sequence
  derived and/or modified CDS sequence (wt) from hemagglutinin__InfluenzaA__ACR15425
augaaaguaaaacuacugguccuguuaugcacauuuacagcuacauaugcagacacaauauguauaggcuaccaugcuaacaacucaaccgacacuguugacacaguacuugaaaagaaugugacagugacacauucugucaaccugcuugagaacagucacaauggaaaacuaugucuauuaaaaggaauagccccacuacaauuggguaauugcagcguugccggauggaucuuaggaaacccagaaugcggauuacugauuuccaaggagucaugguccuacauuguagaaaaaccaaacccugagaauggaacauguuacccagggcauuucgcugacuaugaggaacugagggagcaauugaguucaguaucuucauuugagagguucgaaauauuccccaaagaaagcucauggcccaaccacaccguaaccggagugucagcaucaugcucccauaauggggaaagcaguuuuuacagaaauuugcuauggcugacggggaagaaugguuuguacccaaaccugagcaaguccuaugcaaacaacaaagaaaaagaaguccuuguacuaugggguguucaucacccgccaaacauaggugaccaaaaggcccucuaucauacagaaaaugcuuauguuucuguagugucuucacauuauagcagaaaauucaccccagaaauagccaaaagacccaaaguaagagaucaagaaggaagaaucaacuacuacuggacucuacuugaacccggggauacaauaauauuugaggcaaauggaaaucuaauagcgccaagauaugcuuucgcacugaguagaggcuuuggaucaggaaucaucaacucaaaugcaccaauggauaaaugugaugcgaagugccaaacaccucagggagcuauaaacagcagucuuccuuuccagaacguacacccagucacaauaggagaguguccaaaguaugucaggagugcaaaauuaaggaugguuacaggacuaaggaacaucccauccauucaauccagagguuuguuuggagccauugccgguuucauugaagggggguggacuggaaugguagaugguugguaugguuaucaucaucagaaugagcaaggaucuggcuaugcugcagaucaaaaaagcacacaaaaugccauuaaugggauuacaaacaaggugaauucuguaauugagaaaaugaacacucaauucacagcagugggcaaagaauucaacaaauuggaaagaaggauggaaaacuugaauaaaaaaguugaugauggguuuauagacauuuggacauauaaugcagaacuguugguucuacuggaaaaugaaaggacuuuggauuuccaugacuccaaugugaagaaucuguaugagaaaguaaaaagccaguuaaagaauaaugcuaaagaaauaggaaauggguguuuugaauucuaucacaaguguaacgaugaaugcauggagaguguaaagaauggaacuuaugacuauccaaaauauuccgaagaaucaaaguuaaacagggagaaaauugauggggugaaauuggaaucaaugggagucuaucagauucuggcgaucuacucaacagucgccaguucucugguucuuuuggucucccugggggcaaucagcuucuggauguguuccaaugggucuuugcaguguagaauaugcaucuaa

SEQ ID NO: 34793 - RNA, 1698 nt, Artificial Sequence
  derived and/or modified CDS sequence (wt) from hemagglutinin__InfluenzaA__ACR15436
augaaaguaaaacuacugguccuguuaugcacauuuacagcuacauaugcggacacaauauguauaggcuaccaugcuaacaacucgaccgacacuguugacacaguacuugaaaagaaugugacagugacacacucugucaaccugcuugagaacagucacaauggaaaacuaugucuauuaaaaggaauagccccacuacaauuggguaauugcagcguugccggauggaucuuaggaaacccagaaugcgaauuacugauuuccaaggagucauggucuuacauuguagaaaaaccaaauccugagaauggaacauguuacccagggcauuucgcugacuaugaggaacugagggagcaauugaguucaguaucuucauuugagagguucgaaauauuccccaaagaaagcucauggcccaaccacaccguaaccggagugucagcaucaugcucccacaauggggaaagcaguuuuuacagaaauuugcuauggcugacggggaagaaugguuuguacccaaaccugagcaaguccuaugcaaacaacaaaggaaaagaaguccuuguacuaugggguguucaucacccgccaaacauaggugaccaaaauacccucuaucauacagaaaaugcuuauguuucuguagugucuucacauuauagcagaaaauucaccccagaaauagccaaaagacccaaaguaagagaucaagaaggaagaaucaacuacuacuggacucugcuugaacccggggauacaauaauauuugaggcaaauggaaaucuaauagcaccaagauaugcuuucgcacugaguagaggcuuuggaucaggaaucaucaacucaaaugcaccaauggauaaaugugaugcgaagugccaaacaccucagggagcuauaaacagcagucuuccuuuccagaacguacacccagucacaauaggagaguguccaaaguaugucaggagugcaaaauuaaggaugguuacaggacuaaggaacaucccauccauucaauccagagguuuguuuggagccauugccgguuucauugaagggggguggacuggaaugguagaugguugguaugguuaucaucaucagaaugagcaaggaucuggcuaugcugcagaucaaaaaagcacacaaaaugccauuaaugggauuacaaacaaggugaauucuguaauugagaaaaugaacacucaauucacagcagugggcaaagaauucaacaaauuggaaagaaggauggaaaacuugaauaaaaaaguugaugauggguuuauagacauuuggacauauaaugcagaacuguugguucuacuggaaaaugaaaggacuuuggauuuccaugacuccaaugugaagaaucuguaugagaaaguaaaaagccaguugaagaauaaugcuaaagaaauaggaaauggguguuuugaauucuaucacaaguguaacgaugaaugcauggagaguguaaagaauggaacuuaugacuauccaaaauauuccgaagaaucaaaguuaaacagggagaaaauugauggagugaaauuggaaucaaugggagucuaucagauucuggcgaucuacucaacagucgccaguucucugguucuuuuggucucccugggggcaaucagcuucuggauguguuccaaugggucuuugcaguguagaauaugcaucuaa

SEQ ID NO: 34794 - RNA, 1698 nt, Artificial Sequence
  derived and/or modified CDS sequence (wt) from hemagglutinin__InfluenzaA__ACR15458
augaaaguaaaacuacugguccuguuaugcacauuuacagcuacauaugcagacacaauauguauaggcuaccaugcuaacaacucgaccgacacuguugacacaguacuugaaaagaaugugacagugacacacucugucaaccugcuugagaacagucacaauggaaaacuaugucuauuaaaaggaauagccccacuacaauuggguaauugcagcguugccggguggaucuuaggaaacccagaaugcgaauuacugauuuccaaggagucaugguccuacauuguagaaaacccaaauccugagaauggaacauguuacccagggcauuucgcugacuaugaggaacugagggagcaauugaguucaguaucuucauuugagagguucgaaauauuccccaaagaaagcucauggcccaaccacaccguaaccggagugucagcaucaugcucccacaauggggaaagcaguuuuuacagaaauuugcuauggcugacggggaagaaugguuuguacccaaaccugagcaaguccuaugcaaacaacaaagaaaaagaaguccuuguacuaugggguguucaucacccgccaaacauaggugaccaaaaggcccucuaccauacagaaaaugcuuauguuucuguagugucuucacauuauagcagaaaauucaccccagaaauagccaaaagacccaaaguaagagaucaagaaggaagaaucaacuacuacuggacucugcuugaacccggggauacaauaauauuugaggcaaauggaaaucuaauagcgccaagauaugcuuucgcacugaguagaggcuuuggaucaggaaucaucaacucaaaugcaccaauggauaaaugugaugcgaagugccaaacaccucagggagcuauaaacagcagucuuccuuuccagaacguacacccagucacaauaggagaguguccaaaguaugucaggagugcaaaauuaaggaugguuacaggacuaagaaacaucccaucuauucaauccagagguuuguuuggagccauugccgguuucauugaaggaggguggacuggaaugguagaugguugguaugguuaucaucaucagaaugagcaaggaucuggcuaugcugcagaucaaaaaagcacacaaaaugccauuaaugggauuacaaacaaggugaauucuguaauugagaaaaugaacacucaauucacagcagugggcaaagaauucaacaaauuggaaagaaggauggaaaacuugaauaaaaaaguugaugauggguuuauagacauuuggacauauaaugcagaacuguugguucuacuggaaaaugaaaggacuuuggauuuccaugacuccaaugugaagaaucuguaugagaaaguaaaaagccaguuaaagaauaaugcuaaagaaauaggaaauggguguuuugaauucuaucacaaguguaacgaugaaugcauggagaguguaaagaauggaacuuaugacuauccaaaauauuccgaagaaucaaaguuaaacagggagaaaauugauggagugaaauuggaaucaaugggagucuaucagauucuggcgaucuacucaacagucgccaguucucugguucuucuggucucccugggggcaaucagcuucuggauguguuccaaugggucuuugcaguguagaauaugcaucuaa

SEQ ID NO: 34795 - RNA, 1698 nt, Artificial Sequence
  derived and/or modified CDS sequence (wt) from hemagglutinin__InfluenzaA__ACR15469
augaaaguaaaacuacugguccuguuaugcacauuuacagcuacauaugcggacacaauauguauaggcuaccaugcuaacaacucgaccgacacuguugacacaguacuugaaaagaaugugacagugacacacucugucaaccugcuugaggacagucacaauggaaaacuaugucuauuaaaaggaauagccccacuacaauuggguaauugcagcguugccggguggaucuuaggaaacccagaaugcgaauuacugauuuccaaggagucaugguccuacauuguagaaaaaccagauccugagaauggaacauguuacccagggcauuucgcugacuaugaggaacugagggagcaauugaguucaguaucuucauuugagagguucgaaauauuccccaaagaaagcucauggcccaaccacaccguaaccggagugucagcaucaugcucccacaauggggaaagcaguuuuuacagaaauuugcuauggcugacggggaagaaugguuuguacccaaaccugagcaaguccuaugcaaacaacaaagaaaaagaaguccuuguacuaugggguguucaucacccgccaaacauaggugaccaaaauacccucuaucauacagaaaaugcuuauguuucuguagugucuucacauuauagcagaaaauucaccccagaaauagccaaaagacccaaaguaagagaucaagaaggaagaaucaacuacuacuggacucugcuugaacccggggauacaauaauauuugaggcaaauggaaaucuaauagcaccaagauaugcuuucgcacugaguagaggcuuuggaucaggaaucaucaacucaaaugcaccaauggauaaaugugaugcgaagugccaaacaccucagggagcuauaaacagcagucuuccuuuccagaacguacacccagucacaauaggagaguguccaaaguaugucaggagugcaaaauuaaggaugguuacaggacuaaggaacaucccauccauucaauccagagguuuguuuggagccauugccgguuucauugaagggggguggacuggaaugguagaugguugguaugguuaucaucaucagaaugagcaaggaucuggcuaugcugcagaucaaaaaagcacacaaaaugccauuaaugggauuacaaacaaggugaauucuguaauugagaaaaugaacacucaauucacagcagugggcaaagaauucaacaaauuggaaagaaggauggaaaacuugaauaaaaaaguugaugauggguuuauagacauuuggacauauaaugcagaacuguugguucuacuggaaaaugaaaggacuuuggauuuccaugacuccaaugugaagaaucuguaugagaaaguaaaaagccaguuaaagaauaaugcuaaagaaauaggaaauggguguuuugaauucuaucacaaguguaacgaugaaugcauggagaguguaaagaaugggacuuaugacuauccaaaauauuccgaagaaucaaaguuaaacagggagaaaauugauggagugaaauuggaaucaaugggagucuaucagauucuggcgaucuauucaacagucgccaguucucugguucuuuuggucucccugggggcaaucagcuucuggauguguuccaaugggucuuugcaguguagaauaugcaucuaa

SEQ ID NO: 34796 - RNA, 1698 nt, Artificial Sequence
  derived and/or modified CDS sequence (wt) from hemagglutinin__InfluenzaA__ACR15480
augaaaguaaaacuacugguccuguuaugcacauuuacagcuacauacgcggacacaauauguauaggcuaccaugcuaacaacucgaccgacacuguugacacaguacuugaaaagaaugugacagugacacacucugucaaccugcuugagaacagucacaauggaaaacuaugucuauuaaaaggaauagccccacuacaauuggguaauugcagcguugccggauggaucuuaggaaacccagaaugcgaauuacugauuuccaaggagucauggucuuacauuguagaaaaaccaaauccugagaauggaacauguuacccagggcauuucgcugacuaugaggaacugagggagcaauugaguucaguaucuucauuugagagguucgaaauauuccccaaagaaagcucauggcccaaccacaccguaacaggagugucagcaucaugcucccacaauggggaaagcaguuuuuacagaaauuugcuauggcugacggggaagaaugguuuguacccaaaccugagcaaguccuaugcaaacaacaaaggaaaagaaguccuuguacuaugggguguucaucacccgccaaacauaggugaccaaaauacccucuaucauacagaaaaugcuuauguuucuguagugucuucacauuauagcagaaaauucaccccagaaauagccaaaagacccaaaguaagagaucaagaaggaagaaucaacuacuacuggacucugcuugaacccggggauacaauaauauuugaggcaaauggaaaucuaauagcaccaagauaugcuuucgcacuuaguagaggcuuuggaucaggaaucaucaacucaaaugcaccaauggauaaaugugaugcgaagugccaaacaccucagggagcuauaaacagcagucuuccuuuccagaacguacacccagucacaauaggagaguguccaaaguaugucaggagugcaaaauuaaggaugguuacaggacuaaggaacaucccauccauucaauccagagguuuguuuggagccauugccgguuucauugaagggggguggacuggaaugguagaugguugguaugguuaucaucaucagaaugagcaaggaucuggcuaugcugcagaucaaaaaagcacacaaaaugccauuaaugggauuacaaacaaggugaauucuguaauugagaaaaugaacacucaauucacagcagugggcaaagaauucaacaaauuggaaagaaggauggaaaacuugaauaaaaaaguugaugauggguuuauagacauuuggacauauaaugcagaacuguugguucuacuggaaaaugaaaggacuuuggauuuccaugacuccaaugugaagaaucuguaugagaaaguaaaaagccaguugaagaauaaugcuaaagaaauaggaaauggguguuuugaauucuaucacaaguguaacgaugaaugcauggagaguguaaagaauggaacuuaugacuauccaaaauauuccgaagaaucaaaguuaaacagggagaaaauugauggagugaaauuggaaucaaugggagucuaucagauucuggcgaucuacucaacagucgccaguucucugguucuuuuggucucccugggggcaaucagcuucuggauguguuccaaugggucuuugcaguguagaauaugcaucuaa

SEQ ID NO: 34797 - RNA, 1698 nt, Artificial Sequence
  derived and/or modified CDS sequence (wt) from hemagglutinin__InfluenzaA__ACR15491
augaaaguaaaacuacugguccuguuaugcacauuuacagcuacauaugcagacacaauauguauaggcuaccaugcuaacaacucgaccgacacuguugacacaguacuugaaaagaaugugacagugacacacucugucaaccugcuugagaacagucacaauggaaaacuaugucuauuaaaaggaauagccccacuacaauuggguaacugcagcguugccggguggaucuuaggaaacccagaaugcgaauuacugauuuccaaggagucaugguccuacauuguagaaaaaccaaauccugagaauggaacauguuacccagggcauuucgcugacuaugaggaacugagggagcaauugaguucaguaucuucauuugagagguucgaaauauuccccaaagaaagcucauggcccaaccacaccguaaccggagugucagcaucaugcucccauaauggggaaagcaguuuuuacagaaauuugcuauggcugacggggaggaaugguuuguacccaaaccugagcaaguccuaugcaaacaacaaagaaaaagaaguccuuguacuaugggguguucaucacccgccaaacauaguugaccaaaagacccucuaucguacagaaaaugcuuauguuucuguagugucuucacauuauagcagaaaauucaccccagaaauagccaaaagacccaaaguaagagaucaagaaggaagaaucaacuacuacuggacucugcuugaacccggggauacaauaauauuugaggcaaauggaaaucuaauagcgccaagauaugcuuucgcacugaguagaggcuuuggaucaggaaucaucaacucaaaugcaccaauggauaaaugugaugcgaagugccaaacaccucagggagcuauaaacagcagucuuccuuuccagaacguacacccagucacaauaggagaguguccaaaguaugucaggagugcaaaauuaaggaugguuacaggacuaaggaacaucccauccauucaauccagagguuuguuuggagccauugccgguuucauugaagggggguggacuggaaugguagaugguugguaugguuaucaucaucagaaugagcaaggaucuggcuaugcugcagaucaaaaaagcacacaaaaugccauuaaugggauuacaaacaaggugaauucuguaauugagaaaaugaacacucaauucacagcagugggcaaagaauucaacaaauuggaaagaaggauggaaaacuugaauaaaaaaguugaugauggguuuauagacauuuggacauauaaugcagaacuguugguucuacuggaaaaugaaaggacuuuggauuuccaugacuccaaugugaagaaucuguaugagaaaguaaaaagccaguuaaagaauaaugcuaaagaaauaggaaauggguguuuugaauucuaucacaaguguaacgaugaaugcauggagaguguaaagaauggaacuuaugacuauccaaaauauuccgaagaaucaaaguuaaacagggagaaaauugauggaauaaaauuggaaucaaugggagucuaucagauucuggcgaucuacucaacagucgccaguucucugguucuuuuggucucccugggggcaaucagcuucuggauguguuccaaugggucuuugcaguguagaauaugcaucuaa

SEQ ID NO: 34798 - RNA, 1698 nt, Artificial Sequence
  derived and/or modified CDS sequence (wt) from hemagglutinin__InfluenzaA__ACR15502
augaaaguaaaacuacugguccuguuaugcacauuuacagcuacauaugcggacacaauauguauaggcuaccaugcuaacaacgcgaccgacacuguugacacaguacuugaaaagaaugugacagugacacacucugucaaccugcuugagaacagucacaauggaaaacuaugucuauuaaaaggaauagccccacuacaauuggguaauugcagcguugccggauggaucuuaggaaacccagaaugcgaauuacugauuuccaaggagucauggucuuacauuguagaaaaaccaaauccugagaauggaacauguuacccagggcauuucgcugacuaugaggaacugagggagcaauugaguucaguaucuucauuugagagguucgaaauauuccccaaagaaagcucauggcccaaccacaccguaaccggagugucagcaucaugcucccacaauggggaaagcaguuuuuacagaaauuugcuauggcugacggggaagaaugguuuguacccaaaccugagcaaguccuaugcaaacaacaaaggaaaagaaguccuuguacuaugggguguucaucacccgccaaacauaggugaccaaaauacccucuaucauacagaaaaugcuuauguuucuguagugucuucacauuauagcagaaaauucaccccagaaauagccaaaagacccaaaguaagagaucaagaaggaagaaucaacuacuacuggacucugcuugaacccggggauacaauaauauuugaggcaaauggaaaucuaauagcaccaagauaugcuuucgcacugaguagaggcuuuggaucaggaaucaucaacucaaaugcaccaauggauaaaugugaugcgaagugccaaacaccucagggagcuauaaacagcagucuuccuuuccagaacguacacccagucacaauaggagaguguccaaaguaugucaggagugcaaaauuaaggaugguuacaggacuaaggaacaucccauccauucaauccagagguuuguuuggagccauugccgguuucauugaagggggguggacuggaaugguagaugguugguaugguuaucaucaucagaaugagcaaggaucuggcuaugcugcagaucaaaaaagcacacaaaaugccauuaaugggauuacaaacaaggugaauucuguaauugagaaaaugaacacucaauucacagcagugggcaaagaauucaacaaauuggaaagaaggauggaaaacuugaauaaaaaaguugaugauggguuuauagacauuuggacauauaaugcagaacuguugguucuacuggaaaaugaaaggacuuuggauuuccaugacuccaaugugaagaaucuguaugagaaaguaaaaagccaguugaagaauaaugcuaaagaaauaggaaauggguguuuugaauucuaucacaaguguaacgaugaaugcauggagaguguaaagaauggaacuuaugacuauccaaaauauuccgaagaaucaaaguuaaacagggagaaaauugauggagugaaauuggaaucaaugggagucuaucagauucuggcgaucuacucaacagucgccaguucucugguucuuuuggucucccugggggcaaucagcuucuggauguguuccaaugggucuuugcaguguagaauaugcaucuaa

SEQ ID NO: 34799 - RNA, 1698 nt, Artificial Sequence
  derived and/or modified CDS sequence (wt) from hemagglutinin__InfluenzaA__ACR15513
augaaaguaaaacuacugguccuguuaugcacauuuacagcuacauaugcagacacaauauguauaggcuaccaugcuaacaacucgaccgacacuguugacacaguacuugaaaagaaugugacagugacacacucugucaaccugcuugagaacagucacaauggaaaacuaugucuauuaaaaggaauagccccacuacaauuggguaauugcagcguugccggguggaucuuaggaaacccagaaugcgaauuacugauuuccaaggagucaugguccuacauuguagaaaaaccaaauccugagaauggaacauguuacccagggcauuucgcugacuaugaggaacugagggagcaauugaguucaguaucuucguuugagagguucgaaauauuccccaaagaaggcucauggcccaaccacaccguaaccggagugucagcaucaugcucccauaauggggaaagcaguuuuuacagaaauuugcuauggcugacggggaagaaugguuuguacccaaaccugagcaaguccuaugcaaacaacaaagaaaaagaaguccuuguacuaugggguguucaucacccgccaaacauaggugaccaaaaggcccucuaucauacagaaaaugcuuaugucucuguagugucuucacauuauagcagaaaauucaccccagaaauagccaagagacccaaaguaagagaucaagaaggaagaaucaacuacuacuggacucugcuugaacccggggauacuauaauauuugaggcaaauggaaaucuaauagcgccaagauaugcuuucgcacugaguagaggcuuuggaucaggaaucaucaacucaaaugcuccaauggauaaaugugaugcgaagugccaaacaccucagggagcuauaaacagcagucuuccuuuccagaacguacacccagucacaauaggagaguguccaaaguaugucaggagugcaaaauuaaggaugguuacaggacuaaggaacaucccauccauucaauccagagguuuguuuggagccauugccgguuucauugaagggggguggacugggaugguagaugguugguaugguuaucaucaucagaaugagcaaggaucuggcuaugcugcagaucaaaaaagcacacaaaaugccauuaaugggauuacaaacaaggugaauucuguaauugagaaaaugaacacucaauucacagcagugggcaaagaauucaacaaauuggaaagaaggauggaaaacuugaauaaaaaaguugaugauggguuuauagacauuuggacauauaaugcagaacuguugguucuacuggaaaaugaaaggacuuuggauuuccaugacuccaaugugaagaaucuguaugagaaaguaaaaagccaguuaaagaauaaugcuaaagaaauaggaaauggguguuuugaauucuaucacaaguguaacgaugaaugcauggagaguguaaagaauggaacuuaugacuauccaaaauauuccgaagaaucaaaguuaaacagggagaaaauugauggagugaaauuggaaucaaugggagucuaucagauucuagcgaucuacucaacagucgccaguucucugguucuuuuggucucccugggggcaaucagcuucuggauguguuccaaugggucuuugcaguguagaauaugcaucuaa

SEQ ID NO: 34800 - RNA, 1701 nt, Artificial Sequence
  derived and/or modified CDS sequence (wt) from hemagglutinin__InfluenzaA__ACR15524
augaagacuaucauugcuuugagcuacauucuaugucugguuuucgcucaaaaacuucccggaaaugacaacagcacggcaacgcugugccuugggcaccaugcaguaccaaacggaacaauagugaaaacaaucacgaaugaccaaauugaaguuacuaaugcuacugagcugguucagaguuccucaacagguggaauaugcgacaguccucaucagauccuugauggagaaaacugcacacuaauagaugcucuauugggagacccucagugugauggcuuccaaaauaagaaaugggaccuuuuuguugaacgcagcaaagccuacagcaacuguuacccuuaugaugugccggauuaugccucccuuaggucacuaguugccucauccggcacacuggaguuuaacaaugaaagcuucaauuggacuggagucacucaaaauggaacaagcucugcuugcaaaaggagaucuaauaaaaguuucuuuaguagauugaauugguugacccacuuaaaauucaaauacccagcauugaacgugacuaugccaaacaaugaaaaauuugacaaauuguacauuugggggguucaccacccggguacggacaaugaccaaaucagccuauaugcucaagcaucaggaagaaucacagucucuaccaaaagaagccaacaaacuguaaucccgaauaucggaucuagacccaggguaagggauguccccagcagaauaagcaucuauuggacaauaguaaaaucgggagacauacuuuugauuaacagcacagggaaucuaauugcuccucgggguuacuucaaaauacgaagugggaaaagcucaauaaugagaucagaugcacccauuggcaaaugcaauucugaaugcaucacuccaaacggaagcauucccaaugacaaaccauuucaaaauguaaacaggaucacauauggggccugucccagauauguuaagcaaaacacucugaaauuggcaacagggaugcgaaacguaccagagaaacaaacuagaggcauauuuggcgcaaucgcggguuucauagaaaaugguugggagggaaugguggacgguugguacgguuucaggcaucaaaauucugagggaacaggacaagcagcagaucucaaaagcacucaagcagcaaucaaccaaaucaaugggaagcugaauagguugaucgggaaaacaaacgagaaauuccaucagauugaaaaagaauucucagaaguagaagggagaauucaggaccucgagaaauauguugaggacacuaaaauagaucucuggucauacaacgcggagcuucuuguugcccuggagaaccaacauacaauugaucuaacugacucagaaaugaacaaacuguuugaaagaacaaagaagcaacugagggaaaaugcugaggauaugggcaaugguuguuucaaaauauaccacaaaugugacaaugccugcauagggucaaucagaaauggaacuuaugaccaugauguauacagagaugaagcauuaaacaaccgguuccagaucaaagguguugagcugaagucaggauacaaagauuggauccuauggauuuccuuugccauaucauguuuuuugcuuuguguuguuuuguugggguucaucaugugggccugccaaaaaggcaacauuaggugcaacauuugcauuuga

SEQ ID NO: 34801 - RNA, 1701 nt, Artificial Sequence; identical to SEQ ID NO: 34609
  derived and/or modified CDS sequence (wt) from hemagglutinin__InfluenzaA__ACR15535

SEQ ID NO: 34802 - RNA, 1701 nt, Artificial Sequence
  derived and/or modified CDS sequence (wt) from hemagglutinin__InfluenzaA__ACR15546
augaagacuaucauugcuuugagcuacauucuaugucugguuuucgcucaaaaacuucccggaaaugacaacagcacggcaacgcugugccuugggcaccaugcaguaccaaacggaacgauagugaaaacaaucacaaaugaccaaauugaaguuacuaaugcuacugagcugguucagaguuccucaacagguggaauaugcgacaguccucaucauauccucgauggagaaaacugcacacuaauagaugcucuauugggagacccucagugugauggcuuccaaaauaagaaaugggaccuuuuuguugaacgcagcaaagccuacagcaacuguuacccuuaugaugugccggauuaugccucccuuaggucacuaguugccucauccggcacacuggaguuuaacaaugaaagcuucaauuggacuggagucacucagaauggaacaagcucugcuugcaaaaggagaucuaauaacaguuucuuuaguagauugaauugguugacccacuuaaaauucaaauacccagcauugaacgugacuaugccaaacaaugaaaaauuugacaaauuguacauuugggggguucaccacccggguacggacaaugaccaaaucagccuauaugcucaagcaucaggaagaaucacagucucuaccaaaagaagccaacaaacuguaaucccgaauaucggaucuagacccaggguaagggauaucuccagcagaauaagcaucuauuggacaauaguaaaaccgggagacauacuuuugauuaacagcacagggaaucuaauugcuccucgggguuacuucaaaauacgaagugggaaaagcucaauaaugagaucagaugcacccauuggcaaaugcaauucugaaugcaucacuccaaauggaagcauucccaaugacaaaccauuucaaaauguaaacaggaucacauauggggccugucccagauauguuaagcaaaacacucugaaauuggcaacagggaugcgaaauguaccagagacacaaacuagaggcauauuuggcgcaaucgcagguuucauagaaaaugguugggagggaaugguggacgguugguacgguuucaggcaucaaaauucugagggcacaggacaagcagcagaucucaaaagcacucaagcagcaaucaaccaaaucaaugggaaacugaauagguuaaucgggaaaacaaacgagaaauuccaucagauugaaaaagaauucucagaaguagaagggagaauucaggaccucgagaaauauguugaggacacuaaaauagaucucuggucauacaacgcagagcuucuuguugcccuggagaaccaacauacaauugaucuaacugacucagaaaugaacaaacuguuugaaagaacaaagaagcaacugagggaaaaugcugaggauaugggcaaugguuguuucaaaauauaccacaaaugugacaaugccugcauagggucaaucagaaaugaaacuuaugaccaugauguauacagagaugaagcauuaaacaaccgguuccagaucaaagguguugagcugaagucaggauacaaagauuggauccuauggauuuccuuugccauaucauguuuuuugcuuuguguugcuuuguugggguucaucaugugggcuugccaaaaaggcaacauuaggugcaacauuugcauuuga

SEQ ID NO: 34803 - RNA, 1701 nt, Artificial Sequence; identical to SEQ ID NO: 34384
  derived and/or modified CDS sequence (wt) from hemagglutinin__InfluenzaA__ACR15557

SEQ ID NO: 34804 - RNA, 1701 nt, Artificial Sequence; identical to SEQ ID NO: 34650
  derived and/or modified CDS sequence (wt) from hemagglutinin__InfluenzaA__ACR15568

SEQ ID NO: 34805 - RNA, 1701 nt, Artificial Sequence
  derived and/or modified CDS sequence (wt) from hemagglutinin__InfluenzaA__ACR15579
augaagacuaucauugcuuugagcuacauucuaugucugguuuucgcucaaaaacuucccggaaaugacaacagcacggcaacgcugugccuugggcaccaugcaguaccaaacggaacgauagugaaaacaaucacgaaugaccaaauugaaguuacuaaugcuacugagcugguucagaguucuucaacagguggaauaugcgacaguccucaucagauccuugauggagaaaauugcacacuaauagaugcucuauugggagacccucagugugauggcuuccaaaauaagaaaugggaccuuuuuguugaacgcagcaaagccuacagcaacuguuacccuuaugaugugccggauuaugccucccuuaggucacuaguugccucauccggcacacuggaguuuaacaaugaaagcuucaauuggacuggagucacucaaaauggaacaagcucugcuugcaaaaggagaucuaauaacaguuucuuuaguagauugaauugguugacccacuuaaaauucaaauacccagcauugaacgugacuaugccaaacaaugaaaaauuugacaaauuguacauuugggggguucaccacccggguacggacaaugaccaaaucuuccuguaugcucaagcaucaggaagaaucacagucucuaccaaaagaagccaacaaacuguaaucccgaauaucggaucuagacccagaguaaggaauauccccagcagaauaagcaucuauuggacaauaguaaacccgggagacauacuuuugauuaacagcacagggaaucuaauugcuccuagggguuacuucaaaauacgaagugggaaaagcucaauaaugagaucagaugcacccauuggcaaaugcaauucugaaugcaucacuccaaauggaagcauucccaaugacaaaccauuucaaaauguaaacaggaucacauauggggccugucccagauauguuaagcaaaacacucugaaauuggcaacagggaugcgaaauguaccagagaaacaaacuagaggcauauuuggcgcaaucgcggguuucauagaaaaugguugggagggaaugguggaugguugguacgguuucaggcaucaaaauucugagggaauaggacaagcagcagaucucaaaagcacucaagcagcaaucaaucaaaucaaugggaagcugaauagguugaucgggaaaaccaacgagaaauuccaucagauugaaaaagaauucucagaaguagaagggagaauucaggaccucgagaaauauguugaggacacuaaaauagaucucuggucauacaacgcggagcuucuuguugcccuggagaaccaacauacaauugaucuaacugacucagaaaugaacaaacuguuugaaagaacaaagaagcaacugagggaaaaugcugaggauaugggcaaugguuguuucaaaauauaccacaaaugugacaaugccugcauaggaucaaucagaaauggaacuuaugaccaugauguauacagagaugaagcauuaaacaaucgguuccagaucaaaggcguugagcugaagucaggauacaaagauuggauccuauggauuuccuuugccauaucauguuuuuugcuuuguguugcuuuguugggguucaucaugugggccugccaaaaaggcaacauuaggugcaacauuugcauuuga

SEQ ID NO: 34806 - RNA, 1701 nt, Artificial Sequence
  derived and/or modified CDS sequence (wt) from hemagglutinin__InfluenzaA__ACR15590
augaagacuaucauugcuuugagcuacauucuaugucugguuuucacucaaaaacuucccggaaaugacaacagcacggcaacgcugugccuugggcaccaugcaguaccaaacggaacgauagugaaaacaaucacgaaugaccaaauugaaguuacuaaugcuacugagcugguucagaguuccucaacagguggaauaugcgacaguccucaucagauccuugauggagaaaacugcacacuaauagaugcucuauugggagacccucagugugauggcuuccaaaauaagaaaugggaccuuuuuguugaacgcagcaaagccuacagcaacuguuacccuuaugaugugccggauuaugccucccuuaggucacuaguugccucauccggcacacuggaguuuaacaaugaaagcuucaauuggacuggagucacucaaaauggaacaagcucugcuugcaaaaggagaucuaauaacaguuucuuuaguagauugaauugguugacccacuuaaaauucaaauacccagcauugaacgugacuaugccaaacaaugaaaaauuugacaaauuguacauuugggggguucaccacccggguacggacaaugaccaaaucuuccuguaugcucaagcaucaggaagaaucacagucucuaccaaaagaagccaacaaacuguaaucccgaauaucggaucuagacccagaguaaggaauauccccagcagaauaagcaucuauuggacaauaguaaaaccgggagacauacuuuugauuaacagcacagggaaucuaauugcuccuagggguuacuucaaaauacgaagugggaaaagcucaauaaugagaucagaugcacccauuggcaaaugcaauucugaaugcaucacuccaaauggaagcauucccaaugacaaaccauuucaaaauguaaacaggaucacauauggggccugucccagauauguuaagcaaaacacucugaaauuggcaacagggaugcgaaauguaccagagaaacaaacuagaggcauauuuggcgcaaucgcggguuucauagaaaaugguugggagggaaugguggaugguugguacgguuucaggcaucaaaauucugagggaauaggacaagcagcagaucucaaaagcacucaagcagcaaucaaucaaaucaaugggaagcugaauagguugaucgggaaaaccaacgagaaauuccaucagauugaaaaagaauucucagaaguagaagggagaauucaggaccucgagaaauauguugaggacacuaaaauagaucucuggucauacaacgcggagcuucuuguugcccuggagaaccaacauacaauugaucuaacugacucagaaaugaacaaacuguuugaaagaacaaagaagcaacugagggaaaaugcugaggauaugggcaaugguuguuucaaaauauaccacaaaugugacaaugccugcauaggaucaaucagaaauggaacuuaugaccaugauguauacagagaugaagcauuaaacaaccguuuccagaucaaaggcguugagcugaagucaggauacaaagauuggauccuauggauuuccuuugccauaucauguuuuuugcuuuguguugcuuuguugggguucaucaugugggccugccaaaaaggcaacauuaggugcaacauuugcauuuga

SEQ ID NO: 34807 - RNA, 1701 nt, Artificial Sequence; identical to SEQ ID NO: 32647
  derived and/or modified CDS sequence (wt) from hemagglutinin__InfluenzaA__ACR15601

SEQ ID NO: 34808 - RNA, 1701 nt, Artificial Sequence
  derived and/or modified CDS sequence (wt) from hemagglutinin__InfluenzaA__ACR18920
augaaggcaauacuaguaguucugcuauauacauuugcaaccgcaaaugcagacacauuauguauagguuaucaugcgaacaauucaacagacacuguagacacaguacuagaaaagaauguaacaguaacacacucuguuaaccuucuagaagacaagcauaacgggaaacuaugcaaacuaagaggaguagccccauugcauuuggguaaauguaacauugcuggcuggauccugggaaauccagagugugaaucacucuccacagcaagcucaugguccuacauuguggaaacaucuaguucagacaauggaacguguuacccaggagauuucaucgauuaugaggagcuaagagagcaauugagcucagugucaucauuugaaagguuugagauauuccccaagacaaguucauggcccaaucaugacucgaacaaagguguaacggcagcauguccucaugcuggagcaaaaagcuucuacaaaaauuuaauauggcuaguuaaaaaaggaaauucauacccaaagcucagcaaauccuacauuaaugauaaagggaaagaaguccucgugcuauggggcauucaccauccaucuacuagugcugaccaacaaagucucuaucagaaugcagaugcauauguuuuuguggggucaucaagauauagcaagaaguucaagccggaaauagcaauaagacccaaagugagggaucaagaagggagaaugaacuauuacuggacacuaguagagccgggagacaaaauaacauucgaagcaacuggaaaucuagugguaccgagauaugcauucgcaauggaaagaaaugcuggaucugguauuaucauuucagauacaccaguccacgauugcaauacaacuugucagacacccaagggugcuauaaacaccagccucccauuucagaauauacauccgaucacaauuggaaaauguccaaaauauguaaaaagcacaaaauugagacuggccacaggauugaggaaugucccgucuauucaaucuagaggccuauuuggggccauugccgguuucauugaagggggguggacagggaugguagauggaugguacgguuaucaccaucaaaaugagcaggggucaggauaugcagccgaccugaagagcacacagaaugccauugacgagauuacuaacaaaguaaauucuguuauugaaaagaugaauauacaguucacagcaguagguaaagaguucaaccaccuggaaaaaagaauagagaauuuaaauaaaaaaguugaugaugguuuccuggacauuuggacuuacaaugccgaacuguugguucuauuggaaaaugaaagaacuuuggacuaccacgauucgaaugugaagaacuuauaugaaaagguaagaagccagcuaaaaaacaaugccaaggaaauuggaaacggcugcuuugaauuuuaccacaaaugcgauaacacgugcauggaaagugucaaaaaugggacuuaugacuacccaaaauacucagaggaagcaaaauuaaacagagaagaaauagaugggguaaagcuggaaucaacaaggauuuaccagauuuuggcgaucuauucaacugucgccaguucauugguacugguagucucccugggggcaaucaguuucuggaugugcucuaaugggucucuacaguguagaauauguauuuaa

SEQ ID NO: 34809 - RNA, 1701 nt, Artificial Sequence; identical to SEQ ID NO: 34681
  derived and/or modified CDS sequence (wt) from hemagglutinin__InfluenzaA__ACR18975

SEQ ID NO: 34810 - RNA, 1701 nt, Artificial Sequence; identical to SEQ ID NO: 34705
  derived and/or modified CDS sequence (wt) from hemagglutinin__InfluenzaA__ACR18976

SEQ ID NO: 34811 - RNA, 1701 nt, Artificial Sequence; identical to SEQ ID NO: 34676
  derived and/or modified CDS sequence (wt) from hemagglutinin__InfluenzaA__ACR18977

SEQ ID NO: 34812 - RNA, 1701 nt, Artificial Sequence; identical to SEQ ID NO: 34683
  derived and/or modified CDS sequence (wt) from hemagglutinin__InfluenzaA__ACR18978

SEQ ID NO: 34813 - RNA, 1701 nt, Artificial Sequence; identical to SEQ ID NO: 34676
  derived and/or modified CDS sequence (wt) from hemagglutinin__InfluenzaA__ACR18979

SEQ ID NO: 34814 - RNA, 1701 nt, Artificial Sequence; identical to SEQ ID NO: 34737
  derived and/or modified CDS sequence (wt) from hemagglutinin__InfluenzaA__ACR18981

SEQ ID NO: 34815 - RNA, 1701 nt, Artificial Sequence
  derived and/or modified CDS sequence (wt) from hemagglutinin__InfluenzaA__ACR18982
augaaggcaauacuaguaguucugcuauauacauuugcaaccgcaaaugcagacacauuauguauagguuaucaugcgaacaauucaacagacacuguagacacaguacuagaaaagaauguaacaguaacacacucuguuaaccuucuagaagacaagcauaacgggaaacuaugcaaacuaagagggguagccccauugcauuuggguaaauguaacauugcuggcuggauccugggaaauccagagugugaaucacucuccacagcaagcucaugguccuacauuguggaaacaucuaguucagacaauggaacguguuacccaggagauuucaucgauuaugaggagcuaagagagcaauugagcucagugucaucauuugaaagguuugagauauuccccaagacaaguucauggcccaaucaugacucgaacaaagguguaacggcagcauguccucaugcuggagcaaaaagcuucuacaaaaauuuaauauggcuaguuaaaaaaggaaauucauacccaaagcucagcaaauccuacauuaaugauaaagggaaagaaguccucgugcuauggggcauucaccauccaucuacuagugcugaccaacaaagucucuaucagaaugcagaugcauauguuuuuguggggucaucaagauacagcaagaaguucaagccggaaauagcaauaagaccuaaagugagggaucaagaagggagaaugaacuauuacuggacacuaguagagccgggagacaaaauaacauucgaagcaacuggaaaucuagugguaccgagauaugcauucgcaauggaaagaaaugcuggaucugguauuaucauuucagauacaccaguccacgauugcaauacaacuugucagacacccaagggugcuauaaacaccagccucccauuucagaauauacauccgaucacaauuggaaaauguccaaaauauguaaaaagcacaaaauugagacuggccacaggauugaggaaugucccgucuauucaaucuagaggccuauuuggggccauugccgguuucauugaagggggguggacagggaugguagauggaugguacgguuaucaccaucaaaaugagcaggggucaggauaugcagccgaccugaagagcacacagaaugccauugacgagauuacuaacaaaguaaauucuguuauugaaaagaugaauacacaguucacagcaguagguaaagaguucaaccaccuggaaaaaagaauagagaauuuaaauaaaaaaguugaugaugguuuccuggacauuuggacuuacaaugccgaacuguugguucuauuggaaaaugaaagaacuuuggacuaccacgauucaaaugugaagaacuuauaugaaaagguaagaagccaguuaaaaaacaaugccaaggaaauuggaaacggcugcuuugaauuuuaccacaaaugcgauaacacgugcauggaaagugucaaaaaugggacuuaugacuacccaaaauacucagaggaagcaaaauugaacagagaagaaauagaugggguaaagcuggaaucaacaaggauuuaccagauuuuggcgaucuauucaacugucgccaguucauugguacugguagucucccugggggcaaucaguuucuggaugugcucuaaugggucucuacaguguagaauauguauuuaa

SEQ ID NO: 34816 - RNA, 1701 nt, Artificial Sequence; identical to SEQ ID NO: 34681
  derived and/or modified CDS sequence (wt) from hemagglutinin__InfluenzaA__ACR18988

SEQ ID NO: 34817 - RNA, 1701 nt, Artificial Sequence
  derived and/or modified CDS sequence (wt) from hemagglutinin__InfluenzaA__ACR18991
augaaggcaauacuaguaguucugcuauauacauuugcaaccgcaaaugcagacacauuauguauagguuaucaugcgaacaauucaacagacacuguagacacaguacuagaaaagaauguaacaguaacacacucuguuaaccuucuagaagacaagcauaacaggaaacuaugcaaacuaagagggguagccccauugcauuuggguaaauguaacauugcuggcuggauccugggaaauccagagugugaaucacucuccacagcaagcucaugguccuacauuguggaaacaucuaguucagacaauggaacguguuacccaggagauuucaucgauuaugaggagcuaagagagcaauugagcucagugucaucauuugaaagguuugagauauuccccaagacaaguucauggcccaaucaugacucgaacaaagguguaacggcagcauguccucaugcuggagcaaaaagcuucuacaaaaauuuaauauggcuaguuaaaaaaggaaauucauacccaaagcucagcaaauccuacauuaaugauaaagggaaagaaguccucgugcuauggggcauucaccauccaucuacuagugcugaccaacaaagucucuaucagaaugcagaugcauauguuuuuguggggucaucaagauacagcaagaaguucaagccggaaauagcaauaagacccaaagugagggaucaagaagggagaaugaacuauuacuggacacuaguagagccgggagacaaaauaacauucgaagcaacuggaaaucuagugguaccgagauaugcauucgcaauggaaagaaaugcuggaucugguauuaucauuucagauacaccaguccacgauugcaauacaacuugucagacacccaagggugcuauaaacaccagccucccauuucagaauauacauccgaucacaauuggaaaauguccaaaauauguaaaaagcacaaaauugagacuggccacaggauugaggaaugucccgucuauucaaucuagaggccuauuuggggccauugccgguuucauugaagggggguggacagggaugguagauggaugguacgguuaucaccaucaaaaugagcaggggucaggauaugcagccgaccugaagagcacacagaaugccauugacgagauuacuaacaaaguaaauucuguuauugaaaagaugaauacacaguucacagcaguagguaaagaguucaaccaccuggaaaaaagaauagagaauuuaaauaaaaaaguugaugaugguuuccuggacauuuggacuuacaaugccgaacuguugguucuauuggaaaaugaaagaacuuuggacuaccacgauucaaaugugaagaacuuauaugaaaagguaagaagccagcuaaaaaacaaugccaaggaaauuggaaacggcugcuuugaauuuuaccacaaaugcgauaacacgugcauggaaagugucaaaaaugggacuuaugacuacccaaaauacucagaggaagcaaaauuaaacagagaagaaauagaugggguaaagcuggaaucaacaaggauuuaccagauuuuggcgaucuauucaacugucgccaguucauugguacugguagucucccugggggcaaucaguuucuggaugugcucuaaugggucucuacaguguagaauauguauuuaa

SEQ ID NO: 34818 - RNA, 1701 nt, Artificial Sequence; identical to SEQ ID NO: 34668
  derived and/or modified CDS sequence (wt) from hemagglutinin__InfluenzaA__ACR18993

SEQ ID NO: 34819 - RNA, 1701 nt, Artificial Sequence; identical to SEQ ID NO: 34707
  derived and/or modified CDS sequence (wt) from hemagglutinin__InfluenzaA__ACR18995

SEQ ID NO: 34820 - RNA, 1701 nt, Artificial Sequence
  derived and/or modified CDS sequence (wt) from hemagglutinin__InfluenzaA__ACR23302
augaaggcaauacuaguaguucugcuauauacauuugcaaccgcaaaugcagacacauuauguauagguuaucaugcgaacaauucaacagacacuguagacacaguacuagaaaagaauguaacaguaacacacucuguuaaccuucuagaagacaagcauaacgggaaacuaugcaaacuaagagggguagccccauugcauuuggguaaauguaacauugcuggcuggauccugggaaauccagagugugaaucacucuccacagcaagcucaugguccuacauuguggaaacaucuaguucagacaauggaacguguuacccaggagauuucaucgauuaugaggagcuaagagagcaauugagcucagugucaucguuugaaagguuugagauauuccccaagacaaguucauggcccaaucaugacucgaacaaagguguaacggcagcauguccucaugcuggagcaaaaagcuucuacaaaaauuuaauauggcuaguuaaaaaaggaaauucauacccaaagcucagcaaauccuacauuaaugauaaagggaaagaaguccucgugcuauggggcauucaccauccaucuacuagugcugaccaacaaagucucuaucagaaugcagaugcauauguuuuuguggggucaucaagauacagcaagaaguucaagccggaaauagcaauaagacccaaagugagggaucaagaagggagaaugaacuauuacuggacacuaguagagccgggagacaaaauaacauucgaagcaacuggaaaucuagugguaccgagauaugcauucgcaauggaaagaaaugcuggaucugguauuaucauuucagauacaccaguccacgauugcaauacaacuugucagacacccaagggugcuauaaacaccagccucccauuucagaauauacauccgaucacaauuggaaaauguccaaaauauguaaaaagcacaaaauugagacuggccacaggauugaggaaugucccgucuauucaaucuagaggccuauuuggggccauugccgguuucauugaagggggguggacagggaugguagauggaugguacgguuaucaccaucaaaaugagcaggggucaggauaugcagccgaccugaagagcacacagaaugccauugacgagauuacuaacaaaguaaauucuguuauugaaaagaugaauacacaguucacagcaguagguaaagaguucaaccaccuggaaaaaagaauggagaauuuaaauaaaaaaguugaugaugguuuccuggacauuuggacuuacaaugccgaacuguugguucuauuggaaaaugaaagaacuuuggacuaccacgauucaaaugugaagaacuuauaugaaaagguaagaagccaguuaaaaaacaaugccaaggaaauuggaaacggcugcuuugaauuuuaccacaaaugcgauaacacgugcauggaaagugucaaaaaugggacuuaugacuacccaaaauacucagaggaagcaaaauuaaacagagaagaaauagaugggguaaagcuggaaucaacaaggauuuaccagauuuuggcgaucuauucaacugucgccaguucauugguacugguagucucccugggggcaaucaguuucuggaugugcucuaaugggucucuacaguguagaauauguauuuaa

SEQ ID NO: 34821 - RNA, 1701 nt, Artificial Sequence; identical to SEQ ID NO: 34681
  derived and/or modified CDS sequence (wt) from hemagglutinin__InfluenzaA__ACR33743

SEQ ID NO: 34822 - RNA, 1701 nt, Artificial Sequence; identical to SEQ ID NO: 34676
  derived and/or modified CDS sequence (wt) from hemagglutinin__InfluenzaA__ACR38821

SEQ ID NO: 34823 - RNA, 1701 nt, Artificial Sequence
  derived and/or modified CDS sequence (wt) from hemagglutinin__InfluenzaA__ACR38822
augaaggcaauacuaguaguucugcuauauacauuugcaaccgcaaaugcagacacauuauguauagguuaucaugcgaacaauucaacagacacuguagacacaguacuagaaaagaauguaacaguaacacacucuguuaaccuucuagaagacaagcauaacgggaaacuaugcaaacuaagagggguagccccauugcauuuggguaaauguaacauugcuggcuggauccugggaaauccagagugugaaucacucuccacagcaagcucaugguccuacauuguggaaacaucuaguucagacaauggaacguguuacccaggagauuucaucgauuaugaggagcuaagagagcaauugagcucagugucaucauuugaaagguuugagauauuccccaagacaaguucauggcccaaucaugacucgaacaaagguguaacggcagcauguccucaugcuggagcaaaaagcuucuacaaaaauuuaauauggcuaguuaaaaaaggaaauucauacccaaagcucagcaaauccuacauuaaugauaaagggaaagaaguccucguacuauggggcauucaccauccaucuacuagugcugaccaacaaagucucuaucagaaugcagaugcauauguuuuuguggggucaucaagauacagcaagaaguucaagccggaaauagcaauaagacccaaagugagggaucaagaagggagaaugaacuauuacuggacacuaguagagccgggagacaaaauaacauucgaagcaacuggaaaucuagugguaccgagauaugcauucgcaauggaaagaaaugcuggaucugguauuaucauuucagauacaccaguccacgauugcaauacaacuugucagacacccaagggugcuauaaacaccagccucccauuucagaauauacauccgaucacaauuggaaaauguccaaaauauguaaaaagcacaaaauugagacuggccacaggauugaggaaugucccgucuauucaaucuagaggccuauuuggggccauugccgguuucauugaaggaggguggacagggaugguagauggaugguacgguuaucaccaucaaaaugagcaggggucaggauaugcagccgaccugaagagcacacagaaugccauugacgagauuacuaacaaaguaaauucuguuauugaaaagaugaauacacaguucacagcaguagguaaagaguucaaccaccuggaaaaaagaauagagaauuuaaauaaaaaaguugaugaugguuuccuggacauuuggacuuacaaugccgaacuguugguucuauuggaaaaugaaagaacuuuggacuaccacgauucaaaugugaagaacuuauaugaaaagguaagaagccagcuaaaaaacaaugccaaggaaauuggaaacggcugcuuugaauuuuaccacaaaugcgauaacacgugcauggaaagugucaaaaaugggacuuaugacuacccaaaauacucagaggaagcaaaauuaaacagagaagaaauagaugggguaaagcuggaaucaacaaggauuuaccagauuuuggcgaucuauucaacugucgccaguucauugguacugguagucucccugggggcaaucaguuucuggaugugcucuaaugggucucuacaguguagaauauguauuuaa

SEQ ID NO: 34824 - RNA, 1701 nt, Artificial Sequence; identical to SEQ ID NO: 34668
  derived and/or modified CDS sequence (wt) from hemagglutinin__InfluenzaA__ACR38823

SEQ ID NO: 34825 - RNA, 1701 nt, Artificial Sequence; identical to SEQ ID NO: 34737
  derived and/or modified CDS sequence (wt) from hemagglutinin__InfluenzaA__ACR38824

SEQ ID NO: 34826 - RNA, 1701 nt, Artificial Sequence
  derived and/or modified CDS sequence (wt) from hemagglutinin__InfluenzaA__ACR38825
augaaggcaauacuaguaguucugcuauauacauuugcaaccgcaaaugcagacacauuauguauagguuaucaugcgaacaauucaacagacacuguagacacaguacuagaaaagaauguaacaguaacacacucuguuaaccuucuagaagacaagcauaacgggaaacuaugcaaacuaagagggguagccccauugcauuuggguaaauguaacauugcuggcuggauccugggaaauccagagugugaaucacucuccacagcaagcucaugguccuacauuguggaaacaucuaguucagacaauggaacguguuacccaggagauuucaucgauuaugaggagcuaagagagcaauugagcucagugucaucauuugaaagguuugagauauuccccaagacaaguucauggcccaaucaugacucgaacaaagguguaacggcagcauguccucaugcuggagcaaaaagcuucuacaaaaauuuaauauggcuaguuaaaaaaggaaauucauacccaaagcucagcaaauccuacauuaaugauaaagggaaagaaguccucgugcuauggggcauucaccauccaucuacuagugcugaccaacaaagucucuaucagaaugcagaugcauauguuuuuguggggacaucaagauacagcaagaaguucaagccggaaauagcaauaagacccaaagugaggggucaagaagggagaaugaacuauuacuggacacuaguagagccgggagacaaaauaacauucgaagcaacuggaaaucuagugguaccgagauaugcauucgcaauggaaagaaaugcuggaucugguauuaucauuucagauacaccaguccacgauugcaauacaacuugucagacacccaagggugcuauaaacaccagccucccauuucagaauauacauccgaucacaauuggaaaauguccaaaauauguaaaaagcacaaaauugagacuggccacaggauugaggaaugucccgucuauucaaucuagaggccuauuuggggccauugccgguuucauugaagggggguggacagggaugguagauggaugguacgguuaucaccaucaaaaugagcaggggucaggauaugcagccgaccugaagagcacacagaaugccauugacgagauuacuaacaaaguaaauucuguuauugaaaagaugaauacacaguucacagcaguagguaaagaguucaaccaccuggaaaaaagaauagagaauuuaaauaaaaaaauugaugaugguuuccuggacauuuggacuuacaaugccgaacuguugguucuauuggaaaaugaaagaacuuuggacuaccacgauucaaaugugaagaacuuauaugaaaagguaagaagccaguuaaaaaacaaugccaaggaaauuggaaacggcugcuuugaauuuuaccacaaaugcgauaacacgugcauggaaagugucaaaaaugggacuuaugacuacccaaaauacucagaggaagcaaaauuaaacagagaagaaauagaugggguaaagcuggaaucaacaaggauuuaccagauuuuggcgaucuauucaacugucgccaguucauugguacugguagucucccugggggcaaucaguuucuggaugugcucuaaugggucucuacaguguagaauauguauuuaa

SEQ ID NO: 34827 - RNA, 1701 nt, Artificial Sequence; identical to SEQ ID NO: 34681
  derived and/or modified CDS sequence (wt) from hemagglutinin__InfluenzaA__ACR38826

SEQ ID NO: 34828 - RNA, 1701 nt, Artificial Sequence; identical to SEQ ID NO: 34676
  derived and/or modified CDS sequence (wt) from hemagglutinin__InfluenzaA__ACR38827

SEQ ID NO: 34829 - RNA, 1701 nt, Artificial Sequence; identical to SEQ ID NO: 34737
  derived and/or modified CDS sequence (wt) from hemagglutinin__InfluenzaA__ACR38828

SEQ ID NO: 34830 - RNA, 1701 nt, Artificial Sequence
  derived and/or modified CDS sequence (wt) from hemagglutinin__InfluenzaA__ACR38829
augaaggcaauacuaguaguucugcuauauacauuugcaaccgcaaaugcagacacauuauguauagguuaucaugcgaacaauucaacagacacuguagacacaguacuagaaaagaauguaacaguaacacacucuguuaaccuucuagaagacaagcauaacgggaaacuaugcaaacuaagagggguagccccauugcauuuggguaaauguaacauugcuggcuggauccugggaaauccagagugugaaucacucuccacagcaagcucaugguccuacauuguggaaacaucuaguucagacaauggaacguguuacccaggagauuucaucgauuaugaggagcuaagagagcaauugagcucagugucaucauuugaaagguuugagauauuccccaagacaaguucauggcccaaucaugacucgaacaaagguguaacggcagcauguccucaugcuggagcaaaaagcuucuacaaaaauuuaauauggcuaguuaaaaaaggaaauucauacccaaagcucagcaaauccuacauuaaugauaaagggaaagaaguccucgugcuauggggcauucaccauccaucuacuagugcugaccaacaaagucucuaucagaaugcagaugcauauguuuuuguggggucaucaagauacagcaagaaguucaagccggaaauagcaauaagacccaaagugagggaucaagaagggagaaugaacuauuacuggacacuaguagagccgggagacaaaauaacauucgaagcaacuggaaaucuagugguaccgagauaugcauucgcaauggaaagaaaugcuggaucugguauuaucauuucagauacaccaguccacgauugcaauacaacuugucagacacccaagggugcuauaaacaccagccucccauuucagaauauacauccgaucacaauuggaaaauguccaaaauauguaaaaagcacaaaauugagacuggccacaggauugaggaaugucccgucuauucaaucuagaggccuauuuggggccauugccgguuucauugaagggggguggacagggaugguagauggaugguacgguuaucaccaucaaaaugagcaggggucaggauaugcagccgaccugaagagcacacagaaugccauugacgagauuacuaacaaaguaaauucuguuauugaaaagaugaauacacaguucacagcaguagguaaagaguucaaccaccuggaaaaaagaauagagaauuuaaauaaaaaaguugaugaugguuuccuggacauuuggacuuacaaugccgaacuguugguucuauuggaaaaugaaagaacuuuggacuaccacgauucaaaugugaagaacuuauaugaaaagguaagaagccagcuaaaaaacaaugccaaggaaauuggaaacggcugcuuugaauuuuaccacaaaugcgauaacacgugcauggaaagugucaaaaaugggacuuaugacuacccaaaauacucagaggaagcaaaauuaaacagagaagaaauagaugggguaaagcuggaaucaacaaggauuuaccagauuuuggcgaucuauucaacugucgccaguucauugguacugguagucucccugggggcaaucaguuucuggaugugcucuaaugggucucuacagugucgaauauguauuuaa

SEQ ID NO: 34831 - RNA, 1701 nt, Artificial Sequence; identical to SEQ ID NO: 34707
  derived and/or modified CDS sequence (wt) from hemagglutinin__InfluenzaA__ACR38830

SEQ ID NO: 34832 - RNA, 1701 nt, Artificial Sequence; identical to SEQ ID NO: 34681
  derived and/or modified CDS sequence (wt) from hemagglutinin__InfluenzaA__ACR39354

SEQ ID NO: 34833 - RNA, 1701 nt, Artificial Sequence; identical to SEQ ID NO: 34681
  derived and/or modified CDS sequence (wt) from hemagglutinin__InfluenzaA__ACR39393

SEQ ID NO: 34834 - RNA, 1701 nt, Artificial Sequence; identical to SEQ ID NO: 34681
  derived and/or modified CDS sequence (wt) from hemagglutinin__InfluenzaA__ACR39403

SEQ ID NO: 34835 - RNA, 1701 nt, Artificial Sequence; identical to SEQ ID NO: 34681
  derived and/or modified CDS sequence (wt) from hemagglutinin__InfluenzaA__ACR39413

SEQ ID NO: 34836 - RNA, 1701 nt, Artificial Sequence; identical to SEQ ID NO: 34681
  derived and/or modified CDS sequence (wt) from hemagglutinin__InfluenzaA__ACR39423

SEQ ID NO: 34837 - RNA, 1701 nt, Artificial Sequence; identical to SEQ ID NO: 34681
  derived and/or modified CDS sequence (wt) from hemagglutinin__InfluenzaA__ACR39433

SEQ ID NO: 34838 - RNA, 1701 nt, Artificial Sequence; identical to SEQ ID NO: 34681
  derived and/or modified CDS sequence (wt) from hemagglutinin__InfluenzaA__ACR39443

SEQ ID NO: 34839 - RNA, 1701 nt, Artificial Sequence
  derived and/or modified CDS sequence (wt) from hemagglutinin__InfluenzaA__ACR39453
auggaggcaauacuaguaguucugcuauauacauuugcaaccgcaaaugcagacacauuauguauagguuaucaugcgaacaauucaacagacacuguagacacaguacuagaaaagaauguaacaguaacacacucuguuaaccuucuagaagacaagcauaacgggaaacuaugcaaacuaagagggguagccccauugcauuuggguaaauguaacauugcuggcuggauccugggaaauccagagugugaaucacucuccacagcaagcucaugguccuacauuguggaaacaucuaguucagacaauggaacguguuacccaggagauuucaucgauuaugaggagcuaagagagcaauugagcucagugucaucauuugaaagguuugagauauuccccaagacaaguucauggcccaaucaugacucgaacaaagguguaacggcagcauguccucaugcuggagcaaaaagcuucuacaaaaauuuaauauggcuaguuaaaaaaggaaauucauacccaaagcucagcaaauccuacauuaaugauaaagggaaagaaguccucgugcuauggggcauucaccauccaucuacuagugcugaccaacaaagucucuaucagaaugcagaugcauauguuuuuguggggacaucaagauacagcaagaaguucaagccggaaauagcaauaagacccaaagugagggaucaagaagggagaaugaacuauuacuggacacuaguagagccgggagacaaaauaacauucgaagcaacuggaaaucuagugguaccgagauaugcauucgcaauggaaagaaaugcuggaucugguauuaucauuucagauacaccaguccacgauugcaauacaacuugucagacacccaagggugcuauaaacaccagccucccauuucagaauauacauccgaucacaauuggaaaauguccaaaauauguaaaaagcacaaaauugagacuggccacaggauugaggaaugucccgucuauucaaucuagaggccuauuuggggccauugccgguuucauugaagggggguggacagggaugguagauggaugguacgguuaucaccaucaaaaugagcaggggucaggauaugcagccgaccugaagagcacacagaaugccauugacgagauuacuaacaaaguaaauucuguuauugaaaagaugaauacacaguucacagcaguagguaaagaguucaaccaccuggaaaaaagaauagagaauuuaaauaaaaaaguugaugaugguuuccuggacauuuggacuuacaaugccgaacuguugguucuauuggaaaaugaaagaacuuuggacuaccacgauucaaaugugaagaacuuauaugaaaagguaagaagccaguuaaaaaacaaugccaaggaaauuggaaacggcugcuuugaauuuuaccacaaaugcgauaacacgugcauggaaagugucaaaaaugggacuuaugacuacccaaaauacucagaggaagcaaaauuaaacagagaagaaauagaugggguaaagcuggaaucaacaaggauuuaccagauuuuggcgaucuauucaacugucgccaguucauugguacugguagucucccugggggcaaucaguuucuggaugugcucuaaugggucucuacaguguagaauauguauuuaa

SEQ ID NO: 34840 - RNA, 1701 nt, Artificial Sequence; identical to SEQ ID NO: 34681
  derived and/or modified CDS sequence (wt) from hemagglutinin__InfluenzaA__ACR39463

SEQ ID NO: 34841 - RNA, 1701 nt, Artificial Sequence; identical to SEQ ID NO: 34681
  derived and/or modified CDS sequence (wt) from hemagglutinin__InfluenzaA__ACR39473

SEQ ID NO: 34842 - RNA, 1701 nt, Artificial Sequence; identical to SEQ ID NO: 34681
  derived and/or modified CDS sequence (wt) from hemagglutinin__InfluenzaA__ACR39483

SEQ ID NO: 34843 - RNA, 1701 nt, Artificial Sequence; identical to SEQ ID NO: 34681
  derived and/or modified CDS sequence (wt) from hemagglutinin__InfluenzaA__ACR39493

SEQ ID NO: 34844 - RNA, 1701 nt, Artificial Sequence; identical to SEQ ID NO: 34681
  derived and/or modified CDS sequence (wt) from hemagglutinin__InfluenzaA__ACR40288

SEQ ID NO: 34845 - RNA, 1701 nt, Artificial Sequence; identical to SEQ ID NO: 34681
  derived and/or modified CDS sequence (wt) from hemagglutinin__InfluenzaA__ACR40298

SEQ ID NO: 34846 - RNA, 1701 nt, Artificial Sequence
  derived and/or modified CDS sequence (wt) from hemagglutinin__InfluenzaA__ACR40308
augaaggcaauacuaguaguucugcuauauacauuugcaaccgcaaaugcagacacauuauguauagguuaucaugcgaacaauucaacagacacuguagacacaguacuagaaaagaauguaacaguaacacacucuguuaaccuucuagaagacaagcauaacgggaaacuaugcaaacuaagagggguagccccauugcauuuggguaaauguaacauugcuggcuggauccugggaaauccagagugugaaucacucuccacagcaagcucaugguccuacauuguggaaacaucuaguucagacaauggaacguguuacccaggagauuucaucgauuaugaggagcuaagagagcaauugagcucagugucaucauuugaaagguuugagauauuccccaagacaaguucauggcccaaucaugacucgaacaaagguguaacggcagcauguccucaugcuggagcaaaaagcuucuacaaaaauuuaauauggcuaguuaaaaaaggaaauucauacccaaagcucagcaaauccuacauuaaugauaaagggaaagaaguccucgugcuauggggcauucaccauccaucuacuagugcugaccaacaaagucucuaucagaaugcagaugcauauguuuuuguggggucaucaagauacagcaagaaguucaagccggaaauagcaauaagacccaaagugagggaucaagaagggagaaugaacuauuacuggacacuaguagagccgggagacaaaauaacauucgaagcaacuggaaaucuagugguaccgagauaugcauucgcaauggaaagaaaugcuggaucugguauuaucauuucagauacaccaguccacgauugcaauacaacuugucaaacacccaagggugcuauaaacaccagccucccauuucagaauauauauccgaucacaauuggaaaauguccaaaauauguaaaaagcacaaaauugagacuggccacaggauugaggaaugucccgucuauucaaucuagaggccuauuuggggccauugccgguuucauugaagggggguggacagggaugguagauggaugguacgguuaucaccaucaaaaugagcaggggucaggauaugcagccgaccugaagagcacacagaaugccauugacgagauuacuaacaaaguaaauucuguuauugaaaagaugaauacacaguucacagcaguagguaaagaguucaaccaccuggaaaaaagaauagagaauuuaaauaaaaaaguugaugaugguuuccuggacauuuggacuuacaaugccgaacuguugguucuauuggaaaaugaaagaacuuuggacuaccacgauucaaaugugaagaacuuauaugaaaagguaagaagccagcuaaaaaacaaugccaaggaaauuggaaacggcugcuuugaauuuuaccacaaaugcgauaacacgugcauggaaagugucaaaaaugggacuuaugacuacccaaaauacucagaggaagcaaaauuaaacagagaagaaauagaugggguaaagcuggaaucaacaaggauuuaccagauuuuggcgaucuauucaacugucgccaguucauugguacugguagucucccugggggcaaucaguuucuggaugugcucuaaugggucucuacaguguagaauauguauuuaa

SEQ ID NO: 34847 - RNA, 1701 nt, Artificial Sequence; identical to SEQ ID NO: 34681
  derived and/or modified CDS sequence (wt) from hemagglutinin__InfluenzaA__ACR40318

SEQ ID NO: 34848 - RNA, 1701 nt, Artificial Sequence; identical to SEQ ID NO: 34681
  derived and/or modified CDS sequence (wt) from hemagglutinin__InfluenzaA__ACR40328

SEQ ID NO: 34849 - RNA, 1701 nt, Artificial Sequence; identical to SEQ ID NO: 34681
  derived and/or modified CDS sequence (wt) from hemagglutinin__InfluenzaA__ACR40338

SEQ ID NO: 34850 - RNA, 1701 nt, Artificial Sequence; identical to SEQ ID NO: 34681
  derived and/or modified CDS sequence (wt) from hemagglutinin__InfluenzaA__ACR40348

SEQ ID NO: 34851 - RNA, 1701 nt, Artificial Sequence; identical to SEQ ID NO: 34681
  derived and/or modified CDS sequence (wt) from hemagglutinin__InfluenzaA__ACR40358

SEQ ID NO: 34852 - RNA, 1701 nt, Artificial Sequence; identical to SEQ ID NO: 34681
  derived and/or modified CDS sequence (wt) from hemagglutinin__InfluenzaA__ACR40378

SEQ ID NO: 34853 - RNA, 1701 nt, Artificial Sequence; identical to SEQ ID NO: 34681
  derived and/or modified CDS sequence (wt) from hemagglutinin__InfluenzaA__ACR40388

SEQ ID NO: 34854 - RNA, 1701 nt, Artificial Sequence; identical to SEQ ID NO: 34676
  derived and/or modified CDS sequence (wt) from hemagglutinin__InfluenzaA__ACR46986

SEQ ID NO: 34855 - RNA, 1701 nt, Artificial Sequence; identical to SEQ ID NO: 34676
  derived and/or modified CDS sequence (wt) from hemagglutinin__InfluenzaA__ACR46988

SEQ ID NO: 34856 - RNA, 1701 nt, Artificial Sequence; identical to SEQ ID NO: 34676
  derived and/or modified CDS sequence (wt) from hemagglutinin__InfluenzaA__ACR46989

SEQ ID NO: 34857 - RNA, 1701 nt, Artificial Sequence; identical to SEQ ID NO: 34676
  derived and/or modified CDS sequence (wt) from hemagglutinin__InfluenzaA__ACR46990

SEQ ID NO: 34858 - RNA, 1701 nt, Artificial Sequence
  derived and/or modified CDS sequence (wt) from hemagglutinin__InfluenzaA__ACR46992
augaaggcaauacuaguaguucugcuauauacauuugcaaccgcaaaugcagacacauuauguauagguuaucaugcgaacaauucaacagacacuguagacacaguacuagaaaagaauguaacaguaacacacucuguuaaccuucuagaagacaagcauaacgggaaacuaugcaaacuaagagggguagccccauugcauuuggguaaauguaacauugcuggcuggauccugggaaauccagagugugaaucacucuccacagcaagcucaugguccuacauuguggaaacaucuaguucagacaauggaacguguuacccaggagauuucaucgauuaugaggagcuaagagagcaauugagcucagugucaucauuugaaagguuugagauauuccccaagacaaguucauggcccaaucaugacucgaacaaagguguaacggcagcauguccucaugcuggagcaaaaagcuucuacaaaaauuuaauauggcuaguuaaaaaaggaaauucauacccaaagcucagcaaauccuacauuaaugauaaagggaaagaaguccucgugcuauggggcauucaccauccaucuacuagugcugaccaacaaagucucuaucagaaugcagaugcauauguuuuuguggggucaucaagauacagcaagaaguucaagccggaaauagcaauaagacccaaagugagggaucaagaagggagaaugaacuauuacuggacacuaguagagccgggagacaaaauaacauucgaagcaacuggaaaucuagugguaccgagauaugcauucgcaauggaaagaaaugcuggaucugguauuaucauuucagauacaccaguccacgauugcaauacaacuugucagacacccaagggugcuauaaacaccagccucccauuucagaauauacauccgaucacaauuggaaaauguccaaaauauguaaaaagcacaaaauugagacuggccacaggauugaggaaugucccgucuauucaaucuagaggccuauuuggggccauugccgguuucauugaagggggguggacagggaugguagauggaugguacgguuaucaccaucaaaaugagcaggggucaggauaugcagccgaccugaagagcacacagaaugccauugacgagauuacuaacaaaguaaauucuguuauugaaaagaugaauacacaguucacagcaguagguaaagaguucaaccaccuggaaaaaagaauagagaauuuaaauaaaaaaguugaugaugguuuccuggacauuuggacuuacaaugccgaacuguugguucuauuggaaaaugaaagaacuuuggacuaccacgauucaaaugugaagaacuuauaugaaaagguaagaagccagcuaaaaaacaaugccaaggaaauuggaaacggcugcuuugaauuuuaucacaaaugcgauaacacgugcauggaaagugucaaaaaugggacuuaugacuacccaaaauacucagaggaagcaaaauuaaacagagaagaaauagaugggguaaagcuggaaucaacaaggauuuaccagauuuuggcgaucuauucaacugucgccaguucauugguacugguagucucccugggggcaaucaguuucuggaugugcucuaaugggucucuacaguguagaauauguauuuaa

SEQ ID NO: 34859 - RNA, 1701 nt, Artificial Sequence; identical to SEQ ID NO: 34676
  derived and/or modified CDS sequence (wt) from hemagglutinin__InfluenzaA__ACR46993

SEQ ID NO: 34860 - RNA, 1701 nt, Artificial Sequence; identical to SEQ ID NO: 34676
  derived and/or modified CDS sequence (wt) from hemagglutinin__InfluenzaA__ACR46994

SEQ ID NO: 34861 - RNA, 1701 nt, Artificial Sequence
  derived and/or modified CDS sequence (wt) from hemagglutinin__InfluenzaA__ACR47006
augaaggcaauacuaguaguucugcuauauacauuugcaaccgcaaaugcagacacauuauguauagguuaucaugcgaacaauucaacagacacuguagacacaguacuagaaaagaauguaacaguaacacacucuguuaacauucuagaagacaagcauaacgggaaacuaugcaaacuaagagggguagccccauugcauuuggguaaaugcaacauugcuggcuggauccugggaaauccagagugugaaucacucuccacagcaagcucaugguccuacauuguggaaacaucuaguucagacaauggaacguguuacccaggagauuucaucgauuaugaggagcuaagagagcaauugagcucagugucaucauuugaaagguuugagauauuccccaagacaaguucauggcccaaucaugacucgaacaaagguguaacggcagcauguccucaugcuggagcaaaaagcuucuacaaaaauuuaauauggcuaguuaaaaaaggaaauucauacccaaagcucagcaaauccuacauuaaugauaaagggaaagaaguccucgugcuauggggcauucaccauccaucuacuagugcugaccaacaaagucucuaucagaaugcagaugcauauguuuuuguggggucaucaagauacagcaagaaguucaagccggaaauagcaauaagacccaaagugagggaucaagaagggagaaugaacuauuacuggacacuaguagagccgggagacaaaauaacauucgaagcaacuggaaaucuagugguaccgagauaugcauucgcaauggaaagaaaugcuggaucugguauuaucauuucagauacaccaguccacgauugcaauacaacuugucagacacccaagggugcuauaaacaccagccucccauuucagaauauacauccgaucacaauuggaaaauguccaaaauauguaaaaagcacaaaauugagacuggccacaggauugaggaaugucccgucuauucaaucuagaggccuauuuggggccauugccgguuucauugaagggggguggacagggaugguagauggaugguacgguuaucaccaucaaaaugagcaggggucaggauaugcagccgaccugaagagcacacagaaugccauugacgagauuacuaacaaaguaaauucuguuauugaaaagaugaauacacaguucacagcaguagguaaagaguucaaccaccuggaaaaaagaauagagaauuuaaauaaaaaaguugaugaugguuuccuggacauuuggacuuacaaugccgaacuguugguucuauuggaaaaugaaagaacuuuggacuaccacgauucaaaugugaagaacuuauaugaaaagguaagaagccagcuaaaaaacaaugccaaggaaauuggaaacggcugcuuugaauuuuaccacaaaugcgauaacacgugcauggaaagugucaaaaaugggacuuaugacuacccaaaauacucagaggaagcaaaauuaaacagagaagaaauagaugggguaaagcuggaaucaacaaggauuuaccagauuuuggcgaucuauucaacugucgccaguucauugguacugguagucucccugggggcaaucaguuucuggaugugcucuaaugggucucuacaguguagaauauguauuuaa

SEQ ID NO: 34862 - RNA, 1701 nt, Artificial Sequence; identical to SEQ ID NO: 34681
  derived and/or modified CDS sequence (wt) from hemagglutinin__InfluenzaA__ACR49281

SEQ ID NO: 34863 - RNA, 1701 nt, Artificial Sequence
  derived and/or modified CDS sequence (wt) from hemagglutinin__InfluenzaA__ACR49282
augaaggcaauacuaguaguucugcuauauacauuugcaaccgcaaaugcagacacauuauguauagguuaucaugcgaacaauucaacagacacuguagacacaguacuagaaaagaauguaacaguaacacacucuguugaccuucuagaagacaagcauaacgggaaacuaugcaaacuaagagggguagccccauugcauuuggguaaauguaacauugcuggcuggauccugggaaauccagagugugaaucacucuccacagcaagcucaugguccuacauuguggaaacaucuaguucagacaauggaacguguuacccaggagauuucaucgauuaugaggagcuaagagagcaauugagcucagugucaucauuugaaagguuugagauauuccccaagacaaguucauggcccaaucaugacucgaacaaagguguaacggcagcauguccucaugcuggagcaaaaagcuucuacaaaaauuuaauauggcuaguuaaaaaaggaaauucauacccaaagcucagcaaauccuacauuaaugauaaagggaaagaaguccucgugcuauggggcauucaccauccaucuacuagugcugaccaacaaagucucuaucagaaugcagaugcauauguuuuuguggggucaucaagauacagcaagaaguucaagccggaaauagcaauaagacccaaagugagggaucaagaagggagaaugaacuauuacuggacacuaguagagccgggagacaaaauaacauucgaagcaacuggaaaucuagugguaccgagauaugcauucgcaauggaaagaaaugcuggaucugguauuaucauuucagauacaccaguccacgauugcaauacaacuugucagacacccaagggugcuauaaacaccagccucccauuucagaauauacauccgaucacaauuggaaaauguccaaaauauguaaaaagcacaaaauugagacuggccacaggauugaggaaugucccgucuauucaaucuagaggccuauuuggggccauugccgguuucauugaagggggguggacagggaugguagauggaugguacgguuaucaccaucaaaaugagcaggggucaggauaugcagccgaccugaagagcacacagaaugccauugacgagauuacuaacaaaguaaauucuguuauugaaaagaugaauacacaguucacagcaguagguaaagaguucaaccaccuggaaaaaagaauagagaauuuaaauaaaaaaguugaugaugguuuccuggacauuuggacuuacaaugccgaacuguugguucuauuggaaaaugaaagaacuuuggacuaccacgauucaaaugugaagaacuuauaugaaaagguaagaagccagcuaaaaaacaaugccaaggaaauuggaaacggcugcuuugaauuuuaccacaaaugcgauaacacgugcauggaaagugucaaaaaugggacuuaugacuacccaaaauacucagaggaagcaaaauuaaacagagaagaaauagaugggguaaagcuggaaucaacaaggauuuaccagauuuuggcgaucuauucaacugucgccaguucauugguacugguagucucccugggggcaaucaguuucuggaugugcucuaaugggucucuacaguguagaauauguauuuaa

SEQ ID NO: 34864 - RNA, 1701 nt, Artificial Sequence; identical to SEQ ID NO: 34668
  derived and/or modified CDS sequence (wt) from hemagglutinin__InfluenzaA__ACR49283

SEQ ID NO: 34865 - RNA, 1701 nt, Artificial Sequence; identical to SEQ ID NO: 34676
  derived and/or modified CDS sequence (wt) from hemagglutinin__InfluenzaA__ACR49288

SEQ ID NO: 34866 - RNA, 1701 nt, Artificial Sequence; identical to SEQ ID NO: 34707
  derived and/or modified CDS sequence (wt) from hemagglutinin__InfluenzaA__ACR49290

SEQ ID NO: 34867 - RNA, 1701 nt, Artificial Sequence; identical to SEQ ID NO: 34681
  derived and/or modified CDS sequence (wt) from hemagglutinin__InfluenzaA__ACR49291

SEQ ID NO: 34868 - RNA, 1701 nt, Artificial Sequence; identical to SEQ ID NO: 34707
  derived and/or modified CDS sequence (wt) from hemagglutinin__InfluenzaA__ACR49293

SEQ ID NO: 34869 - RNA, 1701 nt, Artificial Sequence; identical to SEQ ID NO: 34707
  derived and/or modified CDS sequence (wt) from hemagglutinin__InfluenzaA__ACR49295

SEQ ID NO: 34870 - RNA, 1701 nt, Artificial Sequence; identical to SEQ ID NO: 34721
  derived and/or modified CDS sequence (wt) from hemagglutinin__InfluenzaA__ACR50993

SEQ ID NO: 34871 - RNA, 1701 nt, Artificial Sequence; identical to SEQ ID NO: 34681
  derived and/or modified CDS sequence (wt) from hemagglutinin__InfluenzaA__ACR50995

SEQ ID NO: 34872 - RNA, 1701 nt, Artificial Sequence; identical to SEQ ID NO: 34681
  derived and/or modified CDS sequence (wt) from hemagglutinin__InfluenzaA__ACR51005

SEQ ID NO: 34873 - RNA, 1701 nt, Artificial Sequence; identical to SEQ ID NO: 34681
  derived and/or modified CDS sequence (wt) from hemagglutinin__InfluenzaA__ACR51015

SEQ ID NO: 34874 - RNA, 1701 nt, Artificial Sequence; identical to SEQ ID NO: 34681
  derived and/or modified CDS sequence (wt) from hemagglutinin__InfluenzaA__ACR51025

SEQ ID NO: 34875 - RNA, 1701 nt, Artificial Sequence; identical to SEQ ID NO: 34681
  derived and/or modified CDS sequence (wt) from hemagglutinin__InfluenzaA__ACR51035

SEQ ID NO: 34876 - RNA, 1701 nt, Artificial Sequence; identical to SEQ ID NO: 34681
  derived and/or modified CDS sequence (wt) from hemagglutinin__InfluenzaA__ACR51045

SEQ ID NO: 34877 - RNA, 1701 nt, Artificial Sequence; identical to SEQ ID NO: 34681
  derived and/or modified CDS sequence (wt) from hemagglutinin__InfluenzaA__ACR51055

SEQ ID NO: 34878 - RNA, 1701 nt, Artificial Sequence; identical to SEQ ID NO: 34676
  derived and/or modified CDS sequence (wt) from hemagglutinin__InfluenzaA__ACR51065

SEQ ID NO: 34879 - RNA, 1701 nt, Artificial Sequence; identical to SEQ ID NO: 34681
  derived and/or modified CDS sequence (wt) from hemagglutinin__InfluenzaA__ACR52368

SEQ ID NO: 34880 - RNA, 1701 nt, Artificial Sequence; identical to SEQ ID NO: 34681
  derived and/or modified CDS sequence (wt) from hemagglutinin__InfluenzaA__ACR52378

SEQ ID NO: 34881 - RNA, 1701 nt, Artificial Sequence; identical to SEQ ID NO: 34681
  derived and/or modified CDS sequence (wt) from hemagglutinin__InfluenzaA__ACR52398

SEQ ID NO: 34882 - RNA, 1701 nt, Artificial Sequence; identical to SEQ ID NO: 34681
  derived and/or modified CDS sequence (wt) from hemagglutinin__InfluenzaA__ACR52408

SEQ ID NO: 34883 - RNA, 1701 nt, Artificial Sequence; identical to SEQ ID NO: 34681
  derived and/or modified CDS sequence (wt) from hemagglutinin__InfluenzaA__ACR52418

SEQ ID NO: 34884 - RNA, 1701 nt, Artificial Sequence; identical to SEQ ID NO: 34681
  derived and/or modified CDS sequence (wt) from hemagglutinin__InfluenzaA__ACR52428

SEQ ID NO: 34885 - RNA, 1701 nt, Artificial Sequence; identical to SEQ ID NO: 34681
  derived and/or modified CDS sequence (wt) from hemagglutinin__InfluenzaA__ACR52438

SEQ ID NO: 34886 - RNA, 1701 nt, Artificial Sequence
  derived and/or modified CDS sequence (wt) from hemagglutinin__InfluenzaA__ACR52448
augaaggcaauacuaguaguucugcuauauacauuugcaaccgcaaaugcagacacauuauguauagguuaucaugcgaacaauucaacagacacuguagacacaguacuagaaaagaauguaacaguaacacacucuguuaaccuucuagaagacaagcauaacgggaaacuaugcaaacuaagagggguagccccauugcauuuggguaaauguaacauugcuggcuggauccugggaaauccagagugugaaucacucuccacagcaagcucaugguccuacauuguggaaacaucuaguucagacaauggaacguguuacccaggagauuucaucgauuaugaggagcuaagagagcaauugagcucagugucaucauuugaaagguuugagauauuccccaagacaaguucauggcccaaucaugacucgaacaaagguguaacggcagcauguccucaugcuggagcaaaaagcuucuacaaaaauuuaauauggcuaguuaaaaaaggaaauucauacccaaagcucagcaaauccuacauuaaugauaaagggaaagaaguccucgugcuauggggcauucaccauccaucuacuagugcugaccaacaaagucucuaucagaaugcagaugcauauguuuuuguggggacaucaagauacagcaagaaguucaagccggaaauagcaauaagacccaaagugagggaucaagaagggagaaugaacuauuacuggacacuaguagagccgggagacaaaauaacauucgaagcaacuggaaaucuagugguaccgagauaugcauucgcaauggaaagaaaugcuggaucugguauuaucauuucagauacaccaguccacgauugcaauacaacuugucagacacccaagggugcuauaaacaccagccucccauuucagaauauacauccgaucacaauuggaaaauguccaaaauauguaaaaagcacaaaauugagacuggccacaggauugaggaaugucccgucuauucaaucuagaggccuauuuggggccauugccgguuucauugaagggggguggacagggaugguagauggaugguacgguuaucaccaucaaaaugagcaggggucaggauaugcagccgaccugaagagcacacagaaugcuauugacgagauuacuaacaaaguaaauucuguuauugaaaagaugaauacacaguucacagcaguagguaaagaguucaaccaccuggaaaaaagaauagagaauuuaaauaaaaaaguugaugaugguuuccuggacauuuggacuuacaaugccgaacuguugguucuauuggaaaaugaaagaacuuuggacuaccacgauucaaaugugaagaacuuauaugaaaagguaagaagccaguuaaaaaacaaugccaaggaaauuggaaacggcugcuuugaauuuuaccacaaaugcgauaacacgugcauggaaagugucaaaaaugggacuuaugacuacccaaaauacucagaggaagcaaaauuaaacagagaagaaauagaugggguaaagcuggaaucaacaaggauuuaccagauuuuggcgaucuauucaacugucgccaguucauugguacugguagucucccugggggcaaucaguuucuggaugugcucuaaugggucucuacaguguagaauauguauuuaa

SEQ ID NO: 34887 - RNA, 1701 nt, Artificial Sequence; identical to SEQ ID NO: 34681
  derived and/or modified CDS sequence (wt) from hemagglutinin__InfluenzaA__ACR52458

SEQ ID NO: 34888 - RNA, 1701 nt, Artificial Sequence; identical to SEQ ID NO: 34681
  derived and/or modified CDS sequence (wt) from hemagglutinin__InfluenzaA__ACR52468

SEQ ID NO: 34889 - RNA, 1701 nt, Artificial Sequence; identical to SEQ ID NO: 34681
  derived and/or modified CDS sequence (wt) from hemagglutinin__InfluenzaA__ACR52478

SEQ ID NO: 34890 - RNA, 1701 nt, Artificial Sequence; identical to SEQ ID NO: 34681
  derived and/or modified CDS sequence (wt) from hemagglutinin__InfluenzaA__ACR52488

SEQ ID NO: 34891 - RNA, 1701 nt, Artificial Sequence; identical to SEQ ID NO: 34714
  derived and/or modified CDS sequence (wt) from hemagglutinin__InfluenzaA__ACR54045

SEQ ID NO: 34892 - RNA, 1701 nt, Artificial Sequence
  derived and/or modified CDS sequence (wt) from hemagglutinin__InfluenzaA__ACR54047
augaaggcaauacuaguaguucugcuauauacauuugcaaccgcaaaugcagacacauuauguauagguuaucaugcgaacaauucaacagacacuguagacacaguacuagaaaagaauguaacaguaacacacucuguuaaccuucuagaagacaagcauaacgggaaacuaugcaaacuaagagggguagccccauugcauuuggguaaauguaacauugcuggcuggauccugggaaauccagagugugaaucacucuccacagcaagcucaugguccuacauuguggaaacaucuaguucagacaauggaacguguuacccaggagauuucaucgauuaugaggagcuaagagagcaauugagcucagugucaucauuugaaagguuugagauauuccccaagacaaguucauggcccaaucaugacucgaacaaagguguaacggcagcauguccucaugcuggagcaaaaagcuucuacaaaaauuuaauauggcuaguuaaaaaaggaaauucauacccaaagcucagcaaauccuacauuaaugauaaagggaaagaaguccucgugcuauggggcauucaccauccaucuacuagugcugaccaacaaagucucuaucagaaugcagaugcauauguuuuuguggggucaucaagauacagcaagaaguucaagccggaaauagcaauaagacccaaagugagggaucaagaagggagaaugaacuauuacuggacacuaguagagccgggagacaaaauaacauucgaagcaacuggaaaucuagugguaccgagauaugcauucgcaauggaaagaaaugcuggaucugguauuaucauuucagauacaccaguccacgauugcaauacaacuugucagacacccaagggugcuauaaacaccagccucccauuucagaauauacauccgaucacaauuggaaaauguccaaaauauguaaaaagcacaaaauugagacuggccacaggauugaggaaugucccgucuauucaaucuagaggccuauuuggggccauugccgguuucauugaagggggguggacagggaugguagauggaugguacgguuaucaccaucaaaaugagcaggggucaggauaugcagccgaccugaagagcacacagaaugccauugacgagauuacuaacaaaguaaauucuguuauugaaaagaugaauacacaguucacagcaguagguaaagaguucaaccaccuggaaaaaagaauagagaauuuaaauaaaaaaguugaugaugguuuccuggacauuuggacuuacaaugccgaacuguugguucuauuggaaaaugaaagaacuuuggacuaccacgauucaaaugugaagaacuuauaugaaaagguaagaagccagcuaaaaaacaaugccaaggaaauuggaaacggcugcuuugaauuuuaccacaaaugcgauaacacgugcauggaaagugucaaaaaugggacuuaugacuacccaaaauacucagaggaagcaaaauuaaacagagaagaaauagaugggauaaagcuggaaucaacaaggauuuaccagauuuuggcgaucuauucaacugucgccaguucauugguacugguagucucccugggggcaaucaguuucuggaugugcucuaaugggucucuacaguguagaauauguauuuaa

SEQ ID NO: 34893 - RNA, 1701 nt, Artificial Sequence
  derived and/or modified CDS sequence (wt) from hemagglutinin__InfluenzaA__ACR54964
augaaggcaauacuaguaguucugcuauauacauuugcaaccgcaaaugcagacacauuauguauagguuaucaugcgaacaauucaacagacacuguagacacaguacuagaaaagaauguaacaguaacacacucuguuaaccuucuagaagacaagcauaacgggaaacuaugcaaacuaagagggguagccccauugcauuuggguaaauguaacauugcuggcuggauccugggaaauccagagugugaaucacucuccacagcaagcucaugguccuacauuguggaaacaucuaguucagacaauggaacguguuacccaggagauuucaucgauuaugaggagcuaagagagcaauugagcucagugucaucauuugaaagguuugagauauuccccaagacaaguucauggcccaaucaugacucgaacaaagguguaacggcagcauguccucaugcuggagcaaaaagcuucuacaaaaauuuaauauggcuaguuaaaaaaggaaauucauacccaaagcucagcaaauccuacauuaaugauaaagggaaagaaguccucgugcuauggggcauucaccauccaucuacuagugcugaccaacaaagucucuaucagaaugcagaugcauauguuuuuguggggacaucaagauacagcaagaaguucaagccggaaauagcaauaagacccaaagugagggaucaagaagggagaaugaacuauuacuggacacuaguagagccgggagacaaaauaacauucgaagcaacuggaaaucuagugguaccgagauaugcauucgcaauggaaagaaaugcuggaucugguauuaucauuucagauacaccaguccacgauugcaauacaacuugucagacacccaagggugcuauaaacaccagccucccauuucagaauauacauccgaucacaauuggaaaauguccaaaauauguaaaaagcacaaaauugagacuggccacaggauugaggaaugucccgucuauucaaucuagaggccuauuuggggccauugccgguuucauugaagggggguggacagggaugguagauggaugguacgguuaucaccaucaaaaugagcaggggucaggauaugcagccgaccugaagagcacacagaaugccauugacgagauuacuaacaaaguaaauucuguuauugaaaagaugaauacacaguucauagcaguagguaaagaguucaaccaccuggaaaaaagaauagagaauuuaaauaaaaaaguugaugaugguuuccuggacauuuggacuuacaaugccgaacuguugguucuauuggaaaaugaaagaacuuuggacuaccacgauucaaaugugaagaacuuauaugaaaagguaagaagccaguuaaaaaacaaugccaaggaaauuggaaacggcugcuuugaauuuuaccacaaaugcgauaacacgugcauggaaagugucaaaaaugggacuuaugacuacccaaaauacucagaggaagcaaaauuaaacagagaagaaauagaugggguaaagcuggaaucaacaaggauuuaccagauuuuggcgaucuauucaacugucgccaguucauugguacugguagucucccugggggcaaucaguuucuggaugugcucuaaugggucucuacaguguagaauauguauuuaa

SEQ ID NO: 34894 - RNA, 1701 nt, Artificial Sequence; identical to SEQ ID NO: 34772
  derived and/or modified CDS sequence (wt) from hemagglutinin__InfluenzaA__ACR54974

SEQ ID NO: 34895 - RNA, 1701 nt, Artificial Sequence
  derived and/or modified CDS sequence (wt) from hemagglutinin__InfluenzaA__ACR54984
augaaggcaauacuaguaguucugcuauauacauuugcaaccgcaaaugcagacacauuauguauagguuaucaugcgaacaauucaacagacacuguagacacaguacuagaaaagaauguaacaguaacacacucuguuaaccuucuagaagacaagcauaacgggaaacuaugcaaacuaagagggguagccccauugcauuuggguaaauguaacauugcuggcuggauccugggaaauccagagugugaaucacucuccacagcaagcucaugguccuacauuguggaaacaucuaguucagacaauggaacguguuacccaggagauuucaucgauuaugaggagcuaagagagcaauugagcucagugucaucauuugaaagguuugagauauuccccaagacaaguucauggcccaaucaugacucgaacaaagguguaacggcagcauguccucaugcuggagcaaaaagcuucuacaaaaauuuaauauggcuaguuaaaaaaggaaauucauacccaaagcucagcaaauccuacauuaaugauaaagggaaagaaguccucgugcuauggggcauucaccauccaucuacuagugcugaccaacaaagucucuaucagaaugcagaugcauauguuuuuguggggacaucaagauacagcaagaaguucaagccggaaauagcaauaagacccaaagugagggaucaagaagggagaaugaacuauuacuggacacuaguagagccgggagacaaaauaacauucgaagcaacuggaaaucuagugguaccgagauaugcauucgcaauggaaagaaaugcuggaucugguauuaucauuucagauacaccaguccacgauugcaauacaacuugucagacacccaagggugcuauaaacaccagccuaccauuucagaauauacauccgaucacaauuggaaaauguccaaaauauguaaaaagcacaaaauugagacuggccacaggauugaggaaugucccgucuauucaaucuagaggccuauuuggggccauugccgguuucauugaagggggguggacagggaugguagauggaugguacgguuaucaccaucaaaaugagcaggggucaggauaugcagccgaccugaagagcacacagaaugccauugacgagauuacuaacaaaguaaauucuguuauugaaaagaugaauacacaguucacagcaguagguaaagaguucaaccaccuggaaaaaagaauagagaauuuaaauaaaaaaguugaugaugguuuccuggacauuuggacuuacaaugccgaacuguugguucuauuggaaaaugaaagaacuuuggacuaccacgauucaaaugugaagaacuuauaugaaaagguaagaagccaguuaaaaaacaaugccaaggaaauuggaaacggcugcuuugaauuuuaccacaaaugcgauaacacgugcauggaaagugucaaaaaugggacuuaugacuacccaaaauacucagaggaagcaaaauuaaacagagaagaaauagaugggguaaagcuggaaucaacaaggauuuaccagauuuuggcgaucuauucaacugucgccaguucauugguacugguagucucccugggggcaaucaguuucuggaugugcucuaaugggucucuacaguguagaauauguauuuaa

SEQ ID NO: 34896 - RNA, 1701 nt, Artificial Sequence; identical to SEQ ID NO: 34676
  derived and/or modified CDS sequence (wt) from hemagglutinin__InfluenzaA__ACR54994

SEQ ID NO: 34897 - RNA, 1701 nt, Artificial Sequence
  derived and/or modified CDS sequence (wt) from hemagglutinin__InfluenzaA__ACR55004
augaaggcaauacuaguaguucugcuauauacauuugcaaccgcaaaugcagacacauuauguauagguuaucaugcgaacaauucaacagacacuguagacacaguacuagaaaagaauguaacaguaacacacucuguuaaccuucuagaagacaagcauaacgggaaacuaugcaaacuaagagggguagccccauugcauuuggguaaauguaacauugcuggcuggauccugggaaauccagagugugaaucacucuccacagcaagcucaugguccuacauuguggaaacaucuaguucagacaauggaacguguuacccaggagauuucaucgauuaugaggagcuaagagagcaauugagcucagugucaucauuugaaagguuugagauauuccccaagacaaguucauggcccaaucaugacucgaacaaagguguaacggcagcauguccucaugcuggagcaaaaagcuucuacaaaaauuuaauauggcuaguuaaaaaaggaaauucauacccaaagcucagcaaauccuacauuaaugauaaagggaaagaaguccucgugcuauggggcauucaccauccaucuacuagugcugaccaacaaagucucuaucagaaugcagaugcauauguuuuuguggggucaucaagauacagcaagaaguucaagccggaaauagcaauaagacccaaagugagggaucaagaagggagaaugaacuauuacuggacacuaguagagccgggagacaaaauaacauucgaagcaacuggaaaucuagugguaccgagauaugcauucgcaauggaaagaaaugcuggaucugguauuaucauuucagauacaccaguccacgauugcaauacaacuugucagacacccaagggugcuauaaacaccagccucccauuucagaauauacauccgaucacaauuggaaaauguccaaaauauguaaaaagcacaaaauugagacuggccacaggauugaggaaugucccgucuauucaaucuagaggccuauuuggggccauugccgguuucauugaagggggguggacagggaugguagauggaugguacgguuaucaccaucaaaaugagcaggggucaggauaugcagccgaccugaagagcacacagaaugccauugacgagauuacuaacaaaguaaauucuguuauugaaaagaugaauacacaguucacagcaguagguaaagaguucaaccaccuggaaaaaagaauagagaauuuaaauaaaaaaguugaugaugguuuccuggacauuuggacuuacaaugccgaacuguugguucuauuggaaaaugaaagaacuuuggacuaccacgauucaaaugugaagaacuuauaugaaaagguaagaagccaguuaaaaaacaaugccaaggaaauuggaaacggcugcuuugaauuuuaccacaaaugcgauaacacgugcauggaaagugucaaaaaugggacuuaugacuacccaaaauacucagaggaagcaaaauuaaacagagaagaaauagaugggguaaagcuggaaucaacaaggauuuaccagauuuuggcgaucuauucaacugucgccagcucauugguacugguagucucccugggggcaaucaguuucuggaugugcucuaaugggucucuacaguguagaauauguauuuaa

SEQ ID NO: 34898 - RNA, 1701 nt, Artificial Sequence
  derived and/or modified CDS sequence (wt) from hemagglutinin__InfluenzaA__ACR56380
augaaggcaauacuaguaguucugcuauauacauuugcaaccgcaaaugcagacacauuauguauagguuaucaugcgaacaauucaacagacacuguagacacaguacuagaaaagaauguaacaguaacacacucuguuaacauucuagaagacaagcauaacgggaaacuaugcaaacuaagagggguagccccauugcauuuggguaaauguaacauugcuggcuggauccugggaaauccagagugugaaucacucuccacagcaagcucaugguccuacauuguggaaacaucuaguucagacaauggaacguguuacccaggagauuucaucgauuaugaggagcuaagagagcaauugagcucagugucaucauuugaaagguuugagauauuccccaagacaaguucauggcccaaucaugacucgaacaaagguguaacggcagcauguccucaugcuggagcaaaaagcuucuacaaaaauuuaauauggcuaguuaaaaaaggaaauucauacccaaagcucagcaaauccuacauuaaugauaaagggaaagaaguccucgugcuauggggcauucaccauccaucuacuagugcugaccaacaaagucucuaucagaaugcagaugcauauguuuuuguggggucaucaagauacagcaagaaguucaagccggaaauagcaauaagacccaaagugagggaucaagaagggagaaugaacuauuacuggacacuaguagagccgggagacaaaauaacauucgaagcaacuggaaaucuagugguaccgagauaugcauucgcaauggaaagaaaugcuggaucugguauuaucauuucagauacaccaguccacgauugcaauacaacuugucagacacccaagggugcuauaaacaccagccucccauuucagaauauacauccgaucacaauuggaaaauguccaaaauauguaaaaagcacaaaauugagacuggccacaggauugaggaaugucccgucuauucaaucuagaggccuauuuggggccauugccgguuucauugaagggggguggacagggaugguagauggaugguacgguuaucaccaucaaaaugagcaggggucaggauaugcagccgaccugaagagcacacagaaugccauugacgagauuacuaacaaaguaaauucuguuauugaaaagaugaauacacaguucacagcaguagguaaagaguucaaccaccuggaaaaaagaauagagaauuuaaauaaaaaaguugaugaugguuuccuggacauuuggacuuacaaugccgaacuguugguucuauuggaaaaugaaagaacuuuggacuaccacgauucaaaugugaagaacuuauaugaaaagguaagaagccagcuaaaaaacaaugccaaggaaauuggaaacggcugcuuugaauuuuaccacaaaugcgauaacacgugcauggaaagugucaaaaaugggacuuaugacuacccaaaauacucagaggaagcaaaauuaaacagagaagaaauagaugggguaaagcuggaaucaacaaggauuuaccagauuuuggcgaucuauucaacugucgccaguucauugguacugguagucucccugggggcaaucaguuucuggaugugcucuaaugggucucuacaguguagaauauguauuuaa

SEQ ID NO: 34899 - RNA, 1701 nt, Artificial Sequence; identical to SEQ ID NO: 34737
  derived and/or modified CDS sequence (wt) from hemagglutinin__InfluenzaA__ACR56390

SEQ ID NO: 34900 - RNA, 1701 nt, Artificial Sequence; identical to SEQ ID NO: 34681
  derived and/or modified CDS sequence (wt) from hemagglutinin__InfluenzaA__ACR56400

SEQ ID NO: 34901 - RNA, 1701 nt, Artificial Sequence; identical to SEQ ID NO: 34681
  derived and/or modified CDS sequence (wt) from hemagglutinin__InfluenzaA__ACR56410

SEQ ID NO: 34902 - RNA, 1701 nt, Artificial Sequence; identical to SEQ ID NO: 34681
  derived and/or modified CDS sequence (wt) from hemagglutinin__InfluenzaA__ACR56420

SEQ ID NO: 34903 - RNA, 1701 nt, Artificial Sequence; identical to SEQ ID NO: 34681
  derived and/or modified CDS sequence (wt) from hemagglutinin__InfluenzaA__ACR56430

SEQ ID NO: 34904 - RNA, 1701 nt, Artificial Sequence; identical to SEQ ID NO: 34681
  derived and/or modified CDS sequence (wt) from hemagglutinin__InfluenzaA__ACR56440

SEQ ID NO: 34905 - RNA, 1698 nt, Artificial Sequence
  derived and/or modified CDS sequence (wt) from hemagglutinin__InfluenzaA__ACR58541
augaaaguaaaacuacugguccuguuaugcacauuuacagcuacauaugcagacacaauauguauaggcuaccaugcuaacaacucgaccgacacuguugacacaguacuugaaaagaaugugacagugacacacucugucaaccugcuugagaacagucacaauggaaaacuaugucuauuaaaaggaauagccccacuacaauuggguaauugcagcguugccggguggaucuuaggaaacccagaaugcgaauuacugaucuccaaggagucaugguccuacauuguagaaaaaccaaauccugagaauggaacauguuacccagggcauuucgcugacuaugaggaacugagggagcaauugaguucaguaucuucauuugagagguucgaaauauuccccaaagaaagcucauggcccaaccacaccguaaccggagugucagcaucaugcucccacaauggggaaagcaguuuuuacagaaauuugcuauggcugacgaggaagaaugguuuguacccaaaccugagcaaguccuaugcaaacaacaaagaaaaagaaguccuuguacuaugggguguucaucacccgccaaacauaggugaccaaaaggcacucuaucauacagaaaaugcuuauguuucuguagugucuucacauuauagcagaaaauucaccccagaaauagccaaaagacccaaaguaagagaucaagaaggaagaaucaacuacuacuggacucugcuugaacccggggauacaauaauauuugaggcaaauggaaaucuaauagcaccaagauaugcuuucgcacugaguagaggcuuuggaucaggaaucaucaacucaaaugcaccaauggauaaaugugaugcgaagugccaaacaccucagggagcuauaaacagcagucuuccuuuccagaacguacacccagucacaauaggagaguguccaaaguaugucaggagugcaaaauuaaggaugguuacaggacuaaggaacaucccauccauucaauccagagguuuguuuggagccauugccgguuucauugaagggggguggacuggaaugguagaugguugguaugguuaucaucaucagaaugagcaaggaucuggcuaugcugcagaucaaaaaagcacacaaaaugccauuaaugggauuacaaacaaggugaauucuguaauugauaaaaugaacacucaauucacagcagugggcaaagaauucaacaaauuggaaagaaggauggaaaacuugaauaaaaaaguugaugauggguuuauagacauuuggacauauaaugcagaacuguugguucuacuggaaaaugaaaggacuuuggauuuccaugacuccaaugugaagaaucuguaugagaaaguaaaaagccaguuaaagaauaaugcuaaagaaauaggaaauggguguuuugaauucuaucacaaguguaacgaugaaugcauggagaguguaaagaauggaacuuaugacuauccaaaauauuccgaagaaucaaaguuaaacagggagaaaauugauggagugaaauuggaaucaaugggagucuaucagauucuggcgaucuacucaacagucgccaguucucugguucuuuuggucucccugggggcaaucagcuucuggauguguuccaaugggucuuugcaguguagaauaugcaucuaa

SEQ ID NO: 34906 - RNA, 1698 nt, Artificial Sequence; identical to SEQ ID NO: 33962
  derived and/or modified CDS sequence (wt) from hemagglutinin__InfluenzaA__ACR61655

SEQ ID NO: 34907 - RNA, 1698 nt, Artificial Sequence
  derived and/or modified CDS sequence (wt) from hemagglutinin__InfluenzaA__ACR61666
augaaaguaaaacuacuuguucuguuauguacauuuacagcuacauaugcagacacaauauguauaggcuaccaugccaacaacucgaccgacacuguugacacaguacuugagaagaaugugacagugacacacucugucaaccuacuugaggacagucacaauggaaaacuaugucuacuaaaaggaauagccccauuacaauuggguaauugcagcguugccggauggaucuuaggaaacccagaaugcgaauuacugauuuccaaggaaucaugguccuacauuguagaaacaccaaauccugagaauggaacauguuacccaggauauuucgccgacuaugaggagcugagggagcaauugaguucaguaucuucauuugagagguucgaaauauuccccaaagagagcucauggcccaaccacaccguaaccggaguaucagcaucaugcucccauaacgggaaaagcaguuuuuacagaaauuugcuauggcugacggggaagaaugguuuguauccaaaccugagcaaguccuaugcaaacaacaaagagaaagaaguccuuguacugugggguguucaucacccgccuaacauaggggaccaaagggcccucuaucauacagaaaaugcguaugucucuguagugucuucacauuauagcagaagauucaccccagaaauagccaaaagacccaaggugagagaucaggaaggaagaaucaacuacuacuggacucugcuggaacccggggauacaauaauauuugaggcaaauggaaaucuaauagcgccaagguuugcuuucgcacugaguagaggcuuuggaucaggaaucaucaccucaaaugcaccaaugggugaaugugaugcgaagugucaaacaccucagggagcuauaaacaguagucuuccuuuccagaauguacacccagucacaauaggagaguguccaaaguaugucaggagugcaaaauuaagaaugguuacaggacuaaggaacaucccauccauucaauccagagguuuguuuggagccauugccgguuucauugaagggggguggacuggaaugguagaugguugguaugguuaucaccaucagaaugagcaaggaucuggguaugcugcagaucaaaaaagcacacaaaaugccauuaacgggauuacaaacaaggugaauucuguaauugagaaaaugaacacucaauucacagcugugggcaaagaauucaacaaauuggaaagaaggauggaaaacuuaaauaaaaagguugaugauggguuucuagacauuuggacauauaacgcagaauuguugguucuacuggaaaaugaaaggacuuuggacuuccaugacuccaacgugaagaaucuauaugagaaaguaaaaagccaauuaaagaauaaugccaaagaaauaggaaacggguguuuugaauucuaucacaaguguaacgaugaaugcauggagagugugaaaaauggaacuuaugacuauccaaaauauuccgaagaaucaaaguugaacagggagaaaauugauggagugaaauuggaaucaaugggagucuaucagauucuggcgaucuacucaacagucgccaguucccugguucuuuuggucucccugggggcaaucagcuucuggauguguuccaaugggucuuugcaauguagaauaugcaucuaa

SEQ ID NO: 34908 - RNA, 1701 nt, Artificial Sequence
  derived and/or modified CDS sequence (wt) from hemagglutinin__InfluenzaA__ACR61677
augaagacuaucauugcuuugagcuacauucuaugucugguuuucgcucaaaaacuuccuggaaaugacaacagcacggcaacgcugugccuugggcaccaugcaguaccaaacggaacgauagugaaaacaaucacgaaugaccaaauugaaguuacuaaugcuacugagcugguucagaguuccucaacaggugaaauaugcgacaguccucaucagauccuugauggagaaaacugcacacuaauagaugcucuauugggagacccucagugugauggcuuccaaaauaagaaaugggaucuuuuuguugaacgcagcaaagccuacagcaacuguuacccuuaugaugugccggauuaugccucccuuaggucacuaguugccucauccggcacacuggaguuuaacaaugaaagcuucaauuggacuggagucacucaaaacggaacaagcucugcuugcauaaggagaucuaauaacaguuucuuuaguagauugaauugguugacccacuuaaaauucaaauacccagcauugaacgugacuaugccaaacaaugaacaauuugacaaauuguacauuugggggguucaccacccggguacggacaaugaccaaaucuuccuguaugcucaagcaucaggaagaaucacagucucuaccaaaagaagccaacaaacuguaaucccgaauaucggaucuagacccagaguaaggaauaucccuagcagaauaagcaucuauuggacaauaguaaaaccgggagacauacuuuugauuaacagcacagggaaucuaauugcuccuagggguuacuucaaaauacgaagugggaaaagcucaauaaugagaucagaugcacccauuggcaaaugcaauucugaaugcaucacuccaaauggaagcauucccaaugacaaaccauuccaaaauguaaacaggaucacauacggggccugucccagauauguuaagcaaaacacucugaaauuggcaacagggaugcgaaauguaccagagaaacaaacuagaggcauauuuggcgcaaucgcggguuucauagaaaaugguugggagggaaugguggaugguugguacgguuucaggcaucaaaauucugagggaagaggacaagcagcagaucucaaaagcacucaagcagcaaucgaucaaaucaaugggaagcugaauagauugaucgggaaaaccaacgagaaauuccaucagauugaaaaagaauucucagaagucgaagggagaauucaggaccuugagaaauauguugaggacaccaaaauagaucucuggucauacaacgcggagcuucuuguugcccuggagaaccaacauacaauugaucuaacugacucagaaaugaacaaacuguuugaaaaaacaaagaagcaacugagggaaaaugcugaggauaugggcaaugguuguuucaaaauauaccacaaaugugacaaugccugcauaggaucaaucagaaauggaacuuaugaccacgauguauacagagaugaagcauuaaacaaccgguuccagaucaagggaguugagcugaagucaggguacaaagauuggauccuauggauuuccuuugccauaucauguuuuuugcuuuguguugcuuuguugggguucaucaugugggccugccaaaaaggcaacauuaggugcaacauuugcauuuga

SEQ ID NO: 34909 - RNA, 1701 nt, Artificial Sequence
  derived and/or modified CDS sequence (wt) from hemagglutinin__InfluenzaA__ACR61688
augaagacuaucauugcuuugagcuacauucuaugucugguuuucgcucaaaaacuuccuggaaaugacaacagcacggcaacgcugugccuugggcaccaugcaguaccaaacggaacgauagugaaaacaaucacgaaugaccaaauugaaguaacuaaugcuacugagcugguucagaguuccucaacaggugaaauaugcgacaguccucaucagauccuugauggagaaaacugcacacuaauagaugcucuauugggagacccucagugugauggcuuccaaaauaagaaaugggaccuuuuuguugaacgcagcaaagccuacagcaacuguuacccuuaugaugugccggauuaugccucccuuaggucacuaguugccucauccggcacacuggaguuuaacaaugaaagcuucaauuggacuggagucacucaaaacggaacaagcucugcuugcauaaggagaucuaauaacaguuucuuuaguagauugaauugguugacccacuuaaaauucaaauacccagcauugaacgugacuaugccaaacaaugaacaauuugacaaauuguacauuugggggguucaccacccggguacggacaaugaccaaaucuuccuguaugcucaagcaucaggaagaaucacagucucuaccaaaagaagccaacaaacuguaaucccgaauaucggaucuagacccagaguaaggaauaucccuagcagaauaagcaucuauuggacaauaguaaaaccgggagacauacuuuugauuaacagcacagggaaucuaauugcuccuagggguuacuucaaaauacgaagugggaaaagcucaauaaugagaucagaugcacccauuggcaaaugcaauucugaaugcaucacuccaaauggaagcauucccaaugacaaaccauuccaaaauguaaacaggaucacauacggggccugucccagauauguuaagcaaaacacucugaaauuggcaacagggaugcgaaauguaccagagaaacaaacuagaggcauauuuggcgcaaucgcggguuucauagaaaaugguugggagggaaugguggaugguugguacgguuucaggcaucaaaauucugagggaagaggacaagcagcagaucucaaaagcacucaagcagcaaucgaucaaaucaaugggaagcugaauagauugaucgggaaaaccaacgagaaauuccaucagauugaaaaagaauucucagaagucgaagggagaauucaggaccuugagaaauauguugaggacacuaaaauagaucucuggucauacaacgcggagcuucuuguugcccuggagaaccaacauacaauugaucuaacugacucagaaaugaacaaacuguuugaaaaaacaaagaagcaacugagggaaaaugcugaggauaugggcaaugguuguuucaaaauauaccacaaaugugacaaugccugcauaggaucaaucagaaauggaacuuaugaccacgauguauacagagaugaagcauuaaacaaccgguuccagaucaagggaguugagcugaagucaggguacaaagauuggauccuauggauuuccuuugccauaucauguuuuuugcuuuguguugcuuuguugggguucaucaugugggccugccaaaaaggcaacauuaggugcaacauuugcauuuga

SEQ ID NO: 34910 - RNA, 1701 nt, Artificial Sequence; identical to SEQ ID NO: 34561
  derived and/or modified CDS sequence (wt) from hemagglutinin__InfluenzaA__ACR61699

SEQ ID NO: 34911 - RNA, 1701 nt, Artificial Sequence
  derived and/or modified CDS sequence (wt) from hemagglutinin__InfluenzaA__ACR67170
augaaggcaauacuaguaguucugcuauauacauuugcaaccgcaaaugcagacacauuauguauagguuaucaugcgaacaauucaacagacacuguagacacaguacuagaaaagaauguaacaguaacacacucuguuaaccuucuagaagacaagcauaacgggaaacuaugcaaacuaagagggguagccccauugcauuuggguaaauguaacauugcuggcuggauccugggaaauccagagugugaaucacucuccacagcaagcucaugguccuacauuguggaaacaucuaguucagacaauggaacguguuacccaggagauuucaucgauuaugaggagcuaagagagcaauugagcucagugucaucauuugaaagguuugagauauuccccaagacaaguucauggcccaaucaugacucgaacaaagguguaacggcagcauguccucaugcuggagcaaaaagcuucuacaaaaauuuaauauggcuaguuaaaaaaggaaauucauacccaaagcucagcaaauccuacauuaaugauaaagggaaagaaguccucgugcuauggggcauucaccauccaucuacuagugcugaccaacaaagucucuaucagaaugcagaugcauauguuuuuguggggucaucaagauacagcaagaaguucaagccugaaauagcaauaagacccaaagugagggaucaagaagggagaaugaacuauuacuggacacuaguagaaccgggagacaaaauaacauucgaagcaacuggaaaucuagugguaccgagauaugcauucgcaauggaaagaaaugcuggaucugguauuaucauuucagauacaccaguccacgauugcaauacaacuugucagacacccaagggugcuauaaacaccagccucccauuucagaauauacauccgaucacaauuggaaaauguccaaaauauguaaaaagcacaaaauugagacuggccacaggauugaggaaugucccgucuauucaaucuagaggccuauuuggggccauugccgguuucauugaagggggguggacagggaugguagauggaugguacgguuaucaccaucaaaaugagcaggggucaggauaugcagccgaccugaagagcacacagaaugccauugacgaaauuacuaacaaaguaaauucuguuauugaaaagaugaauacacaguucacagcaguagguaaagaguucaaccaccuggaaaaaagaauagagaauuuaaauaaaaaaguugaugaugguuuccuggacauuuggacuuacaaugccgaacuguugguucuauuggaaaaugaaagaacuuuggacuaccacgauucaaaugugaagaacuuauaugaaaagguaagaagccagcuaaaaaacaaugccaaggaaauuggaaacggcugcuuugaauuuuaccacaaaugcgauaacacgugcauggaaagugucaaaaaugggacuuaugacuacccaaaauacucagaggaagcaaaauuaaacagagaagaaauagaugggguaaagcuggaaucaacaaggauuuaccagauuuuggcgaucuauucaacuguugccaguucauugguacugguagucucccugggggcaaucaguuucuggaugugcucuaaugggucucuacaguguagaauauguauuuaa

SEQ ID NO: 34912 - RNA, 1701 nt, Artificial Sequence; identical to SEQ ID NO: 34707
  derived and/or modified CDS sequence (wt) from hemagglutinin__InfluenzaA__ACR67171

SEQ ID NO: 34913 - RNA, 1701 nt, Artificial Sequence; identical to SEQ ID NO: 34676
  derived and/or modified CDS sequence (wt) from hemagglutinin__InfluenzaA__ACR67172

SEQ ID NO: 34914 - RNA, 1701 nt, Artificial Sequence
  derived and/or modified CDS sequence (wt) from hemagglutinin__InfluenzaA__ACR67177
augaaggcaauacuaguaguucugcuauauacauuugcaaccgcaaaugcagacacauuauguauagguuaucaugcgaacaauucaacagacacuguagacacaguacuagaaaagaauguaacaguaacacacucuguuaaccuucuagaagacaagcauaacgggaaacuaugcaaacuaagagggguagccccauugcauuuggguaaauguaacauugcuggcuggauccugggaaauccagagugugaaucacucuccacagcaagcucaugguccuacauuguggaaacaucuaguucagacaauggaacguguuacccaggagauuucaucgauuaugaggagcuaagagagcaauugagcucagugucaucauuugaaagguuugagauauuccccaagacaaguucauggcccaaucaugacucgaacaaagguguaacggcagcauguccucaugcuggagcaaaaagcuucuacaaaaauuuaauauggcuaguuaaaaaaggaaauucauacccaaagcucagcaaauccuacauuaaugauaaagggaaagaaguccucgugcuauggggcauucaccauccaucuacuagugcugaccaacaaagucucuaucagaaugcagaugcauauguuuuuguggggucaucaagauacagcaagaaguucaagccggaaauagcaauaagacccaaagugagggaucaagaagggagaaugaacuauuacuggacacuaguagagccgggagacaaaauaacauucgaagcaacuggaaaucuagugguaccgagauaugcauucgcaauggaaagaaaugcuggaucugguauuaucauuucagauacaccaguccacgauugcaauacaacuugucagacacccaagggugcuauaaacaccagccucccauuucagaauauacauccgaucacaauuggaaaauguccaaaauauguaaaaagcacaaaauugagacuggccacaggauugaggaaugucccgucuauucaaucuagaggccuauuuggggccauugccgguuucauugaagggggguggacagggaugguagauggaugguacgguuaucaccaucaaaaugagcaggggucaggauaugcagccgaccugaagagcacacagaaugccauugacgagauuacuaacaaaguaaauucuguuauugaaaagaugaauacacaguucacagcaguagguaaagaguucaaccaccuggaaaaaagaauagagaauuuaaauaaaaaaguugaugaugguuuccuggacauuuggacuuacaaugccgaacuguugguucuauuggaaaaugaaagaacuuuggacuaccacgauucaaaugugaagaacuuauaugaaaagguaagaagccaguuaaaaaacaaugccaaggaaauuggaaacggcugcuuugaauuuuaccacaaaugcgauaacacgugcauggaaagugucaaaaaugggacuuaugacuacccaaaauacucagaggaagcaaaauuaaacagagaagaaauagaugggguaaagcuggaaucaacaaggauuuaucagauuuuggcgaucuauucaacugucgccaguucauugguacugguagucucccugggggcaaucaguuucuggaugugcucuaaugggucucuacaguguagaauauguauuuaa

SEQ ID NO: 34915 - RNA, 1701 nt, Artificial Sequence; identical to SEQ ID NO: 34823
  derived and/or modified CDS sequence (wt) from hemagglutinin__InfluenzaA__ACR67181

SEQ ID NO: 34916 - RNA, 1701 nt, Artificial Sequence
  derived and/or modified CDS sequence (wt) from hemagglutinin__InfluenzaA__ACR67183
augaaggcaauacuaguaguucugcuauauacauuugcaaccgcaaaugcagacacauuauguauagguuaucaugcgaacaauucaacagacacuguagacacaguacuagaaaagaauguaacaguaacacacucuguuaaccuucuagaagacaagcauaacgggaaacuaugcaaacuaagagggguagccccauugcauuuggguaaauguaauauugcuggcuggauccugggaaauccagagugugaaucacucuccacagcaagcucaugguccuacauuguggaaacaucuaguucagacaauggaacguguuacccaggagauuucaucgauuaugaggagcuaagagagcaauugagcucagugucaucauuugaaagguuugagauauuccccaagacaaguucauggcccaaucaugacucgaacaaagguguaacggcagcauguccucaugcuggagcaaaaagcuucuacaaaaauuuaauauggcuagucaaaaaaggaaauucauacccaaagcucagcaaauccuacauuaaugauaaagggaaagaaguccucgugcuauggggcauucaccauccaucuacuagugcugaccaacaaagucucuaucagaaugcagaugcauauguuuuuguggggucaucaagauacagcaagaaguucaagccggaaauagcaauaagacccaaagugagggaucgagaagggagaaugaacuauuacuggacacuaguagagccgggagacaaaauaacauucgaagcaacuggaaaucuagugguaccgagauaugcauucgcaauggaaagaaaugcuggaucugguauuaucauuucagauacaccaguccacgauugcaauacaacuugucagacacccaagggugcuauaaacaccagccucccauuucagaauauacauccgaucacaauuggaaaauguccaaaauauguaaaaagcacaaaauugagacuggccacaggauugaggaaugucccgucuauucaaucuagaggccuauuuggggccauugccgguuucauugaagggggguggacagggaugguagauggaugguacgguuaucaccaucaaaaugagcaggggucaggauaugcagccgaccugaagagcacacagaaugccauugacgagauuacuaacaaaguaaauucuguuauugaaaagaugaauacacaguucacagcaguagguaaagaguucaaccaccuggaaaaaagaauagagaauuuaaauaaaaaaguugaugaugguuuccuggacauuuggacuuacaaugccgaacuguugguucuauuggaaaaugaaagaacuuuggacuaccacgauucaaaugugaagaacuuauaugaaaagguaagaagccagcuaaaaaacaaugccaaggaaauuggaaacggcugcuuugaauuuuaccacaaaugcgauaacacgugcauggaaagugucaaaaaugggacuuaugacuacccaaaauacucagaggaagcaaaauuaaacagagaagaaauagaugggguaaagcuggaaucaacaaggauuuaccagauuuuggcgaucuauucaacugucgccaguucauugguacugguagucucccugggggcaaucaguuucuggaugugcucuaaugggucucuacaguguagaauaugcauuuaa

SEQ ID NO: 34917 - RNA, 1701 nt, Artificial Sequence; identical to SEQ ID NO: 34681
  derived and/or modified CDS sequence (wt) from hemagglutinin__InfluenzaA__ACR67184

SEQ ID NO: 34918 - RNA, 1701 nt, Artificial Sequence; identical to SEQ ID NO: 34676
  derived and/or modified CDS sequence (wt) from hemagglutinin__InfluenzaA__ACR67185

SEQ ID NO: 34919 - RNA, 1701 nt, Artificial Sequence; identical to SEQ ID NO: 34898
  derived and/or modified CDS sequence (wt) from hemagglutinin__InfluenzaA__ACR67186

SEQ ID NO: 34920 - RNA, 1701 nt, Artificial Sequence; identical to SEQ ID NO: 34705
  derived and/or modified CDS sequence (wt) from hemagglutinin__InfluenzaA__ACR67187

SEQ ID NO: 34921 - RNA, 1701 nt, Artificial Sequence
  derived and/or modified CDS sequence (wt) from hemagglutinin__InfluenzaA__ACR67188
augaaggcaauacuaguaguuaugcuauauacauuugcaaccgcaaaugcagacacauuauguauagguuaucaugcgaacaauucaacagacacuguagacacaguacuagaaaagaauguaacaguaacacacucuguuaaccuucuagaagacaagcauaacgggaaacuaugcaaacuaagagggguagccccauugcauuuggguaaauguaacauugcuggcuggauccugggaaauccagagugugaaucacucuccacagcaagcucaugguccuacauuguggaaacaucuaguucagacaauggaacguguuacccaggagauuucaucgauuaugaggagcuaagagagcaauugagcucagugucaucauuugaaagguuugagauauuccccaagacaaguucauggcccaaucaugacucgaacaaagguguaacggcagcauguccucaugcuggagcaaaaagcuucuacaaaaauuuaauauggcuaguuaaaaaaggaaauucauacccaaagcucagcaaauccuacauuaaugauaaagggaaagaaguccucgugcuauggggcauucaccauccaucuacuagugcugaccaacaaagucucuaucagaaugcagaugcauauguuuuuguggggucaucaagauacagcaagaaguucaagccggaaauagcaauaagacccaaagugagggaucaagaaggaagaaugaacuauuacuggacacuaguagagccgggagacaaaauaacauucgaagcaacuggaaaucuagugguaccgagauaugcauucgcaauggaaagaaaugcuggaucugguauuaucauuucagauacaccaguccacgauugcaauacaacuugucagacacccaagggugcuauaaacaccagccucccauuucagaauauacauccgaucacaauuggaaaauguccaaaauauguaaaaagcacaaaauugagacuggccacaggauugaggaaugucccgucuauucaaucuagaggccuauuuggggccauugccgguuucauugaagggggguggacagggaugguagauggaugguacgguuaucaccaucaaaaugagcaggggucaggauaugcagccgaccugaagagcacacagaaugccauugacgagauuacuaacaaaguaaauucuguuauugaaaagaugaauacacaguucacagcaguagguaaagaguucaaccaccuggaaaaaagaauagagaauuuaaauaaaaaaguugaugaugguuuccuggacauuuggacuuacaaugccgaacuguugguucuauuggaaaaugaaagaacuuuggacuaccacgauucaaaugugaagaacuuauaugaaaagguaagaagccagcuaaaaaacaaugccaaggaaauuggaaacggcugcuuugaauuuuaccacaaaugcgauaacacgugcauggaaagugucaaaaaugggacuuaugacuacccaaaauacucagaggaagcaaaauuaaacagagaagaaauagaugggguaaagcuggaaucaacaaggauuuaccagauuuuggcgaucuauucaacugucgccaguucauugguacugguagucucccugggggcaaucaguuucuggaugugcucuaaugggucucuacaguguagaauauguauuuaa

SEQ ID NO: 34922 - RNA, 1701 nt, Artificial Sequence
  derived and/or modified CDS sequence (wt) from hemagglutinin__InfluenzaA__ACR67189
augaaggcaauacuaguaguuaugcuauauacauuugcaaccgcaaaugcagacacauuauguauagguuaucaugcgaacaauucaacagacacuguagacacaguacuagaaaagaauguaacaguaacacacucuguuaaccuucuagaagacaagcauaacgggaaacuaugcaaacuaagagggguagccccauugcauuuggguaaauguaacauugcuggcuggauccugggaaauccagagugugaaucacucuccacagcaagcucaugguccuacauuguggaaacaucuaguucagacaauggaacguguuacccaggagauuuuaucgauuaugaggagcuaagagagcaauugagcucagugucaucauuugaaagguuugagauauuccccaagacaaguucauggcccaaucaugacucgaacaaagguguaacggcagcauguccucaugcuggagcaaaaagcuucuacaaaaauuuaauauggcuaguuaaaaaaggaaauucauacccaaagcucagcaaauccuacauuaaugauaaagggaaagaaguccucgugcuauggggcauucaccauccaucuacuagugcugaccaacaaagucucuaucagaaugcagaugcauauguuuuuguggggucaucaagauacagcaagaaguucaagccggaaauagcaauaagacccaaagugagggaucaagaagggagaaugaacuauuacuggacacuaguagagccgggagacaaaauaacauucgaagcaacuggaaaucuagugguaccgagauaugcauucgcaauggaaagaaaugcuggaucugguauuaucauuucagauacaccaguccacgauugcaauacaacuugucagacacccaagggugcuauaaacaccagccucccauuucagaauauacauccgaucacaauuggaaaauguccaaaauauguaaaaagcacaaaauugagacuggccacaggauugaggaaugucccgucuauucaaucuagaggccuauuuggggccauugccgguuucauugaagggggguggacagggaugguagauggaugguacgguuaucaccaucaaaaugagcaggggucaggauaugcagccgaccugaagagcacacagaaugccauugacgagauuacuaacaaaguaaauucuguuauugaaaagaugaauacacaguucacagcaguagguaaagaguucaaccaccuggaaaaaagaauagagaauuuaaauaaaaaaguugaugaugguuuccuggacauuuggacuuacaaugccgaacuguugguucuauuggaaaaugaaagaacuuuggacuaccacgauucaaaugugaagaacuuauaugaaaagguaagaagccagcuaaaaaacaaugccaaggaaauuggaaacggcugcuuugaauuuuaccacaaaugcgauaacacgugcauggaaagugucaaaaaugggacuuaugacuacccaaaauacucagaggaagcaaaauuaaacagagaagaaauagaugggguaaagcuggaaucaacaaggauuuaccagauuuuggcgaucuauucaacugucgccaguucauugguacugguagucucccugggggcaaucaguuucuggaugugcucuaaugggucucuacaguguagaauauguauuuaa

SEQ ID NO: 34923 - RNA, 1701 nt, Artificial Sequence
  derived and/or modified CDS sequence (wt) from hemagglutinin__InfluenzaA__ACR67190
auggaggcaauacuaguaguucugcuauauacauuugcaaccgcaaaugcagacacauuauguauagguuaucaugcgaacaauucaacagacacuguagacacaguacuagaaaagaauguaacaguaacacacucuguuaaccuucuagaagacaagcauaacgggaaacuaugcaaacuaagagggguagccccauugcauuuggguaaauguaacauugcuggcuggauccugggaaauccagagugugaaucacucuccacagcaagcucaugguccuacauuguggaaacaucuaguucagacaauggaacguguuacccaggagauuucaucgauuaugaggagcuaagagagcaauugagcucagugucaucauuugaaagguuugagauauuccccaagacaaguucauggcccaaucaugacucgaacaaagguguaacggcagcauguccucaugcuggagcaaaaagcuucuacaaaaauuuaauauggcuaguuaaaaaaggaaauucauacccaaagcucagcaaauccuacauuaaugauaaagggaaagaaguccucgugcuauggggcauucaccauccaucuacuagugcugaccaacaaagucucuaucagaaugcagaugcauauguuuuuguggggucaucaagauacagcaagaaguucaagccggaaauagcaauaagacccaaagugagggaucaagaagggagaaugaacuauuacuggacacuaguagagccgggagacaaaauaacauucgaagcaacuggaaaucuagugguaccgagauaugcauucgcaauggaaagaaaugcuggaucugguauuaucauuucagauacaccaguccacgauugcaauacaacuugucagacgcccaagggugcuauaaacaccagccucccauuucauaauauacauccgaucacaauuggaaaauguccaaaauauguaaaaagcacaaaauugagacuggccacaggauugaggaaugucccgucuauucaaucuagaggccuauuuggggccauugccgguuucauugaagggggguggacagggaugguagauggaugguacgguuaucaccaucaaaaugagcaggggucaggauaugcagccgaccugaagagcacacagaaugccauugacgagauuacuaacaaaguaaauucuguuauugaaaagaugaauacacaguucacagcaguagguaaagaguucaaccaccuggaaaaaagaauagagaauuuaaauaaaaaaguugaugaugguuuccuggacauuuggacuuacaaugccgaacuguugguucuauuggaaaaugaaagaacuuuggacuaccacgauucaaaugugaagaacuuauaugaaaagguaagaagccaguuaaaaaacaaugccaaggaaauuggaaacggcugcuuugaauuuuaccacaaaugcgauaacacgugcauggaaagugucaaaaaugggacuuaugacuacccaaaauacucagaggaagcaaaauuaaacagagaagaaauagaugggguaaagcuggaaucaacaaggauuuaccagauuuuggcgaucuauucaacugucgccaguucauugguacugguagucucccugggggcaaucaguuucuggaugugcucuaaugggucucuacaguguagaauauguauuuaa

SEQ ID NO: 34924 - RNA, 1701 nt, Artificial Sequence; identical to SEQ ID NO: 34676
  derived and/or modified CDS sequence (wt) from hemagglutinin__InfluenzaA__ACR67192

SEQ ID NO: 34925 - RNA, 1701 nt, Artificial Sequence
  derived and/or modified CDS sequence (wt) from hemagglutinin__InfluenzaA__ACR67193
augaaggcaauacuaguaguucugcuauauacauuugcaaccgcaaaugcagacacauuauguauagguuaucaugcgaacaauucaacagacacuguagacacaguacuagaaaagaauguaacaguaacacacucuguuaacauucuagaagacaagcauaacgggaaacuaugcaaacuaagagggguagccccauugcauuuggguaaauguaacauugcuggcuggauccugggaaauccagagugugaaucacucuccacagcaagcucaugguccuacauuguggaaacaucuaguucagacaauggaacguguuacccaggagauuucaucgauuaugaggagcuaagagagcaauugagcucagugucaucauuugaaagguuugagauauuccccaagacaaguucauggcccaaucaugacucgaacaaagguguaacggcagcauguccucaugcuggagcaaaaagcuucuacaaaaauuuaauauggcuaguuaaaaaaggaaauucauacccaaagcucagcaaauccuacauuaaugauaaagggaaagaaguccucgugcuauggggcauucaccauccaucuacuagugcugaccaacaaagucucuaucagaaugcagaugcauauguuuuuguggggucaucaagauacagcaagaaguucaagccggaaauagcaauaagacccaaagugagggaucaagaagggagaaugaacuauuacuggacacuaguagagccgggagacaaaauaacauucgaagcaacuggaaaucuagugguaccgagauaugcauucgcaauggaaagaaaugcuggaucugguauuaucauuucagauacaccaguccacgagugcaauacaacuugucagacacccaagggugcuauaaacaccagccucccauuucagaauauacauccgaucacaauuggaaaauguccaaaauauguaaaaagcacaaaauugagacuggccacaggauugaggaaugucccgucuauucaaucuagaggccuauuuggggccauugccgguuucauugaagggggguggacagggaugguagauggaugguacgguuaucaccaucaaaaugagcaggggucaggauaugcagccgaccugaagagcacacagaaugccauugacgagauuacuaacaaaguaaauucuguuauugaaaagaugaauacacaguucacagcaguagguaaagaguucaaccaccuggaaaaaagaauagagaauuuaaauaaaaaaguugaugaugguuuccuggacauuuggacuuacaaugccgaacuguugguucuauuggaaaaugaaagaacuuuggacuaccacgauucaaaugugaagaacuuauaugaaaagguaagaagccagcuaaaaaacaaugccaaggaaauuggaaacggcugcuuugaauuuuaccacaaaugcgauaacacgugcauggaaagugucaaaaaugggacuuaugacuacccaaaauacucagaggaagcaaaauuaaacagagaagaaauagaugggguaaagcuggaaucaacaaggauuuaccagauuuuggcgaucuauucaacugucgccaguucauugguacugguagucucccugggggcaaucaguuucuggaugugcucuaaugggucucuacaguguagaauauguauuuaa

SEQ ID NO: 34926 - RNA, 1701 nt, Artificial Sequence; identical to SEQ ID NO: 34705
  derived and/or modified CDS sequence (wt) from hemagglutinin__InfluenzaA__ACR67195

SEQ ID NO: 34927 - RNA, 1701 nt, Artificial Sequence
  derived and/or modified CDS sequence (wt) from hemagglutinin__InfluenzaA__ACR67197
augaaggcaauacuaguaguucugcuauauacauuugcaaccgcaaaugcagacacauuauguauagguuaucaugcgaacaauucaacagacacuguagacacaguacuagaaaagaauguaacaguaacacacucuguuaaccuucuagaagacaagcauaacgggaaacuaugcaaacuaagagggguagccccauugcauuuggguaaauguaacauugcuggcuggauccugggaaauccagaaugugaaucacucuccacagcaagcucaugguccuacauuguggaaacaucuaguucagacaauggaacguguuacccaggagauuucaucgauuaugaggagcuaagagagcaauugagcucagugucaucauuugaaagguuugagauauuccccaagacaaguucauggcccaaucaugacucgaacaaagguguaacggcagcauguccucaugcuggagcaaaaagcuucuacaaaaauuuaauauggcuaguuaaaaaaggaaauucauacccaaagcucagcaaauccuacauuaaugauaaagggaaagaaguccucgugcuauggggcauucaccauccaucuacuagugcugaccaacaaagucucuaucagaaugcagaugcauauguuuuuguggggucaucaagauacagcaagaaguucaagccggaaauagcaauaagacccaaagugagggaucaagaagggagaaugaacuauuacuggacacuaguagagccgggagacaaaauaacauucgaagcaacuggaaaucuagugguaccgagauaugcauucgcaauggaaagaaaugcuggaucugguauuaucauuucagauacaccaguccacgauugcaauacaacuugucagacacccaagggugcuauaaacaccagccucccauuucagaauauacauccgaucacaauuggaaaauguccaaaauauguaaaaagcacaaaauugagacuggccacaggauugaggaaugucccgucuauucaaucuagaggccuauuuggggccauugccgguuucauugaagggggguggacagggaugguagauggaugguacgguuaucaccaucaaaaugagcaggggucaggauaugcagccgaccugaagagcacacagaaugccauugacgagauuacuaacaaaguaaauucuguuauugaaaagaugaauacacaguucacagcaguagguaaagaguucaaccaccuggaaaaaagaauagagaauuuaaauaaaaaaguugaugaugguuuccuggacauuuggacuuacaaugccgaacuguugguucuauuggaaaaugaaagaacuuuggacuaccacgauucaaaugugaagaacuuauaugaaaagguaagaagccaguuaaaaaacaaugccaaggaaauuggaaacggcugcuuugaauuuuaccacaaaugcgauaacacgugcauggaaagugucaaaaaugggacuuaugacuacccaaaauacucagaggaagcaaaauuaaacagagaagaaauagaugggguaaagcuggaaucaacaaggauuuaccagauuuuggcgaucuauucaacugucgccaguucauugguacugguagucucccugggggcaaucaguuucuggaugugcucuaaugggucucuacaguguagaauauguauuuaa

SEQ ID NO: 34928 - RNA, 1701 nt, Artificial Sequence; identical to SEQ ID NO: 34925
  derived and/or modified CDS sequence (wt) from hemagglutinin__InfluenzaA__ACR67198

SEQ ID NO: 34929 - RNA, 1701 nt, Artificial Sequence
  derived and/or modified CDS sequence (wt) from hemagglutinin__InfluenzaA__ACR67199
augaaggcaauacuaguaguucugcuauauacauuugcaaccgcaaaugcagacacauuauguauagguuaucaugcgaacaauucaacagacacuguagacacaguacuagaaaagaauguaacaguaacacacucuguuaaccuucuagaagacaagcauaacgggaaacuaugcaaacuaagagggguagccccauugcauuuggguaaauguaacauugcuggcuggauccugggaaauccagagugugaaucacucuccacagcaagcucaugguccuacauuguggaaacaucuaguucagacaauggaacguguuacccaggagauuucaucgauuaugaggagcuaagagagcaauugagcucagugucaucauuugaaagguuugagauauuccccaagacaaguucauggcccaaucaugacucgaacaaagguguaacggcagcauguccucaugcuggagcaaaaagcuucuacaaaaauuuaauauggcuaguuaaaaaaggaaauucauacccaaagcucagcaaauccuacauuaaugauaaagggaaagaaguccucgugcuauggggcauucaccauccaucuacuagugcugaccaacaaagucucuaucagaaugcagaugcauauguuuuuguggggucaucaagauacagcaagaaguucaagccggaaauagcaauaagacccaaagugagggaucaagaagggagaaugaacuauuacuggacacuaguagagccgggagacaaaauaacauucgaagcaacuggaaaucuagugguaccgagauaugcauucgcaauggaaaggaaugcuggaucugguauuaucauuucagauacaccaguccacgauugcaauacaacuugucagacacccaagggugcuauaaacaccagccucccauuucagaauauacauccgaucacaauuggaaaauguccaaaauauguaaaaagcacaaaauugagacuggccacaggauugaggaaugucccgucuauucaaucuagaggccuauuuggggccauugccgguuucauugaagggggguggacagggaugguagauggaugguacgguuaucaccaucaaaaugagcaggggucaggauaugcagccgaccugaagagcacacagaaugccauugacgagauuacuaacaaaguaaauucuguuauugaaaagaugaauacacaguucacagcaguagguaaagaguucaaccaccuggaaaaaagaauagagaauuuaaauaaaaaaguugaugaugguuuccuggacauuuggacuuacaaugccgaacuguugguucuauuggaaaaugaaagaacuuuggacuaccacgauucaaaugugaagaacuuauaugaaaagguaagaagccaguuaaaaaacaaugccaaggaaauuggaaacggcugcuuugaauuuuaccacaaaugcgauaacacgugcauggaaagugucaaaaaugggacuuaugacuacccaaaauacucagaggaagcaaaauuaaacagagaagaaauagaugggguaaagcuggaaucaacaaggauuuaccagauuuuggcgaucuauucaacugucgccaguucauugguacugguagucucccugggggcaaucaguuucuggaugugcucuaaugggucucuacaguguagaauauguauuuaa

SEQ ID NO: 34930 - RNA, 1701 nt, Artificial Sequence; identical to SEQ ID NO: 34714
  derived and/or modified CDS sequence (wt) from hemagglutinin__InfluenzaA__ACR67244

SEQ ID NO: 34931 - RNA, 1701 nt, Artificial Sequence
  derived and/or modified CDS sequence (wt) from hemagglutinin__InfluenzaA__ACR67254
augaaggcaauacuaguaguucugcuauauacauuugcaaccgcaaaugcagacacauuauguauagguuaucaugcgaacaauucaacagacacuguagacacaguacuagaaaagaauguaacaguaacacacucuguuaaccuucuagaagacaagcauaacgggaaacuaugcaaacuaagagggguagccccauugcauuuggguaaauguaacauugcuggcuggauccugggaaauccagagugugaaucacucuccacagcaagcucaugguccuacauuguggaaacaucuaguucagacaauggaacguguuacccaggagauuucaucgauuaugaggagcuaagagagcaauugagcucagugucaucauuugaaagguuugagauauuccccaagacaaguucauggcccaaucaugacucgaacaaagguguaacggcagcauguccucaugcuggagcaaaaagcuucuacaaaaauuuaauauggcuaguuaaaaaaggaaauucauacccaaagcucagcaaauccuacauuaaugauaaagggaaagaaguccucgugcuauggggcauucaccauccaucuacuagugcugaccaacaaagucucuaucagaaugcagaugcauauguuuuuguggggucaucaagauacagcaagaaguucaagccggaaauagcaauaagacccaaagugagggaucaagaagggagaaugaacuauuacuggacacuaguagagccgggagacaaaauaacauucgaagcaacuggaaaucuagugguaccgagauaugcauucgcaauggaaagaaauguuggaucugguauuaucauuucagauacaccaguccacgauugcaauacaacuugucagacacccaagggugcuauaaacaccagccucccauuucagaauauacauccgaucacaauuggaaaauguccaaaauauguaaaaagcacaaaauugagacuggccacaggauugaggaaugucccgucuauucaaucuagaggccuauuuggggccauugccgguuucauugaagggggguggacagggaugguagauggaugguacgguuaucaccaucaaaaugagcaggggucaggauaugcagccgaccugaagagcacacagaaugccauugacgagauuacuaacaaaguaaauucuguuauugaaaagaugaauacacaguucacagcaguagguaaagaguucaaccaccuggaaaaaagaauagagaauuuaaauaaaaaaguugaugaugguuuccuggacauuuggacuuacaaugccgaacuguugguucuauuggaaaaugaaagaacuuuggacuaccacgauucaaaugugaagaacuuauaugaaaagguaagaagccagcuaaaaaacaaugccaaggaaauuggaaacggcugcuuugaauuuuaccacaaaugcgauaacacgugcauggaaagugucaaaaaugggacuuaugacuacccaaaauacucagaggaagcaaaauuaaacagagaagaaauagaugggguaaagcuggaaucaacaaggauuuaccagauuuuggcgaucuauucaacugucgccaguucauugguacugguagucucccugggggcaaucaguuucuggaugugcucuaaugggucucuacaguguagaauauguauuuaa

SEQ ID NO: 34932 - RNA, 1701 nt, Artificial Sequence
  derived and/or modified CDS sequence (wt) from hemagglutinin__InfluenzaA__ACR77438
augaaggcaauacuaguaguucugcuauauacauuugcaaccgcaaaugcagacacauuauguauagguuaucaugcgaacaauucaacagacacuguagacacaguacuagaaaagaauguaacaguaacacacucuguuaaccuucuagaagacaagcauaacgggaaacuaugcaaacuaagagggguagccccauugcauuuggguaaauguaacauugcuggcuggauccugggaaauccagagugugaaucacucuccacagcaagcucaugguccuacauuguggaaacaucuaguucagacaauggaacguguuacccaggagauuucaucgauuaugaggagcuaagagagcaauugagcucagugucaucauuugaaagguuugagauauuccccaagacaaguucauggcccaaucaugacucgaacaaagguguaacggcagcauguccucaugcuggagcaaaaagcuucuacaaaaauuuaauauggcuaguuaaaaaaggaaauucauacccaaagcucagcaaauccuacauuaaugauaaagggaaagaaguccucgugcuauggggcauucaccauccaucuacuagugcugaccaacaaagucucuaucagaaugcagaugcauauguuuuuguggggacaucaagauacagcaagaaguucaagccggaaauagcaauaagacccaaagugagggaucaagaagggagaaugaacuauuacuggacacuaguagagccgggagacaaaauaacauucgaagcaacuggaaaucuagugguaccgagauaugcauucgcaauggaaagaaaugcuggaucugguauuaucauuucagauacaccaguccacgauugcaauacaacuugucagacacccaagggugcuauaaacaccagccucccauuucagaauauacauccgaucacaauuggaaaauguccaaaauauguaaaaagcacaaaauugagacuggccacaggauugaggaaugucccgucuauucaaucuagaggccuauuuggggccauugccgguuucauugaagggggguggacagggaugguagauggaugguacgguuaucaccaucaaaaugagcaggggucaggauaugcagccgaccugaagagcacacagaaugccauugacgagauuacuaacaaaguaaauucuguuauugaaaagaugaauacacaguucacagcaguagguaaagaguucaaccaccuggaaaaaagaauagagaauuuaaauaaaaaaguugaugaugguuuccuggacauuuggacuuacaaugccgaacuguuaguucuauuggaaaaugaaagaacuuuggacuaccacgauucaaaugugaagaacuuauaugaaaagguaagaagccaguuaaaaaacaaugccaaggaaauuggaaacggcugcuuugaauuuuaccacaaaugcgauaacacgugcauggaaagugucaaaaaugggacuuaugacuacccaaaauacucagaggaagcaaaauuaaacagagaagaaauagaugggguaaagcuggaaucaacaaggauuuaccagauuuuggcgaucuauucaacugucgccaguucauugguacugguagucucccugggggcaaucaguuucuggaugugcucuaaugggucucuacaguguagaauauguauuuaa

SEQ ID NO: 34933 - RNA, 1701 nt, Artificial Sequence; identical to SEQ ID NO: 34681
  derived and/or modified CDS sequence (wt) from hemagglutinin__InfluenzaA__ACR77448

SEQ ID NO: 34934 - RNA, 1701 nt, Artificial Sequence
  derived and/or modified CDS sequence (wt) from hemagglutinin__InfluenzaA__ACR77458
augaaggcaauacuaguaguucugcuauauacauuugcaaccgcaaaugcagacacauuauguauagguuaucaugcgaacaauucaacagacacuguagacacaguacuagaaaagaauguaacaguaacacacucuguuaaccuucuagaagacaagcauaacgggaaacuaugcaaacuaagagggguagccccauugcauuuggauaaauguaacauugcuggcuggauccugggaaauccagagugugaaucacucuccacagcaagcucaugguccuacauuguggaaacaucuaguucagacaauggaacguguuacccaggagauuucaucgauuaugaggagcuaagagagcaauugagcucagugucaucauuugaaagguuugagauauuccccaagacaaguucauggcccaaucaugacucgaacaaagguguaacggcagcauguccucaugcuggagcaaaaagcuucuacaaaaauuuaauauggcuaguuaaaaaaggaaauucauacccaaagcucagcaaauccuacauuaaugauaaagggaaagaaguccucgugcuauggggcauucaccauccaucuacuagugcugaccaacaaagucucuaucagaaugcagaugcauauguuuuuguggggacaucaagauacagcaagaaguucaagccggaaauagcaauaagacccaaagugagggaucaagaagggagaaugaacuauuacuggacacuaguagagccgggagacaaaauaacauucgaagcaacuggaaaucuagugguaccgagauaugcauucgcaauggaaagaaaugcuggaucugguauuaucauuucagauacaccaguccacgauugcaauacaacuugucagacacccaagggugcuauaaacaccagccucccauuucagaauauacauccgaucacaauuggaaaauguccaaaauauguaaaaagcacaaaauugagacuggccacaggauugaggaaugucccgucuauucaaucuagaggccuauuuggggccauugccgguuucauugaagggggguggacagggaugguagauggaugguacgguuaucaccaucaaaaugagcaggggucaggauaugcagccgaccugaagagcacacagaaugccauugacgagauuacuaacaaaguaaauucuguuauugaaaagaugaauacacaguucacagcaguagguaaagaguucaaccaccuggaaaaaagaauagagaauuuaaauaaaaaaguugaugaugguuuccuggacauuuggacuuacaaugccgaacuguugguucuauuggaaaaugaaagaacuuuggacuaccacgauucaaaugugaagaacuuauaugaaaagguaagaagccaguuaaaaaacaaugccaaggaaauuggaaacggcugcuuugaauuuuaccacaaaugcgauaacacgugcauggaaagugucaaaaaugggacuuaugacuacccaaaauacucagaggaagcaaaauuaaacagagaagaaauagaugggguaaagcuggaaucaacaaggauuuaccagauuuuggcgaucuauucaacugucgccaguucauugguacugguagucucccugggggcaaucaguuucuggaugugcucuaaugggucucuacaguguagaauauguauuuaa

SEQ ID NO: 34935 - RNA, 1701 nt, Artificial Sequence; identical to SEQ ID NO: 34681
  derived and/or modified CDS sequence (wt) from hemagglutinin__InfluenzaA__ACR77468

SEQ ID NO: 34936 - RNA, 1701 nt, Artificial Sequence; identical to SEQ ID NO: 34681
  derived and/or modified CDS sequence (wt) from hemagglutinin__InfluenzaA__ACR77478

SEQ ID NO: 34937 - RNA, 1701 nt, Artificial Sequence; identical to SEQ ID NO: 34681
  derived and/or modified CDS sequence (wt) from hemagglutinin__InfluenzaA__ACR77488

SEQ ID NO: 34938 - RNA, 1701 nt, Artificial Sequence
  derived and/or modified CDS sequence (wt) from hemagglutinin__InfluenzaA__ACR77498
augaaggcaauacuaguaguucugcuauauacauuugcaaccgcaaaugcagacacauuauguauagguuaucaugcgaacaauucaacagacacuguagacacaguacuagaaaagaauguaacaguaacacacucuguuaaccuucuagaagacaagcauaacgggaaacuaugcaaacuaagagggguagccccauugcauuuggguaaauguaacauugcuggcuggauccugggaaauccagagugugaaucacucuccacagcaagcucaugguccuacauuguggaaacaucuaguucagacaauggaacguguuacccaggagauuucaucgauuaugaggagcuaagagagcaauugagcucagugucaucauuugaaagguuugagauauuccccaagacaaguucauggcccaaucaugacucgaacaaagguguaacggcagcauguccucaugcuggagcaaaaagcuucuacaaaaauuuaauauggcuaguuaaaaaaggaaauucauacccaaagcucagcaaauccuacauuaaugauaaagggaaagaaguccucgugcuauggggcauucaccauccaucuacuagugcugaccaacaaagucucuaucagaaugcagaugcauauguuuuuguggggacaucaagauacagcaagaaguucaagccggaaauagcaauaagacccaaagugagggaucaagaagggagaaugaacuauuacuggacacuaguagagccgggagacaaaauaacauucgaagcaacuggaaaucuagugguaccgagauaugcauucgcaauggaaagaaaugcuggaucugguauuaucauuucagauacaccaguccacgauugcaauacaacuugucagacacccaagggugcuauaaacaccagccucccauuucagaauauacauccgaucacaauuggaaaauguccaaaauauguaaaaagcacaaaauugagacuggccacaggauugaggaaugucccgucuauucaaucuagaggccuauuuggggccauugccgguuucauugaagggggguggacagggaugguagauggaugguacgguuaucaccaucaaaaugagcaggggucaggauaugcagccgaccugaagagcacacagaaugccauugacgagauuacuaacaaaguaaauucuguuauugaaaagaugaauacacaguucacagcaguagguaaagaguucaaccaccuggaaaaaagaauagagaauuuaaauaaaaaaguugaugaugguuuccuggacauuuggacuuacaaugccgaacuguugguucuauuggaaaaugaaagaacuuuggacuaccacgauucaaaugugaagaacuuauaugaaaagguaagaagccaguuaaaaaacaaugccaaggaaauuggaaauggcugcuuugaauuuuaccacaaaugcgauaacacgugcauggaaagugucaaaaaugggacuuaugacuacccaaaauacucagaggaagcaaaauuaaacagagaagaaauagaugggguaaagcuugaaucaacaaggauuuaccagauuuuggcgaucuauucaacugucgccaguucauugguacugguagucucccugggggcaaucaguuucuggaugugcucuaaugggucucuacaguguagaauauguauuuaa

SEQ ID NO: 34939 - RNA, 1701 nt, Artificial Sequence
  derived and/or modified CDS sequence (wt) from hemagglutinin__InfluenzaA__ACR83525
augaaggcaauacuaguaguucugcuauauacauuugcaaccgcaaaugcagacacauuauguauagguuaucaugcgaacaauucaacagacacuguagacacaguacuagaaaagaauguaacaguaacacacucuguuaaccuucuagaagacaagcauaacgggaaacuaugcaaacuaagagggguagccccauugcauuuggguaaauguaacauugcuggcuggauccugggaaauccagagugugaaucacucuccacagcaagcucaugguccuacauuguggaaacaucuaguucagacaauggaacguguuacccaggagauuucaucgauuaugaggagcuaagagagcaauugagcucagugucaucauuugaaagguuugagauauuccccaagacaaguucauggcccaaucaugacucgaacaaagguguaacggcagcauguccucaugcuggagcaaaaagcuucuacaaaaauuuaauauggcuaguuaaaaaaggaaauucauacccaaagcucagcaaauccuacauuaaugauaaagggaaagaaguccucgugcuauggggcauucaccauccaucuacuagugcugaccaacaaagucucuaucagaaugcagaugcauauguuuuuguggggucaucaagauacagcaagaaguucaagccggaaauagcaauaagacccaaagugagggaucaagaagggagaaugaacuauuacuggacacuaguagagccgggagacaaaauaacauucgaagcaacuggaaaucuagugguaccgagauaugcauucgcaauggaaagaaaugcuggaucugguauuaucauuucagauacaccaguccacgauugcaauacaacuugucaaacacccaagggugcuauaaacaccagccucccauuucagaauauacauccgaucacaauuggaaaauguccaaaauauguaaaaagcacaaaauugagacuggccacaggauugaggaaugucccgucuauucaaucuagaggccuauuuggggccauugccgguuucauugaagggggguggacagggaugguagauggaugguacgguuaucaccaucaaaaugagcaggggucaggauaugcagccgaccugaagagcacacagaaugccauugacgagauuacuaacaaaguaaauucuguuauugaaaagaugaauacacaguucacagcaguagguaaagaguucaaccaccuggaaaaaagaauagagaauuuaaauaaaaaaguugaugaugguuuccuggacauuuggacuuacaaugccgaacuguugguucuauuggaaaaugaaagaacuuuggacuaccacgauucaaaugugaagaacuuauaugaaaagguaagaagccagcuaaaaaacaaugccaaggaaauuggaaacggcugcuuugaauuuuaccacaaaugcgauaacacgugcauggaaagugucaaaaaugggacuuaugacuacccaaaauacucagaggaagcaaaauuaaacagagaagaaauagaugggguaaagcuggaaucaacaaggauuuaccagauuuuggcgaucuauucaacugucgccaguucauugguacugguagucucccugggggcaaucaguuucuggaugugcucuaaugggucucuacaguguagaauauguauuuaa

SEQ ID NO: 34940 - RNA, 1701 nt, Artificial Sequence
  derived and/or modified CDS sequence (wt) from hemagglutinin__InfluenzaA__ACR83538
augaaggcaauacuaguaguucugcuauauacauuugcaaccgcaaaugcagacacauuauguauagguuaucaugcgaacaauucaacagacacuguagacacaguacuagaaaagaauguaacaguaacacacucuguuaaccuucuagaagacaagcauaacgggaaacuaugcaaacuaagagggguagccccauugcauuuggguaaauguaacauugcuggcuggauccugggaaauccagagugugaaucacucuccacagcaagcucaugguccuacauuguggaaacaucuaguucagacaauggaacguguuacccaggagauuucaucgauuaugaggagcuaagagagcaauugagcucagugucaucauuugaaagguuugagauauuccccaagacaaguucauggcccaaucaugacucgaacaaagguguaacggcagcauguccucaugcuggagcaaaaagcuucuacaaaaauuuaauauggcuaguuaaaaaaggaaauucauacccaaagcucagcaaauccuacauuaaugauaaagggaaagaaguccucgugcuauggggcauucaccauccaucuacuagugcugaccaacaaagucucuaucagaaugcagaugcauauguuuuuguggggacaucaagauacagcaagaaguucaagccggaaauagcaauaagacccaaagugagggaucaagaagggagaaugaacuauuacuggacacuaguagagccgggagacaaaauaacauucgaagcaacuggaaaucuagugguaccgagauaugcauucgcaauggaaagaaaugcuggaucugguauuaucauuucagauacaccaguccacgauugcaauacaacuugucagacacccaagggugcuauaaacaccagccucccauuucagaauauacauccgaucacaauuggaaaauguccaaaauauguaaaaagcacaaaauugagacuggccacaggauugaggaaugucccgucuauucuaucuagaggccuauuuggggccauugccgguuucauugaagggggguggacagggaugguagauggaugguacgguuaucaccaucaaaaugagcaggggucaggauaugcagccgaccugaagagcacacagaaugccauugacgagauuacuaacaaaguaaauucuguuauugaaaagaugaauacacaguucacagcaguagguaaagaguucaaccaccuggaaaaaagaauagagaauuuaaauaaaaaaguugaugaugguuuccuggacauuuggacuuacaaugccgaacuguugguucuauuggaaaaugaaagaacuuuggacuaccacgauucaaaugugaagaacuuauaugaaaagguaagaagccaguuaaaaaacaaugccaaggaaauuggaaacggcugcuuugaauuuuaccacaaaugcgauaacacgugcauggaaagugucaaaaaugggacuuaugacuacccaaaauacucagaggaagcaaaauuaaacagagaagaaauagaugggguaaagcuggaaucaacaaggauuuaccagauuuuggcgaucuauucaacugucgccaguucauugguacugguagucucccugggggcaaucaguuucuggaugugcucuaaugggucucuacaguguagaauauguauuuaa

SEQ ID NO: 34941 - RNA, 1701 nt, Artificial Sequence; identical to SEQ ID NO: 34681
  derived and/or modified CDS sequence (wt) from hemagglutinin__InfluenzaA__ACS14666

SEQ ID NO: 34942 - RNA, 1701 nt, Artificial Sequence; identical to SEQ ID NO: 34681
  derived and/or modified CDS sequence (wt) from hemagglutinin__InfluenzaA__ACS14676

SEQ ID NO: 34943 - RNA, 1701 nt, Artificial Sequence; identical to SEQ ID NO: 34681
  derived and/or modified CDS sequence (wt) from hemagglutinin__InfluenzaA__ACS14686

SEQ ID NO: 34944 - RNA, 1701 nt, Artificial Sequence; identical to SEQ ID NO: 34681
  derived and/or modified CDS sequence (wt) from hemagglutinin__InfluenzaA__ACS14696

SEQ ID NO: 34945 - RNA, 1701 nt, Artificial Sequence; identical to SEQ ID NO: 34681
  derived and/or modified CDS sequence (wt) from hemagglutinin__InfluenzaA__ACS14706

SEQ ID NO: 34946 - RNA, 1701 nt, Artificial Sequence; identical to SEQ ID NO: 34681
  derived and/or modified CDS sequence (wt) from hemagglutinin__InfluenzaA__ACS14716

SEQ ID NO: 34947 - RNA, 1701 nt, Artificial Sequence; identical to SEQ ID NO: 34681
  derived and/or modified CDS sequence (wt) from hemagglutinin__InfluenzaA__ACS14726

SEQ ID NO: 34948 - RNA, 1701 nt, Artificial Sequence; identical to SEQ ID NO: 34681
  derived and/or modified CDS sequence (wt) from hemagglutinin__InfluenzaA__ACS14736

SEQ ID NO: 34949 - RNA, 1701 nt, Artificial Sequence; identical to SEQ ID NO: 34898
  derived and/or modified CDS sequence (wt) from hemagglutinin__InfluenzaA__ACS27189

SEQ ID NO: 34950 - RNA, 1701 nt, Artificial Sequence; identical to SEQ ID NO: 34681
  derived and/or modified CDS sequence (wt) from hemagglutinin__InfluenzaA__ACS27199

SEQ ID NO: 34951 - RNA, 1701 nt, Artificial Sequence; identical to SEQ ID NO: 34681
  derived and/or modified CDS sequence (wt) from hemagglutinin__InfluenzaA__ACS27209

SEQ ID NO: 34952 - RNA, 1701 nt, Artificial Sequence; identical to SEQ ID NO: 34737
  derived and/or modified CDS sequence (wt) from hemagglutinin__InfluenzaA__ACS27219

SEQ ID NO: 34953 - RNA, 1701 nt, Artificial Sequence; identical to SEQ ID NO: 34681
  derived and/or modified CDS sequence (wt) from hemagglutinin__InfluenzaA__ACS27229

SEQ ID NO: 34954 - RNA, 1701 nt, Artificial Sequence
  derived and/or modified CDS sequence (wt) from hemagglutinin__InfluenzaA__ACS27239
augaaggcaauacuaguaguucugcuauauacauuugcaaccgcaaaugcagacacauuauguauagguuaucaugcgaacaauucaacagacacuguagacacaguacuagaaaagaauguaacaguaacacacucuguuaaccuucuagaagacaagcauaacgggaaacuaugcaaacuaagagggguagccccauugcauuuggguaaauguaacauugcuggcuggauccugggaaauccagagugugaaucacuuuccacagcaagcucaugguccuacauuguggaaacaucuaguucagacaauggaacguguuacccaggagauuucaucgauuaugaggagcuaagagagcaauugagcucaaugucaucauuugaaagguuugagauauuccccaagacaaguucauggcccaaucaugacucgaacaaagguguaacggcagcauguccucaugcuggagcaaaaagcuucuacaaaaauuuaauauggcuaguuaaaaaaggaaauucauacccaaagcucagcaaauccuacauuaaugauaaagggaaagaaguccucgugcuauggggcauucaccauccaucuacuagugcugaccaacaaagucucuaucagaaugcagaugcauauguuuuuguggggucaucaagauacagcaagaaguucaagccggaaauagcaauaagacccaaagugagggaucaagaagggagaaugaacuauuacuggacacuaguagagccgggagacaaaauaacauucgaagcaacuggaaaucuagugguaccgagauaugcauucgcaauggaaagaaaugcuggaucugguauuaucauuucagauacaccaguccacgauugcaauacaacuugucagacacccaagggugcuauaaacaccagccucccauuucagaauauacauccgaucacaauuggaaaauguccaaaauauguaaaaagcacaaaauugagacuggccacaggauugaggaaugucccgucuauucaaucuagaggccuauuuggggccauugccgguuucauugaagggggguggacagggaugguagauggaugguacgguuaucaccaucaaaaugagcaggggucaggauaugcagccgaccugaagagcacacagaaugccauugacgagauuacuaacaaaguaaauucuguuauugaaaagaugaauacacaguucacagcaguagguaaagaguucaaccaccuggaaaaaagaauagagaauuuaaauaaaaaaguugaugaugguuuccuggacauuuggacuuacaaugccgaacuguugguucuauuggaaaaugaaagaacuuuggacuaccacgauucaaaugugaagaacuuauaugaaaagguaagaagccagcuaaaaaacaaugccaaggaaauuggaaacggcugcuuugaauuuuaccacaaaugcgauaacacgugcauggaaagugucaaaaaugggacuuaugacuacccaaaauacucagaggaagcaaaauuaaacagagaagaaauagaugggguaaagcuggaaucaacaaggauuuaccagauuuuggcgaucuauucaacugucgccaguucauugguacugguagucucccugggggcaaucaguuucuggaugugcucuaaugggucucuacaguguagaauauguauuuaa

SEQ ID NO: 34955 - RNA, 1701 nt, Artificial Sequence; identical to SEQ ID NO: 34681
  derived and/or modified CDS sequence (wt) from hemagglutinin__InfluenzaA__ACS27249

SEQ ID NO: 34956 - RNA, 1701 nt, Artificial Sequence; identical to SEQ ID NO: 34681
  derived and/or modified CDS sequence (wt) from hemagglutinin__InfluenzaA__ACS27775

SEQ ID NO: 34957 - RNA, 1701 nt, Artificial Sequence
  derived and/or modified CDS sequence (wt) from hemagglutinin__InfluenzaA__ACS34705
augaaggcaauacuaguaguucugcuauauacauuugcaaccgcaaaugcagacacauuauguauagguuaucaugcgaacaauucaacagacacuguagacacaguacuagaaaagaauguaacaguaacacacucuguuaaccuucuagaagacaagcauaacgggaaacuaugcaaacuaagagggguagccccauugcauuuggguaaauguaacauugcuggcuggauccugggaaauccagagugugaaucacucuccacagcaagcucaugguccuacauuguggaaacaucuaguucagacaauggaacguguuacccaggagauuucaucgauuaugaggagcuaagagagcaauugagcucagugucaucauuugaaagguuugagauauuccccaagacaaguucauggcccaaucaugacucgaacaaagguguaacggcagcauguccucaugcuggagcaaaaagcuucuacaaaaauuuaauauggcuaguuaaaaaaggaaauucauacccaaagcucagcaaauccuacauuaaugauaaagggaaagaaguccucgugcuauggggcauucaccauccaucuacuagugcugaccaacaaagucucuaucagaaugcagaugcauauguuuuuguggggucaucaagauacagcaagaaguucaagccggaaauagcaauaagacccaaagugagggaucaagaagggagaaugaacuauuacuggacacuaguagagccgggagacaaaauaacauucgaagcaacuggaaaucuagugguaccgagauaugcauucgcaauggaaagaaaugcuggaucugguauuaucauuucagauacaccaguccacgauugcaauacaacuugucagacacccaagggugcuauaaacaccagccucccauuucagaauauacauccgaucacaauuggaaaauguccaaaauauguaaaaagcacaaaauugagacuggccacaggauugaggaaugucccgucuauucaaucuagaggccuauuuggggccauugccgguuucauugaagggggguggacagggaugguagauggaugguacgguuaucaccaucaaaaugagcaggggucaggauaugcagccgaccugaagagcacacagaaugccauugacgagauuacuaacaaaguaaauucuguuauugaaaagaugaauacacaguucacagcaguagguaaagaguucaaccaccuggaaaaaagaauagagaauuuaaauaaaaaaguugaugaugguuucuuggacauuuggacuuacaaugccgaacuguugguucuauuggaaaaugaaagaacuuuggacuaccacgauucaaaugugaagaacuuauaugaaaagguaagaagccagcuaaaaaacaaugccaaggaaauuggaaacggcugcuuugaauuuuaccacaaaugcgauaacacgugcauggaaagugucaaaaaugggacuuaugacuacccaaaauacucagaggaagcaaaauuaaacagagaagaaauagaugggguaaagcuggaaucaacaaggauuuaccagauuuuggcgaucuauucaacugucgccaguucauugguacugguagucucccugggggcaaucaguuucuggaugugcucuaaugggucucuacaguguagaauauguauuuaa

SEQ ID NO: 34958 - RNA, 1701 nt, Artificial Sequence; identical to SEQ ID NO: 34676
  derived and/or modified CDS sequence (wt) from hemagglutinin__InfluenzaA__ACS34966

SEQ ID NO: 34959 - RNA, 1701 nt, Artificial Sequence
  derived and/or modified CDS sequence (wt) from hemagglutinin__InfluenzaA__ACS34967
augaaggcaauacuaguaguucugcuauauacauuugcaaccgcaaaugcagacacauuauguauagguuaucaugcgaacaauucaacagacacuguagacacaguacuagaaaagaauguaacaguaacacacucuguuaaccuucuagaagacaagcauaacgggaaacuaugcaaacuaagagggguagccccauugcauuuggguaaauguaacauugcuggcuggauccugggaaauccagagugugaaucacucuccacagcaagcucaugguccuacauuguggaaacaucuaguucagacaauggaacguguuaccccggagauuucaucgauuaugaggagcuaagagagcaauugagcucagugucaucauuugaaagguuugagauauuccccaagacaaguucauggcccaaucaugacucgaacaaagguguaacggcagcauguccucaugcuggagcaaaaagcuucuacaaaaauuuaauauggcuaguuaaaaaaggaaauucauacccaaagcucagcaaauccuacauuaaugauaaagggaaagaaguccucgugcuauggggcauucaccauccaucuacuagugcugaccaacaaagucucuaucagaaugcagaugcauauguuuuuguggggucaucaagauacagcaagaaguucaagccggaaauagcaauaagacccaaagugagggaucaagaagggagaaugaacuauuacuggacacuaguagagccgggagacaaaauaacauucgaagcaacuggaaaucuagugguaccgagauaugcauucgcaauggaaagaaaugcuggaucugguauuaucauuucagauacaccaguccacgauugcaauacaacuugucagacacccaagggugcuauaaacaccagccucccauuucagaauauacauccgaucacaauuggaaaauguccaaaauauguaaaaagcacaaaaucgagacuggccacaggauugaggaaugucccgucuauucaaucuagaggccuauuuggggccauugccgguuucauugaagggggguggacagggaugguagauggaugguacgguuaucaccaucaaaaugagcaggggucaggauaugcagccgaccugaagagcacacagaaagccauugacgagauuacuaacaaaguaaauucuguuauugaaaagaugaauacacaguucacagcaguagguaaagaguucaaccaccuggaaaaaagaauagagaauuuaaauaaaaaaguugaugaugguuuccuggacauuuggacuuacaaugccgaacuguugguucuauuggaaaaugaaagaacuuuggacuaccacgauucaaaugugaagaacuuauaugaaaagguaagaagccagcuaaaaaacaaugccaaggaaauuggaaacggcugcuuugaauuuuaccacaaaugcgauaacacgugcauggaaagugucaaaaaugggacuuaugacuacccaaaauacucagaggaagcaaaauuaaacagagaagaaauagaugggguaaagcuggaaucaacaaggauuuaccagauuuuggcgaucuauucaacugucgccaguucauugguacugguagucucccugggggcaaucaguuucuggaugugcucuaaugggucucuacaguguagaauauguauuuaa

SEQ ID NO: 34960 - RNA, 1701 nt, Artificial Sequence
  derived and/or modified CDS sequence (wt) from hemagglutinin__InfluenzaA__ACS34968
augaaggcaauacuaguaguucugcuauauacauuugcaaccgcaaaugcagacacauuauguauagguuaucaugcgaacaauucaacagacacuguagacacaguacuagaaaagaauguaacaguaacacacucuguuaaccuucuagaagacaagcauaacgggaaacuaugcaaacuaagagggguagccccauugcauuuggguaaauguaacauugcuggcuggauccugggaaauccagagugugaaucacucuccacagcaagcucaugguccuacauuguggaaucaucuaguucagacaauggaacguguuacccaggagauuucaucgauuaugaggagcuaagagagcaauugagcucagugucaucauuugaaagguuugagauauuccccaagacaaguucauggcccaaucaugacucgaacaaagguguaacggcagcauguccucaugcuggagcaaaaagcuucuacaaaaauuuaauauggcuaguuaaaaaaggaaauucauacccaaagcuaagcaaauccuacauuaaugauaaagggaaagaaguccucgugcuauggggcauucaccauccaucuacuagugcugaccaacaaagucucuaucagaaugcagaugcauauguuuuuguggggucaucaagauacagcaagaaguucaagccggaaauagcaauaagacccaaagugagggaucaagaagggagaaugaacuauuacuggacacuaguagagccgggagacaaaauaauauucgaagcaacuggaaaucuagugguaccgagauaugcauucgcaauggaaagaaaugcuggaucugguauuaucauuucagauacaccaguccacgauugcaauacaacuugucagacacccaagggugcuauaaacaccagccucccauuucagaauauacauccgaucacaauuggaaaauguccaaaauauguaaaaagcacaaaauugagacuggccacaggauugaggaaugucccgucuauucaaucuagaggccuauuuggggccauugccgguuucauugaagggggguggacagggaugguagauggaugguacgguuaucaccaucaaaaugagcaggggucaggauaugcagccgaccugaagagcacacagaaugccauugacgagauuacuaacaaaguaaauucuguuauugaaaagaugaauacacaguucacagcaguagguaaagaguucaaccaccuggaaaaaagaauagagaauuuaaauaaaaaaguugaugaugguuuccuggacauuuggacuuacaaugccgaacuguugguucuauuggaaaaugaaagaacuuuggacuaccacgauucaaaugugaagaacuuauaugaaaagguaagaagccaguuaaaaaacaaugccaaggaaauuggaaacggcugcuuugaauuuuaccacaaaugcgauaacacgugcauggaaagugucaaaaaugggacuuaugacuacccaaaauacucagaggaagcaaaauuaaacagagaagaaauagaugggguaaagcuggaaucaacaaggauuuaccagauuuuggcgaucuauucaacugucgccaguucauugguacugguagucucccugggggcaaucaguuucuggaugugcucuaaugggucucuacaguguagaauauguauuuaa

SEQ ID NO: 34961 - RNA, 1701 nt, Artificial Sequence
  derived and/or modified CDS sequence (wt) from hemagglutinin__InfluenzaA__ACS36632
augaaggcaauacuaguaguucugcuauauacauuugcaaccgcaaaugcagacacauuauguauagguuaucaugcgaacaauucaacagacacuguagacacaguacuagaaaagaauguaacaguaacacacucuguuaaccuucuagaagacaagcauaacgggaaacuaugcaaacuaagagggguagccccauugcauuuggguaaauguaacauugcuggcuggauccugggaaauccagagugugaaucacucuccacagcaagcucaugguccuacauuguggaaacaucuaguucagacaauggaacguguuacccaggagauuucaucgauuaugaggagcuaagagagcaauugagcucagugucaucauuugaaagguuugagauauuccccaagacaaguucauggcccaaucaugacucgaacaaagguguaacggcagcauguccucaugcuggagcaaaaagcuucuacaaaaauuuaauauggcuaguuaaaaaaggaaauucauacccaaagcucagcaaauccuacauuaaugauaaagggaaagaaguccucgugcuauggggcauucaccauccaucuacuagugcugaccaacaaagucucuaucagaaugcagaugcauauguuuuuguggggucaucaagauacagcaagaaguucaagccggaaauagcaauaagacccaaagugagggaucaagaagggagaaugaacuauuacuggacacuaguagagccgggagacaaaauaacauucgaagcaacuggaaaucuagugguaccgagauaugcauucgcaauggaaagaaaugcuggaucugguauuaucauuucagauacaccaguccacgauugcaauacaacuugucagacacccaagggugcuauaaacaccagccucccauuucagaauauacauccgaucacaauuggaaaauguccaaaauauguaaaaagcacaaaauugagacuggccacaggauugaggaaugucccgucuauucaaucuagaggccuauuuggggccauugccgguuucauugaagggggguggacagggaugguagauggaugguacgguuaucaccaucaaaaugagcaggggucaggauaugcagccgaccugaagagcacacagaaagccauugacgagauuacuaacaaaguaaauucuguuauugaaaagaugaauacacaguucacagcaguagguaaagaguucaaccaccuggaaaaaagaauagagaauuuaaauaaaaaaguugaugaugguuuccuggacauuuggacuuacaaugccgaacuguugguucuauuggaaaaugaaagaacuuuggacuaccacgauucaaaugugaagaacuuauaugaaaagguaagaagccagcuaaaaaacaaugccaaggaaauuggaaacggcugcuuugaauuuuaccacaaaugcgauaacacgugcauggaaagugucaaaaaugggacuuaugacuacccaaaauacucagaggaagcaaaauuaaacagagaagaaauagaugggguaaagcuggaaucaacaaggauuuaccagauuuuggcgaucuauucaacugucgccaguucauugguacugguagucucccugggggcaaucaguuucuggaugugcucuaaugggucucuacaguguagaauauguauuuaa

SEQ ID NO: 34962 - RNA, 1701 nt, Artificial Sequence
  derived and/or modified CDS sequence (wt) from hemagglutinin__InfluenzaA__ACS36645
augaaggcaauacuaguaguucugcuauauacauuugcaaccgcaaaugcagacacauuauguauagguuaucaugcgaacaauucaacagacacuguagacacaguacuagaaaagaauguaacaguaacacacucuguuaaccuucuagaagacaagcauaacgggaaacuaugcaaacuaagagggguagccccauugcauuuggguaaauguaacauugcuggcuggauccugggaaauccagagugugaaucacucuccacagcaagcucaugguccuacauuguggaaacaucuaguucagacaauggaacgugcuacccaggagauuucaucgauuaugaggagcuaagagagcaauugagcucagugucaucauuugaaagguuugagauauuccccaagacaaguucauggcccaaucaugacucgaacaaagguguaacggcagcauguccucaugcuggaacaaaaagcuucuacaaaaauuuaauauggcuaguuaaaaaaggaaauucauacccaaagcucagcaaauccuacauuaaugauaaagggaaagaaguccucgugcuauggggcauucaccauccaucuacuagugcugaccaacaaagucucuaucagaaugcagaugcauauguuuuuguggggucaucaagauacagcaagaaguucaagccggaaauagcaauaagacccaaagugagggaucaagaagggagaaugaacuauuacuggacacuaguagagccgggagacaaaauaacauucgaagcaacuggaaaucuagugguaccgagauaugcauucgcaauggaaagaaaugcuggaucugguauuaucauuucagauacaccaguccacgauugcaauacaacuugucagacacccaagggugcuauaaacaccagccucccauuucagaauauacauccgaucacaauuggaaaauguccaaaauauguaaaaagcacaaaauugagacuggccacaggauugaggaaugucccgucuauucaaucuagaggccuauuuggggccauugccgguuucauugaagggggguggacagggaugguagauggaugguacgguuaucaccaucaaaaugagcaggggucaggauaugcagccgaccugaagagcacacagaaugccauugacgagauuacuaacaaaguaaauucuguuauugaaaagaugaauacacaguucacagcaguagguaaagaguucaaccaccuggaaaaaagaauagagaauuuaaauaaaaaaguugaugaugguuuccuggacauuuggacuuacaaugccgaacuguugguucuauuggaaaaugaaagaacuuuggacuaccacgauucaaaugugaagaacuuauaugaaaagguaagaagccagcuaaaaagcaaugccaaggaaauuggaaacggcugcuuugaauuuuaccacaaaugcgauaacacgugcauggaaagugucaaaaaugggacuuaugacuacccaaaauacucagaggaagcaaaauuaaacagagaagaaauagaugggauaaagcuggaaucaacaaggauuuaccagauuuuggcgaucuauucaacugucgccaguucauugguacugguagucucccugggggcaaucaguuucuggaugugcucuaaugggucucuacaguguagaauauguauuuaa

SEQ ID NO: 34963 - RNA, 1701 nt, Artificial Sequence
  derived and/or modified CDS sequence (wt) from hemagglutinin__InfluenzaA__ACS45035
augaaggcaauacuaguaguucugcuauauacauuugcaaccgcaaaugcagacacauuauguauagguuaucaugcgaacaauucaacagacacuguagacacaguacuagaaaagaauguaacaguaacacacucuguuaaccuucuagaagacaagcauaacgggaaacuaugcaaacuaagagggguagccccauugcauuuggguaaauguaacauugcuggcuggauccugggaaauccagagugugaaucacucuccacagcaagcucaugguccuacauuguggaaacaccuaguucagacaauggaacguguuacccaggagauuucaucgauuaugaggagcuaagagagcaauugagcucagugucaucauuugaaagguuugagauauuccccaagacaaguucauggcccaaucaugacucgaacaaagguguaacggcagcauguccucaugcuggagcaaaaagcuucuacaaaaauuuaauauggcuaguuaaaaaaggaaauucauacccaaagcucagcaaauccuacauuaaugauaaagggaaagaaguccucgugcuauggggcauucaccauccaucuacuagugcugaccaacaaaguaucuaucagaaugcagauacauauguuuuuguggggucaucaagauacagcaagaaguucaagccggaaauagcaauaagacccaaagugagggaucaagaagggagaaugaacuauuacuggacacuaguagagccgggagacaaaauaacauucgaagcaacuggaaaucuagugguaccgagauaugcauucgcaauggaaagaaaugcuggaucugguauuaucauuucagauacaccaguccacgauugcaauacaacuugucaaacacccaagggugcuauaaacaccagccucccauuucagaauauacauccgaucacaauuggaaaauguccaaaauaugugaaaagcacaaaauugagacuggccacaggauugaggaauaucccgucuauucaaucuagaggccuauuuggggccauugccgguuucauugaagggggguggacagggaugguagauggaugguacgguuaucaccaucaaaaugagcaggggucaggauaugcagccgaccugaagagcacacagaaugccauugacgagauuacuaacaaaguaaauucuguuauugaaaagaugaauacacaguucacagcaguagguaaagaguucaaccaccuggaaaaaagaauagagaauuuaaauaaaaaaguugaugaugguuuccuggacauuuggacuuacaaugccgaacuguugguucuauuggaaaaugaaagaacuuuggacuaccacgauucaaaugugaagaacuuauaugaaaagguaagaagccagcuaaaaaacaaugccaaggaaauuggaaacggcugcuuugaauuuuaccacaaaugcgauaacacgugcauggaaagugucaaaaaugggacuuaugacuacccaaaauacucagaggaagcaaaauuaaacagagaagaaauagaugggguaaagcuggaaucaacaaggauuuaccagauuuuggcgaucuauucaacugucgccaguucauugguacugguagucucccugggggcaaucaguuucuggaugugcucuaaugggucucuacaguguagaauauguauuuaa

SEQ ID NO: 34964 - RNA, 1701 nt, Artificial Sequence; identical to SEQ ID NO: 34681
  derived and/or modified CDS sequence (wt) from hemagglutinin__InfluenzaA__ACS50084

SEQ ID NO: 34965 - RNA, 1701 nt, Artificial Sequence
  derived and/or modified CDS sequence (wt) from hemagglutinin__InfluenzaA__ACS50095
auggaggcaauacuaguaguucugcuauauacauuugcaaccgcaaaugcagacacauuauguauagguuaucaugcgaacaauucaacagacacuguagacacaguacuagaaaagaauguaacaguaacacacucuguuaaccuucuagaagacaagcauaacgggaaacuaugcaaacuaagagggguagccccauugcauuuggguaaauguaacauugcuggcuggauccugggaaauccagagugugaaucacucuccacagcaagcucaugguccuacauuguggaaacaucuaguucagacaauggaacguguuacccaggagauuucaucgauuaugaggagcuaagagagcaauugagcucagugucaucauuugaaagguuugagauauuccccaagacaaguucauggcccaaucaugacucgaacaaagguguaacggcagcauguccucaugcuggagcaaaaagcuucuacaaaaauuuaauauggcuaguuaaaaaaggaaauucauacccaaagcucagcaaauccuacauuaaugauaaagggaaagaaguccucgugcuauggggcauucaccauccaucuacuagugcugaccaacaaagucucuaucagaaugcagaugcauauguuuuuguggggucaucaagauacagcaagaaguucaagccggaaauagcaauaagacccaaagugagggaucaagaagggagaaugaacuauuacuggacacuaguagagccgggagacaaaauaacauucgaagcaacuggaaaucuagugguaccgagauaugcauucgcaauggaaagaaaugcuggaucugguauuaucauuucagauacaccaguccacgauugcaauacaacuugucagacacccaagggugcuauaaacaccagccucccauuucauaauauacauccgaucacaauuggaaaauguccaaaauauguaaaaagcacaaaauugagacuggccacaggauugaggaaugucccgucuauucaaucuagaggccuauuuggggccauugccgguuucauugaagggggguggacagggaugguagauggaugguacgguuaucaccaucaaaaugagcaggggucaggauaugcagccgaccugaagagcacacagaaugccauugacgagauuacuaacaaaguaaauucuguuauugaaaagaugaauacacaguucacagcaguagguaaagaguucaaccaccuggaaaaaagaauagagaauuuaaauaaaaaaguugaugaugguuuccuggacauuuggacuuacaaugccgaacuguugguucuauuggaaaaugaaagaacuuuggacuaccacgauucaaaugugaagaacuuauaugaaaagguaagaagccaguuaaaaaacaaugccaaggaaauuggaaacggcugcuuugaauuuuaccacaaaugcgauaacacgugcauggaaagugucaaaaaugggacuuaugacuacccaaaauacucagaggaagcaaaauuaaacagagaagaaauagaugggguaaagcuggaaucaacaaggauuuaccagauuuuggcgaucuauucaacugucgccaguucauugguacugguagucucccugggggcaaucaguuucuggaugugcucuaaugggucucuacaguguagaauauguauuuaa

SEQ ID NO: 34966 - RNA, 1701 nt, Artificial Sequence
  derived and/or modified CDS sequence (wt) from hemagglutinin__InfluenzaA__ACS54258
augaaggcaauacuaguaguucugcuauauacauuugcaaccgcaaaugcagacacauuauguauagguuaucaugcgaacaauucaacagacacuguagacacaguacuagaaaagaauguaacaguaacacacucuguuaaccuucuagaagacaagcauaacgggaaacuaugcaaacuaagagggguagccccauugcauuuggguaaauguaacauugcuggcuggauccugggaaauccagagugugaaucacucuccacagcaagcucaugguccuacauuguggaaacaucuaguucagacaauggaacguguuacccaggagauuucaucgauuaugaggagcuaagagagcaauugagcucagugucaucauuugaaagguuugagauauuccccaagacaaguucauggcccaaucaugacucgaacaaagguguaacggcagcauguccucaugcuggagcaaaaagcuucuacaaaaauuuaauauggcuaguuaaaaaaggaaauucauacccaaagcucagcaaauccuacauuaaugauaaagggaaagaaguccucgugcuauggggcauucaccauccaucuacuagugcugaccaacaaagucucuaucagaaugcagaugcauauguuuuuguggggacaucaagauacagcaagaaguucaagccggaaauagcaauaagacccaaagugagggaucaagaagggagaaugaacuauuacuggacacuaguagagccgggagacaaaauaacauucgaagcaacuggaaaucuagugguaccgagauaugcauucgcaauggaaagaaaugcuggaucugguauuaucauuucagauacaccaguccacgauugcaacacaacuugucagacacccaagggugcuauaaacaccagccucccauuucagaauauacauccgaucacaauuggaaaauguccaaaauauguaaaaagcacaaaauugagacuggccacaggauugaggaaugucccgucuauucaaucuagaggccuauuuggggccauugccgguuucauugaagggggguggacagggaugguagauggaugguacgguuaucaccaucaaaaugagcaggggucaggauaugcagccgaccugaagagcacacagaaugccauugacgagauuacuaacaaaguaaauucuguuauugaaaagaugaauacacaguucacagcaguagguaaagaguucaaccaccuggaaaaaagaauagagaauuuaaauaaaaaaguugaugaugguuuccuggacauuuggacuuacaaugccgaacuguugguucuauuggaaaaugaaagaacuuuggacuaccacgauucaaaugugaagaacuuauaugaaaagguaagaagccaguuaaaaaacaaugccaaggaaauuggaaacggcugcuuugaauuuuaccacaaaugcgauaacacgugcauggaaagugucaaaaaugggacuuauuacuacccaaaauacucagaggaagcaaaauuaaacagagaagaaauagaugggguaaagcuggaaucaacaaggauuuaccagauuuuggcgaucuauucaacugucgccaguucauugguacugguagucucccugggggcaaucaguuucuggaugugcucuaaugggucucuacaguguagaauauguauuuaa

SEQ ID NO: 34967 - RNA, 1701 nt, Artificial Sequence
  derived and/or modified CDS sequence (wt) from hemagglutinin__InfluenzaA__ACS54259
augaaggcaauacuaguaguucugcuauauacauuugcaaccgcaaaugcagacacauuauguauagguuaucaugcgaacaauucaacagacacuguagacacaguacuagaaaagaauguaacaguaacacacucuguuaaccuucuagaagacaagcauaacgggaaacuaugcaaacuaagagggguagccccauugcauuuggguaaauguaacauugcuggcuggauccugggaaauccagagugugaaucacucuccacagcaagcucaugguccuacauuguggaaacaccuaguucagacaauggaacguguuacccaggagauuucaucgauuaugaggagcuaagagagcaauugagcucagugucaucauuugaaagguuugagauauuccccaagacaaguucauggcccaaucaugacucgaacaaagguguaacggcagcauguccucaugcuggagcaaaaagcuucuacaaaaauuuaauauggcuaguuaaaaaaggaaauucauacccaaagcucagcaaauccuacauuaaugauaaagggaaagaaguccucgugcuauggggcauucaccauccaucuacuagugcugaccaacaaagucucuaucagaaugcagauacauauguuuuuguggggucaucaagauacagcaagaaguucaaaccggaaauagcaauaagacccaaagugagggaucaagaagggagaaugaacuauuacuggacacuaguagagccgggagacaaaauaacauucgaagcaacuggaaaucuagugguaccgagauaugcauucgcaauggaaagaaaugcuggaucugguauuaucauuucagauacaccaguccacgauugcaauacaacuugucaaacacccaagggugcuauaaacaccagccucccauuucagaauauacauccgaucacaauuggaaaauguccaaaauauguaaaaagcacaaaauugagacuggccacaggauugaggaauaucccgucuauucaaucuagaggccuauuuggggccauugccgguuucauugaagggggguggacagggaugguagauggaugguacgguuaucaccaucaaaaugagcaggggucaggauaugcagccgaccugaagagcacacagaaugccauugacgagauuacuaacaaaguaaauucuguuauugaaaagaugaauacacaguucacagcaguagguaaagaguucaaccaccuggaaaaaagaauagagaauuuaaauaaaaaaguugaugaugguuuccuggacauuuggacuuacaaugccgaacuguugguucuauuggaaaaugaaagaacuuuggacuaccacgauucaaaugugaagaacuuauaugaaaagguaagaagccagcuaaaaaacaaugccaaggaaauuggaaacggcugcuuugaauuuuaccacaaaugcgauaacacgugcauggaaagugucaaaaaugggacuuaugacuacccaaaauacucagaggaagcaaaauuaaacagagaagaaauagaugggguaaagcuggaaucaacaaggauuuaccagauuuuggcgaucuauucaacugucgccaguucauugguacugguagucucccugggggcaaucaguuucuggaugugcucuaaugggucucuacaguguagaauauguauuuaa

SEQ ID NO: 34968 - RNA, 1701 nt, Artificial Sequence; identical to SEQ ID NO: 34676
  derived and/or modified CDS sequence (wt) from hemagglutinin__InfluenzaA__ACS54260

SEQ ID NO: 34969 - RNA, 1701 nt, Artificial Sequence; identical to SEQ ID NO: 34681
  derived and/or modified CDS sequence (wt) from hemagglutinin__InfluenzaA__ACS54261

SEQ ID NO: 34970 - RNA, 1701 nt, Artificial Sequence; identical to SEQ ID NO: 34681
  derived and/or modified CDS sequence (wt) from hemagglutinin__InfluenzaA__ACS54263

SEQ ID NO: 34971 - RNA, 1701 nt, Artificial Sequence; identical to SEQ ID NO: 34895
  derived and/or modified CDS sequence (wt) from hemagglutinin__InfluenzaA__ACS54301

SEQ ID NO: 34972 - RNA, 1701 nt, Artificial Sequence
  derived and/or modified CDS sequence (wt) from hemagglutinin__InfluenzaA__ACS66821
augaaggcaauacuaguaguucugcuauauacauuugcaaccgcaaaugcagacacauuauguauagguuaucaugcgaacaauucaacagacacuguagacacaguacuagaaaagaauguaacaguaacacacucuguuaaccuucuagaagacaagcauaacgggaaacuaugcaaacuaagagggguagccccauugcauuuggguaaauguaacauugcuggcuggauccugggaaauccagagugugaaucacucuccacagcaagcucaugguccuacauuguggaaacaucuaguucagacaauggaacguguuacccaggagauuucaucgauuaugaggagcuaagagagcaauugagcucagugucaucauuugaaagguuugagauauuccccaagacaaguucauggcccaaucaugacucgaacaaagguguaacggcagcauguccucaugcuggagcaaaaagcuucuacaaaaauuuaauauggcuaguuaaaaaaggaaauucauacccaaagcucagcaaauccuacauuaaugauaaagggaaagaaguccucgugcuauggggcauucaccauccaucuacuagugcugaccaacaaagucucuaucagaaugcagaugcauauguuuuuguggggucaucaagauacagcaagaaguucaagccugaaauagcaauaagacccaaagugagggaucaagaagggagaaugaacuauuacuggacacuaguagagccgggagacaaaauaacauucgaagcaacuggaaaucuagugguaccgagauaugcauucgcaauggaaagaaaugcuggaucugguauuaucauuucagauacaccaguccacgauugcaauacaacuugucagacacccaagggugcuauaaacaccagccucccauuucagaauauacauccgaucacaauuggaaaauguccaaaauauguaaaaagcacaaaauugagacuggccacaggauugaggaaugucccgucuauucaaucuagaggccuauuuggggccauugccgguuucauugaagggggguggacagggaugguagauggaugguacgguuaucaccaucaaaaugagcaggggucaggauaugcagccgaccugaagagcacacagaaugccauugacgagauuacuaacaaaguaaauucuguuauugaaaagaugaauacacaguucacagcaguagguaaagaguucaaccaccuggaaaaaagaauagagaauuuaaauaaaaaaguugaugaugguuuccuggacauuuggacuuacaaugccgaacuguugguucuauuggaaaaugaaagaacuuuggacuaccacgauucaaaugugaagaacuuauaugaaaagguaagaagccagcuaaaaaacaaugccaaggaaauuggaaacggcugcuuugaauuuuaccacaaaugcgauaacacgugcauggaaagugucaaaaaugggacuuaugacuacccaaaauacucagaggaagcaaaauuaaacagagaagaaauagaugggguaaagcuggaaucaacaaggauuuaccagauuuuggcgaucuauucaacugucgccaguucauugguacugguagucucccugggggcaaucaguuucuggaugugcucuaaugggucucuacaguguagaauauguauuuaa

SEQ ID NO: 34973 - RNA, 1701 nt, Artificial Sequence
  derived and/or modified CDS sequence (wt) from hemagglutinin__InfluenzaA__ACS68822
augaaggcaauacuaguaguucugcuauauacauuugcaaccgcaaaugcagacacauuauguauagguuaucaugcgaacaauucaacagacacuguagacacaguacuagaaaagaauguaacaguaacacacucuguuaaccuucuagaagacaagcauaacgggaaacuaugcaaacuaagagggguagccccauugcauuuggguaaauguaacauugcuggcuggauccugggaaauccagagugugaaucacucuccacggcaagcucaugguccuacauuguggaaacaucuaguucagacaauggaacguguuacccaggagauuucaucgauuaugaggggcuaagagagcaauugagcucagugucaucauuugaaagguuugagauauuccccaagacaaguucauggcccaaucaugacucgaacaaagguguaacggcagcauguccucaugcuggagcaaaaagcuucuacaaaaauuuaauauggcuaguuaaaaaaggaaauucauacccaaagcucagcaaauccuacauuaaugauaaagggaaagaaguccucgugcuauggggcauucaccauccaucuacuagugcugaccaacaaagucucuaucagaaugcagaugcauauguuuuuguggggacaucaagauacagcaagaaguucaagccggaaauagcaauaagacccaaagugagggaucaagaagggagaaugaacuauuacuggacacuaguagagccgggagacaaaauaacauucgaagcaacuggaaaucuagugguaccgagauaugcauucgcaauggaaagaaaugcuggaucugguauuaucauuucagauacaccaguccacgauugcaauacaacuugucagacacccaagggugcuauaaacaccagccucccauuucagaauauacauccgaucacaauuggaaaauguccaaaauauguaaaaagcacaaaauugagacuggccacaggauugaggaaugucccgucuauucaaucuagaggccuauuuggggccauugccgguuucauugaagggggguggacagggaugguagauggaugguacgguuaucaccaucaaaaugagcaggggucaggauaugcagccgaccugaagagcacacagaaugccauugacgagauuacuaacaaaguaaauucuguuauugaaaagaugaauacacaguucacagcaguagguaaagaguucaaccaccuggaaaaaagaauagagaauuuaaauaaaaaaauugaugaugguuuccuggacauuuggacuuacaaugccgaacuguugguucuauuggaaaaugaaagaacuuuggacuaccacgauucaaaugugaagaacuuauaugaaaagguaagaagccaguuaaaaaacaaugccaaggaaauuggaaacggcugcuuugaauuuuaccacaaaugcgauaacacgugcauggaaagugucaaaaaugggacuuaugacuacccaaaauacucagaggaagcaaaauuaaacagagaagaaauagaugggguaaagcuggaaucaacaaggauuuaccagauuuuggcgaucuauucaacugucgccaguucauugguacugguagucucccugggggcaaucaguuucuggaugugcucuaaugggucucuacaguguagaauauguauuuaa

SEQ ID NO: 34974 - RNA, 1701 nt, Artificial Sequence; identical to SEQ ID NO: 34681
  derived and/or modified CDS sequence (wt) from hemagglutinin__InfluenzaA__ACS75821

SEQ ID NO: 34975 - RNA, 1701 nt, Artificial Sequence; identical to SEQ ID NO: 34681
  derived and/or modified CDS sequence (wt) from hemagglutinin__InfluenzaA__ACS77926

SEQ ID NO: 34976 - RNA, 1701 nt, Artificial Sequence; identical to SEQ ID NO: 34681
  derived and/or modified CDS sequence (wt) from hemagglutinin__InfluenzaA__ACS77936

SEQ ID NO: 34977 - RNA, 1701 nt, Artificial Sequence; identical to SEQ ID NO: 34774
  derived and/or modified CDS sequence (wt) from hemagglutinin__InfluenzaA__ACS77946

SEQ ID NO: 34978 - RNA, 1701 nt, Artificial Sequence; identical to SEQ ID NO: 34681
  derived and/or modified CDS sequence (wt) from hemagglutinin__InfluenzaA__ACS77956

SEQ ID NO: 34979 - RNA, 1701 nt, Artificial Sequence; identical to SEQ ID NO: 34681
  derived and/or modified CDS sequence (wt) from hemagglutinin__InfluenzaA__ACS77966

SEQ ID NO: 34980 - RNA, 1701 nt, Artificial Sequence
  derived and/or modified CDS sequence (wt) from hemagglutinin__InfluenzaA__ACS77976
augaaggcaauacuaguaguucugcuauauacauuugcaaccgcaaaugcagacacauuauguauagguuaucaugcgaacaauucaacagacacuguagacacaguacuagaaaagaauguaacaguaacacacucuguuaaccuucuagaagacaagcauaacgggaaacuaugcaaacuaagagggguagccccauugcauuuggguaaauguaacauugcuggcuggauccugggaaauccagagugugaaucacucuccacagcaagcucaugguccuacauuguggaaacaucuaguucagacaauggaacguguuacccaggagauuucaucgauuaugaggagcuaagagagcaauugagcucagugucaucauuugaaagguuugagauauuccccaagacaaguucauggcccaaucaugacucgaacaaagguguaacggcagcauguccucaugcuggagcaaaaagcuucuacaaaaauuuaauauggcuaguuaaaaaagggaauucauacccaaagcucagcaaauccuacauuaaugauaaagggaaagaaguccucgugcuauggggcauucaccauccaucuacuagugcugaccaacaaagucucuaucagaaugcagaugcauauguuuuuguggggacaucaagauacagcaagaaguucaagccggaaauagcaauaagacccaaagugagggaucaagaagggagaaugaacuauuacuggacacuaguagagccgggagacaaaauaacauucgaagcaacuggaaaucuagugguaccgagauaugcauucgcaauggaaagaaaugcuggaucugguauuaucauuucagauacaccaguccacgauugcaauacaacuugucagacacccaagggugcuauaaacaccagccucccauuucagaauauacauccgaucacaauuggaaaauguccaaaauauguaaaaagcacaaaauugagacuggccacaggauugaggaaugucccgucuauucaaucuagaggccuauuuggggccauugccgguuucauugaagggggguggacagggaugguagauggaugguacgguuaucaccaucaaaaugagcaggggucaggauaugcagccgaccugaagagcacacagaaugccauugacgagauuacuaacaaaguaaauucuguuauugaaaagaugaauacacaguucacagcaguagguaaagaguucaaccaccuggaaaaaagaauagagaauuuaaauaaaaaaguugaugaugguuuccuggacauuuggacuuacaaugccgaacuguugguucuauuggaaaaugaaagaacuuuggacuaccacgauucaaaugugaagaacuuauaugaaaagguaagaagccaguuaaaaaacaaugccaaggaaauuggaaacggcugcuuugaauuuuaccacaaaugcgauaacacgugcauggaaagugucaaaaaugggacuuaugacuacccaaaauacucagaggaagcaaaauuaaacagagaagaaauagaugggguaaagcuggaaucaacaaggauuuaccagauuuuggcgaucuauucaacugucgccaguucauugguacugguagucucccugggggcaaucaguuucuggaugugcucuaaugggucucuacaguguagaauauguauuuaa

SEQ ID NO: 34981 - RNA, 1701 nt, Artificial Sequence
  derived and/or modified CDS sequence (wt) from hemagglutinin__InfluenzaA__ACS77986
auggaggcaauacuaguaguucugcuauauacauuugcaaccgcaaaugcagacacauuauguauagguuaucaugcgaacaauucaacagacacuguagacacaguacuagaaaagaauguaacaguaacacacucuguuaaccuucuagaagacaagcauaacgggaaacuaugcaaacuaagagggguagccccauugcauuuggguaaauguaacauugcuggcuggauccugggaaauccagagugugaaucacucuccacagcaagcucaugguccuacauuguggaaacaucuaguucagacaauggaacguguuacccaggagauuucaucgauuaugaggagcuaagagagcaauugagcucagugucaucauuugaaagguuugagauauuccccaagacaaguucauggcccaaucaugacucgaacaaagguguaacggcagcauguccucaugcuggagcaaaaagcuucuacaaaaauuuaauauggcuaguuaaaaaaggaaauucauacccaaagcucagcaaauccuacauuaaugauaaagggaaagaaguccucgugcuauggggcauucaccauccaucuacuagugcugaccaacaaagucucuaucagaaugcagaugcauauguuuuuguggggucaucaagauacagcaagaaguucaagccggaaauagcaauaagacccaaagugagggaucaagaagggagaaugaacuauuacuggacacuaguagagccgggagacaaaauaacauucgaagcaacuggaaaucuagugguaccgagauaugcauucgcaauggaaagaaaugcuggaucugguauuaucauuucagauacaccaguccacgauugcaauacaacuugucagacacccaagggugcuauaaacaccagccucccauuucauaauauacauccgaucacaauuggaaaauguccaaaauauguaaaaagcacaaaauugagacuggccacaggauugaggaaugucccgucuauucaaucuagaggccuauuuggggccauugccgguuucauugaagggggguggacagggaugguagauggaugguacgguuaucaccaucaaaaugagcaggggucaggauaugcagccgaccugaagagcacacagaaugccauugacgagauuacuaacaaaguaaauucuguuauugaaaagaugaauacacaguucacagcaguagguaaagaguucaaccacuuggaaaaaagaauagagaauuuaaauaaaaaaguugaugaugguuuccuggacauuuggacuuacaaugccgaacuguugguucuauuggaaaaugaaagaacuuuggacuaccacgauucaaaugugaagaacuuauaugaaaagguaagaagccaguuaaaaaacaaugccaaggaaauuggaaacggcugcuuugaauuuuaccacaaaugcgauaacacgugcauggaaagugucaaaaaugggacuuaugacuacccaaaauacucagaggaagcaaaauuaaacagagaagaaauagaugggguaaagcuggaaucaacaaggauuuaccagauuuuggcgaucuauucaacugucgccaguucauugguacugguagucucccugggggcaaucaguuucuggaugugcucuaaugggucucuacaguguagaauauguauuuaa

SEQ ID NO: 34982 - RNA, 1701 nt, Artificial Sequence
  derived and/or modified CDS sequence (wt) from hemagglutinin__InfluenzaA__ACS77996
augaaggcaacacuaguaguucugcuauauacauuugcaaccgcaaaugcagacacauuauguauagguuaucaugcgaacaauucaacagacacuguagacacaguacuagaaaagaauguaacaguaacacacucuguuaaccuucuagaagacaagcauaacgggaaacuaugcaaacuaagagggguagccccauugcauuuggguaaauguaacauugcuggcuggauccugggaaauccagagugugaaucacucuccacagcaagcucaugguccuacauuguggaaacaucuaguucagacaauggaacguguuacccaggagauuucaucgauuaugaggagcuaagagagcaauugagcucagugucaucauuugaaagguuugagauauuccccaagacaaguucauggcccaaucaugacucgaacaaagguguaacggcagcauguccucaugcuggagcaaaaagcuucuacaaaaauuuaauauggcuaguuaaaaaaggaaauucauacccaaagcucagcaaauccuacauuaaugauaaagggaaagaaguccucgugcuauggggcauucaccauccaucuacuagugcugaccaacaaagucucuaucagaaugcagaugcauauguuuuuguggggacaucaagauacagcaagaaguucaagccggaaauagcaauaagacccaaagugagggaucaagaagggagaaugaacuauuacuggacacuaguagagccgggagacaaaauaacauucgaagcaacuggaaaucuagugguaccgagauaugcauucgcaauggaaagaaaugcuggaucugguauuaucauuucagauacaccaguccacgauugcaauacaacuugucagacacccaagggugcuauaaacaccagccucccauuucagaauauacauccgaucacaauuggaaaauguccaaaauauguaaaaagcacaaaauugagacuggccacaggauugaggaaugucccgucuauucaaucuagaggccuauuuggggccauugccgguuucauugaagggggguggacagggaugguagauggaugguacgguuaucaccaucaaaaugagcaggggucaggauaugcagccgaccugaagagcacacagaaugccauugacgagauuacuaacaaaguaaauucuguuauugaaaagaugaauacacaguucacagcaguagguaaagaguucaaccaccuggaaaaaagaauagagaauuuaaauaaaaaaguugaugaugguuuccuggacauuuggacuuacaaugccgaacuguugguucuauuggaaaaugaaagaacuuuggacuaccacgauucaaaugugaagaacuuauaugaaaagguaagaagccaguuaaaaaacaaugccaaggaaauuggaaacggcugcuuugaauuuuaccacaaaugcgauaacacgugcauggaaagugucaaaaaugggacuuaugacuacccaaaauacucagaggaagcaaaauuaaacagagaagaaauagaugggguaaagcuggaaucaacaaggauuuaccagauuuuggcgaucuauucaacugucgccaguucauugguacugguagucucccugggggcaaucaguuucuggaugugcucuaaugggucucuacaguguagaauauguauuuaa

SEQ ID NO: 34983 - RNA, 1701 nt, Artificial Sequence; identical to SEQ ID NO: 34681
  derived and/or modified CDS sequence (wt) from hemagglutinin__InfluenzaA__ACS78006

SEQ ID NO: 34984 - RNA, 1701 nt, Artificial Sequence; identical to SEQ ID NO: 34681
  derived and/or modified CDS sequence (wt) from hemagglutinin__InfluenzaA__ACS78016

SEQ ID NO: 34985 - RNA, 1701 nt, Artificial Sequence
  derived and/or modified CDS sequence (wt) from hemagglutinin__InfluenzaA__ACS78026
augaaggcaauacuaguaguucugcuauauacauuugcaaccgcaaaugcagacacauuauguauagguuaucaugcgaacaauucaacagacacuguagacacaguacuagaaaagaauguaacaguaacacacucuguuaaccuucuagaagacaagcauaacgggaaacuaugcaaacuaagagggguagccccauugcauuuggguaaauguaacauugcuggcuggauccugggaaauccagagugugaaucacucuccacagcaagcucaugguccuacauuguggaaacaucuaguucagacaauggaacguguuacccaggagauuucaucgauuaugaggagcuaagagagcaauugagcucagugucaucauuugaaagguuugagauauuccccaagauaaguucauggcccaaucaugacucgaacagagguguaacggcagcauguccucaugcuggagcaaaaagcuucuacaaaaauuuaauauggcuaguuaaaaaaggaaauucauacccaaagcucaucaaauccuacauuaaugauaaagggaaagaaguccucgugcuauggggcauucaccauccaucuacuagugcugaccaacaaagucucuaucagaaugcagaugcauauguuuuuguggggucaucaagauacagcaagaaguucaagccggaaauagcaauaagacccaaagugagggaucaagaagggagaaugaacuauuacuggacacuaguagagccgggagacaaaauaacauucgaagcaacuggaaaucuagugguaccgagauaugcauucgcaauggaaagaaaugcuggaucugguauuaucauuucagauacaccaguccacgauugcaauacaacuugucagacacccaagggugcuauaaacaccagccucccauuucagaauauacauccgaucacaauuggaaaauguccaaaauauguaaaaagcacaaaauugagacuggccacaggauugaggaaugucccgucuauucaaucuagaggccuauuuggggccauugccgguuucauugaagggggguggacagggaugguagauggaugguacgguuaucaccaucaaaaugagcaggggucaggauaugcagccgaccugaagagcacacagaaugccauugacgagauuacuaacaaaguaaauucuguuauugaaaagaugaauacacaguucacagcaguagguaaagaguucaaccaccuggaaaaaagaauagagaauuuaaauaaaaaaguugaugaugguuuccuggacauuuggacuuacaaugccgaacuguugguucuauuggaaaaugaaagaacuuuggacuaccacgauucaaaugugaagaacuuauaugaaaagguaagaagccaguuaaaaaacaaugccaaggaaauuggaaacggcugcuuugaauuuuaccacaaaugcgauaacacgugcauggaaagugucaaaaaugggacuuaugacuacccaaaauacucagaggaagcaaaauuaaacagagaagaaauagaugggguaaagcuggaaucaacaaggauuuaccagauuuuggcgaucuauucaacugucgccaguucauugguacugguagucucccugggggcaaucaguuucuggaugugcucuaaugggucucuacaguguagaauauguauuuaa

SEQ ID NO: 34986 - RNA, 1701 nt, Artificial Sequence; identical to SEQ ID NO: 34965
  derived and/or modified CDS sequence (wt) from hemagglutinin__InfluenzaA__ACS78036

SEQ ID NO: 34987 - RNA, 1701 nt, Artificial Sequence; identical to SEQ ID NO: 34965
  derived and/or modified CDS sequence (wt) from hemagglutinin__InfluenzaA__ACS78046

SEQ ID NO: 34988 - RNA, 1701 nt, Artificial Sequence; identical to SEQ ID NO: 34967
  derived and/or modified CDS sequence (wt) from hemagglutinin__InfluenzaA__ACS92569

SEQ ID NO: 34989 - RNA, 1701 nt, Artificial Sequence; identical to SEQ ID NO: 34967
  derived and/or modified CDS sequence (wt) from hemagglutinin__InfluenzaA__ACS92579

SEQ ID NO: 34990 - RNA, 1701 nt, Artificial Sequence; identical to SEQ ID NO: 34681
  derived and/or modified CDS sequence (wt) from hemagglutinin__InfluenzaA__ACS92589

SEQ ID NO: 34991 - RNA, 1701 nt, Artificial Sequence
  derived and/or modified CDS sequence (wt) from hemagglutinin__InfluenzaA__ACS92612
augaaggcaauacuaguaguucugcuauauacauuugcaaccgcaaaugcagacacauuauguauagguuaucaugcgaacaauucaacagacacuguagacacaguacuagaaaagaauguaacaguaacacacucuguuaaccuucuagaagacaagcauaacgggaaacuaugcaaacuaagagggguagccccauugcauuuggguaaauguaacauugcuggcuggauccugggaaauccagagugugaaucacucuccacagcaagcucaugguccuacauuguggaaacaucuaguucagacaauggaacguguuacccaggagauuucaucgauuaugaggagcuaagagagcaauugagcucagugucaucauuugaaagguuugagauauuccccaagacaaguucauggcccauucaugacucgaacaaagguguaacggcagcauguccccaugcuggagcaaaaagcuucuacaaaaauuuaauauggcuaguuaaaaaaggaaauucauacccaaagcucagcaaauccuacauuaaugauaaagggaaagaaguccucgugcuauggggcauucaccauccaucuacuagugcugaccaacaaagucucuaucagaaugcagaugcauauguuuuuguggggucaucaagauacagcaagaaguucaagccugaaauagcaauaagacccaaagugagggaucaagaagggagaaugaacuauuacuggacacuaguagagccgggagacaaaauaacauucgaagcaacuggaaaucuagugguaccgagauaugcauucgcaauggaaagaaaugcuggaucugguauuaucauuucagauacaccaguccacgauugcgauacaacuugucagacacccaagggugcuauaaacaccagccucccauuucagaauauacauccgaucacaauuggaaaauguccaaaauauguaaaaagcacaaaauugagacuggccacaggauugaggaauaucccgucuauucaaucuagaggccuauuuggggccauugccgguuucauugaagggggguggacagggaugguagauggaugguacgguuaucaccaucaaaaugagcaggggucaggauaugcagccgaccugaagagcacacagaaugccauugacgaaauuacuaacaaaguaaauucuguuauugaaaagaugaauacacaguucacagcaguagguaaagaguucaaccaccuggaaaaaagaauagagaauuuaaauaaaaaaguugaugaugguuuccuggacauuuggacuuacaaugccgaacuguugguucuauuggaaaaugaaagaacuuuggacuaccacgauucaaaugugaagaacuuauaugaaaagguaagaagccagcuaaaaaacaaugccaaggaaauuggaaacggcugcuuugaauuuuaccacaaaugcgauaacacgugcauggaaagugucaaaaaugggacuuaugacuacccaaaauacucagaggaagcaaaauuaaacagagaagaaauagaugggguaaagcuggaaucaacaaggauuuaccagauuuuggcgaucuauucaacugucgccaguucauuggugcugguagucucccugggggcaaucaguuucuggaugugcucuaaugggucucuacaguguagaauauguauuuga

SEQ ID NO: 34992 - RNA, 1701 nt, Artificial Sequence; identical to SEQ ID NO: 34681
  derived and/or modified CDS sequence (wt) from hemagglutinin__InfluenzaA__ACT10307

SEQ ID NO: 34993 - RNA, 1701 nt, Artificial Sequence; identical to SEQ ID NO: 34681
  derived and/or modified CDS sequence (wt) from hemagglutinin__InfluenzaA__ACT10314

SEQ ID NO: 34994 - RNA, 1701 nt, Artificial Sequence
  derived and/or modified CDS sequence (wt) from hemagglutinin__InfluenzaA__ACT11057
augaaggcaauacuaguaguucugcuauauacauuugcaaccgcaaaugcagacacauuauguauagguuaucaugcgaacaauucaacagacacuguagacacaguacuagaaaagaauguaacaguaacacacucuguuaacauucuagaagacaagcauaacgggaaacuaugcaaacuaagagggguagccccauugcauuuggguaaauguaacauugcuggcuggauccugggaaauccagagugugaaucacucuccacagcaagcucaugguccuacauuguggaaacaucuaguucagacaauggaacguguuacccaggagauuucaucgauuaugaggagcuaagagagcaauugagcucagugucaucauuugaaagguuugagauauuccccaagacaaguucauggcccaaucaugacucgaacaaagguguaacggcagcauguccucaugcuggagcaaaaagcuucuacaaaaauuuaauauggcuaguuaaaaaaggaaauucauacccaaagcucagcaaauccuacauuaaugauaaagggaaagaaguccucgugcuauggggcauucaccauccaucuacuagugcugaccaacaaagucucuaucagaaugcagaugcauauguuuuugugggaucaucaagauacagcaagaaguucaagccggaaauagcaauaagacccaaagugagggaucaagaagggagaaugaacuauuacuggacacuaguagagccgggagacaaaauaacauucgaagcaacuggaaaucuagugguaccgagauaugcauucgcaauggaaagaaaugcuggaucugguauuaucauuucagauacaccaguccaugauugcaauacaacuugucagacacccaagggugcuauaaacaccagccucccauuucagaauauacauccgaucacaauuggaaaauguccaaaauauguaaaaagcacaaaauugagacuggccacaggauugaggaaugucccgucuauucaaucuagaggccuauuuggggccauugccgguuucauugaagggggguggacagggaugguagauggaugguacgguuaucaccaucaaaaugagcaggggucaggauaugcagccgaccugaagagcacacagaaugccauugacgagauuacuaacaaaguaaauucuguuauugaaaagaugaauacacaguucacagcaguagguaaagaguucaaccaccuggaaaaaagaauagagaauuuaaauaaaaaaguugaugaugguuuccuggacauuuggacuuacaaugccgaacuguugguucuauuggaaaaugaaagaacuuuggacuaccacgauucaaaugugaagaacuuauaugaaaagguaagaagccagcuaaaaaacaaugccaaggaaguuggaaacggcugcuuugaauuuuaccacaaaugcgauaacacgugcauggaaagugucaaaaaugggacuuaugacuacccaaaauacucagaggaagcaaaauuaaacagagaagaaauagaugggguaaagcuggaaucaacaaggauuuaccagauuuuggcgaucuauucaacugucgccaguucauugguacugguagucucccugggggcaaucaguuucuggaugugcucuaaugggucucuacaguguagaauauguauuuaa

SEQ ID NO: 34995 - RNA, 1704 nt, Artificial Sequence
  derived and/or modified CDS sequence (wt) from hemagglutinin__InfluenzaA__ACT15312
auggagaaaauagugcuucuucuugcaauagucaguauuguuaaaagugaucagauuugcauugguuaccaugcaaacaacucgacagagcagguugacacaauaauggaaaagaacgucacuguuacacacgcccaagacauacuggaaaagacacacaacgggaaacucugcaaucuagauggagugaagccucuaauuuuaagagauuguaguguagcuggauggcuccucgggaacccaaugugcgacgaauuccucaaugugccggaauggucuuacauaguggagaagaucaauccagccaaugaccucuguuauccagggaauuucaacgacuaugaagaacugaaacaccuauugagcagaauaaaccauuuugagaaaauucagaucauucccaaaaauucuuggucagaucaugaagccucaggagugagcucagcauguccauaccagggaagauccuccuuuuuuagaaaugugguauggcuuaccaaaaagaacaaugcauacccaacaauaaagagaaguuacaauaauaccaaccaagaagaucuuuugguacuaugggggauucaccauccaaaugaugcggcagagcagacaaggcuuuaucaaaacccaacuaccuauauuuccguugggacaucaacacuaaaccagagauugguaccaaaaauagcuacuagaucuaagguaaacgggcaaaguggaaggauggaguucuuuuggacaauuuuaaaaucgaaugaugcaauaaacuuugagaguaauggaaauuucauugcuccagaaaaugcauacaaaauugucaagaaaggggacucaacaauuaugaaaagugaguuggaauaugguaacugcaacaccaagugucagacuccaauaggggcgauaaacuccaguaugccauuccacaacauccacccucucaccaucggggaaugccccaaauaugugaaaucaaacagauuaguccuugcuacugggcucagaaauagcccucaaggagagagaagaagaaaaaagagagggcuauuuggagcuauagcaggguuuauagagggaggauggcagggaaugguagaugguugguauggguaccaccauagcaacgagcaggggaguggguacgcugcagacaaagaauccacucaaaaggcaauagauggagucaccaauaaggucaacucgaucauugacaaaaugaacacucaguuugaggcuguuggaagggaauuuaauaacuuagaaaggagaauagaaaauuuaaacaagaagauggaagacggauuccuagaugucuggacuuauaaugcugaacuucugguucucauggaaaaugagagaacucuagacuuucaugacucaaaugucaagaaccuuuacgacaagguccgacuacagcuuagggauaaugcaaaggagcuugguaacgguuguuucgaguucuaucacagaugugauaaugaauguauggaaaguguaagaaacggaacguaugacuacccgcaguauucagaagaagcaagauuaaaaagagaggaaauaaguggaguaaaauuggagucaauaggaacuuaccaaauacugucaauuuauucaacaguggcgagcucccuagcacuggcaaucaugguggcuggucuauuuuuauggaugugcuccaauggaucguuacaaugcagaauuugcauuuaa

SEQ ID NO: 34996 - RNA, 1704 nt, Artificial Sequence
  derived and/or modified CDS sequence (wt) from hemagglutinin__InfluenzaA__ACT15314
auggagaaaauagugcuucuucuugcaauagucagucuuguuaaaagugaucagauuugcauugguuaccaugcaaacaacucgacagagcagguugacacaauaauggaaaagaacgucacuguuacacacgcccaagacauacuggaaaagacacacaacgggaaacucugcaaucuagauggagugaagccucuaauuuuaagagauuguaguguagccggauggcuccucgggaacccaaugugcgacgaauuccucaaugugccggaauggucuuacauaguggagaagaucaauccagccaaugaccucuguuauccagggaauuucaacgacuaugaagaacugaaacaccuauugagcagaauaaaccauuuugagaaaauucagaucauccccaaaaauucuuggucagaucaugaagccucaggagugagcucagcauguccauaccagggaagauccuccuuuuuuagaaaugugguauggcuuaccaaaaagaacaaugcauacccaacaauaaagagaaguuacaauaauaccaaccaagaagaucuuuugguacuaugggggauucaccauccaaaugaugcggcagagcagacaaggcuuuaucaaaacccaacuaccuauauuuccguugggacaucaacacuaaaccagagauugguaccaaaaauaacuacuagaucuaagguaaacgggcaaaguggaaggauggaguucuuuuggacaauuuuaaaaucgaaugaugcaauaaacuuugagaguaauggaaauuucauugcuccagaaaaugcauacaaaauugucaagaaaggggacucaacaauuaugaaaagcgaguuggaauaugguaacugcaacaccaagugucagacuccaauaggggcgauaaacuccaguaugccauuccacaacauccacccucucaccaucggggaaugccccaaauaugugaaaucaaacagauuaguccuugcuacugggcucagaaauagcccucaaggagagagaagaagaaaaaagagaggacuauuuggagcuauagcagguuuuauagagggaggauggcagggaaugguagaugguugguauggguaccaccauagcaacgagcaggggaguggguacgcugcagacaaagaauccacucaaaaggcaauagauggagucaccaauaaggucaacucgaucauugacaaaaugaacacucaguuugaggcuguuggaagggaauuuaauaacuuagaaaggagaauagaaaauuuaaacaagaagauggaagacggauuccuagaugucuggacuuauaaugcugaacuucugguucucauggaaaaugagagaacucuagacuuucaugacucaaaugucaagaaucuuuacgacaagguccgacuacagcuuagggauaaugcaaaggagcuugguaacgguuguuucgaguucuaucacagaugugauaaugaauguauggaaaguguaagaaacggaacguaugacuacccgcaguauucagaagaagcaagauuaaaaagagaggaaauaaguggaguaaaauuggagucaauaggaacuuaccaaauacugucaauuuauucaacaguggcgagcucccuagcacuggcaaucaugguggcuggucuauuuuuauggaugugcuccaauggaucguuacaaugcagaauuugcauuuaa

SEQ ID NO: 34997 - RNA, 1704 nt, Artificial Sequence
  derived and/or modified CDS sequence (wt) from hemagglutinin__InfluenzaA__ACT15316
auggagaaaauagugcuucuucuugcaauagucagucuuguuaaaagugaucagauuugcauugguuaccaugcaaacaacucgacagagcagguugacacaauaauggaaaagaacgucacuguuacacacgcccaagacauacuggaaaagacacacaacgggaaacucugcaaucuagauggagugaagccucuaauuuuaagagauuguaguguagcuggauggcuccucgggaacccaaugugugacgaauuccucaaugugccggaauggucuuacauaguggagaagaucaauccagccaaugaccucuguuauccagggaauuucaacgacuaugaagaacugaaacaucuauugagcagaauaaaccauuuugagaaaauucagaucauccccaaaaauucuuggucagaucaugaagccucaggagugagcucagcauguccauaccagggaagguccuccuuuuuuagaaaugugguauggcuuaccaaaaaggacaaugcauacccaacaauaaagagaaguuacaauaauaccaaccaagaagaucuuuugguacuauggggaauucaccauccaaaugaugcggcagagcagacaaggcuuuaucaaaacccaacuaccuauauuuccguugggacaucaacacuaaaccagagauugauaccaaaaauagcuacuagaucuaagguaaacgggcaaaguggaaggauggaguucuuuuggacaauuuuaaaaucgaaugaugcaauaaacuuugagaguaauggaaauuucauugcuccagaaaaugcauacaaaauugucaagaaaggggacucaacaauuaugaaaagugaguuggaauaugguaacugcaacaccaagugucagacuccaauaggggcgauaaacuccaguaugccauuccacaacauccacccucucaccaucggggaaugccccaaauaugugaaaucaaacagauuaguccuugcuacugggcuaagaaauagcccucaaggagagagaagaagaaaaaagagaggacuauuuggagcuauagcagguuucauagagggaggauggcagggaaugguagaugguugguauggguaccaccauagcaacgagcaggggagugguuacgcugcagacaaagaauccacucaaaaggcaauagauggagucaccaauaaggucaacucgaucauugacaaaaugaacacucaguuugaggcuguuggaagggaauuuaauaacuuagaaaggagaauagaaaauuuaaacaagaagauggaagacggauuccuagaugucuggacuuauaaugcugaacuucugguucucauggaaaaugagagaacucuagacuuucaugacucaaaugucaagaaccuuuacgacaagguccgguuacagcuuagggauaaugcaaaggagcuugguaacgguuguuucgaguucuaucacagaugugauaaugaauguauggaaaguguaagaaacggaacguaugacuacccgcaguauucagaagaagcaagauuaaaaagagaggaaauaaguggaguaaaauuggagucaauaggaacuuaccaaauacuuucaauuuauucaacaguggcgagcucccuagcacuggcaaucaugguggcuggucuauuuuuauggaugugcuccaauggaucguuacaaugcagaauuugcauuuaa

SEQ ID NO: 34998 - RNA, 1704 nt, Artificial Sequence
  derived and/or modified CDS sequence (wt) from hemagglutinin__InfluenzaA__ACT15320
auggagaaaauagugcuucuucuugcaauagucagucuuguuaagagugaucagauuugcauugguuaccaugcaaacaacucgacagagcagguugacacaauaauggaaaagaacgucacuguuacacacgcccaagacauacuggaaaagacacacaacgggaaacucugcaaucuagauggagugaagccucuaauuuuaagagauuguaguguagccggauggcuccucgggaacccaaugugcgacgaauuccucaaugugccggaauggucuuacauaguggagaagaucaauccagccaaugaccucuguuauccagggaauuucaacgacuaugaagaacugaaacaccuauugagcagaauaaaccauuuugagaaaauucagaucauccccaaaaauucuuggucagaucaugaagccucaggaaugagcucagcauguccauaccagggaagauccuccuuuuuuagaaaugugguauggcuuaccaaaaaggacaaugcauacccaacaauaaagagaaguuacaauaauaccaaccaagaagaucuuuugguacuaugggggauucaccauccaaaugaugcggcagagcagacaaggcuuuaucaaaacccaacuaccuauauuuccguugggacaucaacacuaaaccagagauugguaccaaaaauagcuacuagaucuaagguaaacggacaaaguggaaggauggaguucuuuuggacaauuuuaaaaucgaaugaugcaauaaacuuugagaguaauggaaauuucauugcuccagaaaaugcauacaaaauugucaagaaaggggacucaacaauuaugaaaagugaguuggaauaugguaacugcaacaccaagugucagacuccaauaggggcgauaaacuccaguaugccauuccacaacauccacccucucaccaucggggaaugccccaaauaugugaaaucaaacagauuaguccuugcuacugggcucagaaauagcccucaaggagagagaagaagaaaaaagagaggacuauuuggagcuauagcagguuuuauagagggaggauggcagggaaugguagaugguugguauggguaccaccauagcaacgagcaggggaguggguacgcugcagacaaagaauccacucaaaaggcaauagauggagucaccaauaaggucaacucgaucauugacaaaaugaacacucaguuugaggcuguuggaagggaauuuaauaacuuagaaaggagaauagaaaauuuaaacaagaagauggaagacggauuccuagaugucuggacuuauaaugcugaacuucugguucucauggaaaaugagagaacucuagacuuucaugacucaaaugucaagaaucuuuacgacaagguccgacuacagcuuagggauaaugcaaaggagcuugguaacgguuguuucgaguucuaucacagaugugauaaugaauguauggaaaguguaagaaacggaacguaugacuacccgcaguauucagaagaagcaagauuaaaaagagaggaaauaaguggaguaaaauuggagucaauaggaacuuaccaaauacugucaauuuauucaacaguggcgagcucccuagcacuggcaaucaugguggcuggucuauuuuuauggaugugcuccaauggaucguuacaaugcagaauuugcauuuaa

SEQ ID NO: 34999 - RNA, 1704 nt, Artificial Sequence
  derived and/or modified CDS sequence (wt) from hemagglutinin__InfluenzaA__ACT15322
auggagaaaauagugcuucuucuugcaauagucagucuuguuaagagugaucagauuugcauugguuaccaugcaaacaacucgacagagcagguugacacaauaauggaaaagaacgucacuguuacacacgcccaagacauacuggaaaagacacacaacgggaaacucugcaaucuagauggagugaagccucuaauuuuaagagauuguaguguagccggauggcuccucgggaacccaaugugcgacgaauuccucaaugugccggaauggucuuacauaguggagaagaucaauccagccaaugaccucuguuauccagggaauuucaacgacuaugaagaacugaaacaccuauugagcagaauaaaccauuuugagaaaauucagaucauccccaaaaauucuuggucagaucaugaagccucaggagugagcucagcauguccauaccagggaagauccuccuuuuuuagaaaugugguauggcuuaccaaaaaggacaaugcauacccaacaauaaaaagaaguuacaauaauaccaaccaagaagaucuuuugguacuaugggggauucaccauccaaaugaugcggcagagcagacaaggcuuuaucaaaacccaacuaccuauauuuccguugggacaucaacacuaaaccagagauugguaccaaaaauagcuacuagaucuaagguaaacggacaaaguggaaggauggaguucuuuuggacaauuuuaaaaucgaaugaugcaauaaacuuugagaguaauggaaauuucauugcuccagaaaaugcauacaaaauugucaagaaaggggacucaacaauuaugaaaagugaguuggaauaugguaacugcaacaccaagugucagacuccaauaggggcgauaaacuccaguaugccauuccacaacauccacccucucaccaucggggaaugccccaaauaugugaaaucaaacagauuaguccuugcuacugggcucagaaauagcccucaaggagagagaagaagaaaaaagagaggacuauuuggagcuauagcagguuuuauagagggaggauggcagggaaugguagaugguugguauggguaccaccauagcaacgagcaggggaguggguacgcugcagacaaagaauccacucaaaaggcaauagauggagucaccaauaaggucaacucgaucauugacaaaaugaacacucaguuugaggcuguuggaagggaauuuaauaacuuagaaaguagaauagaaaauuuaaacaagaagauggaagacggauuccuagaugucuggacuuauaaugcugaacuucugguucucauggaaaaugaaagaacucuagacuuucaugacucaaaugucaagaaucuuuacgacaagguccgacuacagcuuagggauaaugcaaaggagcuugguaacgguuguuucgaguucuaucacagaugugauaaugaauguauggaaaguguaagaaacggaacguaugacuacccgcaguauucagaagaagcaagauuaaaaagagaggaaauaaguggaguaaaauuggagucaauaggaacuuaccaaauacugucaauuuauucaacaguggcgagcucccuagcacuggcaaucaugguggcuggucuauuuuuauggaugugcuccaauggaucguuacaaugcagaauuugcauuuaa

SEQ ID NO: 35000 - RNA, 1704 nt, Artificial Sequence
  derived and/or modified CDS sequence (wt) from hemagglutinin__InfluenzaA__ACT15326
auggagaaaauagugcuucuucuugcaauagucagucuuguuaaaagugaucagauuugcauugguuaccaugcaaacaacucgacagagcagguugacacaauaauggaaaagaacgucacuguuacacacgcccaagacauacuggaaaagacacacaacggaaaacucugcaaucuagauggagugaagccucuaauuuuaagagauuguaguguagcuggauggcuccucgggaacccaaugugcgacgaauuccucaaugugccggaauggucuuacauaguggagaagaucaauccagccaaugaccucuguuauccagggaauuucaacgacuaugaagaacugaaacaccuauugagcagaauaaaccauuuugagaaaauccagaucauccccaaaaauucuuggucagaucaugaagccucaggagugagcucagcauguccauaccagggaagauccuccuuuuuuagaaaugugguauggcuuaccaaaaaggacaaugcauacccaacaauaaagagaaguuacaauaauaccaaccaagaagaucuuuugguacuaugggggauucaccauccaaaugaugcggcagagcagacaaggcuuuaucaaaacccaacuaccuauauuuccguugggacaucaacacuaaaccagagauugauaccaaaaauagcuacuagaucuaagguaaacgggcaaaguggaaggauggaguucuuuuggacaauuuuaaaaccgaaugaugcaauaaauuuugagaguaauggaaauuucauugcuccagaaaaugcauacaaaauugucaagaaaggggacucaacaauuaugaaaagugaguuggaauaugguaacugcaacaccaagugucagacuccaauaggggcgauaaacuccaguaugccauuccacaacauccacccucucaccaucggggaaugccccaaauaugugaaaucaaacagauuaguccuugcuacugggcuaagaaauagcccucaaggagagagaagaagaaaaaagagaggacuauuuggagcuauagcagguuucauagagggaggauggcagggaaugguagaugguugguauggguaccaccauagcaacgagcaggggagugguuacgcugcagacaaagaauccacucaaaaggcaauagauggagucaccaauaaggucaacucgaucauugacaaaaugaacacucaguuugaggcuguuggaagggaauuuaauaacuuagaaaggagaauagaaaauuuaaacaagaagauggaagacggauuccuagaugucuggacuuauaaugcugaacuucugguucucauggaaaaugagagaacucuagacuuucaugacucaaaugucaagaaccuuuacgacaagguccgguuacagcuuagggauaaugcaaaggagcuugguaacgguuguuucgaguucuaucacagaugugauaaugaauguauggaaaguguaagaaacggaacguaugacuacccgcaguauucagaagaagcaagauuaaaaagagaggaaauaaguggaguaaaauuggagucaauaggaacuuaccaaauacugucaauuuauucaacaguggcgagcucccuagcacuggcaaucaugguggcuggucuauuuuuauggaugugcuccaauggaucguuacaaugcagaauuugcauuuaa

SEQ ID NO: 35001 - RNA, 1704 nt, Artificial Sequence
  derived and/or modified CDS sequence (wt) from hemagglutinin__InfluenzaA__ACT15328
auggagaaaauagugcuucuucuugcaauagucagucuuguuaagagugaucagauuugcauugguuaccaugcaaacaacucgacagagcagguugacacaauaauggaaaagaacgucacuguuacacacgcccaagacauacuggaaaagacacacaacgggaaacucugcaaucuagauggagugaagccucuaauuuuaagagauuguaguguagccggauggcuccucgggaacccaaugugcgacgaauuccucaaugugccggaauggucuuacauaguggagaagaucaauccagccaaugaccucuguuauccagggaauuucaacgacuaugaagaacugaaacaccuauugagcagaauaaaccauuuugagaaaauucagaucauccccaaaaauucuuggucagaucaugaagccucaggagugagcucagcauguccauaccagggaagguccuccuuuuuuagaaaugugguauggcuuaccaaaaaggacaaugcauacccaacaauaaagagaaguuacaauaauacaaaccaagaagaucuuuugguacuaugggggauucaccauccaaaugaugcggcagagcagacaaggcuuuaucaaaacccaacuaccuauauuuccguugggacaucaacacuaaaccagagauugguaccaaaaauagcuacuagaucuaagguaaacggacaaaauggaaggauggaguucuuuuggacaauuuuaaaaucgaaugaugcaauaaacuuugagaguaauggaaauuucauugcuccagaaaaugcauacaaaauugucaagaaaggggacucaacaauuaugaaaagugaguuggaauaugguaauugcaacaccaagugucagacuccaauaggggcgauaaacuccaguaugccauuccacaacauccacccccucaccaucggggaaugccccaaauaugugaaaucaaacagauuaguccuugcuacugggcucagaaauagcccucaaggagagagaagaagaaaaaagagaggacuauuuggagcuauagcagguuuuauagagggaggauggcagggaaugguagaugguugguauggguaccaccauagcaacgagcaggggaguggguacgcugcagacaaagaauccacucaaaaggcaauagauggagucaccaauaaggucaacucgaucauugacaaaaugaacacucaguuugaggcuguuggaagggaauuuaauaacuuagaaaggagaauagaaaauuuaaacaagaagauggaagacggauuccuagaugucuggacuuauaaugcugaacuucugguucucauggaaaaugagagaacucuagacuuucaugacucaaaugucaagaaucuuuacgacaagguccgacuacagcuuagggauaaugcaaaggagcuugguaacgguuguuucgaguucuaucacagaugugauaaugaauguauggaaaguguaagaaacggaacguaugacuacccgcauuauucagaagaagcaagauuaaaaagagaggaaauaaguggaguaaaauuggagucaauaggaacuuaccaaauacugucaauuuauucaacaguggcgagcucccuagcacuggcaaucaugguggcuggucuauuuuuauggaugugcuccaauggaucguuacaaugcagaauuugcauuuaa

SEQ ID NO: 35002 - RNA, 1704 nt, Artificial Sequence
  derived and/or modified CDS sequence (wt) from hemagglutinin__InfluenzaA__ACT15330
auggagaaaauagugcuucuucuugcaauagucagucuuguuaagagugaucagauuugcauugguuaccaugcaaacaacucgacagagcagguugacacaauaauggaaaagaacgucacuguuacacacgcccaagacauacuggaaaagacacacaacgggaaacucugcaauuuagauggagugaagccucuaauuuuaagagauuguaguguagccggauggcuccucgggaacccaaugugcgacgaauuccucaaugugccggaauggucuuacauaguggagaagaucaauccagccaaugaccucuguuauccagggaauuucaacgacuaugaagaacugaaacaccuauugagcagaauaaaccauuuugagaaaauucagaucauccccaaaaauucuuggucagaucaugaagccucaggagugagcucagcauguccauaccagggaagguccuccuuuuuuagaaaugugguauggcuuaccaaaaaggacaaugcauacccaacaauaaagagaaguuacaauaauacaaaccaagaagaucuuuugguacuaugggggauucaccauccaaaugaugcggcagagcagacaaggcuuuaucaaaacccaacuaccuauauuuccguugggacaucaacacuaaaccagagauugguaccaaaaauagcuacuagaucuaagguaaacggacaaaguggaaggauggaguucuuuuggacaauuuuaaaaucgaaugaugcaauaaacuuugagaguaauggaaauuucauugcuccagaaaaugcauacaaaauugucaagaaaggggacucaacaauuaugaaaagugaguuggaauaugguaauugcaacaccaagugucagacuccaauaggggcgauaaacuccaguaugccauuccacaacauccacccccucaccaucggggaaugccccaaauaugugaaaucaaacagauuaguccuugcuacugggcucagaaauagcccucaaggagagagaagaagaaaaaagagaggacuauuuggagcuauagcagguuuuauagagggaggauggcagggaaugguagaugguugguauggguaccaccauagcaacgagcaggggaguggguacgcugcagacaaagaauccacucaaaaggcaauagauggagucaccaauaaggucaacucgaucauugacaaaaugaacacucaguuugaggcuguuggaagggaauuuaauaacuuagaaaggagaauagaaaauuuaaacaagaagauggaagacggauuccuagaugucuggacuuauaaugcugaacuucugguucucauggaaaaugagagaacucuagacuuucaugacucaaaugucaagaaucuuuacgacaagguccgacuacagcuuagggauaaugcaaaggagcuugguaacgguuguuucgaguucuaucacagaugugauaaugaauguauggaaaguguaagaaacggaacguaugacuacccgcauuauucagaagaagcaagauuaaaaagagaggaaauaaguggaguaaaauuggagucaauaggaacuuaccaaauacugucaauuuauucaacaguggcgagcucccuagcacuggcaaucaugguggcuggucuauuuuuauggaugugcuccaauggaucguuacaaugcagaauuugcauuuaa

SEQ ID NO: 35003 - RNA, 1707 nt, Artificial Sequence
  derived and/or modified CDS sequence (wt) from hemagglutinin__InfluenzaA__ACT15332
auggagaaaauagugcuucuucuugcaauagucagucuuguuaaaagugaucaaauuugcauugguuaccaugcaaacaacucgacagaacagguugacacaauaauggaaaagaacgucacuguuacacacgcccaagacauacuggaaaagacacacaacgggaagcuaugcgaucuagauggagugaagccucuaauuuuaagagauuguaguguagcuggauggcuccucgggaacccaaugugugacgaauuccucaaugugccggaauggucuuacauaguggagaagaucaauccagccaaugaccucuguuacccaggggauuucaacgacuaugaagaacugaaacaccuauugagcagaauaaaccauuuugagaaaauucagaucauccccaaaaguucuuggucagaucaugaagcaucgucaggagugagcucagcauguccauaccagggaagauccuccuuuuuuagaaaugugguauggcuuaucaaaaaggacaaugcauacccaacaauaaagagaaguuacaauaauaccaaccaagaagaucuuuugguacugugggggauucaccauccgaaugaugcggcagagcagacaaggcucuaucauaacccaacuaccuauauuuccguugggacaucaacacuaaaccagagauugguaccaaaaauagcuacuagaucuaagauaaaugggcaaaguggaaggauggaguucuuuuggacaauuuuaaaaccgaaugaugcaauaaacuuugagaguaauggaaauuucauugcuccagaaaaugcauacaaaauugucaagaaaggggacucaacaauuaugaaaagugaguuggaauaugguaacugcaacaccaagugucaaacuccaauaggggcgauaaacuccaguaugccauuccacaacauccacccucucaccaucggggaaugccccaaauaugugaaaucaagcagauuaguccuugcuacugggcucagaaauaguccucaaggaaagaguagaagaaaaaagagaggacuauuuggagcuauagcaggguuuauagagggaggauggcagggaaugguagaugguugguauggguaccaccauagcaacgagcaggggaguggguacgcugcagacaaagaauccacucaaagggcaauagauggagucaccaauaaggucaacucgaucauugacaaaaugaacacccaguuugaggcuguuggaagggaauuuaauaacuuagaaaggagaauagaaaauuuaaacaagaagauggaagacggauuccuagaugucuggacuuauaaugcugaacuucugguucucauggaaaaugagagaacucuagacuuucaugacucaaauguuaagaaucuuuacgacaagguccgacuacagcuuagggauaaugcaaaggagcuuggcaacgguuguuucgaguucuaucacagaugugauaaugaauguauggaaaguguaagaaacggaacguaugacuacccgcaguauucagaagaagcaagauuaaaaagagaggaaauaaguggaguaaaauuggaaucaauaggaauuuaccaaauacugucaauuuauucaacaguggcgagcucccuagcacuggcaaucaugguggcuggucuauuuuuauggaugugcuccaauggaucguuacaaugcagaauuugcauuuaa

SEQ ID NO: 35004 - RNA, 1704 nt, Artificial Sequence
  derived and/or modified CDS sequence (wt) from hemagglutinin__InfluenzaA__ACT15336
auggagaaaauagugcuucuucuugcaauagucagucuuguuaagagugaucagauuugcauugguuaccaugcaaacaacucgacagagcagguugacacaauaauggaaaagaacgucacuguuacacacgcccaagacauacuggaaaagacacacaacgggaaacucugcaaucuagauggagugaagccucuaauuuuaagagauuguaguguagccggauggcuccucgggaacccaaugugcgacgaauuccucaaugugccggaauggucuuacauaguggagaagaucaauccagccaaugaccucuguuauccagggaauuucaacgacuaugaagaacugaaacaccuauugagcagaauaaaccauuuugagaaaauucagaucauccccaaaaauucuuggucagaucaugaagccucaggagugagcucagcauguccauaccagggaagauccuccuuuuuuagaaaugugguauggcuuaccaaaaaggacaaugcauacccaacaauaaagagaaguuacaauaauaccaaccaagaagaucuuuugguacuaugggggauucaccauccaaaugaugcggcagagcagacaaggcuuuaucaaaacccaacuaccuauauuuccguugggacaucaacacuaaaccagagauugguaccaaaaauagcuacuagaucuaagguaaacggacaaaguggaaggauggaguucuuuuggacaauuuuaaaaucgaaugaugcaauaaacuuugagaguaauggaaauuucauugcuccagaaaaugcauacaaaauugucaagaaaggggacucaacaauuaugaaaagugaguuggaauaugguaacugcaacaccaagugucagacuccaauaggggcgauaaacuccaguaugccauuccacaacauccacccucucaccaucggggaaugccccaaauaugugaaaucaaacagauuaguccuugcuacugggcucagaaauagcccucaaggagagagaagaagaaaaaagagaggacuauuuggagcuauagcagguuuuauagagggaggauggcagggaaugguagaugguugguauggguaccaccauagcaacgagcaggggaguggguacgcugcagacaaagaauccacucaaaaggcaauagauggagucaccaauaaggucaacucgaucauugacaaaaugaacacucaguuugaggcuguuggaagggaauuuaauaacuuagaaaggagaauagaaaauuuaaacaagaagauggaagacggauuccuagaugucuggacuuauaaugcugaacuucugguucucauggaaaaugagagaacucuagacuuucaugacucaaaugucaagaaucuuuacgacaagguccgacuacagcuuagggauaaugcaaaggagcuugguaacgguuguuucgaguucuaucacagaugugauaaugaauguauggaaaguguaagaaacggaacguaugacuacccgcaguauucagaagaagcaagauuaaaaagagaggaaauaaguggaguaaaauuggagucaauaggaacuuaccaaauacugucaauuuauucaacaguggcgagcucccuagcacuggcaaucaugguggcuggucuauuuuuauggaugugcuccaauggaucguuacaaugcagaauuugcauuuaa

SEQ ID NO: 35005 - RNA, 1704 nt, Artificial Sequence
  derived and/or modified CDS sequence (wt) from hemagglutinin__InfluenzaA__ACT15338
auggagaaaauagugcuucuucuugcaauagucagucuuguuaaaagugaucagauuugcauugguuaccaugcaaacaacucgacagagcagguugacacaauaauggaaaagaacgucacuguuacacacgcccaagacauacuggaaaagacacacaacgggaaacucugcaaucuagauggagugaagccucuaauuuuaagagauuguaguguagcuggauggcuccucgggaacccaaugugugacgaauuccucaaugugccggaauggucuuacauaguggagaagaucaauccagccaaugaccucuguuauccagggaauuucaacgacuaugaagaacugaaacaccuauugagcagaauaaaccauuuugagaaaauucagaucauccccaaaaauucuuggucagaucaugaagccucaggagugagcucagcauguccauaccagggaagauccuccuuuuuuagaaaugugguauggcuuacaaaaaagaacaaugcauacccaacaauaaagagaaguuacaauaauaccaaccaagaagaucuuuugguacuaugggggauucaccauccaaaugaugcgacagagcagacaaggcuuuaucaaaacccaacuaccuauauuuccguugggacaucaacacuaaaccagagauugauaccaaaaauagcuacuagaucuaagguaaacgggcaaaguggaaggauggaguucuuuuggacaauuuuaaaaucgaaugaugcaauaaacuuugagaguaauggaaauuucauugcuccagaaaaugcauacaaaauugucaagaaaggggacucaacaauuaugaaaagugaguuggaauaugguaacugcaacaccaagugucagacuccaauaggggcgauaaacuccaguaugccauuccacaacauccacccccucaccaucggggaaugccccaaauaugugaaaucaaacagauuaguccuugcuaccgggcuaagaaauagcccucaagaagggagaagaagaaaaaagagaggacuauuuggagcuauagcagguuucauagagggaggauggcagggaaugguagaugguugguauggguaccaccauagcaacgagcaggggagugguuacgcugcagacaaagaauccacucaaaaggcaauagauggagucaccaauaaggucaacucgaucauugacaaaaugaacacucaguuugaggcuguuggaagggaauuuaauaacuuagaaaggagaauagaaaauuuaaacaagaagauggaagacggauuccuagaugucuggacuuauaaugcugaacuucugguucucauggaaaaugagagaacucuagacuuucaugacucaaaugucaagaaccuuuacgacaagguccgguuacagcuuagggauaaugcaaaggagcuugguaacgguuguuucgaguucuaucacagaugugauaaugaauguauggaaaguguaagaaacggaacguaugacuacccgcaguauucagaagaagcaagauuaaaaagagaggaaauaaguggaguaaaauuggagucaauaggaacuuaccaaauacugucaauuuauucaacaguggcgagcucccuagcacuggcaaucaugguggcuggucuauuuuuauggaugugcuccaauggaucguuacaaugcagaauuugcauuuaa

SEQ ID NO: 35006 - RNA, 1704 nt, Artificial Sequence
  derived and/or modified CDS sequence (wt) from hemagglutinin__InfluenzaA__ACT15340
auggagaaaauagugcuucuucuugcaauagucagucuuguuaaaagugaucaaauuugcauugguuaccaugcaaacaacucgacagagcagguugacacaauaauggaaaagaacgucacuguuacacacgcccaagacauacuggaaaagacacacaacgggaaacucugcaaucuagauggagugaagccucuaauuuuaagagauuguaguguagccggauggcuccucgggaacccaaugugcgacgaauuccucaaugugccggaauggucuuacauaguggagaagaucaauccagccaaugaccucuguuauccagggaauuucaacgacuaugaagaacugaaacaccuauugagcagaauaaaccauuuugagaaaauucagaucauccccaaaaauucuuggucagaucaugaagccucaggagugagcucagcauguccauaccagggaagauccuccuuuuuuagaaaugugguauggcuuaccaaaaagaacaaugcauacccaacaauaaagagaaguuacaauaauaccaaccaagaagaucuuuugguacuaugggggauucaccauccaaaugaugcggaagagcagacaaggcuuuaucaaaacccaacuaccuauauuuccguugggacaucaacacuaaaccagagauugguaccaaaaauagcuacuagaucuaagguaaacgggcaaaguggaaggauggaguucuuuuggacaauuuuaaaaucgaaugaugcaauaaacuuugagaguaauggaaauuucauugcuccagaaaaugcauacaaaauugucaagaaaggggacucaacaauuaugaaaagugaguuggaauaugguaacugcaacaccaagugucagacuccaauaggggcgauaaacuccaguaugccauuccacaacauccacccucucaccaucggggaaugccccaaauaugugaaaucaaacagauuaguccuugcuacugggcucagaaauagcccucaaggagagagaagaagaaaaaagagaggacuauuuggagcuauagcagguuuuauagagggaggauggcagggaaugguagaugguugguauggguaccaccauagcaacgagcaggggaguggguacgcugcagacaaagaauccacucaaaaggcaauagauggagucaccaauaaggucaacucgaucauugacaaaaugaacacucaguuugaggcuguuggaagggaauuuaaugccuuagaaaggagaauagaaaauuuaaacaagaagauggaagacggauuccuagaugucuggacuuauaaugcugaacuucugguucucauggaaaaugagagaacucuagacuuucaugacucaaaugucaagaaccuuuacgacaagguccgacuacagcuuagggauaaugcaaaggagcuuggcaacgguuguuucgaguucuaucacagaugugauaaugaauguauggaaaguguaagaaacggaacguaugacuacccgcaguauucagaagaagcaagauuaaaaagagaggaaauaaguggaguaaaauuggagucaauaggaacuuaccaaauacugucaauuuauucaacaguggcgagcucccuagcacuggcaaucaugguggcuggucuauuuuuauggaugugcuccaauggaucguuacaaugcagaauuugcauuuaa

SEQ ID NO: 35007 - RNA, 1704 nt, Artificial Sequence
  derived and/or modified CDS sequence (wt) from hemagglutinin__InfluenzaA__ACT15342
auggagaaaauagugcuucuucuugcaauagucagucuuguuaaaagugaucagauuugcauugguuaccaugcaaacaacucgacagagcagguugacacaauaauggaaaagaacgucacuguuacacacgcccaagacauacuggaaaagacacacaacgggaaacucugcaaucuagauggagugaagccucuaauuuuaagagauuguaguguagcuggauggcuccucgggaacccaaugugcgacgaauuccucaaugugccggaauggucuuacauaguggagaagaucaauccagccaaugaccucuguuauccagggaguuucaacgacuaugaagaacugaaacaccuauugagcagaauaaaccauuuugagaaaauucagaucauccccaagaauucuuggucagaucaugaagccucaggagugagcucagcauguccauaccagggaagauccuccuuuuuuagaaaugugguauggcuuaccaaaaaggacaaugcauacccaacaauaaagagaaguuacaauaacaccaaccaagaagaucuuuugguacuaugggggauucaccauccaaaugaugcggcagagcaaacaaggcuuuaucaaaacccaacuaccuauauuuccguuggaacaucaacacuaaaccagagauugguaccaaaaauugcuacuagaucuaagguaaacgggcaaaguggaaggauggaguucuuuuggacaauuuuaaaaccgaaugaugcaauaaacuuugaaaguaauggaaauuucauugcuccagaaaaugcauacaaaauugucaagaaaggggacucaacaauuaugaaaagugaguuggaauaugguaacugcaacaccaagugucagacuccaauaggggcgauaaacuccaguaugccauuccacaacauccacccucucaccaucggggaaugccccaaauaugugaaaucaaacagauuaauccuugcuacugggcucagaaauagcccucaaggagagagaagaagaaaaaagagaggacuauuuggagcuauagcagguuuuauagagggaggauggcagggaaugguagaugguugguauggguaccaccauagcaacgagcaggggaguggguacgcugcagacaaagaauccacucaaaaggcaauagauggagucaccaauaaggucaacucgaucauugacaaaaugaacacucaguuugaggcuguuggaagggaauuuaauaacuuagaaaggagaauagaaaauuuaaacaagaaaauggaagacggauuccuagaugucuggacuuauaaugcugaacuucugguucucauggaaaaugagagaacucuagacuuucaugacucaaaugucaagaaccuuuacgacaagguccgacuacagcuuagggauaaugcaaaggagcuugguaacgguuguuucgaguucuaucacagaugugauaaugaauguauggaaaguguaagaaacggaacguaugacuacccgcaguauucagaagaagcaagauuaaaaagagaggaaauaaguggaguaaaauuggagucaauaggaacuuaccaaauacugucaauuuauucaacaguggcgagcucccuagcacuggcaaucaugguggcuggucuauuuuuauggaugugcuccaauggaucguuacaaugcagaauuugcauuuaa

SEQ ID NO: 35008 - RNA, 1704 nt, Artificial Sequence; identical to SEQ ID NO: 35004
  derived and/or modified CDS sequence (wt) from hemagglutinin__InfluenzaA__ACT15343

SEQ ID NO: 35009 - RNA, 1704 nt, Artificial Sequence
  derived and/or modified CDS sequence (wt) from hemagglutinin__InfluenzaA__ACT15345
auggagaaaauagugcuucuucuugcaauagucagucuuguuaagagugaucagauuugcauugguuaccaugcaaacaacucgacagagcagguugacacaauaauggaaaagaacgucacuguuacacacgcccaagacauacuggaaaagacacacaacgggaaacucugcaaucuagauggagugaagccucuaauuuuaagagauuguaguguagccggauggcuccucgggaacccaaugugcgacgaauuccucaaugugccggaauggucuuacauaguggagaagaucaauccagccaaugaccucuguuauccagggaauuucaacgacuaugaagaacugaaacaccuauugagcagaauaaaccauuuugagaaaauucagaucauccccaaaaauucuuggucagaucaugaagccucaggagugagcucaucauguccauaccagggaagauccuccuuuuuuagaaaugugguauggcuuaccaaaaaggacaaugcauacccaacaauaaagagaaguuacaauaauaccaaccaagaagaucuuuugguacuaugggggauucaccauccaaaugaugcggcagagcagacaaggcuuuaucaaaacccaacuaccuauauuuccguugggacaucaacacuaaaccaaagauugguaccaaaaauagcuacuagaucuaagguaaacggacaaaguggaaggauggaguucuuuuggacaauuuuaaaaucgaaugaugcaauaaacuuugggaguaauggaaauuucauugcuccagaaaaugcauacaaaauugucaagaaaggggacucaacaauuaugaaaagugaguuggaauaugguaacugcaacaccaagugucagacuccaauaggggcgauaaacuccaguaugccauuccacaacauccacccucucaccaucggggaaugccccaaauaugugaaaucaaacagauuaguccuugcuacugggcucagaaauagcccucaaggagagagaagaagaaaaaagagaggacuauuuggagcuauagcagguuuuauagagggaggauggcagggaaugguagaugguugguauggguaccaccauagcaacgagcaggggaguggguacgcugcagacaaagaauccacucaaaaggcaauagauggagucaccaauaaggucaacucgaucauugacaaaaugaacacucaguuugaggcuguuggaagggaauuuaauaacuuagaaaggagaauagaaaauuuaaacaagaagauggaagacggauuccuagaugucuggacuuauaaugcugaacuucugguucucauggaaaaugagagaacucuagacuuucaugacucaaaugucaagaaucuuuacgacaagguccgacuacagcuuagggauaaugcaaaggagcuugguaacgguuguuucgaguucuaucacagaugugauaaugaauguauggaaaguguaagaaacggaacguaugacuacccgcaguauucagaagaagcaagauuaaaaagagaggaaauaaguggaguaaaauuggagucaauaggaacuuaccaaauacugucaauuuauucaacaguggcgagcucccuagcacuggcaaucaugguggcuggucuauuuuuauggaugugcuccaauggaucguuacaaugcagaauuugcauuuaa

SEQ ID NO: 35010 - RNA, 1707 nt, Artificial Sequence
  derived and/or modified CDS sequence (wt) from hemagglutinin__InfluenzaA__ACT15347
auggagaaaauagugcuucuucuugcaauagucagucuuguuaaaagugaucaaauuugcauugguuaccaugcaaacaacucgacagaacagguugacacaauaauggaaaagaacgucacuguuacacacgcccaagacauacuggaaaagacacacaacgggaagcuaugugaucuagauggagugaagccucuaauuuuaagagauuguaguguagcuggauggcuccucgggaacccaaugugugacgaauuccucaaugugccggaauggucuuacauaguggagaagaucaauccagccaaugaccucuguuacccaggggauuucaacgacuaugaagaacugaaacaccuauugagcagaauaaaccauuuugagaaaauucagaucauccccaaaaguucuuggucagaucaugaagcaucgucaggagugagcucagcauguccauaccagggaagauccuccuuuuuuagaaaugugguauggcuuaucaaaaaggacaaugcauacccaacaauaaagagaaguuacaauaauaccaaccaagaagaucuuuugguacugugggggauucaccauccgaaugaugcggcagagcagacaaggcucuaucauaacccaacuaccuauauuuccguugggacaucaacacuaaaccagagauugguaccaaaaauagcuacuagaucuaagguaaaugggcaaaguggaaggauggaguucuuuuggacaauuuuaaaaccgaaugaugcaauaaacuuugagaguaauggaaauuucauugcuccagaaaaugcauacaaaauugucaagaaaggggacucaacaauuaugaaaagugaguuggaauaugguaacugcaacaccaagugucaaacuccaauaggggcgauaaacuccaguaugccauuccacaacauccacccucucaccaucggggaaugccccaaauaugugaaaucaagcagauuaguccuugcuacugggcucagaaauaguccucaaggaaagaauagaagaaaaaagagaggacuguuuggagcuauagcagguuuuauagagggaggauggcagggaaugguagaugguugguauggguaccaccauagcaacgagcaggggaguggguacgcugcagacaaagaauccacucaaagggcaauagauggggucaccaauaaggucaacucgaucauugacaaaaugaacacucaguuugaggcuguuggaagggaauuuaauaacuuagaaaggagaauagaaaauuuaaacaagaagauggaagacggauuccuagaugucuggacuuauaaugcugaacuucugguucucauggaaaaugagagaacucuagacuuucaugacucaaauguuaagaaucuuuacgacaagguccgacuacagcuuagggauaaugcaaaggagcuuggcaacgguuguuucgaguucuaucacagaugugauaaugaauguauggaaaguguaaggaacggaacguaugacuacccgcaguauucagaagaagcaagauuaaaaagagaggaaauaaguggaguaaaauuggaaucaauaggaauuuaccaaauacugucaauuuauucaacaguggcgagcucccuagcacuggcaaucaugguggcuggucuauuuuuauggaugugcuccaauggaucguuacaaugcagaauuugcauuuaa

SEQ ID NO: 35011 - RNA, 1704 nt, Artificial Sequence
  derived and/or modified CDS sequence (wt) from hemagglutinin__InfluenzaA__ACT15349
auggagaaaauagugcuucuucuugcaauagucagucuuguuaaaagugaucagauuugcauugguuaccaugcaaacaacucgacagagcagguugacacaauaauggaaaagaacgucacuguuacacacgcccaagacauacuggaaaagacacacaacgggaaacuaugcaaucuagauggagugaagccucuaauuuuaagagauuguaguguagcuggauggcuccucgggaacccaaugugugacgaauuccucaaugugccggaauggucuuacauaguggagaagaucaauccagccaaugaccucuguuauccagggaauuucaacgacuaugaagaacugaaacaccuauugagcagaauaaaccauuuugagaaaauucagaucauccccaaaaauucuuggucagaucaugaagccucaggagugagcucagcauguccauaccagggaagauccuccuuuuuuagaaaugugguauggcuuacaaaaaaggacaaugcauacccaacaauaaagagaaguuacaauaauaccaaccaagaagaucuuuugguacuaugggggauucaccauccaaaugaugcgacagagcagacaaggcuuuaucaaaacccaacuaccuauauuuccguugggacaucaacacuaaaccagagauugauaccaaaaauagcuacuagaucuaagguaaacgggcaaaguggaaggauggaguucuuuuggacaauuuuaaaaucgaaugaugcaauaaacuuugagaguaauggaaauuucauugcuccagaaaaugcauacaaaauugucaagaaaggggacucaacaauuaugaaaagugaguuggaauaugguaacugcaacaccaagugucagacuccaauaggggcgauaaacuccaguaugccauuccacaacauccacccccucaccaucggggaaugccccaaauaugugaaaucaaacagauuaguccuugcuacugggcuaagaaauagcccucaagaagagagaagaagaaaaaagagaggacuauuuggagcuauagcagguuucauagagggaggauggcagggaaugguagaugguugguauggguaccaccauagcaacgagcaggggagugguuacgcugcagacaaagaauccacucaaaaggcaauagauggagucaccaauaaggucaacucgaucauugacaaaaugaacacucaguuugaggcuguuggaagggaauuuaauaacuuagaaaggagaauagaaaauuuaaacaagaagauggaagacggauuccuagaugucuggacuuauaaugcugaacuucugguucucauggaaaaugagagaacucuagacuuucaugacucaaaugucaagaaccuuuacgacaagguccgguuacagcuuagggauaaugcaaaggagcuugguaacgguuguuucgaguucuaucacagaugugauaaugaauguauggaaaguguaagaaacggaacguaugacuacccgcaguauucagaagaagcaagauuaaaaagagaggaaauaaguggaguaaaauuggagucaauaggaacuuaccaaauacugucaauuuauucaacaguggcgagcucccuagcacuggcaaucaugguggcuggucuauuuuuauggaugugcuccaauggaucguuacaaugcagaauuugcauuuaa

SEQ ID NO: 35012 - RNA, 1707 nt, Artificial Sequence
  derived and/or modified CDS sequence (wt) from hemagglutinin__InfluenzaA__ACT15351
auggagaaaauagugcuucuucuugcaauagucagucuuguuaaaagugaucaaauuugcauugguuaccaugcaaacaacucgacagaacagguugacacaauaauggaaaagaacgucacuguuacacacgcccaagacauacuggaaaagacacacaacgggaagcuaugcgaucuagauggagugaagccucuaauuuuaagagauuguaguguagcuggauggcuccucgggaauccaaugugugacgaauuccucaaugugccggaauggucuuacauaguggagaagaucaauccagccaaugaccucuguuacccaggggauuucaacgacuaugaagaacugaaacaccuauugagcagaauaaaccauuuugagaaaauucagaucauccccaaaaguucuuggucagaucaugaagcaucgucaggagugagcucagcauguccauaccagggaggauccuccuuuuuuagaaaugugguauggcuuaucaaaaaggacaaugcauacccaacaauaaagagaaguuacaauaauaccaaccaagaagaucuuuugguacugugggggauucaccauccgaaugaugcggcggagcagacaaggcucuaucauaacccaacuaccuauauuuccguugggacaucaacacuaaaccagagauugguaccaaaaauagcuacuagaucuaagguaaaugggcaaaguggaaggauggaguucuuuuggacaauuuuaaaaccgaaugaugcaauaaacuuugagaguaauggaaauuucauugcuccagaaaaugcauauaaaauugucaagaaaggggacucaacaauuaugaaaagugaguuggaauaugguaacugcaacaccaagugucaaacuccaauaggggcgauaaacuccaguaugccauuccacaacauccacccucucaccaucggggaaugccccaaauaugugaaaucaagcagauuaguccuugcuacugggcucagaaauaguccucaaggaaagaguagaagaaaaaagagaggacuauuuggagcuauagcaggguuuauagagggaggauggcagggaaugguagaugguugguauggguaccaccauagcaacgagcaggggaguggguacgcugcagacaaagaauccacucaaagggcaauagauggagucaccaauaaggucaacucgaucauugacaaaaugaacacucaguuugaggcuguuggaagggaauuuaauaaauuagaaaggagaauagaaaauuuaaacaagaagauggaagacggauuucuagaugucuggacuuauaaugcugaacuucugguucucauggaaaaugagagaacucuagacuuucaugacucaaauguuaagaaucuuuacgacaagguccgacuacagcuuagggauaaugcaaaggagcuuggcaacgguuguuucgaguucuaucacagaugugacaaugaauguauggaaaguguaagaaacggaacguaugacuacccgcaguauucagaagaagcaagauuaaaaagagaggaaauaaguggaguaaaauuggaaucaauaggaauuuaccaaauacugucaauuuauucaacaguggcgagcucccuagcacuggcaaucaugguggcuggucuauuuuuauggaugugcuccaauggaucguuacaaugcagaauuugcauuuaa

SEQ ID NO: 35013 - RNA, 1704 nt, Artificial Sequence
  derived and/or modified CDS sequence (wt) from hemagglutinin__InfluenzaA__ACT15353
auggagaaaauagugcuucuucuugcaauagucagucuuguuaaaagugaucagauuugcauugguuaccaugcaaacaacucgacagagcagguugacacaauaauggaaaagaacgucacuguuacacacgcccaagacauacuggaaaagacacacaacgggaaacucugcaaucuagauggagugaagccucuaauuuuaagagauuguaguguagccggauggcuccucgggaacccaaugugcgacgaauuccucaaugugccggaauggucuuacauaguggagaagaucaauccagccaaugaccucuguuauccagggaauuucaacgacuaugaagaacugaaacaccuauugagcagaauaaaccauuuugagaaaauucagaucauccccaaaaauucuuggucagaucaugaagccucaggagugagcucagcauguccauaccagggaagauccuccuuuuuuagaaaugugguauggcuuaccaaaaagaacagugcauacccaacaauaaagagaaguuacaauaauaccaaccaagaagaucuuuugguacuaugggggauucaccauccaaaugaugcggcagagcagacaaggcuuuaucaaaacccaacuaccuauauuuccguugggacaucaacacuaaaccagagauugguaccaaaaauagcuacuaggucuaagguaaacgggcaaaguggaaggauggaguucuuuuggacaauuuuaaaaucgaaugaugcaauaaacuuugagaguaauggaaauuucauugcuccagaaaaugcauacaaaauugucaagaaaggggacucaacaauuaugaaaagugaguuggaauauaguaacugcaacaccaagugucagacuccaauaggggcgauaaacuccaguaugccauuccacaacauccacccucucaccaucggggaaugccccaaauaugugaaaucaaacagauuaguccuugcuacugggcucagaaauagcccucaaggagagagaagaagaaaaaagagaggacuauuuggagcuauagcagguuuuauagagggaggauggcagggaaugguagaugguugguauggguaccaccauagcaacgagcaggggaguggguacgcugcagacaaagaauccacucaaaaggcaauagauggggucaccaauaaggucaacucgaucauugacaaaaugaacacucaguuugaggcuguuggaagggaauuuaauaacuuagaaaggagaauagaaaauuuaaacaagaagauggaagacggauuccuagaugucuggacuuauaaugcugaacuucugguucucauggaaaaugagagaacucuagacuuucaugacucaaaugucaagaaccuuuacgacaagguccgacuacagcuuagggauaaugcaaaggagcuugguaacgguuguuucgaguucuaucacagaugugauaaugaauguauggaaaguguaagaaacggaacguaugacuacccgcaguauucagaagaagcaagauuaaaaagagaggaaauaaguggaguaaaauuggagucaauaggaacuuaccaaauacugucaauuuauucaacaguggcgagcucccuagcacuggcaaucaugguggcuggucuauuuuuauggaugugcuccaauggaucguuacaaugcagaauuugcauuuaa

SEQ ID NO: 35014 - RNA, 1707 nt, Artificial Sequence
  derived and/or modified CDS sequence (wt) from hemagglutinin__InfluenzaA__ACT15355
auggagaaaauagugcuucuucuugcaauagucagucuuguuaaaagugaucaaauuugcauugguuaccaugcaaacaacucgacagaacagguugacacaauaauggaaaagaacgucacuguuacacacgcccaagacauacuggaaaagacacacaacgggaagcuaugcgaucuagauggagugaagccucuaauuuuaagagauuguaguguagcuggauggcuccucgggaacccaaugugugacgaauuccucaaugugccggaauggucuuacauaguggagaagaucaauccagccaaugaccucuguuacccaggggauuucaacgacuaugaagaacugaaacaccuauugagcagaauaaaccauuuugagaaaauucagaucauccccaaaaguucuuggucagaucaugaagcaucgucaggagugagcucagcauguccauaccagggaagauccuccuuuuuuagaaaugugguauggcuuaucaaaaaggacaaugcauacccaacaauaaagagaaguuacaauaauaccaaccaagaagaucuuuugguacugugggggauucaccauccgaaugaugcggcagagcagacaaggcucuaucauaacccaacuaccuauauuuccguugggacaucaacacuaaaccagagauugguaccaaaaauagcuacuagaucuaagguaaaugggcaaaguggaaggauggaguucuuuuggacaauuuuaaaaccgaaugaugcaauaaacuuugagaguaauggaaauuucauugcuccagaaaaugcauacaaaauuguuaagaaaggggacucaacaauuaugaaaagugaguuggaauaugguaacugcaacaccaagugucaaacuccaauaggggcgauaaacuccaguaugccauuccacaacauccacccucucaccaucggggaaugccccaaauaugugaaaucaagcagacuaguccuugcuacugggcucagaaauaguccucaaggaaagaguagaagaaaaaagagaggacuauuuggagcuauagcaggguuuauagagggaggauggcagggaaugguagaugguugguauggguaccaccauagcaacgagcaggggaguggguacgcugcagacaaagaauccacucaaagggcaauagauggagucaccaauaaggucaacucgaucauugacaaaaugaacacucaguuugaggcuguuggaagggaauuuaauaacuuagaaaggagaauagaaaauuuaaacaagaagauggaagacggauuccuagaugucuggacuuauaaugcugaacuucugguucucauggaaaaugagagaacucuagacuuucaugacucaaauguuaagaaucuuuacgacaagguccgacuacagcuuagggauaaugcaaaggagcuuggcaacgguuguuucgaguucuaucacagaugugauaaugaauguauggaaaguguaagaaauggaacguaugacuacccgcaguauucagaagaagcaagauuaaaaagagaggaaauaaguggaguaaaauuggaaucaauaggaauuuaccaaauacugucaauuuauucaacaguggcgagcucccuagcacuggcaaucaugguggcuggucuauuuuuauggaugugcuccaauggaucguuacaaugcagaauuugcauuuaa

SEQ ID NO: 35015 - RNA, 1704 nt, Artificial Sequence
  derived and/or modified CDS sequence (wt) from hemagglutinin__InfluenzaA__ACT15357
auggagaaaauagugcuucuucuugcaauagucagucuuguuaaaagugaucagauuugcauugguuaccaugcaaacaacucgacagagcagguugacacaauaauggaaagaaacgucacuguuacacacgcccaggacauacuggaaaagacacacaacgggaaacucugcaaucuagauggagugaagccucuaauuuuaagagauuguaguguagcuggauggcuccucgggaacccaaugugugacgaauuccucaaugugccggaauggucuuacauaguggagaagaucaauccagccaaugaccucuguuauccagggaauuucaacgacuaugaagaacugaaacaccuauugagcagaauaaaccauuuugagaaaauucagaucauccccaaaaauucuuggucagaucaugaagccucaggagugagcucagcauguccauaccagggaagauccuccuuuuuuagaaaugugguauggcuuacccaaaaggacaaugcauacccaacaauaaagagaaguuacaauaauaccaaccaagaagaucuuuugguacuaugggggauucaccauccaaaugaugcggcagagcagacaaggcuuuaucaaaacccaacuaccuauauuuccguugggacaucaacacuaaaccagagauugauaccaaaaauagcuacuagauccaagguaaacgggcaaaguggaaggauggaguucuuuuggacaauuuuaaaaucgaaugaugcaauaaacuuugagaguaauggaaauuucauugcuccagaaaaugcauacaaaauugucaagaaaggggacucaacaauuaugaaaagugaguuggaauaugguaacugcaacaccaagugucagacuccaauaggggcgauaaacuccaguaugccauuccacaacauccacccucucaccaucggggaaugucccaaauaugugaaaucaaacagauuaguccuugcuacugggcuaagaaauagcccucaaggagagagaagaagaaaaaagagaggacuauuuggagcuauagcagguuucauagagggaggauggcagggaaugguagaugguugguauggguaccaccauagcaacgagcaggggagugguuacgcugcagacaaagaauccacucaaaaggcaauagauggagucaccaauaaggucaacucgaucauugacaaaaugaacacucaguuugaggcuguuggaagggaauuuaauaacuuagaaaggaggauagaaaauuuaaacaagaagauggaagacggauuccuagaugucuggacuuauaaugcugaacuucugguucucauggaaaaugagagaacucuagacuuucaugacucaaaugucaagaaccuuuacgacaagguccgguuacagcuuagggauaacgcaaaggagcuugguaacgguuguuucgaguucuaucacagaugugauaaugaauguauggaaaguguaagaaacggaacguaugacuacccgcaguauucagaagaagcaagauuaaaaagagaggaaauaaguggaguaaaauuggagucaauaggaacuuaccaaauacugucaauuuauucaacaguggcgagcucccuagcacuggcaaucaugguggcuggucuauuuuuauggaugugcuccaauggaucguuacaaugcagaauuugcauuuaa

SEQ ID NO: 35016 - RNA, 1701 nt, Artificial Sequence
  derived and/or modified CDS sequence (wt) from hemagglutinin__InfluenzaA__ACT20200
augaaggcaauacuaguaguucugcuauauacauuugcaaccgcaaaugcagacacauuauguauagguuaucaugcgaacaauucaacagacacuguagacacaguacuagaaaagaauguaacaguaacacacucuguuaaccuucuagaagacaagcauaacgggaaacuaugcaaacuaagagggguagccccauugcauuuggguaaauguaacauugcuggcuggauccugggaaauccagagugugaaucacucuccacagcaagcucaugguccuacauuguggaaacaucuaguucagacaauggaacguguuacccaggagauuucaucgauuaugaggagcuaagagagcaauugagcucagugucaucauuugaaagguuugagauauuccccaagacaaguucauggcccaaucaugacucgaacaaagguguaacggcagcauguccucaugcuggagcaaaaagcuucuacaaaaauuuaauauggcuaguuaaaaaaggaaauucauacccaaagcucagcaaauccuacauuaaugauaaagggaaagaaguccucgugcuauggggcauucaccauccaucuacuagugcugaccaacaaagucucuaucagaaugcagaugcauauguuuuuguggggucaucaagauacagcaagaaguucaagccggaaauagcaauaagacccaaagugagggaucaagaagggagaaugaacuauuacuggacacuaguagagccgggagacaaaauaacauucgaagcaacuggaaaucuagugguaccgagauaugcauucgcaauggaaagaaaugcuggaucugguauuaucauuucagauacaccaguccacgauugcaauacaacuugucagacacccaagggugcuauaaacaccagccucccauuucagaauauacauccgaucacaauuggaaaauguccaaaauauguaaaaagcacaaaauugagacuggccacaggauugaggaaugucccgucuauucaaucuagaggccuauuuggggccauugccgguuucauugaagggggguggacagggaugguagauggaugguacgguuaucaccaucaaaaugagcaggggucaggauaugcagccgaccugaagagcacacagaaugccauugacgagauuacuaacaaaguaaauucuguuauugaaaagaugaauacacaguucacagcaguagguaaagaguucaaccaccuggaaaaaagaauagagaauuuaaauaaaaaaguugaugaugguuuccuggacauuuggacuuacaaugccgaacuguugguucuauuggaaaaugaaagaacuuuggacuaccacgauucaaaugugaagaacuuauaugaaaagguaagaaaccaguuaaaaaacaaugccaaggaaauuggaaacggcugcuuugaauuuuaccacaaaugcgauaacacgugcauggaaagugucaaaaaugggacuuaugacuacccaaaauacucagaggaagcaaaauuaaacagagaagaaauagaugggguaaagcuggaaucaacaaggauuuaccagauuuuggcgaucuauucaacugucgccaguucauugguacugguagucucccugggggcaaucaguuucuggaugugcucuaaugggucucuacaguguagaauauguauuuaa

SEQ ID NO: 35017 - RNA, 1701 nt, Artificial Sequence
  derived and/or modified CDS sequence (wt) from hemagglutinin__InfluenzaA__ACT21466
augaagacuaucauugcuuugagcuacauuuuaugucugguuuucgcucaaaaacuucccggaaaugacaacagcacggcaacgccgugccugggacaccaugcagugccaaacggaacgcuagugaaaacaaucacgaaugaccaaauugaagugacuaaugcuacugagcugguucagaguuccucaacagguaaaauaugcgacaguccucaccgaauccuugauggaaaaaacugcacacugauagaugcucuauugggagacccucauugugacggcuucaaaaauaaggaaugggaccuuuuuguugaacgcagcacagcuuacagcaacuguuacccuuaugaugugccggauuaugccucccuuaggucacuaguugccucauccggcacccuggaguuuaccaaugaaggcuucaauuggacuggagucgcucaggauggaacaagcuaugcuugcaaaaggggaucuguuaaaaguuucuuuaguagauugaauugguugcacaaauuagaauacaaauauccagcacugaacgugacuaugccaaacaaugacaaauuugacaaauuguacauuugggggguucaccacccgaguacggacagugaccaaaccagccuauauguucaagcaucagggagagucacagucucuaccaaaagaagccaacaaacuguaaucccgaauaucgggucuagacccuggguaagggguaucuccagcagaauaagcaucuauuggacaauaguaaaaccgggagacauacuuuugauuaacagcacagggaaucuaauugcuccucgggguuacuucaaaauacgaagugggaaaagcucaauaaugaggucagaugcacccauugacaacugcaauucugaaugcaucacuccaaauggaagcauucccaaugacaaaccuuuucaaaauguaaacaggaucacauauggggccugucccagauauguuaagcaaaacacucuaaaauuggcaacagggaugcggaauguaccagagaaacaaacuagaggcauauucggcgcaaucgcagguuucauagaaaaugguugggagggaaugguagacgguugguacgguuucaggcaucaaaauucugagggcacaggacaagcagcagaucuuaaaagcacucaagcagcaaucaaccaaaucaacgggaaacugaauagguuaaucgagaaaacgaacgagaaauuccaucaaaucgaaaaagaauucucagaaguagaagggagaauucaggaccucgagaaauauguugaagacacuaaaauagaucucuggucuuacaacgcggagcuucuuguugcccuggagaaccaacauacaauugaucuaacugacucagaaaugaacaaacuguuugaaaaaacaagaaagcaacugagggaaaaugcugaggacaugggcaaugguugcuucaaaauauaucacaaaugugacaaugccuguauagggucaaucagaaauggaacuuaugaccaugauguauacagagacgaagcauuaaacaaccgguuccagaucaaagguguugagcugaagucaggauacaaagauuggauccuauggauuuccuuugccauaucaugcuuuuugcuuuguguuguuuugcugggguucaucaugugggccugccaaaaaggcaacauuaggugcaacauuugcauuuga

SEQ ID NO: 35018 - RNA, 1701 nt, Artificial Sequence
  derived and/or modified CDS sequence (wt) from hemagglutinin__InfluenzaA__ACT21467
augaagacuaucauugcuuugagcuacauuuuaugucugguuuucgcucaaaaacuucccggaagugacaacagcacggcaacgcugugccugggacaccaugcagugccaaacggaacgcuagugaaaacaaucacgaaugaccaaauugaagugacuaaugcuacugagcugguucagaguuccucaacagguaaaauaugcgacaguccucaccgaauccuugauggaaaaaacugcacacugauagaugcucuauugggagacccucauugugauggcuucaaaaauaaggaaugggaccuuuuuguugaacgcagcacagcuuacagcaacuguuacccuuaugaugugccggauuaugccucccuuaggucacuaguugccucauccggcacccuggaguuuaccaaugaaggcuucaauuggacuggagucgcucaggauggaacaagcuaugcuugcaaaaggggaucuguuaaaaguuucuuuaguagauugaauugguugcacaaauuagaauacaaauauccagcacugaacgugacuaugccaaacaaugacaaauuugacaaauuguacauuugggggguucaccacccgaguacggacagugaccaaaccagccuauauguucaagcaucagggagagucacagucucuaccaaaagaagccaacaaacuguaaucccgaauaucgggucuagacccuggguaagggguaucuccagcagaauaagcgucuauuggacaauaguaaaaccgagagacauacuuuugauuaacagcacagggaaucuaauugcuccucgggguuacuucaaaauacgaagugggaaaagcucaauaaugaggucagaugcacccauugacaacugcaauucugaaugcaucacuccaaauggaagcauucccaaugacaaaccuuuucaaaauguaaacaggaucacauauggggccugucccagauauguuaagcaaaacacucuaaaauuggcaacagggaugcggaauguaccagagaaacaaacuagaggcauauucggcgcaaucgcagguuucauagaaaaugguugggagggaaugguagacgguugguacgguuucaggcaucaaaauucugagggcacaggacaagcagcagaucuuaaaagcacucaagcagcaaucaaccgaaucaacgggaaacugaauagguuaaucgagaaaacgaacgagaaauuccaucaaaucgaaaaagaauucucagaaguagaagggagaauucaggaccucgagaaauauguugaagacacuaaaauagaucucuggucuuacaacgcggagcuucuuguugcccuggagaaccaacauacaauugaucuaacugacucagaaaugaacaaacuguuugaaaaaacaagaaagcaacugagggaaaaugcugaggacaugggcaaugguugcuucaaaauauaucacaaaugugacaaugccuguauagggucaaucagaaauggaacuuaugaccaugauguauacagagacgaagcauuaaacaaccgguuccagaucaaagguguugagcugaagucaggauacaaagauuggauccuauggauuuccuuugccauaucaugcuuuuugcuuuguguuguuuugcugggguucaucaugugggccugccaaaaaggcaacauuaggugcaacauuugcauuuga

SEQ ID NO: 35019 - RNA, 1701 nt, Artificial Sequence
  derived and/or modified CDS sequence (wt) from hemagglutinin__InfluenzaA__ACT21468
augaagacuaucauugcuuugagcuacauuuuaugucugguuuucgcucaaaaacuucccggaaaugacaacagcacggcaacgcugugccugggacaccaugcagugccaaacggaacgcuagugaaaacaaucacgaaugaccaaauugaagugacuaaugcuacugagcugguucagaguuccucaacagguaaaauaugcgacaguccucaccgaauccuugauggaaaaaacugcacacugauagaugcucuauugggagacccucauugugauggcuucaaaaauaaggaaugggaccuuuuuguugaacgcagcacagcuuacagcaacuguuacccuuaugaugugccggauuaugccucccuuaggucacuaguugccucauccggcacccuggaguuuaccaaugaaggcuucaauuggacuggagucgcucaggauggaacaagcuaugcuugcaaaaggggaucuguuaaaaguuucuuuaguagauugaauugguugcacaaauuagaauacaaauauccagcacugaacgugacuaugccaaacaaugacaaauuugacaaauuguacauuugggggguucaccacccgaguacggacagugaccaaaccagccuauauguucaagcaucagggagagucacagucucuaccaaaagaagccaacaaacuguaaucccgaauaucgggucuagacccuggguaagggguaucuccagcagaauaagcaucuauuggacaauaguaaaaccgggagacauacuuuugauuaacagcacagggaaucuaauugcuccucgggguuacuucaaaauacgaagugggaaaagcucaauaaugaggucagaugcacccauugacaacugcaauucugaaugcaucacuccaaauggaagcauucccaaugacaaaccuuuucaaaauguaaacaggaucacauauggggccugucccagauauguuaagcaaaacacucuaaaauuggcaacagggaugcggaauguaccagagaaacaaacuagaggcauauucggcgcaaucgcagguuucauagaaaaugguugggagggaaugguagacgguugguacgguuucaggcaucaaaauucugagggcacaggacaagcagcagaucuuaaaagcacucaagcagcaaucaaccaaaucaacgggaaacugaauagguuaaucgagaaaacgaacgagaaauuccaucaaaucgaaaaagaauucucagaaguagaagggagaauucaggaccucgagaaauauguugaagacacuaaaauagaucucuggucuuacaacgcggagcuucuuguugcccuggagaaccaacauacaauugaucuaacugacucagaaaugaacaaacuguuugaaaaaacaagaaagcaacugagggaaaauguugaggacaugggcaaugguugcuucaaaauauaucacaaaugugacaaugccuguauagggucaaucagaaauggaacuuaugaccaugauguauacagagacgaagcauuaaacaaccgguuccagaucaaagguguugagcugaagucaggauacaaagauuggauccuauggauuuccuuugccauaucaugcuuuuugcuuuguguuguuuugcugggguucaucaugugggccugccaaaaaggcaacauuaggugcaacauuugcauuuga

SEQ ID NO: 35020 - RNA, 1701 nt, Artificial Sequence
  derived and/or modified CDS sequence (wt) from hemagglutinin__InfluenzaA__ACT21469
augaagacuaucauugcuuugagcuacauuucacgucugguuuucgcucaaaaacuucccggaaaugacaacagcacggcaacgcugugccugggacaccaugcagugccaaacggaacgcuagugaaaacaaucacgaaugaccaaauugaagugacuaaugcuacugagcugguucagaguuccucaacagguagaauaugcgacaguccucaccgaauccuugauggagaaaacugcacacugauagaugcucuauugggagacccucauugugauggcuuccaaaauaaggaaugggaccuuuuuguugaacgcagcaaagccuacagcaacuguuacccuuaugaugugccggauuaugccucccuuaggucacuaguugccucauccggcacucuggaguuuaacaaugaaagcuucaauuggacuggagucgcucaggauggaacaagcuaugcuugcaaaaggagaucuauuaaaaguuucuuuaguagauugaauugguugcaccaauuaaaauacaaauauccagcacugaacgugacuaugccaaacaaugacaaauuugacaaauuguacauuugggggguucaccacccgaguacggacagugaccaaaccagccuauaugcucaagcaucagggagagucacagucucuaccaaaagaagccaacaaacuguaaucccgaauaucggaucuagacccuggguaaggggugucuccagcagaauaagcaucuauuggacaauaguaaaaccgggagacauacuuuugauuaacagcacagggaaucuaauugcuccucgggguuacuucaaaauacgaagugggaaaagcucaauaaugaggucagaugcacccauuggcaaaugcaauucugaaugcaucacuccaaauggaagcauucccaaugacaaaccauuucaaaauguaaacaggaucacauauggggccugucccagauauguuaagcaaaacacucugaaauuggcaacagggaugcggaauguaccagagaaacaaacuagaggcauauucggcgcaaucgcaggcuucauagaaaaugguugggagggaaugguagacgguugguacgguuucaggcaucaaaauucugagggcacaggacaagcagcagaucuuaaaagcacucaagcagcaaucaaccaaaucaacgggaaacugaauagguuaaucgagaaaacgaacgagaaauuccaucaaauugaaaaagaauucucagaaguagaagggagaauucaggaccucgagaaauauguugaggacacuaaaauagaucucuggucguacaacgcggagcuucuuguugcccuggagaaccaacauacaauugaucuaacugacucagaaaugaacaaacuguuugaaagaacaaggaagcaacugagggaaaaugcugaggauaugggcaaugguuguuucaaaauauaccacaaaugugacaaugccugcauagggucaaucagaaauggaacuuaugaccaugauguauacagagacgaagcauuaaacaaccgguuccagaucaaagguguugagcugaagucaggauacaaagauuggauccuauggauuuccuuugccauaucauguuuuuugcuuuguguuguuuugcugggguucaucaugugggccugccaaaaaggcaacauuaggugcaacauuugcauuuga

SEQ ID NO: 35021 - RNA, 1701 nt, Artificial Sequence
  derived and/or modified CDS sequence (wt) from hemagglutinin__InfluenzaA__ACT21471
augaagacuaucauugcuuugagcuacauuucaugucugguuuucgcucaaaaacuucccggaaaugacaacagcacggcaacgcugugccugggacaccaugcagugccaaacggaacgcuagugaaaacaaucacgaaugaccaaauugaagugacuaaugcuacugagcugguucagaguuccucaacagguagaauaugcgacaguccucaccgaauccuugauggagaaaacugcacacugauagaugcucuauugggagacccucauugugauggcuuccaaaauaaggaaugggaccuuuuuguugaacgcagcaaagccuacagcaacuguuacccuuaugaugugccggauuaugccucccuuaggucacuaguugccucauccggcacucuggaguuuaacaaugaaagcuucaauuggacuggagucgcucaggauggaacaagcuaugcuugcaaaaggagaucuauuaaaaguuucuuuaguagauugaauugguugcaccaauuaaaauacaaauauccagcacugaacgugacuaugccaaacaaugacaaauuugacaaauuguacauuugggggguucaccacccgaguacggacagugaccaaaccagccuauaugcucaagcaucagggagagucacagucucuaccaaaagaagccaacaaacuguaaucccgaauaucggaucuagacccuggguaaggggugucuccagcagaauaagcaucuauuggacaauaguaaaaccgggagacauacuuuugauuaacagcacagggaaucuaauugcuccucgggguuacuucaaaauacgaagugggaaaagcucaauaaugaggucagaugcacccauuggcaaaugcaauucugaaugcaucacuccaaauggaagcauucccaaugacaaaccauuucaaaauguaaacaggaucacauauggggccugucccagauauguuaagcaaaacacucugaaauuggcaacagggaugcggaauguaccagagaaacaaacuagaggcauauucggcgcaaucgcaggcuucauagaaaaugguugggagggaaugguagacgguugguacgguuucaggcaucaaaauucugagggcacaggacaagcagcagaucuuaaaagcacucaagcagcaaucaaccaaaucaacgggaaacugaauagguuaaucgagaaaacgaacgagaaauuccaucaaauugaaaaagaauucucagaaguagaagggagaauucaggaccucgagaaauauguugaggacacuaaaauagaucucuggucguacaacgcggagcuucuuguugcccuggagaaccaacauacaauugaucuaacugacucagaaaugaacaaacuguuugaaagaacaaggaagcaacugagggaaaaugcugaggauaugggcaaugguuguuucaaaauauaccacaaaugugacaaugccugcauagggucaaucagaaauggaacuuaugaccaugauguauacagagacgaagcauuaaacaaccgguuccagaucaaagguguugagcugaagucaggauacaaagauuggauccuauggauuuccuuugccauaucauguuuuuugcuuuguguuguuuugcugggguucaucaugugggccugccaaaaaggcaacauuaggugcaacauuugcauuuga

SEQ ID NO: 35022 - RNA, 1701 nt, Artificial Sequence
  derived and/or modified CDS sequence (wt) from hemagglutinin__InfluenzaA__ACT21472
augaagacuaucauugcuuugagcuacauuucaugucugguuuucgcucaaaaacuucccggaaaugacaacagcacggcaacgcugugccugggacaccaugcagugccaaacggaacgcuagugaaaacaaucacgaaugaccaaauugaagugacuaaugcuacugagcugguucagaguuccucaacagguagaauaugcgacaguccucaccgaauccuugauggagaaaacugcacacugauagaugcucuauugggagacccucauugugauggcuuccaaaauaaggaaugggaccuuuuuguugaacgcagcaaagccuacagcaacuguuacccuuaugaugugccggauuaugccucccuuaggucacuaguugccucauccggcacucuggaguuuaacaaugaaagcuucaauuggacuggagucgcucaggauggaacaagcuaugcuugcaaaaggagaucuauuaaaaguuucuuuaguacauugaauugguugcaccaauuaaaauacaaauauccagcacugaacgugacuaugccaaacaaugacaaauuugacaaauuguacauuugggggguucaccacccgaguacggacagugaccaaaccagccuauaugcucaagcaucagggagagucacagucucuaccaaaagaagccaacaaacuguaaucccgaauaucggaucuagacccuggguaaggggugucuccagcagaauaagcaucuauuggacaauaguaaaaccgggagacauacuuuugauuaacagcacagggaaucuaauugcuccucgggguuacuucaaaauacgaagugggaaaagcucaauaaugaggucagaugcacccauuggcaaaugcaauucugaaugcaucacuccaaauggaagcauucccaaugacaaaccauuucaaaauguaaacaggaucacauauggggccugucccagauauguuaagcaaaacacucugaaauuggcaacagggaugcggaauguaccagagaaacaaacuagaggcauauucggcgcaaucgcaggcuucauagaaaaugguugggagggaaugguagacgguugguacgguuucaggcaucaaaauucugagggcacaggacaagcagcagaucuuaaaagcacucaagcagcaaucaaccaaaucaacgggaaacugaauagguuaaucgagaaaacgaacgagaaauuccaucaaauugaaaaagaauucucagaaguagaagggagaauucaggaccucgagaaauauguugaggacacuaaaauagaucucuggucguacaacgcggagcuucuuguugcccuggagaaccaacauacaauugaucuaacugacucagaaaugaacaaacuguuugaaagaacaaggaagcaacugagggaaaaugcugaggauaugggcaaugguuguuucaaaauauaccacaaaugugacaaugccugcauagggucaaucagaaauggaacuuaugaccaugauguauacagagacgaagcauuaaacaaccgguuccagaucaaagguguugagcugaagucaggauacaaagauuggauccuauggauuuccuuugccauaucauguuuuuugcuuuguguuguuuugcugggguucaucaugugggccugccaaaaaggcaacauuaggugcaacauuugcauuuga

SEQ ID NO: 35023 - RNA, 1701 nt, Artificial Sequence
  derived and/or modified CDS sequence (wt) from hemagglutinin__InfluenzaA__ACT21507
augaagacuaucauugcuuugagcuacauucuaugucugguuuucgcucagaaacuucccggaaaugacaacagcacggcaacgcugugccuugggcaccaugcaguaccaaacggaacgauagugaaaacaaucacgaaugaccaaauugaaguuacuaaugcuacugagcugguucagaguuccucaacagguggaauaugcgacaguccucaucagauccuugauggagaaaaccgcacacuaauagaugcucuauugggagacccucagugugauggcuuccaaaauaagaaaugggaccuuuuuguugaacgcagcaaagccuacagcaacuguuacccuuaugaugugccggauuaugccucccuuaggucacuaguugccucauccggcacacuggaguuuaacaaugaaagcuucaauuggacuggagucacucaaaauggaacaagcucugcuugcaaagggagaucuaauaacaguuucuuuaguagauugaauugguugacccauuuaaaauucaaauacccagcauugaacgugacuaugccaaacaaugaaaaguuugacaaauuguacauuugggggguucaccacccggguacggacaaugaccaaaucagccuauaugcucaagcaucaggaagaaucacagucucuaccaaaagaagccaacaaacuguaaucccgaauaucggaucuagacccaggguaagggauauccccagcagaauaagcaucuauuggacaauagugaaaccgggagacauacuuuugauuaacagcacagggaaucuaauugcuccucgggguuacuucaaaauacgaagugggaaaagcucaauaaugagaucagaugcacccauuggcaaaugcaauucugaaugcaucacuccaaauggaagcauucccaaugacaaaccauuucaaaauguaaacaggaucacauauggggccugucccagauauguuaagcaaaacacucugaaauuggcaacagggaugcgaaauguaccagagaaacaaacuagaggcauauuuggcgcaaucgcggguuucauagaaaaugguugggagggaaugguggaugguugguacgguuucaggcaucaaaauucugagggaauaggacaagcagcagaucucaaaagcacucaagcagcaaucaaccaaaucaaugggaagcugaauagguugaucgggaaaaccaacgagaaauuccaucagauugaaaaagaauucucagaaguagaagggagaauucaggaccucgagaaauauguugaggacacuagaauagaucucuggucauacaacgcggagcuucuuguugcccuggagagccaacauacaauugaucuaacugacucagaaaugaacaaacuguuugaaagaacaaagaagcaacugagggaaaaugcugaggauaugggcaaugguuguuucaaaauauaccacaaaugugacaaugccugcauagggucaaucagaaauggaacuuaugaccaugauguauacagagaugaagcauuaaacaaacgguuccagaucaaagguguugagcugaagucaggauacaaagauuggauccuauggauuuccuuugccauaucauguuuuuugcuuuguguugcuuuguugggguucaucaugugggccugccaaaaaggcaacauuaggugcaacauuugcauuuga

SEQ ID NO: 35024 - RNA, 1701 nt, Artificial Sequence
  derived and/or modified CDS sequence (wt) from hemagglutinin__InfluenzaA__ACT21508
augaagacuaucauugcuuugagcuacauucuaugucugguuuucgcucaaaaacuucccggaaaugacaacagcacggcaacgcugugccuugggcaccaugcaguaccaaacggaacgauagugaaaacaaucacgaaugaccaaauugaaguuacuaaugcuacugagcugguucagaguuccucaacagguggaauaugcgacaguccucaucagauccuugauggagaaaacugcacacuaauagaugcucuauugggagacccucagugugauggcuuccaaaauaagaaaugggaccuuuuuguugaacgcagcaaagccuacagcaacuguuacccuuaugaugugccggauuaugccucccuuaggucacuaguugccucauccggcacacuggaguuuaacaaugaaagcuucaauuggacuggagucacucaaaauggaacaagcucugcuugcaaaaggagaucuaauaacaguuucuuuaguagauugaauugguugacccauuuaaaauucaaauacccagcauugaacgugacuaugccaaacaaugaaaaauuugacaaauuguacauuugggggguucaccacccggguacggacaaugaccaaaucagccuauaugcucaagcaucaggaagaaucacagucucuaccaaaagaagccaacaaacuguaaucccgaauaucggaucuagacccaggguaagggauauccccagcagaauaagcaucuauuggacaauaguaaaaccgggagacauacuuuugauuaacagcacagggaaucuaauugcuccucgggguuacuucaaaauacgaagugggaaaagcucaauaaugagaucagaugcacccauuggcaaaugcaauucugaaugcaucacuccaaauggaagcauucccaaugacaaaccauuucaaaauguaaacaggaucacauauggggccugucccagauauguuaagcaagacacucugaaauuggcaacagggaugcgaaauguaccagagaaacaaacuagaggcauauuuggcgcaaucgcggguuucauagaaaaugguugggagggaaugguggaugguugguacgguuucaggcaucaaaauucugagggaauaggacaagcagcagaucucaaaagcacucaagcagcaaucaaccaaaucaaugggaagcugaauagguugaucgggaaaaccaacgagaaauuccaucagauugaaaaagaauucucagaaguagaagggagaauucaggaccucgagaaauauguugaggacacuaaaauagaucucuggucauacaacgcggagcuucuuguugcccuggagaaccaacauacaauugaucuaacugacucagaaaugaacaaacuguuugaaagaacaaagaagcaacugagggaaaaugcugaggauaugggcaaugguuguuucaaaauauaccacaaaugugacaaugccugcauagggucaaucagaaauggaacuuaugaccaugauguauacagagaugaagcauuaaacaaccgguuccagaucaaagguguugagcugaagucaggauacaaagauuggauccuauggauuuccuuugccauaucauguuuuuugcuuuguguugcuuuguugggguucaucaugugggccugccaaaaaggcaacauuaggugcaacauuugcauuuga

SEQ ID NO: 35025 - RNA, 1701 nt, Artificial Sequence
  derived and/or modified CDS sequence (wt) from hemagglutinin__InfluenzaA__ACT21509
augaagacuauuauugcuuugagcuacauucuaugucugguuuucgcucaaaaacuucccggaaaugacaacagcacggcaacgcugugccuugggcaccaugcaguaccaaacggaacgauagugaaaacaaucacaaaugaccaaauugaaguuacuaaugcuacugagcugguucagaguuccucaacagguggaauaugcgacaguccucaucagauccucgauggagaaaacugcacacuaauagaugcucuauugggagacccucagugugauggcuuccaaaauaagaaaugggaccuuuuuguugaacgcagcaaagccuacagcaacuguuacccuuaugaugugccggauuaugccucccuuaggucacuaguagccucauccggcacacuggaguuuaacaaugaaagcuucaauuggacuggagucacucagaauggaacaagcucugcuugcaaaaggagaucuaauaacaguuucuuuaguagauugaauugguugacccacuuaaaauucaaauacccagcauugaacgugacuaugccaaacaaugaaaaauuugacaaauuguacauuugggggguucaccacccggguacggacaaugaccaaaucagccuauaugcucaagcaucaggaagaaucacagucucuaccaaaagaagccaacaaacuguaaucccgaauaucggaucuagacccaggguaagggauauccccagcagaauaagcaucuauuggacaauaguaaaaccgggagacauacuuuugauuaacagcacagggaaucuaauugcuccucgggguuacuuuaaaauacgaagugggaaaagcucaauaaugagaucagaugcacccauuggcaaaugcaauucugaaugcaucacuccaaauggaagcauucccaaugacaaaccauuucaaaauguaaacaggaucacauauggggccugucccagauauguuaagcaaaacacucugaaauuggcaacagggaugcgaaauguaccagagacacaaacuagaggcauauuuggcgcaaucgcagguuucauagaaaaugguugggagggaaugguggacgguugguacgguuucaggcaucaaaauucugagggcacaggacaagcagcagaucucaaaagcacucaagcagcaaucaaccaaaucaaugggaaaccgaauagguuaaucgggaaaacaaacgagaaauuccaucagauugaaaaagaauucucagaaguagaagggagaauucaggaccucgagaaauauguugaggacacuaaaauagaucucuggucauacaacgcggagcuucuuguugcccuggagaaccaacauacaauugaucuaacugacucagaaaugaacaaacuguuugaaaaaacaaagaagcaacugagggaaaaugcugaggauaugggcaaugguuguuucaaaauauaccacaaaugugacaaugccugcauagggucaaucagaaaugaaacuuaugaccaugauguauacagagaugaagcauuaaacaaccgguuccagaucaaagguguugagcugaagucaggauacaaagauuggauccuauggauuuccuuugccauaucauguuuuuugcuuuguguugcuuuguugggguucaucaugugggccugccaaaaaggcaacauuaggugcaacauuugcauuuga

SEQ ID NO: 35026 - RNA, 1701 nt, Artificial Sequence
  derived and/or modified CDS sequence (wt) from hemagglutinin__InfluenzaA__ACT21510
augaagacuaucauugccuugagcuacauucuauguccgguuuucgcucaaaaacuucccggaaaugacaacagcacggcaacgcugugccuugggcaccaugcaguaccaaacggaacgauagugaaaacaaucacgaaugaccaaauugaaguuacuaaugcuacugagcugguucagaguuccucaacagguggaauaugcgacaguccucaucagauccuugauggagaaaacugcacacuaauagaugcucuauugggagacccucagugugauggcuuccaaaauaagaaaugggaccuuuuuguugaacgcagcaaagccuacagcaacuguuacccuuaugaugugccggauuaugccucccuuaggucacuaguugccucauccggcacacuggaguuuaacaaugaaagcuucaauuggacuggagucacucaaaauggaacaagcucugcuugcaaaaggagaucuaauaacaguuucuuuaguagauugaauugguugacccauuuaaaauucaaauacccagcauugaacgugacuaugccaaacaaugaaaaauuugacaaauuguacauuugggggguucaccacccggguacggacaaugaccaaaucagccuauaugcucaagcaucaggaagaaucacagucucuaccaaaagaagccaacaaacuguaaucccgaauaucggaucuagacccaggguaagggauauccccagcagaauaagcaucuauuggacaauagugaaaccgggagacauacuuuugauuaacagcacagggaaucuaauugcuccucgggguuacuucaaaauacgaagugggaaaagcucaauaaugagaucagaugcacccauuggcaaaugcaauucugaaugcaucacuccaaauggaagcauucccaaugacaaaccauuucaagauguaaacaggaucacauauggggccugucccagauauguuaagcaaaacacucugaaauuggcaacagggaugcgaaauguaccagagaaacaaacuagaggcauauuuggcgcaaucgcggguuucauagaaaaugguugggagggaaugguggaugguugguacgguuucaggcaucaaaauucugagggaauaggacaagcagcagaucucaaaagcacucaagcagcaaucaaccaaaucaaugggaagcugaauagguugaucgggaaaaccaacgagaaauuccaucagauugaaaaagaauucucagaaguagaagggagaauucaggaccucgagaaauauguugaggacacuaaaauagaucucuggucauacaacgcggagcuucuuguugcccuggagaaccaacauacaauugaucuaacugacucagaaaugaacaaacuguuugaaagaacagagaagcaacugagggaaaaugcugaggauaugggcaaugguuguuucaaaauauaccacaaaugugacaaugccggcauagggucaaucagaaauggaacuuaugaccaugauguauacagagaugaagcauuaaacaaccgguuccagaucaaagguguugagcugaagucaggauacaaagauuggauccuauggauuuccuuugccauaucauguuuuuugcuuuguguugcuuuguugggguucaucaugugggccugccaaaaaggcaacauuaggugcaacauuugcauuuga

SEQ ID NO: 35027 - RNA, 1701 nt, Artificial Sequence; identical to SEQ ID NO: 34925
  derived and/or modified CDS sequence (wt) from hemagglutinin__InfluenzaA__ACT21572

SEQ ID NO: 35028 - RNA, 1701 nt, Artificial Sequence; identical to SEQ ID NO: 34681
  derived and/or modified CDS sequence (wt) from hemagglutinin__InfluenzaA__ACT22031

SEQ ID NO: 35029 - RNA, 1701 nt, Artificial Sequence
  derived and/or modified CDS sequence (wt) from hemagglutinin__InfluenzaA__ACT22032
augaaggcaauacuaguaguucugcuauauacauuugcaaccgcaaaugcagacacauuauguauagguuaucaugcgaacaauucaacagacacuguagacacaguacuagaaaagaauguaacaguaacacacucuguuaaccuucuagaagacaagcauaacgggaaacuaugcaaacuaagagggguagccccauugcauuuggguaaauguaacauugcuggcuggauccugggaaauccagagugugaaucacucuccacagcaagcucaugguccuacauuguggaaacaucuaguucagacaauggaacguguuacccaggagauuucaucgauuaugaggagcuaagagagcaauugagcucagugucaucauuugaaagguuugagauauuccccaagacaaguucauggcccaaucaugacucgaacaaagguguaacggcagcauguccucaugcuggagcaaaaagcuucuacaaaaauuuaauauggcuaguuaaaaaaggaaauucauacccaaagcucagcaaauccuacauuaaugauaaagggaaagaaguccucgugcuauggggcauucaccauccaucuacuagugcugaccaacaaagucucuaucagaaugcagaugcauauguuuuuguggggacaucaagauacagcaagaaguucaagccggaaauagcaauaagacccaaagugagggaucaagaagggagaaugaacuauuacuggacacuaguagagccgggagacaaaauaacauucgaagcaacuggaaaucuagugguaccgagauaugcauucgcaauggaaagaaaugcuggaucugguauuaucauuucagauacaccaguccacgauugcaauacaacuugucagacacccaagggugcuauaaacaccagccucccauuucagaauauacauccgaucacaauuggaaaauguccaaaauauguaaaaagcacaaaauugagacuggccacaggauugaggaaugucccuucuauucaaucuagaggccuauuuggggccauugccgguuucauugaagggggguggacagggaugguagauggaugguacgguuaucaccaucaaaaugagcaggggucaggauaugcagccgaccugaagagcacacagaaugccauugacgagauuacuaacaaaguaaauucuguuauugaaaagaugaauacacaguucacagcaguagguaaagaguucaaccaccuggaaaaaagaauagagaauuuaaauaaaaaaguugaugaugguuuccuggacauuuggacuuacaaugccgaacuguugguucuauuggaaaaugaaagaacuuuggacuaccacgauucaaaugugaagaacuuauaugaaaagguaagaagccaguuaaaaaacaaugccaaggaaauuggaaacggcugcuuugaauuuuaccacaaaugcgauaacacgugcauggaaagugucaaaaaugggacuuaugacuacccaaaauacucagaggaagcaaaauuaaacagagaagaaauagauggaguaaagcuggaaucaacaaggauuuaccagauuuuggcgaucuauucaacugucgccaguucauugguacugguagucucccugggggcaaucaguuucuggaugugcucuaaugggucucuacaguguagaauauguauuuaa

SEQ ID NO: 35030 - RNA, 1701 nt, Artificial Sequence; identical to SEQ ID NO: 34681
  derived and/or modified CDS sequence (wt) from hemagglutinin__InfluenzaA__ACT22033

SEQ ID NO: 35031 - RNA, 1701 nt, Artificial Sequence
  derived and/or modified CDS sequence (wt) from hemagglutinin__InfluenzaA__ACT22034
augaaggcaauacuaguaguucugcuauauacauuugcaaccgcaaaugcagacacauuauguauagguuaucaugcgaacaauucaacagacacuguagacacaguacuagaaaagaauguaacaguaacacacucuguuaaccuucuagaagacaagcauaacgggaaacuaugcaaacuaagagggguagccccauugcauuuggguaaauguaacauugcuggcuggauccugggaaauccagagugugaaucacucuccacagcaagcucaugguccuacauuguggaaacaucuaguucagacaauggaacguguuacccaggagauuucaucgauuaugaggagcuaagagagcaauugagcucagugucaucauuugaaagguuugagauauuccccaagacaaguucauggcccaaucaugacucgaacaaagguguaacggcagcauguccucaugcuggagcaaaaagcuucuacaaaaauuuaauauggcuaguuaaaaaaggaaauucauacccaaagcucagcaaauccuacauuaaugauaaagggaaagaaguccucgugcuauggggcauucaccauccaucuacuagugcugaccaacaaagucucuaucagaaugcagaugcauauguuuuuguggggacaucaagauacagcaagaaguucaagccggaaauagcaauaagacccaaagugagggaucaagaagggagaaugaacuauuacuggacacuaguagagccgggagacaaaauaacauucgaagcaacuggaaaucuagugguaccgagauaugcauucgcaauggaaagaaaugcuggaucugguauuaucauuucagauacaccaguccacgauugcaauacaacuugucagacacccaagggugcuauaaacaccagccucccauuucagaauauacauccgaucacaauuggaaaauguccaaaauauguaaaaagcacaaaauugagacuggccacaggauugaggaaugucccgucuauucaaucuagaggccuauuuggggccauugccgguuucauugaagggggguggacagggaugguagauggaugguacgguuaucaccaucaaaaugagcaggggucaggauaugcagccgaccugaagagcacacagaaugccauugacgagauuacuaacaaaguaaauucuguuauugaaaagaugaauacacaguucacagcaguagguaaagaguucaaccaccuggaaaaaagaauagagaauuuaaauaaaaaaguugaugaugguuuccuggacauuuggacuuacaaugccgaacuguugguucuauuggaaaaugaaagaacuuuggacuaccacgauucaaaugugaagaacuuauaugaaaagguaagaagccaguuaaaaaacaaugccaaggaaauuggaaacggcugcuuugaauuuuaccacaaaugcgauaacacguguauggaaagugucaaaaaugggacuuaugacuacccaaaauacucagaggaagcaaaauuaaacagagaagaaauagaugggguaaagcuggaaucaacaaggauuuaccagauuuuggcgaucuauucaacugucgccaguucauugguacugguagucucccugggggcaaucaguuucuggaugugcucuaaugggucucuacaguguagaauauguauuuaa

SEQ ID NO: 35032 - RNA, 1701 nt, Artificial Sequence; identical to SEQ ID NO: 34967
  derived and/or modified CDS sequence (wt) from hemagglutinin__InfluenzaA__ACT22035

SEQ ID NO: 35033 - RNA, 1701 nt, Artificial Sequence
  derived and/or modified CDS sequence (wt) from hemagglutinin__InfluenzaA__ACT22036
augaaggcaauacuaguaguucugcuauauacauuugcaaccgcaaaugcagacacauuauguauagguuaucaugcgaacaauucaacagacacuguagacacaguacuagaaaagaauguaacaguaacacacucuguuaaccuucuagaagacaagcauaacgggaaacuaugcaaacuaagagggguagccccauugcauuuggguaaauguaacauugcuggcuggauccugggaaauccagagugugaaucacucuccacagcaagcucaugguccuacauuguggaaacaucuaguucagacaauggaacguguuacccaggagauuucaucgauuaugaggagcuaagagagcaauugagcucagugucaucauuugaaagguuugagauauuccccaagacaaguucauggcccaaucaugacucgaacaaagguguaacggcagcauguccucaugcuggagcaaaaagcuucuacaaaaauuuaauauggcuaauuaaaaaaggaaauucauacccaaagcucagcaaauccuacauuaaugauaaagggaaagaaguccucgugcuauggggcauucaccauccaucuacuagugcugaccaacaaagucucuaucagaaugcagaugcauauguuuuuguggggucaucaagauacagcaagaaguucaagccggaaauagcaauaagacccaaagugagggaucaagaagggagaaugaacuauuacuggacacuaguagagccgggagacaaaauaacauucgaagcaacuggaaaucuagugguaccgagauaugcauucgcaauggaaagaaaugcuggaucugguauuaucauuucagauacaccaguccacgauugcaauacaacuugucagacacccaagggugcuauaaacaccagccucccauuucagaauauacauccgaucacaauuggaaaauguccaaaauauguaaaaagcacaaaauugagacuggccacaggauugaggaaugucccgucuauucaaucuagaggccuauuuggggccauugccgguuucauugaagggggguggacagggaugguagauggaugguacgguuaucaccaucaaaaugagcaggggucaggauaugcagccgaccugaagagcacacagaaugccauugacgagauuacuaacaaaguaaauucuguuauugaaaagaugaauacacaguucacagcaguagguaaagaguucaaccaccuggaaaaaagaauagagaauuuaaauaaaaaaguugaugaugguuuccuggacauuuggacuuacaaugccgaacuguugguucuauuggaaaaugaaagaacuuuggacuaccacgauucaaaugugaagaacuuauaugaaaagguaagaagccagcuaaaaaacaaugccaaggaaauuggaaacggcugcuuugaauuuuaccacaaaugcgauaacacgugcauggaaagugucaaaaaugggacuuaugacuacccaaaauacucagaggaagcaaaauuaaacagagaagaaauagaugggguaaagcuggaaucaacaaggauuuaccagauuuuggcgaucuauucaacugucgccaguucauugguacugguagucucccugggggcaaucaguuucuggaugugcucuaaugggucucuacaguguagaauauguauuuaa

SEQ ID NO: 35034 - RNA, 1701 nt, Artificial Sequence
  derived and/or modified CDS sequence (wt) from hemagglutinin__InfluenzaA__ACT22037
augaaggcaauacuaguaguucugcuauauacauuugcaaccgcaaaugcagacacauuauguauagguuaucaugcgaacaauucaacagacacuguagacacaguacuagaaaagaauguaacaguaacacacucuguuaaccuucuagaagacaagcauaacgggaaacuaugcaaacuaagagggguagccccauugcauuuggguaaauguaacauugcuggcuggauccugggaaauccagagugugaaucacucuccacagcaagcucaugguccuacauuguggaaacaucuaguucagacaauggaacguguuacccaggagauuucaucgauuaugaggagcuaagagagcaauugagcucagugucaucauuugaaagguuugagauauuccccaagacaaguucauggcccaaucaugacucgaacaaagguguaacggcagcauguccucaugcuggagcaaaaagcuucuacaaaaauuuaauauggcuaguuaaaaaaggaaauucauacccaaagcucagcaaauccuacauuaaugauaaagggaaagaaguccucgugcuauggggcauucaccauccaucuacuagugcugaccaacaaagucucuaucagaaugcagaugcauauguuuuuguggggacaucaagauacagcaagaaguucaagccggaaauagcaauaagacccaaagugagggaacaagaagggagaaugaacuauuacuggacacuaguagagccgggagacaagauaacauucgaagcaacuggaaaucuagugguaccgagauaugcauucgcaauggaaagaaaugcuggaucugguauuaucauuucagauacaccaguccacgauugcaauacaacuugucagacacccaagggugcuauaaacaccagccucccauuucagaauauacauccgaucacaauuggaaaauguccaaaauauguaaaaagcacaaaauugagacuggccacaggauugaggaaugucccgucuauucaaucuagaggccuauuuggggccauugccgguuucauugaagggggguggacagggaugguagauggaugguacgguuaucaccaucaaaaugagcaggggucaggauaugcagccgaccugaagagcacacagaaugccauugacgagauuacuaacaaaguaaauucuguuauugaaaagaugaauacacaguucacagcaguagguaaagaguucaaccaccuggaaaaaagaauagaaaauuuaaauaaaaaaguugaugaugguuuccuggacauuuggacuuacaaugccgaacuguugguucuauuggaaaaugaaaggacuuuggacuaccacgauucaaaugugaagaacuuauaugaaaagguaagaagccaguuaaaaaacaaugccaaggaaauuggaaacggcugcuuugaauuuuaccacaaaugcgauaacacgugcauggaaagugucaaaaaugggacuuaugacuacccaaaauacucagaggaagcaaaauuaaacagagaagaaauagaugggguaaagcuggaaucaacaaggauuuaccagauuuuggcgaucuauucaacugucgcaaguucauugguacugguagucucccugggggcaaucaguuucuggaugugcucuaaugggucucuacaguguagaauauguauuuaa

SEQ ID NO: 35035 - RNA, 1701 nt, Artificial Sequence
  derived and/or modified CDS sequence (wt) from hemagglutinin__InfluenzaA__ACT22038
augaaggcaauacuaguaguucugcuauauacauuugcaaccgcaaaugcagacacauuauguauagguuaucaugcgaacaauucaacagacacuguagacacaguacuagaaaagaauguaacaguaacacacucuguuaaccuucuagaagacaagcauaacgggaaacuaugcaaacuaagagggguagccccauugcauuuggguaaauguaacauugcuggcuggauccugggaaauccagagugugaaucacucuccacagcaagcucaugguccuacauuguggaaacaucuaguucagacaauggaacguguuacccaggagauuucaucgauuaugaggagcuaagagagcaauugagcucagugucaucauuugaaagguuugagauauuccccaagacaaguucauggcccaaucaugacucgaacaaagguguaacggcagcauguccucaugcuggagcaaaaagcuucuacaaaaauuuaauauggcuaguuaaaaaagggaauucauacccaaagcucagcaaauccuacauuaaugauaaagggaaagaaguccucgugcuauggggcauucaccauccaucuacuaaugcugaccaacaaagucucuaucagaaugcagaugcauauguuuuuguggggucaucaagauacagcaagaaguucaagccggaaauagcaauaagacccaaagugagggaucaagaagggagaaugaacuauuacuggacacuaguagagccgggagacaaaauaacauucgaagcaacuggaaaucuagugguaccgagauaugcauucgcaauggaaagaaaugcuggaucugguauuaucauuucagauacaccaguccacgauugcaauacaacuugucagacacccaagggugcuauaaacaccagccucccauuucagaauauacauccgaucacaauuggaaaauguccaaaauauguaaaaagcacaaaauugagacuggccacaggauugaggaaugucccgucuauucaaucuagaggccuauuuggggccauugccgguuucauugaagggggguggacagggaugguagauggaugguacgguuaucaccaucaaaaugagcaggggucaggauaugcagccgaccugaagagcacacagaaugccauugacgagauuacuaacaaaguaaauucuguuauugaaaagaugaauacacaguucacagcaguagguaaagaguucaaccaccuggaaaaaagaauagagaauuuaaauaaaaaaguugaugaugguuuccuggacauuuggacuuacaaugccgaacuguugguucuauuggaaaaugaaagaacuuuggacuaccacgauucaaaugugaagaacuuauaugaaaagguaagaagccaguuaaaaaacaaugccaaggaaauuggaaacggcugcuuugaauuuuaccacaaaugcgauaacacgugcauggaaagugucaaaaaugggacuuaugacuacccaaaauacucagaggaagcaaaauuaaacagagaagaaauagaugggguaaagcuggaaucaacaaggauuuaccagauuuuggcgaucuauucaacugucgccaguucauugguacugguagucucccugggggcaaucaguuucuggaugugcucuaaugggucucuacaguguagaauauguauuuaa

SEQ ID NO: 35036 - RNA, 1701 nt, Artificial Sequence
  derived and/or modified CDS sequence (wt) from hemagglutinin__InfluenzaA__ACT22055
augaaggcaauacuaguaguucugcuauauacauuugcaaccgcaaaugcagacacauuauguauagguuaucaugcgaacaauucaacagacacuguagacacaguacuagaaaagaauguaacaguaacacacucuguuaaccuucuagaagacaagcauaacgggaaacuaugcaaacuaagagggguagccccauugcauuuggguaaauguaacauugcuggcuggauccugggaaauccagagugugaaucacucuccacagcaagcucaugguccuacauuguggaaacaucuaguucagacaauggaacguguuacccaggagauuucaucgauuaugaggagcuaagagagcaauugagcucagugucaucauuugaaagguuugagauauuccccaagacaaguucauggcccaaucaugacucgaacaaagguguaacggcagcauguccucaugcuggagcaaaaagcuucuacaaaaauuuaauauggcuaguuaaaaaaggaaauucauacccaaagcucagaaaauccuacauuaaugauaaagggaaagaaguccucgugcuauggggcauucaccauccaucuacuagugcugaccaacaaagucucuaucagaaugcagaugcauauguuuuuguggggacaucaagauacagcaagaaguucaagccggaaauagcaauaagacccaaagugagggaucaagaagggagaaugaacuauuacuggacacuaguagagccgggagacaaaauaacauucgaagcaacuggaaaucuagugguaccgagauaugcauucgcaauggaaagaaaugcuggaucugguauuaucauuucagauacaccaguccacgauugcaauacaacuugucagacacccaagggugcuauaaacaccagccucccauuucagaauauacauccgaucacaauuggaaaauguccaaaauauguaaaaagcacaaaauugagacuggccacaggauugaggaaugucccgucuauucaaucuagaggccuauuuggggccauugccgguuucauugaagggggguggacagggaugguagauggaugguacgguuaucaccaucaaaaugagcaggggucaggauaugcagcugaccugaagagcacacagaaugccauugacgagauuacuaacaaaguaaauucuguuauugaaaagaugaauacacaguucacagcaguagguaaagaguucaaccaccuggaaaaaagaauagagaauuuaaauaaaaaaguugaugaugguuuccuggacauuuggacuuacaaugccgaacuguugguucuauuggaaaaugaaagaacuuuggacuaccacgauucaaaugugaagaacuuauaugaaaagguaagaagccaguuaaaaaacaaugccaaggaaauuggaaacggcugcuuugaauuuuaccacaaaugcgauaacacgugcauggaaagugucaaaaaugggacuuaugacuacccaaaauacucagaggaagcaaaauuaaacagagaagaaauagaugggguaaagcuggaaucaacaaggauuuaccagauuuuggcgaucuauucaacugucgccaguucauugguacugguagucucccugggggcaaucaguuucuggaugugcucuaaugggucucuacaguguagaauauguauuuaa

SEQ ID NO: 35037 - RNA, 1701 nt, Artificial Sequence; identical to SEQ ID NO: 34994
  derived and/or modified CDS sequence (wt) from hemagglutinin__InfluenzaA__ACT22504

SEQ ID NO: 35038 - RNA, 1701 nt, Artificial Sequence; identical to SEQ ID NO: 34965
  derived and/or modified CDS sequence (wt) from hemagglutinin__InfluenzaA__ACT33122

SEQ ID NO: 35039 - RNA, 1701 nt, Artificial Sequence
  derived and/or modified CDS sequence (wt) from hemagglutinin__InfluenzaA__ACT33123
augaaggcaauacuaguaguucugcuauauacauuugcaaccgcaaaugcagacacauuauguauagguuaucaugcgaacaauucaacagacacuguagacacaguacuagaaaagaauguaacaguaacacacucuguuaaccuucuagaagacaagcauaacgggaaacuaugcaaacuaagagggguagccccauugcauuuggguaaauguaacauugcuggcuggauccugggaaauccagagugugaaucacucuccacagcaagcucaugguccuacauuguggaaacaucuaguucagacaauggaacguguuacccaggagauuucaucgauuaugaggagcuaagagagcaauugagcucagugucaucauuugaaagguuugagauauuccccaagacaaguucauggcccaaucaugacucgaacaaagguguaacggcagcauguccucaugcuggagcaaaaagcuucuacaaaaauuuaauauggcuaguuaaaaaaggaaauucauacccaaagcucagcaaauccuacauuaaugauaaagggaaagaaguccucgugcuauggggcauucaccauccaucuacuagugcugaccaacaaagucucuaucagaaugcagaugcauauguuuuuguggggacaucaagauacagcaagaaguucaagccggaaauagcaauaagacccaaagugagggaucaagaagggagaaugaacuauuacuggacacuaguagagccgggagacaaaauaacauucgaagcaacuggaaaucuagugguaccgagauaugcauucgcaauggaaagaaaugcuggaucugguauuaucauuucagauacaccaguccacgauugcaauacaacuugucagacacccaagggugcuauaaacaccagccucccauuucagaauauacauccgaucacaauuggaaaauguccaaaauauguaaaaagcacaaaauugagacuggccacaggauugaggaaugucccgucuauucaaucuagaggccuauuuggggccauugccgguuucauugaagggggguggacagggaugguagauggaugguacgguuaucaccaucaaaaugagcaggggucaggauaugcagccgaccugaagagcacacagaaugccauugacgagauuacuaacaaaguaaauucuguuauugaaaagaugaauacacaguucacagcaguagguaaagaguucaaccaccuggaaaaaagaauagagaauuuaaauaaaaaaguugaugaugguuuccuggacauuuggacuuacaaugccgaacuguugguucuauuggaaaaugaaagaacuuuggacuaccacgauucaaaugugaagaacuuauaugaaaagguaagaagccaguuaaaaaacaaugccaaggaaauuggaaacggcugcuuugaauuuuaccacaaaugcgauaacacgugcauggaaagugucaaaaaugggacuuaugacuacccaaaauacucagaggaagcaaaauuaaacagagaagaaauagaugggguaaagcuugaaucaacaaggauuuaccagauuuuggcgaucuauucaacugucgccaguucauugguacugguagucucccugggggcaaucaguuucuggaugugcucuaaugggucucuacaguuuagaauauguauuuaa

SEQ ID NO: 35040 - RNA, 1701 nt, Artificial Sequence; identical to SEQ ID NO: 34681
  derived and/or modified CDS sequence (wt) from hemagglutinin__InfluenzaA__ACT33125

SEQ ID NO: 35041 - RNA, 1701 nt, Artificial Sequence
  derived and/or modified CDS sequence (wt) from hemagglutinin__InfluenzaA__ACT36505
augaaggcaauacuaguaguucugcuauauacauuugcaaccgcaaaugcagacacauuauguauagguuaucaugcgaacaauucaacagacacuguagacacaguacuagaaaagaauguaacaguaacacacucuguuaaccuucuagaagacaagcauaacgggaaacuaugcaaacuaagagggguagccccauugcauuuggguaaauguaacauugcuggcuggauccugggaaauccagagugugaaucacucuccacagcaagcucaugguccuacauuguggaaacaucuaguucagacaauggaacguguuacccaggagauuucaucgauuaugaggagcuaagagagcaauugagcucagugucaucauuugaaagguuugagauauuccccaagacaaguucauggcccaaucaugacucgaacaaagguguaacggcagcauguccucaugcuggagcaaaaagcuucuacaaaaauuuaauauggcuaguuaaaaaaggaaauucauacccaaagcucagcaaauccuacauuaaugauaaagggaaagaaguccucgugcuauggggcauucaccauccaucuacuagugcugaccaacaaagucucuaucagaaugcagaugcauauguuuuuguggggacaucaagauacagcaagaaguucaagccggaaauagcaauaagacccaaagugagggaucaagaagggagaaugaacuauuacuggacacuaauagagccgggagacaaaauaacauucgaagcaacuggaaaucuagugguaccgagauaugcauucgcaauggaaagaaaugcuggaucugguauuaucauuucagauacaccaguccacgauugcaauacaacuugucagacacccaagggugcuauaaacaccagccucccauuucagaauauacauccgaucacaauuggaaaauguccaaaauauguaaaaagcacaaaauugagacuggccacaggauugaggaaugucccgucuauucaaucuagaggccuauuuggggccauugccgguuucauugaagggggguggacagggaugguagauggaugguacgguuaucaccaucaaaaugagcaggggucaggauaugcagccgaccugaagagcacacagaaugccauugacgagauuacuaacaaaguaaauucuguuauugaaaagaugaauacacaguucacagcaguagguaaagaguucaaccaccuggaaaaaagaauagagaauuuaaauaaaaaaguugaugaugguuuccuggacauuuggacuuacaaugccgaacuguugguucuauuggaaaaugaaagaacuuuggacuaccacgauucaaaugugaagaacuuauaugaaaagguaagaagccaguuaaaaaacaaugccaaggaaauuggaaacggcugcuuugaauuuuaccacaaaugcgauaacacgugcauggaaagugucaaaaaugggacuuaugacuacccaaaauacucagaggaagcaaaauuaaacagagaagaaauagaugggguaaagcuggaaucaacaaggauuuaccagauuuuggcgaucuauucaacugucgccaguucauugguacugguagucucccugggggcaaucaguuucuggaugugcucuaaugggucucuacaguguagaauauguauuuaa

SEQ ID NO: 35042 - RNA, 1701 nt, Artificial Sequence
  derived and/or modified CDS sequence (wt) from hemagglutinin__InfluenzaA__ACT36649
augaaggcaauacuaguaguucugcuauauacauuugcaaccgcaaaugcagacacauuauguauagguuaucaugcgaacaauucaacagacacuguagacacaguacuagaaaagaauguaacaguaacacacucuguuaaccuucuagaagacaagcauaacgggaaacuaugcaaacuaagagggguagccccauugcauuuggguaaauguaacauugcuggcuggauccugggaaauccagagugugaaucacucuccacagcaagaucaugguccuacauuguggaaacaucuaguucagacaauggaacguguuacccaggagauuucaucgauuaugaggagcuaagagagcaauugaacucagugucaucauuugaaagguuugagauauuccccaagacaaguucauggcccaaucaugacucgaacaaagguguaacggcagcauguccucaugcuggagcaaaaagcuucuacaaaaauuuaauauggcuaguuaaaaaaggaaauucauacccaaagcucagcaaauccuacauuaaugauaaagggaaagaaguccucgugcuauggggcauucaccauccaucuacuagugcugaccaacaaagucucuaucagaaugcagaugcauauguuuuuguggggucaucaagauacagcaagaaguucaagccggaaauagcaauaagacccaaagugagggaucaagaagggagaaugaacuauuacuggacacuaguagagccgggagacaaaauaacauucgaagcaacuggaaaucuagugguaccgagauaugcauucgcaauggaaagaaaugcuggaucugguauuaucauuucagauacaccaguccacgauugcaauacaacuugucagacacccaagggugcuauaaacaccagccucccauuucagaauauacauccgaucacaauuggaaaauguccaaaauauguaaaaagcacaaaauugagacuggccacaggauugaggaaugucccgucuauucaaucuagaggccuauuuggggccauugccgguuucauugaagggggguggacagggaugguagauggaugguacgguuaucaccaucaaaaugagcaggggucaggauaugcagccgaccugaagagcacacagaaugccauugacgagauuacuaacaaaguaaauucuguuauugaaaagaugaauacacaguucacagcaguagguaaagaguucaaccaccuggaaaaaagaauagagaauuuaaauaaaaaaguugaugaugguuuccuggacauuuggacuuacaaugccgaacuguugguucuauuggaaaaugaaagaacuuuggacuaccacgauucaaaugugaagagcuuauaugaaaagguaagaagccaguuaaaaaacaaugccaaggaaauuggaaacggcugcuuugaauuuuaccacaaaugcgauaacacgugcauggaaagugucaaaaaugggacuuaugacuacccaaaauacucagaggaagcaaaauuaaacagagaagaaauagaugggguaaagcuggaaucaacaaggauuuaccagauuuuggcgaucuauucaacugucgccaguucauugguacugguagucucccugggggcaaucaguuucuggaugugcucuaaugggucucuacaguguagaauauguauuuaa

SEQ ID NO: 35043 - RNA, 1701 nt, Artificial Sequence; identical to SEQ ID NO: 34681
  derived and/or modified CDS sequence (wt) from hemagglutinin__InfluenzaA__ACT36650

SEQ ID NO: 35044 - RNA, 1701 nt, Artificial Sequence; identical to SEQ ID NO: 34681
  derived and/or modified CDS sequence (wt) from hemagglutinin__InfluenzaA__ACT36652

SEQ ID NO: 35045 - RNA, 1701 nt, Artificial Sequence; identical to SEQ ID NO: 34679
  derived and/or modified CDS sequence (wt) from hemagglutinin__InfluenzaA__ACT36653

SEQ ID NO: 35046 - RNA, 1701 nt, Artificial Sequence
  derived and/or modified CDS sequence (wt) from hemagglutinin__InfluenzaA__ACT36655
augaaggcaauacuaguaguucugcuauauacauuugcaaccgcaaaugcagacacauuauguauagguuaucaugcgaacaauucaacagacacuguagacacaguacuagaaaagaauguaacaguaacacacucuguuaaccuucuagaagacaagcauaacgggaaacuaugcaaacuaagagggguagccccauugcauuuggguaaauguaacauugcuggcuggauccugggaaauccagagugugaaucacucuccacagcaagcucaugguccuacauuguggaaacaucuaguucaggcaauggaacguguuacccaggagauuucaucgauuaugaggagcuaagagagcaauugagcucagugucaucauuugaaagguuugagauauuccccaagacaaguucauggcccaaucaugacucgaacaaagguguaacggcagcauguccucaugcuggagcaaaaagcuucuacaaaaauuuaauauggcuaguuaaaaaaggaaauucauacccaaagcucagcaaauccuacauuaaugauaaagggaaagaaguccucgugcuauggggcauucaccauccaucuacuagugcugaccaacaaagucucuaucagaaugcagaugcauauguuuuuguggggucaucaagauacagcaagaaguucaagccggaaauagcaauaagacccaaagugagggaucaagaagggagaaugaacuauuacuggacacuaguagagccgggagacaaaauaacauucgaagcaacuggaaaucuagugguaccgagauaugcauucgcaauggaaagaaaugcuggaucugguauuaucauuucagauacaccaguccacgauugcaauacaacuugucagacacccaagggugcuauaaacaccagccucccauuucagaauauacauccgaucacaauuggaaaauguccaaaauauguaaaaagcacaaaauugagacuggccacaggauugaggaaugucccgucuauucaaucuagaggccuauuuggggccauugccgguuucauugaagggggguggacagggaugguagauggaugguacgguuaucaccaucaaaaugagcaggggucaggauaugcagccgaccugaagagcacacagaaugccauugacgagauuacuaacaaaguaaauucuguuauugaaaagaugaauacacaguucacagcaguagguaaagaguucaaccaccuggaaaaaagaauagagaauuuaaauaaaaaaguugaugaugguuuccuggacauuuggacuuacaaugccgaacuguugguucuauuggaaaaugaaagaacuuuggacuaccacgauucaaaugugaagaacuuauaugaaaagguaagaagccagcuaaaaaacaaugccaaggaaauuggaaacggcugcuuugaauuuuaccacaaaugcgauaacacgugcauggaaagugucaaaaaugggacuuaugacuacccaaaauacucagaggaagcaaaauuaaacagagaagaaauagaugggguaaagcuggaaucaacaaggauuuaccagauuuuggcgaucuauucaacugucgccaguucauugguacugguagucucccugggggcaaucaguuucuggaugugcucuaaugggucucuacaguguagaauauguauuuaa

SEQ ID NO: 35047 - RNA, 1701 nt, Artificial Sequence; identical to SEQ ID NO: 34676
  derived and/or modified CDS sequence (wt) from hemagglutinin__InfluenzaA__ACT36658

SEQ ID NO: 35048 - RNA, 1701 nt, Artificial Sequence; identical to SEQ ID NO: 34707
  derived and/or modified CDS sequence (wt) from hemagglutinin__InfluenzaA__ACT36659

SEQ ID NO: 35049 - RNA, 1701 nt, Artificial Sequence; identical to SEQ ID NO: 34676
  derived and/or modified CDS sequence (wt) from hemagglutinin__InfluenzaA__ACT36661

SEQ ID NO: 35050 - RNA, 1701 nt, Artificial Sequence; identical to SEQ ID NO: 34714
  derived and/or modified CDS sequence (wt) from hemagglutinin__InfluenzaA__ACT36663

SEQ ID NO: 35051 - RNA, 1701 nt, Artificial Sequence
  derived and/or modified CDS sequence (wt) from hemagglutinin__InfluenzaA__ACT36666
augaaggcaauacuaguaguucugcuauauacauuugcaaccgcaaaugcagacacauuauguauagguuaucaugcgaacaauucaacagacacuguagacacaguacuagaaaagaauguaacaguaacacacucuguuaaccuucuagaagacaagcauaacgggaaacuaugcaaacuaagagggguagccccauugcauuuggguaaauguaacauugcuggcuggauccugggaaauccagagugugaaucacucuccacagcaagcucaugguccuacauuguggaaacaucuaguucagacaauggaacguguuacccaggagauuucaucgauuaugaggagcuaagagagcaauugagcucagugucaucauuugaaagguuugagauauuccccaagacaaguucauggcccaaucaugacucgaacaaagguguaacggcagcauguccucaugcuggagcaaaaagcuucuacaaaaauuuaauauggcuaguuaaaaaaggaaauucauacccaaagcucagcaaauccuacauuaaugauaaagggaaagaaguccucgugcuauggggcauucaccauccaucuacuagugcugaccaacaaagccucuaucagaaugcagaugcauauguuuuuguggggacaucaagauacagcaagaaguucaagccggaaauagcaauaagacccaaagugagggaucaagaagggagaaugaacuauuacuggacacuaguagagccgggagacaaaauaacauucgaagcaacuggaaaucuagugguaccgagauaugcauucgcaauggaaagaaaugcuggaucugguauuaucauuucagauacaccaguccacgauugcaauacaacuugucagacacccaagggugcuauaaacaccagccucccauuucagaauauacauccgaucacaauuggaaaauguccaaaauauguaaaaagcacaaaauugagacuggccacaggauugaggaaugucccgucuauucaaucuagaggccuauuuggggccauugccgguuucauugaagggggguggacagggaugguagauggaugguacgguuaucaccaucaaaaugagcaggggucaggauaugcagccgaccugaagagcacacagaaugccauugacgagauuacuaacaaaguaaauucuguuauugaaaagaugaauacacaguucacagcaguagguaaagaguucaaccaccuggaaaaaagaauagagaauuuaaauaaaaaaguugaugaugguuuccuggacauuuggacuuacaaugccgaacugcugguucuauuggaaaaugaaagaacuuuggacuaccacgauucaaaugugaagaacuuauaugaaaagguaagaagccaguuaaaaaacaaugccaaggaaauuggaaacggcugcuuugaauuuuaccacaaaugcgauaacacgugcauggaaagugucaaaaaugggacuuaugacuacccaaaauacucagaggaagcaaaauuaaacagagaagaaauagaugggguaaagcuggaaucaacaaggauuuaccagauuuuggcgaucuauucaacugucgccaguucauugguacugguagucucccugggggcaaucaguuucuggaugugcucuaaugggucucuacaguguagaauauguauuuaa

SEQ ID NO: 35052 - RNA, 1701 nt, Artificial Sequence
  derived and/or modified CDS sequence (wt) from hemagglutinin__InfluenzaA__ACT52687
augaaggcaauacuaguaguucugcuauauacauuugcaaccgcaaaugcagacacauuauguauagguuaucaugcgaacaauucaacagacacuguagacacaguacuagaaaagaauguaacaguaacacacucuguuaaccuucuagaagacaagcauaacgggaaacuaugcaaacuaagagggguagccccauugcauuuggguaaauguaacauugcuggcuggauccugggaaauccagagugugaaucacucuccacagcaagcucaugguccuacauuguggaaacaucuaguucagacaauggaacguguuacccaggagauuucaucgauuaugaggagcuaagagagcaauugagcucagugucaucauuugaaagguuugagauauuccccaagacaaguucauggcccaaucaugacucgaacaaagguguaacggcagcauguccucaugcuggagcaaaaagcuucuacaaaaauuuaauauggcuaguuaaaaaaggaaauucauacccaaagcucagcaaauccuacauuaaugauaaagggaaagaaguccucgugcuauggggcauucaccauccaucuacuagugcugaccaacaaagucucuaucagaaugcagaugcauauguuuuuguggggucaucaagauacagcaagaaguucaagccggaaauagcaauaagacccaaagugaggggucaagaagggagaaugaacuauuacuggacacuaguagagccgggagacaaaauaacauucgaagcaacuggaaaucuagugguaccgagauaugcauucgcaauggaaagaaaugcuggaucugguauuaucauuucagauacaccaguccacgauugcaauacaacuugucagacacccaagggugcuauaaacaccagccucccauuucagaauauacauccgaucacaauuggaaaauguccaaaauauguaaaaagcacaaaauugagacuggccacaggauugaggaaugucccgucuauucaaucuagaggccuauuuggggccauugccgguuucauugaagggggguggacagggaugguagauggaugguacgguuaucaccaucaaaaugagcaggggucaggauaugcagccgaccugaagagcacacagaaugccauugacgagauuacuaacaaaguaaauucuguuauugaaaagaugaauacacaguucacagcaguagguaaagaguucaaccaccuggaaaaaagaauagagaauuuaaauaaaaaaguugaugaugguuuccuggacauuuggacuuacaaugccgaacuguugguucuauuggaaaaugaaagaacuuuggacuaccacgauucaaaugugaagaacuuauaugaaaagguaagaagccagcuaaaaaacaaugccaaggaaauuggaaacggcugcuuugaauuuuaccacaaaugcgauaacacgugcauggaaagugucaaaaaugggacuuaugacuacccaaaauacucagaggaagcaaaauuaaacagagaagaaauagaugggguaaagcuggaaucaacaagguuuuaccagauuuuggcgaucuauucaacugucgccaguucauugguacugguagucucccugggggcaaucaguuucuggaugugcucuaaugggucucuacaguguagaauauguauuuaa

SEQ ID NO: 35053 - RNA, 1701 nt, Artificial Sequence
  derived and/or modified CDS sequence (wt) from hemagglutinin__InfluenzaA__ACT54606
augaaggcaauacuaguaguucugcuauauacauuugcaaccgcaaaugcagacacauuauguauagguuaucaugcgaacaauucaacagacacuguagacacaguacuagaaaagaauguaacaguaacacacucuguuaaccuucuagaagacaagcauaacgggaaacuaugcaaacuaagagggguagccccauugcauuuggguaaauguaacauugcuggcuggauccugggaaauccagagugugaaucacucuccacagcaagcucaugguccuacauuguggaaacaucuaguucagacaauggaacguguuacccaggagauuucaucgauuaugaggagcuaagagagcaauugagcucagugucaucauuugaaagguuugagauauuccccaagacaaguucauggcccaaucaugauucgaacaaagguguaacggcagcauguccucaugcuggagcaaaaagcuucuacaaaaauuuaauauggcuagucaaaaaaggaaauucauacccaaagcucagcaaauccuacauuaaugauaaagggaaagaaguccucgugcuauggggcauucaccauccaucuacuagugcugaccaacaaagucucuaucagaaugcagaugcauauguuuuuguggggucaucaagauacagcaagaaguucaagccggaaauagcaauaagacccaaagugagggaucaagaagggagaaugaacuauuacuggacacuaguagagccgggagacaaaauaacauucgaagcaacuggaaaucuagugguaccgagauaugcauucgcaauggaaagaaaugcuggaucugguauuaucauuucagauacaccaguccacgauugcaauacaacuugucagacacccaagggugcuauaaacaccagccucccauuucagaauauacauccgaucacaauuggaaaauguccaaaauauguaaaaagcacaaaauugagacuggccacaggauugaggaaugucccgucuauucaaucuagaggccuauuuggggccauugccgguuucauugaagggggguggacagggaugguagauggaugguacgguuaucaccaucaaaaugagcaggggucaggauaugcagccgaccugaagagcacacagaaugccauugacgagauuacuaacaaaguaaauucuguuauugaaaagaugaauacacaguucacagcaguagguaaagaguucaaccaccuggaaaaaagaauagagaauuuaaauaaaaaaguugaugaugguuuccuggacauuuggacuuacaaugccgaacuguugguucuauuggaaaaugaaagaacuuuggacuaccacgauucaaaugugaagaacuuauaugaaaagguaagaagccagcuaaaaaacaaugccaaggaaauuggaaacggcugcuuugaauuuuaccacaaaugcgauaacacgugcauggaaagugucaaaaaugggacuuaugacuacccaaaauacucagaggaagcaaaauuaaacagagaagaaauagaugggguaaagcuggaaucaacaaggauuuaccagauuuuggcgaucuauucaacugucgccaguucauugguacugguagucucccugggggcaaucaguuucuggaugugcucuaaugggucucuacaguguagaauauguauuuaa

SEQ ID NO: 35054 - RNA, 1701 nt, Artificial Sequence; identical to SEQ ID NO: 34681
  derived and/or modified CDS sequence (wt) from hemagglutinin__InfluenzaA__ACT66146

SEQ ID NO: 35055 - RNA, 1701 nt, Artificial Sequence; identical to SEQ ID NO: 34965
  derived and/or modified CDS sequence (wt) from hemagglutinin__InfluenzaA__ACT66155

SEQ ID NO: 35056 - RNA, 1701 nt, Artificial Sequence
  derived and/or modified CDS sequence (wt) from hemagglutinin__InfluenzaA__ACT66162
auggaggcaauacuaguaguucugcuauauacauuugcaaccgcaaaugcagacacauuauguauagguuaucaugcgaacaauucaacagacacuguagacacaguacuagaaaagaauguaacaguaacacacucuguuaaccuucuagaagacaagcauaacgggaaacuaugcaaacuaagagggguagccccauugcauuuggguaaauguaacauugcuggcuggauccugggaaauccagagugugaaucacucuccacagcaagcucaugguccuacauuguggaaacaucuaguucagacaauggaacguguuacccaggagauuucaucgauuaugaggagcuaagagagcauuugagcucagugucaucauuugaaagguuugagauauuccccaagacaaguucauggcccaaucaugacucgaacaaagguguaacggcagcauguccucaugcuggagcaaaaagcuucuacaaaaauuuaauauggcuaguuaaaaaaggaaauucauacccaaagcucagcaaauccuacauuaaugauaaagggaaagaaguccucgugcuauggggcauucaccauccaucuacuagugcugaccaacaaagucucuaucagaaugcagaugcauauguuuuuguggggucaucaagauacagcaagaaguucaagccggaaauagcaauaagacccaaagugagggaucaagaagggagaaugaacuauuacuggacacuaguagagccgggagacaaaauaacauucgaagcaacuggaaaucuagugguaccgagauaugcauucgcaauggaaagaaaugcuggaucugguauuaucauuucagauacaccaguccacgauugcaauacaacuugucagacacccaagggugcuauaaacaccagccucccauuucagaauauacauccgaucacaauuggaaaauguccaaaauauguaaaaagcacaaaauugagacuggccacaggauugaggaaugucccgucuauucaaucuagaggccuauuuggggccauugccgguuucauugaagggggguggacagggaugguagauggaugguacgguuaucaccaucaaaaugagcaggggucaggauaugcagccgaccugaagagcacacagaaugccauugacgagauuacuaacaaaguaaauucuguuauugaaaagaugaauacacaguucacagcaguagguaaagaguucaaccacuuggaaaaaagaauagagaauuuaaauaaaaaaguugaugaugguuuccuggacauuuggacuuacaaugccgaacuguugguucuauuggaaaaugaaagaacuuuggacuaccacgauucaaaugugaagaacuuauaugaaaagguaagaagccaguuaaaaaacaaugccaaggaaauuggaaacggcugcuuugaauuuuaccacaaaugcgauaacacgugcauggaaagugucaaaaaugggacuuaugacuacccaaaauacucagaggaagcaaaauuaaacagagaagaaauagaugggguaaagcuggaaucaacaaggauuuaccagauuuuggcgauuuauucaacugucgccaguucauugguacugguagucucccugggggcaaucaguuucuggaugugcucuaaugggucucuacaguguagaauauguauuuaa

SEQ ID NO: 35057 - RNA, 1701 nt, Artificial Sequence; identical to SEQ ID NO: 34681
  derived and/or modified CDS sequence (wt) from hemagglutinin__InfluenzaA__ACT67239

SEQ ID NO: 35058 - RNA, 1701 nt, Artificial Sequence; identical to SEQ ID NO: 34681
  derived and/or modified CDS sequence (wt) from hemagglutinin__InfluenzaA__ACT67255

SEQ ID NO: 35059 - RNA, 1701 nt, Artificial Sequence; identical to SEQ ID NO: 34676
  derived and/or modified CDS sequence (wt) from hemagglutinin__InfluenzaA__ACT68102

SEQ ID NO: 35060 - RNA, 1701 nt, Artificial Sequence
  derived and/or modified CDS sequence (wt) from hemagglutinin__InfluenzaA__ACT68103
augaaggcaauacuaguaguucugcuauauacauuugcaaccgcaaaugcagacacauuauguauagguuaucaugcgaacaauucaacagacacuguagacacaguacuagaaaagaauguaacaguaacacacucuguuaaccuucuagaagacaagcauaacgggaaacuaugcaaacuaagagggguagccccauugcauuuggguaaauguaacauugcuggcuggauccugggaaauccagagugugaaucacucuccacagcaagcucaugguccuacauuguggaaacaucuaguucagacaauggaacguguuacccaggagauuucaucgauuaugaggagcuaagagagcaauugagcucagugucaucauuugaaagguuugagauauuccccaagacaaguucauggcccaaucaugacucgaacaaagguguaacggcagcauguccucaugcuggagcaaaaagcuucuacaaaaauuuaauauggcuaguuaaaaaaggaaauucauacccaaagcucagcaaauccuacauuaaugauaaagggaaagaaguccucgugcuauggggcauucaccauccaucuacuagugcugaccaacaaagucucuaucagaaugcagaugcauauguuuuuguggggucaucaagauacagcaagaaguucaagccggaaauagcaauaagacccaaagugagggaucaagaagggagaaugaacuauuacuggacacuaguagagccgggagacaaaauaacauucgaagcaacuggaaaucuagugguaccgagauaugcauucgcaauggaaagaaaugcuggaucugguauuaucauuucagauacaccaguccacgauugcaauacaacuugucagacacucaagggugcuauaaacaccagccucccauuucagaauauacauccgaucacaauuggaaaauguccaaaauauguaaaaagcacaaaauugagacuggccacaggauugaggaaugucccgucuauucaaucuagaggccuauuuggggccauugccgguuucauugaagggggguggacagggaugguagauggaugguacgguuaucaccaucaaaaugagcaggggucaggauaugcagccgaccugaagagcacacagaaugccauugacgagauuacuaacaaaguaaauucuguuauugaaaagaugaauacacaguucacagcaguagguaaagaguucaaccaccuggaaaaaagaauagagaauuuaaauaaaaaaguugaugaugguuuccuggacauuuggacuuacaaugccgaacuguugguucuauuggaaaaugaaagaacuuuggacuaccacgauucaaaugugaagaacuuauaugaaaagguaagaagccagcuaaaaaacaaugccaaggaaauuggaaacggcugcuuugaauuuuaccacaaaugcgauaacacgugcauggaaagugucaaaaaugggacuuaugacuacccaaaauacucagaggaagcaaaauuaaacagagaagaaauagaugggguaaagcuggaaucaacaaggauuuaccagauuuuggcgaucuauucaacugucgccaguucauugguacugguagucucccugggggcaaucaguuucuggaugugcucuaaugggucucuacaguguagaauauguauuuaa

SEQ ID NO: 35061 - RNA, 1701 nt, Artificial Sequence; identical to SEQ ID NO: 34676
  derived and/or modified CDS sequence (wt) from hemagglutinin__InfluenzaA__ACT68104

SEQ ID NO: 35062 - RNA, 1701 nt, Artificial Sequence
  derived and/or modified CDS sequence (wt) from hemagglutinin__InfluenzaA__ACT68105
augaaagcaauacuaguaguucugcuauauacauuugcaaccgcaaaugcagacacauuauguauagguuaucaugcgaacaauucaacagacacuguagacacaguacuagaaaagaauguaacaguaacacacucuguuaaccuucuagaagacaagcauaacgggaaacuaugcaaacuaagagggguagccccauugcauuuggguaaauguaacauugcuggcuggauccugggaaauccagagugugaaucacucuccacagcaagcucaugguccuacauuguggaaacaucuaguucagacaauggaacguguuacccaggagauuucaucgauuaugaggagcuaagagagcaauugagcucagugucaucauuugaaagguuugagauauuccccaagacaaguucauggcccaaucaugacucgaacaaagguguaacggcagcauguccucaugcuggagcaaaaagcuucuacaaaaauuuaauauggcuaguuaaaaaaggaaauucauacccaaagcucagcaaauccuacauuaaugauaaagggaaagaaguccucgugcuauggggcauucaccauccaucuacuagugcugaccaacaaagucucuaucagaaugcagaugcauauguuuuuguggggucaucaaaauacagcaagaaguucaagccggaaauagcaauaagacccaaagugagggaucaagaagggagaaugaacuauuacuggacacuaguagagccgggagacaaaauaacauucgaagcaacuggaaaucuagugguaccgagauaugcauucgcaauggaaagaaaugcuggaucugguauuaucauuucagauacaccaguccacgauugcaauacaacuugucagacacccaagggugcuauaaacaccagccucccauuucagaauauacauccgaucacaauuggaaaauguccaaaauauguaaaaagcacaaaauugagacuggccacaggauugaggaaugucccgucuauucaaucuagaggccuauuuggggccauugccgguuucauugaagggggguggacagggaugguagauggaugguacgguuaucaccaucaaaaugagcaggggucaggauaugcagccgaccugaagagcacacagaaugccauugacgagauuacuaacaaaguaaauucuguuauugaaaagaugaauacacaguucacagcaguagguaaagaguucaaccaccuggaaaaaagaauagagaauuuaaauaaaaaaguugaugaugguuuccuggacauuuggacuuacaaugccgaacuguugguucuauuggaaaaugaaagaacuuuggacuaccacgauucaaaugugaagaacuuauaugaaaagguaagaagccagcuaaaaaacaaugccaaggaaauuggaaacggcugcuuugaauuuuaccacaaaugcgauaacacgugcauggaaagugucaaaaaugggacuuaugacuacccaaaauacucaggggaagcaaaauuaaacagagaagaaauagaugggguaaagcuggaaucaacaaggauuuaccagauuuuggcgaucuauucaacugucgccaguucauugguacugguagucucccugggggcaaucaguuucuggaugugcucuaaugggucucuacaguguagaauauguauuuaa

SEQ ID NO: 35063 - RNA, 1701 nt, Artificial Sequence; identical to SEQ ID NO: 34705
  derived and/or modified CDS sequence (wt) from hemagglutinin__InfluenzaA__ACT68106

SEQ ID NO: 35064 - RNA, 1701 nt, Artificial Sequence; identical to SEQ ID NO: 34705
  derived and/or modified CDS sequence (wt) from hemagglutinin__InfluenzaA__ACT68107

SEQ ID NO: 35065 - RNA, 1701 nt, Artificial Sequence; identical to SEQ ID NO: 34898
  derived and/or modified CDS sequence (wt) from hemagglutinin__InfluenzaA__ACT68108

SEQ ID NO: 35066 - RNA, 1701 nt, Artificial Sequence
  derived and/or modified CDS sequence (wt) from hemagglutinin__InfluenzaA__ACT68109
augaaggcaauacuaguaguucugcuauauacauuugcaaccgcaaauacagacacauuauguauagguuaucaugcgaacaauucaacagacacuguagacacaguacuagaaaagaauguaacaguaacacacucuguuaaccuucuagaagacaagcauaacgggaaacuaugcaaacuaagagggguagccccauugcauuuggguaaauguaacauugcuggcuggauccugggaaauccagagugugaaucacucuccacagcaagcucaugguccuacauuguggaaacaucuaguucagacaauggaacguguuacccaggagauuucaucgauuaugaggagcuaagagagcaauugagcucagugucaucauuugaaagguuugagauauuccccaagacaaguucauggcccaaucaugacucgaacaaagguguaacggcagcauguccucaugcuggagcaaaaagcuucuacaaaaauuuaauauggcuaguuaaaaaaggaaauucauacccaaagcucagcaaauccuacauuaaugauaaagggaaagaaguccucgugcuauggggcauucaccauccaucuacuagugcugaccaacaaagucucuaucagaaugcagaugcauauguuuuuguggggacaucaagauacagcaagaaguucaagccggaaauagcaauaagacccaaagugagggaucaagaagggagaaugaacuauuacuggacacuaguagagccgggagacaaaauaacauucgaagcaacuggaaaucuagugguaccgagauaugcauucgcaauggaaagaaaugcuggaucugguauuaucauuucagauacaccaguccacgauugcaauacaacuugucagacacccaagggugcuauaaacaccagccucccauuucagaauauacauccgaucacaauuggaaaauguccaaaauauguaaaaagcacaaaauugagacuggccacaggauugaggaaugucccgucuauucaaucuagaggccuauuuggggccauugccgguuucauugaagggggguggacagggaugguagauggaugguacgguuaucaccaucaaaaugagcaggggucaggauaugcagccgaccugaagagcacacagaaugccauugacgagauuacuaacaaaguaaauucuguuauugaaaagaugaauacacaguucacagcaguagguaaagaguucaaccaccuggaaaaaagaauagagaauuuaaauaaaaaaguugaugaugguuuccuggacauuuggacuuacaaugccgaacuguugguucuauuggaaaaugaaagaacuuuggacuaccacgauucaaaugugaagaacuuauaugaaaagguaagaagccaguuaaaaaacaaugccaaggaaauuggaaacggcugcuuugaauuuuaccacaaaugcgauaacacgugcauggaaagugucaaaaaugggacuuaugacuacccaaaauacucagaggaagcaaaauuaaacagagaagaaauagaugggguaaagcuggaaucaacaaggauuuaccagauuuuggcgaucuauucaacugucgccaguucauugguacugguagucucccugggggcaaucaguuucuggaugugcucuaaugggucucuacaguguagaauauguauuuaa

SEQ ID NO: 35067 - RNA, 1701 nt, Artificial Sequence; identical to SEQ ID NO: 34676
  derived and/or modified CDS sequence (wt) from hemagglutinin__InfluenzaA__ACT68110

SEQ ID NO: 35068 - RNA, 1701 nt, Artificial Sequence
  derived and/or modified CDS sequence (wt) from hemagglutinin__InfluenzaA__ACT68112
augaaggcaauacuaguaguucugcuauauacauuugcaaccgcaaaugcagacacauuauguauagguuaucaugcgaacaauucaacagacacuguagacacaguacuagaaaagaauguaacaguaacacacucuguuaaccuucuagaagacaagcauaacgggaaacuaugcaaacuaagagggguagccccauugcauuuggguaaauguaacauugcuggcuggauccugggaaauccagagugugaaucacucuccacagcaagcucaugguccuacauuguggaaacaucuaguucagacaauggaacguguuacccaggagauuucaucgauuaugaggagcuaagagagcaauugagcucagugucaucauuugaaagguuugagauauuccccaagacaaguucauggcccaaucaugacucgaacaaagguguaacggcagcauguccucaugcuggagcaaaaagcuucuacaaaaauuuaauauggcuaguuaaaaaaggaaauucauacccaaagcucagcaaauccuacauuaaugauaaagggaaagaaguccucgugcuauggggcauucaccauccaucuacuagugcugaccaacaaagucucuaucagaaugcagaugcauauguuuuuguggggucaucaagauacagcaagaaguucaagccggaaauagcaauaagacccaaagugagggaucaagaagggagaaugaacuauuacuggacacuaguagagccgggagacaaaauaacauucgaagcaacuggaaaucuagugguaccgagauaugcauucgcaauggaaagaaaugcuggaucugguauuaucauuucagauacaccaguccacgauugcaauacaacuugucagacacccaagggugcuauaaacaccagccucccauuucagaauauacauccgaucacaauuggaaaauguccaaaauauguaaaaagcacaaaauugagacuggccacaggauugaggaaugucccgucuauucaaucuagaggccuauuuggggccauugccgguuucauugaagggggguggacagggaugguagauggaugguacgguuaucaccaucaaaaugagcaggggucaggauaugcagccgaccugaagagcacacagaaugccauugacgagauuacuaacaaaguaaauucuguuauugaaaagaugaauacacaguucacagcaguagguaaagaguucaaccaccuggaaaaaagaauagagaauuuaaauaaaaaaguugaugaugguuuccuggacauuuggacuuacaaugccgaacuguugguucuauuggaaaaugaaagaacucuggacuaccacgauucaaaugugaagaacuuauaugaaaagguaagaagccagcuaaaaaacaaugccaaggaaauuggaaacggcugcuuugaauuuuaccacaaaugcgauaacacgugcauggaaagugucaaaaaugggacuuaugacuacccaaaauacucagaggaagcaaaauuaaacagagaagaaauagaugggguaaagcuggaaucaacaaggauuuaccagauuuuggcgaucuauucaacugucgccaguucauugguacugguagucucccugggggcaaucaguuucuggaugugcucuaaugggucucuacaguguagaauauguauuuaa

SEQ ID NO: 35069 - RNA, 1701 nt, Artificial Sequence; identical to SEQ ID NO: 34705
  derived and/or modified CDS sequence (wt) from hemagglutinin__InfluenzaA__ACT68113

SEQ ID NO: 35070 - RNA, 1701 nt, Artificial Sequence; identical to SEQ ID NO: 34676
  derived and/or modified CDS sequence (wt) from hemagglutinin__InfluenzaA__ACT68115

SEQ ID NO: 35071 - RNA, 1701 nt, Artificial Sequence; identical to SEQ ID NO: 34676
  derived and/or modified CDS sequence (wt) from hemagglutinin__InfluenzaA__ACT68119

SEQ ID NO: 35072 - RNA, 1701 nt, Artificial Sequence
  derived and/or modified CDS sequence (wt) from hemagglutinin__InfluenzaA__ACT79133
augaaggcaauacuaguaguucugcuauauacauuugcaaccgcaaaugcagacacauuauguauagguuaucaugcgaacaauucaacagacacuguagacacaguacuagaaaagaauguaacaguaacacacucuguuaaccuucuagaagacaagcauaacgggaaacuaugcaaacuaagagggguagccccauugcauuuggguaaauguaacauugcuggcuggauccugggaaauccagagugugaaucacucuccacagcaagcucaugguccuacauuguggaaacaucuaguucagacaauggaacguguuacccaggagauuucaucgauuaugaggagcuaagagagcaauugagcucagugucaucauuugaaagguuugagauauuccccaagacaaguucauggcccaaucaugacucgaacaaagguguaacggcagcauguccucaugcuggagcaaaaagcuucuacaaaaauuuaauauggcuaguuaaaaaaggaaauucauacccaaagcucagcaaauccuacauuaaugauaaagggaaagaaguccucgugcuauggggcauucaccauccaucuacuagugcugaccaacaaagucucuaucagaaugcagaugcauauguuuuuguggggacaucaagauacagcaagaaguucaagccggaaauagcaauaagacccaaagugagggaucaagaagggagaaugaacuauuacuggaaacuaguagagccgggagacaaaauaacauucgaagcaacuggaaaucuagugguaccgagauaugcauucgcaauggaaagaaaugcuggaucugguauuaucauuucagauacaccaguccacgauugcaauacaacuugucagacacccaagggugcuauaaacaccagccucccauuucagaauauacauccgaucacaauuggaaaauguccaaaauauguaaaaagcacaaaauugagacuggccacaggauugaggaaugucccgucuauucaaucuagaggccuauuuggggccauugccgguuucauugaagggggguggacagggaugguagauggaugguacgguuaucaccaucaaaaugagcaggggucaggauaugcagccgaccugaagagcacacagaaugccauugacgagauuacuaacaaaguaaauucuguuauugaaaagaugaauacacaguucacagcaguagguaaagaguucaaccaccuggaaaaaagaauagagaauuuaaauaaaaaaguugaugaugguuuccuggacauuuggacuuacaaugccgaacuguugguucuauuggaaaaugaaagaacuuuggacuaccacgauucaaaugugaagaacuuauaugaaaagguaagaagccaguuaaaaaacaaugccaaggaaauuggaaacggcugcuuugaauuuuaccacaaaugcgauaacacgugcauggaaagugucaaaaaugggacuuaugacuacccaaaauacucagaggaagcaaaauuaaacagagaagaaauagaugggguaaagcuggaaucaacaaggauuuaccagauuuuggcgaucuauucaacugucgccaguucauugguacugguagucucccugggggcaaucaguuucuggaugugcucuaaugggucucuacaguguagaauauguauuuaa

SEQ ID NO: 35073 - RNA, 1701 nt, Artificial Sequence
  derived and/or modified CDS sequence (wt) from hemagglutinin__InfluenzaA__ACT79143
augaaggcaauacuaguaguucugcuauauacauuugcaaccgcaaaugcagacacauuauguauagguuaucaugcgaacaauucaacagacacuguagacacaguacuagaaaagaauguaacaguaacacacucuguuaaccuucuagaagacaagcauaacgggaaacuaugcaaacuaagagggguagccccauugcauuuggguaaauguaacauugcuggcuggauccugggaaauccagagugugaaucacucuccacagcaagcucaugguccuacauuguggaaacaucuaguucagacaauggaacguguuacccaggagauuucaucgauuaugaggagcuaagagagcaauugagcucagugucaucauuugaaagguuugagauauuccccaagacaaguucauggcccaaucaugacucgaacaaagguguaacggcagcauguccucaugcuggagcaaaaagcuucuacaaaaauuuaauauggcuaguuaaaaaaggaaauucauacccaaagcucagcaaauccuacauuaaugauaaagggaaagaaguccucgugcuauggggcauucaccauccaucuacuagugcugaccaacaaagucucuaucagaaugcagaugcauauguuuuuguggggucaucaagauacagcaagaaguucaagccggaaauagcaauaagacccaaagugagggaucaagaagggagaaugaacuauuacuggacacuaguagagccgggagacaaaauaacauucgaagcaacuggaaaucuagugguaccgagauaugcauucgcaauggaaagaaaugcuggaucugguauuaucauuucagauacaccaguucacgauugcaauacaacuugucagacacccaaaggugcuauaaacaccagccucccauuucagaauauacauccgaucacaauuggaaaauguccaaaauauguaaaaagcacaaaauugagacuggccacaggauugaggaaugucccgucuauucaaucuagaggccuauuuggggccauugccgguuucauugaagggggguggacagggaugguagauggaugguacgguuaucaccaucaaaaugagcaggggucaggauaugcagccgaccugaagagcacacagaaugccauugacgagauuacuaacaaaguaaauucuguuauugaaaagaugaauacacaguucacagcaguagguaaagaguucaaccaccuggaaaaaagaauagagaauuuaaauaaaaaaguugaugaugguuuccuggacauuuggacuuacaaugccgaacuguugguucuauuggaaaaugaaagaacuuuggacuaccacgauucaaaugugaagaacuuauaugaaaagguaagaagccagcuaaaaaacaaugccaaggaaauuggaaacggcugcuuugaauuuuaccacaaaugcgauaacacgugcauggaaagugucaaaaaugggacuuaugacuacccaaaauacucagaggaagcaaaauuaaacagagaagaaauagaugggguaaagcuggaaucaacaaggauuuaccagauuuuggcgaucuauucaacugucgccaguucauugguacugguagucucccugggggcaaucaguuucuggaugugcucuaaugggucucuacaguguagaauauguauuuaa

SEQ ID NO: 35074 - RNA, 1701 nt, Artificial Sequence; identical to SEQ ID NO: 34747
  derived and/or modified CDS sequence (wt) from hemagglutinin__InfluenzaA__ACT79153

SEQ ID NO: 35075 - RNA, 1701 nt, Artificial Sequence; identical to SEQ ID NO: 34994
  derived and/or modified CDS sequence (wt) from hemagglutinin__InfluenzaA__ACT79163

SEQ ID NO: 35076 - RNA, 1701 nt, Artificial Sequence; identical to SEQ ID NO: 34994
  derived and/or modified CDS sequence (wt) from hemagglutinin__InfluenzaA__ACT79173

SEQ ID NO: 35077 - RNA, 1701 nt, Artificial Sequence
  derived and/or modified CDS sequence (wt) from hemagglutinin__InfluenzaA__ACT79625
augaaggcaauacuaguaguucugcuauauacauuugcaaccgcaaaugcagacacauuauguauagguuaucaugcgaacaauucaacagacacuguagacacaguacuagaaaagaauguaacaguaacacacucuguuaaccuucuagaagacaagcauaacgggaaacuaugcaaacuaagagggguagccccauugcauuuggguaaauguaacauugcuggcuggauccugggaaauccagagugugaaucacucuccacagcaagcucaugguccuacauuguggaaacaucuaguucagacaauggaacguguuacccaggagauuucaucgauuaugaggagcuaagagagcaauugagcucagugucaucauuugaaagguuugagauauuccccaagacaaguucauggcccaaucaugacucgaacaaagguguaacgacagcauguccucaugcuggagcaaaaagcuucuacaaaaauuuaauauggcuaguuaaaaaaggaaauucauacccaaagcucagcaaauccuacauuaaugauaaagggaaagaaguccucgugcuauggggcauucaccauccaucuacuagugcugaccaacaaagucucuaucagaaugcagaugcauauguuuuuguggggacaucaagauacagcaagaaguucaagccggaaauagcaauaagacccaaagugagggaucaagaagggagaaugaacuauuacuggacacuaguagagccgggagacaaaauaacauucgaagcaacuggaaaucuagugguaccgagauaugcauucgcaauggaaagaaaugcuggaucugguauuaucauuucagauacaccaguccacgauugcaauacaacuugucagacacccaagggugcuauaaacaccagccucccauuucagaauauacauccgaucacaauuggaaaauguccaaaauauguaaaaagcacaaaauugagacuggccacaggauugaggaaugucccgucuauucaaucuagaggccuauuuggggccauugccgguuucauugaagggggguggacagggaugguagauggaugguacgguuaucaccaucaaaaugagcaggggucaggauaugcagccgaccugaagagcacacagaaugccauugacgagauuacuaacaaaguaaauucuguuauugaaaagaugaauacacaguucacagcaguagguaaagaguucaaccaccuggaaaaaagaauagagaauuuaaauaaaaaaauugaugaugguuuccuggacauuuggacuuacaaugccgaacuguugguucuauugaaaaaugaaagaacuuuggacuaccacgauucaaaugugaagaacuuauaugaaaagguaagaagccaguuaaaaaacaaugccaaggaaauuggaaacggcugcuuugaauuuuaccacaaaugcgauaacacgugcauggaaagugucaaaaaugggacuuaugacuacccaaaauacucagaggaagcaaaauuaaacagagaagaaauagaugggguaaagcuggaaucaacaaggauuuaccagauuuuggcgaucuauucaacugucgccaguucauugguacugguagucucccugggggcaaucaguuucuggaugugcucuaaugggucucuacaguguagaauauguauuuaa

SEQ ID NO: 35078 - RNA, 1701 nt, Artificial Sequence
  derived and/or modified CDS sequence (wt) from hemagglutinin__InfluenzaA__ACT79627
augaaggcaauacuaguaguucugcuauauacauuugcaaccgcaaaugccgacacauuauguauagguuaucaugcgaacaauucaacagacacuguagacacaguacuagaaaagaauguaacaguaacacacucuguuaaccuucuagaagacaagcauaacgggaaacuaugcaaacuaagagggguagccccauugcauuuggguaaauguaacauugcuggcuggauccugggaaauccagagugugaaucacucuccacagcaagcucaugguccuacauuguggaaacaucuaguucagacaauggaacguguuacccaggagauuucaucgauuaugaggagcuaagagagcaauugagcucagugucaucauuugaaagguuugagauauuccccaagacaaguucauggcccaaucaugacucgaacaaagguguaacggcagcauguccucaugcuggagcaaaaagcuucuacaaaaauuuaauauggcuaguuaaaaaaggaaauucauacccaaagcucagcaaauccuacauuaaugauaaagggaaagaaguccucgugcuauggggcauucaccauccaucuacuagugcugaccaacaaagucucuaucagaaugcagaugcauauguuuuuguggggucaucaagauacagcaagaaguucaagccggaaauagcaauaagacccaaagugagggaucaagaagggagaaugaacuauuacuggacacuaguagagccgggagacaaaauaacauucgaagcaacuggaaaucuagugguaccgagauaugcauucgcaauggaaagaaaugcuggaucugguauuaucauuucagauacaccaguccacgauugcaauacaacuugucagacacccaagggugcuauaaacaccagccucccauuucagaauauacauccgaucacaauuggaaaauguccaaaauauguaaaaagcacaaaauugagacuggccacaggauugaggaaugucccgucuauucaaucuagaggccuauuuggggccauugccgguuucauugaagggggguggacagggaugguagauggaugguacgguuaucaccaucaaaaugagcaggggucaggauaugcagccgaccugaagagcacacagaaugccauugacgagauuacuaacaaaguaaauucuguuauugaaaagaugaauacacaguucacagcaguagguaaagaguucaaccaccuggaaaaaagaauagagaauuuaaauaaaaaaguugaugaugguuuccuggacauuuggacuuacaaugccgaacuguugguucuauuggaaaaugaaagaacuuuggacuaccacgauucaaaugugaagaacuuauaugaaaagguaagaagccagcuaaaaaacaaugccaaggaaauuggaaacggcugcuuugaauuuuaccacaaaugcgauaacacgugcauggaaagugucaaaaaugggacuuaugacuacccaaaauacucagaggaagcaaaauuaaacagagaagaaauagaugggguaaagcuggaaucaacaaggauuuaccagauuuuggcgaucuauucaacugucgccaguucauugguacugguagucucccugggggcaaucaguuucuggaugugcucuaaugggucucuacaguguagaauauguauuuaa

SEQ ID NO: 35079 - RNA, 1701 nt, Artificial Sequence
  derived and/or modified CDS sequence (wt) from hemagglutinin__InfluenzaA__ACT82512
augaaggcaauacuaguaguucugcuauauacauuugcaaccgcaaaugcagacacauuauguauagguuaucaugcaaacaauucaacagacacuguagacacaguacuagaaaagaauguaacaguaacacacucuguuaaccuucuagaagacaagcauaacgggaaacuaugcaaacuaagagggguagccccauugcauuuggguaaauguaacauugcuggcuggauccugggaaauccagagugugaaucacucuccacagcaagcucaugguccuacauuguggaaacaucuaguucagacaauggaacguguuacccaggagauuucaucgauuaugaggagcuaagagagcaauugagcucagugucaucauuugaaagguuugagauauuccccaagacaaguucauggcccaaucaugacucgaacaaagguguaacggcagcauguccucaugcuggagcaaaaagcuucuacaaaaauuuaauauggcuaguuaaaaaaggaaauucauacccaaagcucagcaaauccuacauuaaugauaaagggaaagaaguccucgugcuauggggcauucaccauccaucuacuagugcugaccaacaaagucucuaucagaaugcagaugcauauguuuuuguggggacaucaagauacagcaagaaguucaagccggaaauagcaauaagacccaaagugagggaucaagaagggagaaugaacuauuacuggacacuaguagagccgggagacaaaauaacauucgaagcaacuggaaaucuagugguaccgagauaugcauucgcaauggaaagaaaugcuggaucugguauuaucauuucagauacaccaguccacgauugcaauacaacuugucagacacccaagggugcuauaaacaccagccucccauuucagaauauacauccgaucacaauuggaaaauguccaaaauauguaaaaagcacaaaauugagacuggccacaggauugaggaaugucccgucuauucaaucuagaggccuauuuggggccauugccgguuucauugaagggggguggacagggaugguagauggaugguacgguuaucaccaucaaaaugagcaggggucaggauaugcagccgaccugaagagcacacagaaugccauugacgagauuacuaacaaaguaaauucuguuauugaaaagaugaauacacaguucacagcaguagguaaagaguucaaccaccuggaaaaaagaauagagaauuuaaauaaaaaaguugaugaugguuuccuggacauuuggacuuacaaugccgaacuguugguucuauuggaaaaugaaagaacuuuggacuaccacgauucaaaugugaagaacuuauaugaaaagguaagaagccaguuuaaaaacaaugccaaggaaauuggaaacggcugcuuugaauuuuaccacaaaugcgauaacacgugcauggaaagugucaaaaaugggacuuaugacuacccaaaauacucagaggaagcaaaauuaaacagagaagaaauagaugggguaaagcuggaaucaacaaggauuuaccagauuuuggcgaucuauucaacugucgccaguucauugguacugguagucucccugggggcaaucaguuucuggaugugcucuaaugggucucuacaguguagaauauguauuuaa

SEQ ID NO: 35080 - RNA, 1701 nt, Artificial Sequence; identical to SEQ ID NO: 34681
  derived and/or modified CDS sequence (wt) from hemagglutinin__InfluenzaA__ACT82513

SEQ ID NO: 35081 - RNA, 1701 nt, Artificial Sequence
  derived and/or modified CDS sequence (wt) from hemagglutinin__InfluenzaA__ACT82514
augaaggcaauacuaguaguucugcuauauacauuugcaaccgcaaaugcagacacauuauguauagguuaucaugcgaacaauucaacagacacuguagacacaguacuagaaaagaauguaacaguaacacacucuguuaaccuucuagaagacaagcauaacgggaaacuaugcaaacuaagagggguagccccauugcauuuggguaaauguaacauugcuggcuggauccugggaaauccagagugugaaucacucuccacagcaagcucaugguccuacauuguggaaacaucuaguucagacaauggaacguguuacccaggagauuucaucgauuaugaggagcuaagagagcaauugagcucagugucaucauuugaaagguuugagauauuccccaagacaaguucauggcccaaucaugacucgaacaaagguguaacggcagcauguccucaugcuggagcaaaaagcuucuacaaaaauuuaauauggcuaguuaaaaaaggaaauucauacccaaagcucagcaaauccuacauuaaugauaaagggaaagaaguccucgugcuauggggcauucaccauccaucuacuagugcugaccaacaaagucucuaucagaaugcagaugcauauguuuuuguggggacaucaagauacagcaagaaguucaagccggaaauagcaauaagacccaaagugagggaucaagaagggagaaugaacuauuacuggacacuaguagagccgggagacaaaauaacauucgaagcaacuggaaaucuagugguaccgagauaugcauucgcaauggaaagaaaugcuggaucugguauuaucauuucaaauacaccaguccacgauugcaauacaacuugucagacacccaaggguucuauaaacaccagccucccauuucagaauauacauccgaucacaauuggaaaauguccaaaauauguaaaaagcacaaaauugagacuggccacaggauugaggaaugucccgucuauucaaucuagaggccuauuuggggccauugccgguuucauugaagggggguggacagggaugguagauggaugguacgguuaucaccaucaaaaugagcaggggucaggauaugcagccgaccugaagagcacacagaaugccauugacgagauuacuaacaaaguaaauucuguuauugaaaagaugaauacacaguucacagcaguagguaaagaguucaaccaccuggaaaaaagaauagagaauuuaaauaaaaaaguugaugaugguuuccuggacauuuggacuuacaaugccgaacuguugguucuauuggaaaaugaaagaacuuuggacuaccacgauucaaaugugaagaacuuauaugaaaagguaagaagccaguuaaaaaacaaugccaaggaaauuggaaacggcugcuuugaauuuuaccacaaaugcgauaacacgugcauggaaagugucaaaaaugggacuuaugacuacccaaaauacucagaggaagcaaaauuaaacagagaagaaauagaugggguaaagcuggaaucaacaaggauuuaccagauuuuggcgaucuauucaacugucgccaguucauugguacugguagucucccugggggcaaucaguuucuggaugugcucuaaugggucucuacaguguagaauauguauuuaa

SEQ ID NO: 35082 - RNA, 1701 nt, Artificial Sequence; identical to SEQ ID NO: 34681
  derived and/or modified CDS sequence (wt) from hemagglutinin__InfluenzaA__ACT82515

SEQ ID NO: 35083 - RNA, 1701 nt, Artificial Sequence
  derived and/or modified CDS sequence (wt) from hemagglutinin__InfluenzaA__ACT82516
augaaggcaauacuaguaguucugcuauauacauuugcaaccgcaaaugcagacacauuauguauagguuaucaugcgaacaauucaacagacacuguagacacaguacuagaaaagaauguaacaguaacacacucuguuaaccuucuagaagacaagcauaacgggaaacuaugcaaacuaagagggguagccccauugcauuuggguaaauguaacauugcuggcuggauccugggaaauccagagugugaaucacucuccacagcaagcucaugguccuacauuguggaaacaucuaguucagacaauggaacguguuacccaggagauuucaucgauuaugaggagcuaagagagcaauugagcucagugucaucauuugaaagguuugagauauuccccaagacaaguucauggcccaaucaugacucgaacaaagguguaacggcagcauguccucaugcuggagcaaaaagcuucuacaaaaauuuaauauggcuaguuaaaaaaggaaauucauacccaaagcucagcaaauccuacauuaaugauaaagggaaagaaguccucgugcuauggggcauucaccauccaucuacuagugcugaccaacaaagucucuaucagaaugcagaugcauauguuuuuguggggucaucaagauacagcaagaaguucaagccggaaauagcaauaagacccaaagugagggaucaagaagggagaaugaacuauuacuggacacuaguagagccgggagacaaaauaacauucgaagcaacuggaaaucuaaugguaccgagauaugcauucgcaauggaaagaaaugcuggaucugguauuaucauuucagauacaccaguccacgauugcaauacaacuugucagacacccaagggugcuauaaacaccagccucccauuucauaauauacauccgaucacaauuggaaaauguccaaaauauguaaaaagcacaaaauugagacuggccacaggauugaggaaugucccgucuauucaaucuagaggccuauuuggggccauugccgguuucauugaagggggguggacagggaugguagauggaugguacgguuaucaccaucaaaaugagcaggggucaggauaugcagccgaccugaagagcacacagaaugccauugacgagauuacuaacaaaguaaauucuguuauugaaaagaugaauacacaguucacagcaguagguaaagaguucaaccaccuggaaaaaagaauagagaauuuaaauaaaaagguugaugaugguuuccuggacauuuggacuuacaaugccgaacuguugguucuauuggaaaaugaaagaacuuuggacuaccacgauucaaaugugaagaacuuauaugaaaagguaagaagccaguuaaaaaacaaugccaaggaaauuggaaacggcugcuuugaauuuuaccacaaaugcgauaacacgugcauggaaagugucaaaaaugggacuuaugacuacccaaaauacucagaggaagcaaaauuaaacagagaagaaauagaugggguaaagcuggaaucaacaaggauuuaccagauuuuggcgaucuauucaacugucgccaguucauugguacugguagucucccugggggcaaucaguuucuggaugugcucuaaugggucucuacaguguagaauauguauuuaa

SEQ ID NO: 35084 - RNA, 1701 nt, Artificial Sequence; identical to SEQ ID NO: 34965
  derived and/or modified CDS sequence (wt) from hemagglutinin__InfluenzaA__ACT83795

SEQ ID NO: 35085 - RNA, 1701 nt, Artificial Sequence; identical to SEQ ID NO: 34965
  derived and/or modified CDS sequence (wt) from hemagglutinin__InfluenzaA__ACT83805

SEQ ID NO: 35086 - RNA, 1701 nt, Artificial Sequence; identical to SEQ ID NO: 34681
  derived and/or modified CDS sequence (wt) from hemagglutinin__InfluenzaA__ACT83815

SEQ ID NO: 35087 - RNA, 1701 nt, Artificial Sequence; identical to SEQ ID NO: 34681
  derived and/or modified CDS sequence (wt) from hemagglutinin__InfluenzaA__ACT83825

SEQ ID NO: 35088 - RNA, 1701 nt, Artificial Sequence; identical to SEQ ID NO: 34681
  derived and/or modified CDS sequence (wt) from hemagglutinin__InfluenzaA__ACT83835

SEQ ID NO: 35089 - RNA, 1701 nt, Artificial Sequence; identical to SEQ ID NO: 34774
  derived and/or modified CDS sequence (wt) from hemagglutinin__InfluenzaA__ACT83845

SEQ ID NO: 35090 - RNA, 1701 nt, Artificial Sequence
  derived and/or modified CDS sequence (wt) from hemagglutinin__InfluenzaA__ACT83855
augaaggcaauacuaguaguucugcuauauacauuugcaaccgcaaaugcagacacauuauguauagguuaucaugcgaacaauucaacagacacuguagacacaguacuagaaaagaauguaacaguaacacacucuguuaaccuucuagaagacaagcauaacgggaaacuaugcaaacuaagagggguagccccauugcauuuggguaaauguaauauugcuggcuggauccugggaaauccagagugugaaucacucuccacagcaagcucaugguccuacauuguggaaacaucuaguucagacaauggaacguguuacccaggagauuucaucgauuaugaggagcuaagagagcaauugagcucagugucaucauuugaaagguuugagauauuccccaagacaaguucauggcccaaucaugacucgaacaaagguguaacggcagcauguccucaugcuggagcaaaaagcuucuacaaaaauuuaauauggcuaguuaaaaaaggaaauucauacccaaagcucagcaaauccuacauuaaugauaaagggaaagaaguccucgugcuauggggcauucaccauccaucuacuagugcugaccaacaaagucucuaucagaaugcagaugcauauguuuuuguggggucaucaagauacagcaagaaguucaagccggaaauagcaauaagacccaaagugagggaucaagaagggagaaugaacuauuacuggacacuaguagagccgggagacaaaauaacauucgaagcaacuggaaaucuagugguaccgagauaugcauucgcaauggaaagaaaugcuggaucugguauuaucauuucagauacaccaguccacgauugcaauacaacuugucagacacccaagggugcuauaaacaccagccucccauuucagaauauacauccgaucacaauuggaaaauguccaaaauauguaaaaagcacaaaauugagacuggccacaggauugaggaaugucccgucuauucaaucuagaggccuauuuggggccauugccgguuucauugaagggggguggacagggaugguagauggaugguacgguuaucaccaucaaaaugagcaggggucaggauaugcagccgaccugaagagcacacagaaugccauugacgagauuacuaacaaaguaaauucuguuauugaaaagaugaauacacaguucacagcaguagguaaagaguucaaccaccuggaaaaaagaauagagaauuuaaauaaaaaaguugaugaugguuuccuggacauuuggacuuacaaugccgaacuguugguucuauuggaaaaugaaagaacuuuggacuaccacgauucaaaugugaagaacuuauaugaaaagguaagaagccagcuaaaaaacaaugccaaggaaauuggaaacggcugcuuugaauuuuaccacaaaugcgauaacacgugcauggaaagugucaaaaaugggacuuaugacuacccaaaauacucagaggaagcaaaauuaaacagagaagaaauagaugggguaaagcuggaaucaacaaggauuuaccagauuuuggcgaucuauucaacugucgccaguucauugguacugguagucucccugggggcaaucaguuucuggaugugcucuaaugggucucuacaguguagaauauguauuuaa

SEQ ID NO: 35091 - RNA, 1701 nt, Artificial Sequence; identical to SEQ ID NO: 34681
  derived and/or modified CDS sequence (wt) from hemagglutinin__InfluenzaA__ACT83865

SEQ ID NO: 35092 - RNA, 1701 nt, Artificial Sequence; identical to SEQ ID NO: 34965
  derived and/or modified CDS sequence (wt) from hemagglutinin__InfluenzaA__ACT83875

SEQ ID NO: 35093 - RNA, 1701 nt, Artificial Sequence; identical to SEQ ID NO: 34965
  derived and/or modified CDS sequence (wt) from hemagglutinin__InfluenzaA__ACT85999

SEQ ID NO: 35094 - RNA, 1701 nt, Artificial Sequence; identical to SEQ ID NO: 34965
  derived and/or modified CDS sequence (wt) from hemagglutinin__InfluenzaA__ACT86009

SEQ ID NO: 35095 - RNA, 1701 nt, Artificial Sequence; identical to SEQ ID NO: 34681
  derived and/or modified CDS sequence (wt) from hemagglutinin__InfluenzaA__ACT86019

SEQ ID NO: 35096 - RNA, 1701 nt, Artificial Sequence; identical to SEQ ID NO: 34774
  derived and/or modified CDS sequence (wt) from hemagglutinin__InfluenzaA__ACT86029

SEQ ID NO: 35097 - RNA, 1701 nt, Artificial Sequence; identical to SEQ ID NO: 34681
  derived and/or modified CDS sequence (wt) from hemagglutinin__InfluenzaA__ACT86039

SEQ ID NO: 35098 - RNA, 1701 nt, Artificial Sequence; identical to SEQ ID NO: 34681
  derived and/or modified CDS sequence (wt) from hemagglutinin__InfluenzaA__ACT86059

SEQ ID NO: 35099 - RNA, 1701 nt, Artificial Sequence; identical to SEQ ID NO: 34681
  derived and/or modified CDS sequence (wt) from hemagglutinin__InfluenzaA__ACT86069

SEQ ID NO: 35100 - RNA, 1701 nt, Artificial Sequence; identical to SEQ ID NO: 34681
  derived and/or modified CDS sequence (wt) from hemagglutinin__InfluenzaA__ACT86079

SEQ ID NO: 35101 - RNA, 1701 nt, Artificial Sequence; identical to SEQ ID NO: 34681
  derived and/or modified CDS sequence (wt) from hemagglutinin__InfluenzaA__ACT86089

SEQ ID NO: 35102 - RNA, 1701 nt, Artificial Sequence
  derived and/or modified CDS sequence (wt) from hemagglutinin__InfluenzaA__ACT86099
augaaggcaauacuaguaguucugcuauauacauuugcaaccgcaaaugcagacacauuauguauagguuaucaugcgaacaauucaacagacacuguagacacaguacuagaaaagaauguaacaguaacacacucuguuaaccuucuagaagacaagcauaacgggaaauuaugcaaacuaagagggguagccccauugcauuuggguaaauguaacauugcuggcuggauccugggaaauccagagugugaaucacucuccacagcaagcucaugguccuacauuguggaaacaucuaguucagacaauggaacguguuacccaggagauuucaucgauuaugaggagcuaagagagcaauugagcucagugucaucauuugaaagguuugagauauuccccaagacaaguucauggcccaaucaugacucgaacaaagguguaacggcagcauguccucaugcuggagcaaaaagcuucuacaaaaauuuaauauggcuaguuaaaaaaggaaauucauacccaaagcucagcaaauccuacauuaaugauaaagggaaagaaguccucgugcuauggggcauucaccauccaucuacuagugcugaccaacaaagucucuaucagaaugcagaugcauauguuuuuguggggacaucaagauacagcaagaaguucaagccggaaauagcaauaagacccaaagugagggaucaagaagggagaaugaacuauuacuggacacuaguagagccgggagacaaaauaacauucgaagcaacuggaaaucuagugguaccgagauaugcauucgcaauggaaagaaaugcuggaucugguauuaucauuucagauacaccaguccacgauugcaauacaacuugucagacacccaagggugcuauaaacaccagccucccauuucagaauauacauccgaucacaauuggaaaauguccaaaauauguaaaaagcacaaaauugagacuggccacaggauugaggaaugucccgucuauucaaucuagaggccuauuuggggccauugccgguuucauugaagggggguggacagggaugguagauggaugguacgguuaucaccaucaaaaugagcaggggucaggauaugcagccgaccugaagagcacacagaaugccauugacgagauuacuaacaaaguaaauucuguuauugaaaagaugaauacacaguucacagcaguagguaaagaguucaaccaccuggaaaaaagaauagagaauuuaaauaaaaaaguugaugaugguuuccuggacauuuggacuuacaaugccgaacuguugguucuauuggaaaaugaaagaacuuuggacuaccacgauucaaaugugaagaacuuauaugaaaagguaagaagccaguuaaaaaacaaugccaaggaaauuggaaacggcugcuuugaauuuuaccacaaaugcgauaacacgugcauggaaagugucaaaaaugggacuuaugacuacccaaaauacucagaggaagcaaaauuaaacagagaagaaauagaugggguaaagcuggaaucaacaaggauuuaccagauuuuggcgaucuauucaacugucgccaguucauugguacugguagucucccugggggcaaucaguuucuggaugugcucuaaugggucucuacaguguagaauauguauuuaa

SEQ ID NO: 35103 - RNA, 1701 nt, Artificial Sequence; identical to SEQ ID NO: 34965
  derived and/or modified CDS sequence (wt) from hemagglutinin__InfluenzaA__ACT86109

SEQ ID NO: 35104 - RNA, 1701 nt, Artificial Sequence; identical to SEQ ID NO: 34681
  derived and/or modified CDS sequence (wt) from hemagglutinin__InfluenzaA__ACT86119

SEQ ID NO: 35105 - RNA, 1701 nt, Artificial Sequence; identical to SEQ ID NO: 34965
  derived and/or modified CDS sequence (wt) from hemagglutinin__InfluenzaA__ACT86129

SEQ ID NO: 35106 - RNA, 1701 nt, Artificial Sequence; identical to SEQ ID NO: 34681
  derived and/or modified CDS sequence (wt) from hemagglutinin__InfluenzaA__ACT86139

SEQ ID NO: 35107 - RNA, 1701 nt, Artificial Sequence
  derived and/or modified CDS sequence (wt) from hemagglutinin__InfluenzaA__ACU00932
augaaggcaauacuaguaguucugcuauauacauuugcaaccgcaaaugcagacacauuauguauagguuaucaugcgaacaauucaacagacacuguagacacaguacuagaaaagaauguaacaguaacacacucuguuaaccuucuagaagacaagcauaacgggaaacuaugcaaacuaagagggguagccccauugcauuuggguaaauguaacauugcuggcuggauccugggaaauccagagugugaaucacucuccacagcaagcucaugguccuacauuguggaaacaucuaguucagacaauggaacguguuacccaggagauuucaucgauuaugaggagcuaagagagcaauugagcucagugucaucauuugaaagguuugagauauuccccaagacaaguucauggcccaaucaugacucgaacaaagguguaacggcagcauguccucaugcuggagcaaaaagcuucuacaaaaauuuaauauggcuaguuaaaaaaggaaauucauacccaaagcucagcaaauccuacauuaaugauaaagggaaagaaguccucgugcuauggggcauucaccauccaucuacuagugcugaccaacaaagucucuaucagaaugcagaugcauauguuuuuguggggacaucaagauacagcaagaauuucaagccggaaauagcaauaagacccaaagugagggaucaagaagggagaaugaacuauuacuggacacuaguagagccgggagacaaaauaacauucgaagcaacuggaaaucuagugguaccgagauaugcauucgcaauggaaagaaaugcuggaucugguauuaucauuucagauacaccaguccacgauugcaauacaacuugucagacacccaagggugcuauaaacaccagccucccauuucagaauauacauccgaucacaauuggaaaauguccaaaauauguaaaaagcacaaaauugagacuggccacaggauugaggaaugucccgucuauucaaucuagaggccuauuuggggccauugccgguuucauugaagggggguggacagggaugguagauggaugguacgguuaucaccaucaaaaugagcaggggucaggauaugcagccgaccugaagagcacacagaaugccauugacgagauuacuaacaaaguaaauucuguuauugaaaagaugaauacacaguucacagcaguagguaaagaguucaaccaccuggaaaaaagaauagagaauuuaaauaaaaaaguugaugaugguuuccuggacauuuggacuuacaaugccgaacuguugguucuauuggaaaaugaaagaacuuuggacuaccacgauucaaaugugaagaacuuauaugaaaagguaagaagccaguuaaaaaacaaugccaaggaaauuggaaacggcugcuuugaauuuuaccacaaaugcgauaacacgugcauggaaagugucaaaaaugggacuuaugacuacccaaaauacucagaggaagcaaaauuaaacagagaagaaauagaugggguaaagcuggaaucaacaaggauuuaccagauuuuggcgaucuauucaacugucgccaguucauugguacugguagucucccugggggcaaucaguuucuggaugugcucuaaugggucucuacaguguagaauauguauuuaa

SEQ ID NO: 35108 - RNA, 1701 nt, Artificial Sequence
  derived and/or modified CDS sequence (wt) from hemagglutinin__InfluenzaA__ACU00942
augaaggcaauacuaguaguucugcuauauacauuugcaaccgcaaaugcagacacauuauguauagguuaucaugcgaacaauucaacagacacuguagacacaguacuagaaaagaauguaacaguaacacacucuguuaaccuucuagaagacaagcauaacgggaaacuaugcaaacuaagagggguagccccauugcauuuggguaaauguaacauugcuggcuggauccugggaaauccagagugugaaucacucuccacagcaagcucaugguccuacauuguggaaacaucuaguucagacaauggaacguguuacccaggagauuucaucgauuaugaggagcuaagagagcaauugagcucagugucaucauuugaaagguuugagauauuccccaagacaaguucauggcccaaucaugacucgaacaaagguguaacggcagcauguccucaugcuggagcaaaaagcuucuacaaaaauuuaauauggcuaguuaaaaaaggaaauucauacccaaagcucagcaaauccuacauuaaugauaaagggaaagaaguccucgugcuauggggcauucaccauccaucuacuagugcugaccaacaaagucucuaucagaaugcagaugcauauguuuuuguggggacaucaagauacagcaagaaguucaagccggaaauagcaauaagacccaaagugagggaucaagaagggagaaugaacuauuacuggacacuaguagagccgggagacaaaauaacauuugaagcaacuggaaaucuagugguaccgagauaugcauucgcaauggaaagaaaugcuggaucugguauuaucauuucagauacaccaguccacgauugcaauacaacuugucagacacccaagggugcuauaaacaccagccucccauuucagaauauacauccgaucacaauuggaaaauguccaaaauauguaaaaagcacaaaauugagacuggccacaggauugaggaaugucccgucuauucaaucuagaggccuauuuggggccauugccgguuucauugaagggggguggacagggaugguagauggaugguacgguuaucaccaucaaaaugagcaggggucaggauaugcagccgaccugaagagcacacagaaugccauugacgagauuacuaacaaaguaaauucuguuauugaaaagaugaauacacaguucacagcaguagguaaagaguucaaccaccuggaaaaaagaauagagaauuuaaauaaaaaaguugaugaugguuuccuggacauuuggacuuacaaugccgaacuguugguucuauuggaaaaugaaagaacuuuggacuaccacgauucaaaugugaagaacuuauaugaaaagguaagaagccaguuaaaaaacaaugccaaggaaauuggaaacggcugcuuugaauuuuaccacaaaugcgauaacacgugcauggaaagugucaaaaaugggacuuaugacuacccaaaauacucagaggaagcaaaauuaaacagagaagaaauagaugggguaaagcuggaaucaacaaggauuuaccagauuuuggcgaucuauucaacugucgccaguucauugguacugguagucucccugggggcaaucaguuucuggaugugcucuaaugggucucuacaguguagaauauguauuuaa

SEQ ID NO: 35109 - RNA, 1701 nt, Artificial Sequence; identical to SEQ ID NO: 35108
  derived and/or modified CDS sequence (wt) from hemagglutinin__InfluenzaA__ACU00952

SEQ ID NO: 35110 - RNA, 1701 nt, Artificial Sequence
  derived and/or modified CDS sequence (wt) from hemagglutinin__InfluenzaA__ACU12494
augaagacuaucauugcuuugagcuacauuuuaugucugguuuucgcccaaaaacuuccuggaaaugacaacagcacagcaacgcugugccugggacaucaugcagugccaaacggaacgcuagugaaaacaaucacgaaugaucaaauugaagugacuaaugcuacugagcugguucagaguuccucaacagguagaauaugugacaguccucaccgaauccuugauggaaaaaauugcacacugauagaugcucuauugggagacccucauugugauggcuuccaaaauaaggaaugggaccuuuuuguugaacgcagcaaagcuuacagcaacuguuacccuuaugaugugccggauuaugccucccuuaggucacuaguugccucaucaggcacccuggaguuuaucaaugaagacuucaauuggacuggagucgcucagaguggggaaagcuaugcuugcaaaaggggaucuguuaaaaguuucuuuaguagauugaauugguugcacgaaucagauuacaaauauccagcgcugaacgugacuaugccaaacaauggcaaauuugacaaauuguacauuugggggguucaccacccgaucacggacagagaacaaaccagccuauauguucgagcaucagggagagucacagucuccaccaaaagaagccaacaaacugugaucccgaauaucggguccagacccuggguaaggggucuguccaguagaauaagcaucuauuggacaauagugaaaccgggagacauacuuuugauuaauagcaccgggaaccuaauugcuccucgggguuacuucaaaauacgaacugggaaaagcucgauaaugagaucagaugcacccauuggcaccugcaguucugaaugcaucacuccaaauggaagcauccccaaugacaaaccuuuucaaaacguaaacaggaucacauauggggcaugucccagauauguuaagcaaaacacucugaaauuggcaacagggaugcgaaauguaccagagaaacaaacuagaggcauauucggcgcaaucgcagguuucauagaaaaugguugggagggaaugguagacgguugguacgguuucaggcaucaaaauucugagggcacaggacaagcagcagaucuuaaaagcacucaagcagcaaucgaccaaaucaacgggaaacugaauagguuaaucgagaaaacgaacgagaaauuccaucaaaucgaaaaggaauucucagaaguagaagggagaauucaggaccucgagaaauauguugaagacacuaaaauagaucucuggucuuacaacgcggagcuucuuguugcccuggagaaccaacauacaauugaucugacugacucagaaaugaacaaacuguuugaaaaaacaaggaagcaacugagggaaaaugcugaggacaugggcaaugguugcuucaaaauauaccacaaaugugacaaugccugcauagggucaaucagaaauggaacuuaugaccaugauguauacagagacgaagcauuaaacaaccgguuccagaucaaagguguugagcugaagucaggauacaaagauuggauccuauggauuuccuuugccauaucaugcuuuuugcuuuguguuguuuugcugggguucaucaugugggccugccaaaaaggcaacauuaggugcaacauuugcauuuga

SEQ ID NO: 35111 - RNA, 1698 nt, Artificial Sequence; identical to SEQ ID NO: 34793
  derived and/or modified CDS sequence (wt) from hemagglutinin__InfluenzaA__ACU12505

SEQ ID NO: 35112 - RNA, 1701 nt, Artificial Sequence
  derived and/or modified CDS sequence (wt) from hemagglutinin__InfluenzaA__ACU12516
augaagacuaucauugcuuugagcuacauucuaugucugguuuucgcucaaaaacuucccggaaaugacaacagcacggcaacgcugugccuugggcaccaugcaguaccaaacggaacgauagugaaaacaaucacaaaugaccaaauugaaguuacuaaugcuacugagcugguucagaguuccucaacagguggaauaugcgacaguccucaucagauccucgauggagaaaacugcacacuaguagaugcucuauugggagacccucagugugauggcuuccaaaauaaaaaaugggaccuuuuuguugaacgcagcaaagccuacagcaacuguuacccuuaugaugugccggauuaugccucccuuaggucacuaguugccucauccggcacacuggaguuuaacaaugaaagcuucaauuggacuggaguaacucagaauggaacaagcucugcuugcaaaaggagaucuaauaacaguuucuuuaguagauugaauugguugacccacuuaaaauucaaauacccagcauugaacgugacuaugccaaacaaugaaaaauuugacaaauuguacauuugggggguucaccacccggguacggacaaugaccaaaucagccuauaugcccaagcaucaggaagaaucacagucucuaccaaaagaagccaacaaacuguaaucccgaauaucggaucuagacccaggguaagggauaucuccagcagaauaagcaucuauuggacaauaguaaaaccgggagacauacuuuugauuaacagcacagggaaucuaauugcuccucgggguuacuucaaaauacgaagugggaaaagcucaauaaugagaucagaugcacccauuggcaaaugcaauucugaaugcaucacuccaaauggaagcauucccaaugacaaaccauuucaaaauguaaacaggaucacauauggggccugucccagauauguuaagcaaaacacucugaaauuggcaacagggaugcgaaauguaccagagacacaaacuagaggcauauuuggcgcaaucgcagguuucauagaaaaugguugggagggaaugguggacgguugguacgguuucaggcaucaaaauucugagggcacaggacaagcagcagaucucaaaagcacucaagcagcaaucaaccaaaucaaugggaaacugaauagguuaaucgggaaaacaaacgagaaauuccaucagauugaaaaagaauucucagaaguagaagggagaauucaggaccucgagaaauauguugaggacacuaaaauagaucucuggucauacaacgcggagcuucuuguugcccuggagaaccaacauacaauugaucuaacugacucagaaaugaacaaacuguuugaaagaacaaagaagcaacugagggaaaaugcugaggauaugggcaaugguuguuucaaaauauaccacaaaugugacaaugccugcauagggucaaucagaaauggaacuuaugaccaugauguauacagagaugaagcauuaaacaaccgguuccagaucaaagguguugagcugaagucaggauacaaagauuggauccuauggauuuccuuugccauaucauguuuuuugcuuuguguugcuuuguugggguucaucaugugggccugccaaaaaggcaacauuaggugcaacauuugcauuuga

SEQ ID NO: 35113 - RNA, 1701 nt, Artificial Sequence; identical to SEQ ID NO: 32647
  derived and/or modified CDS sequence (wt) from hemagglutinin__InfluenzaA__ACU12527

SEQ ID NO: 35114 - RNA, 1701 nt, Artificial Sequence
  derived and/or modified CDS sequence (wt) from hemagglutinin__InfluenzaA__ACU12538
augaagacuaucauugcuuugagcuacauucuaugucugguuuucgcucaaaaacuucccggaaaugacaacagcacggcaacgcugugccuugggcaccaugcaguaccaaacggaacgauagugaaaacaaucacgaaugaccaaauugaaguuacuaaugcuacugagcugguucagaguuccucaacagguggaauaugcgacaguccucaucagauccuugauggagaaaacugcacacuaauagaugcucuauugggagacccucagugugaugacuuccaaaauaagaaaugggaccuuuuuguugaacgcagcaaagccuacagcaacuguuacccuuaugaugugccggauuaugccucccuuaggucacuaguugccucauccggcacacuggaguuuaacaaugaaagcuucaauuggacuggagucacucaaaauggaacaagcucugcuugcaaaaggagaucuaauaacaguuucuuuaguagauugaauugguugacccacuuaaaauucaaauacccagcauugaacgugacuaugccaaacaaugaaaaauuugacaaauuguacauuugggggguucaccacccggguacggacaaugaccaaaucuuccuguaugcucaagcaucaggaagaaucacagucucuaccaaaagaagccaacaaaccguaaucccgaauaucggaucuagacccaggguaaggaauauccccagcagaauaagcaucuauuggacaauaguaaaaccgggagacauacuuuugauuaacagcacagggaaucuaauugcuccuagggguuacuucaaaauacgaagugggaaaagcucaauaaugagaucagaugcacccauuggcaaaugcaauucugaaugcaucacuccaaauggaagcauucccaaugacaaaccauuucaaaauguaaacaggaucacauauggggccugucccagauauguuaagcaaaacacucugaaauuggcaacagggaugcgaaauguaccagagaaacaaacuagaggcauauuuggcgcaaucgcggguuucauagaaaaugguugggagggaaugguggaugguugguacgguuucaggcaucaaaauucugagggaauaggacaagcagcagaucucaaaagcacucaagcagcaaucaaucaaaucaaugggaagcugaauagguugaucgggaaaaccaacgagaaauuccaucagauugaaaaagaauucucagaaguagaagggagaauucaggaccucgagaaauauguugaggacacuaaaauagaucucuggucauacaacgcggagcuucuuguugcccuggagaaccaacauacaauugaucuaacugacucagaaaugaacaaacuguuugaaagaacaaagaagcaacugagggaaaaugcugaggauaugggcaaugguuguuucaaaauauaccacaaaugugacaaugccugcauaggaucaaucagaaauggaacuuaugaccaugauguauacagagaugaagcauuaaacaaccgguuccagaucaaaggcguugagcugaagucaggauacaaagauuggauccuauggauuuccuuugccauaucauguuuuuugcuuuguguugcuuuguugggguucaucaugugggccugccaaaaaggcaacauuaggugcaacauuugcauuuga

SEQ ID NO: 35115 - RNA, 1701 nt, Artificial Sequence; identical to SEQ ID NO: 33580
  derived and/or modified CDS sequence (wt) from hemagglutinin__InfluenzaA__ACU12549

SEQ ID NO: 35116 - RNA, 1698 nt, Artificial Sequence
  derived and/or modified CDS sequence (wt) from hemagglutinin__InfluenzaA__ACU12560
augaaaguaaaacuacugguccuguuaugcacauuuacagcuacauaugcggacacaauauguauaggcuaccaugcuaacaacucgaccgacacuguugacacaguacuugaaaagaaugugacagugacacacucugucaaccugcuugagaacagucacaauggaaaacuaugucuauuaaaaggaauagccccacuacaauuggguaauugcagcguugccggauggaucuuaggaaacccagaaugcgaauuacugauuuccaaggagucauggucuuacauuguagaaaaaccaaauccugagaauggaacauguuacccagggcauuucgcugacuaugaggaacugagggagcaauugaguucaguaucuucauuugagagguucgaaauauuccccaaagaaagcucauggcccaaccacaccguaaccggagugucagcaucaugcucccacaauggggaaagcaguuuuuacagaaauuugcuauggcugacggggaagaaugguuuguacccaaaccugagcaaguccuaugcaaacaacaaaggaaaagaaguccuuguacuaugggguguucaucacccgccaaacauaggugaccaaaauacccucuaucauacagaaaaugcuuauguuucuguagugucuucacauuauagcagaaaauucaccccagaaauagccaaaagacccaaaguaagagaucaagaaggaagaaucaacuacuacuggacucugcuugaacccggggauacaauaauauuugaggcaaauggaaaucuaauagcaccaagauaugcuuucgcacugaguagaggcuuuggaucaggaaucaucaacucaaauguaccaauggauaaaugugaugcgaagugccaaacaccucagggagcuauaaacagcagucuuccuuuccagaacguacacccagucacaauaggagaguguccaaaguaugucaggagugcaaaauuaaggaugguuacaggacuaaggaacaucccauccauucaauccagagguuuguuuggagccauugccgguuucauugaagggggguggacuggaaugguagaugguugguaugguuaucaucaucagaaugagcaaggaucuggcuaugcugcagaucaaaaaagcacacaaaaugccauuaaugggauuacaaacaaggugaauucuguaauugagaaaaugaacacucaauucacagcagugggcaaagaauucaacaaauuggaaagaaggauggaaaacuugaauaaaaaaguugaugauggguuuauagacauuuggacauauaaugcagaacuguugguucuacuggaaaaugaaaggacuuuggauuuccaugacuccaaugugaagaaucuguaugagaaaguaaaaagccaguugaagaauaaugcuaaagaaauaggaaauggguguuuugaauucuaucacaaguguaacgaugaaugcauggagaguguaaagaauggaacuuaugacuauccaaaauauuccgaagaaucaaaguuaaacagggagaaaauugauggagugaaauuggaaucaaugggagucuaucagauucuggcgaucuacucaacagucgccaguucucugguucuuuuggucucccugggggcaaucagcuucuggauguguuccaaugggucuuugcaguguagaauaugcaucuaa

SEQ ID NO: 35117 - RNA, 1698 nt, Artificial Sequence
  derived and/or modified CDS sequence (wt) from hemagglutinin__InfluenzaA__ACU12571
augaaaguaaaacuacugguccuguuaugcacauuuacagcuacauaugcagacacaauauguauaggcuaccaugcuaacaacucgaccgacacuguugacacaguacuugaaaagaaugugacagugacacacucugucaaccugcuugagaacagccacaauggaaaacuaugucuauuaaaaggaauagccccacuacaauuggguaauugcagcguugccggguggaucuuaggaaauccagaaugcgaauuacugauuuccaaggagucaugguccuacauuguagaaaaaccaaauccugagaauggaacauguuacccagggcauuucgcugacuaugaggaacugagggagcaauugaguucaguaucuucauuugagagguucgaaauauuccccaaagaaagcucauggcccaaccacaccguaaccggagugucagcaucaugcucccauaauggggaaagcaguuuuuacagaaauuugcuauggcugacggggaagaaugguuuguacccaaaccugagcaaguccuaugcaaacaacaaagaaaaagaaguccuuguacuaugggguguucaucacccgccaaacauaggugaccaaaaggcccucuaucauacagaaaaugcuuauguuucuguagugucuucacauuauagcagaaaauucaccccagaaauagccaaaagacccaaaguaagagaucaagaaggaagaaucaacuacuauuggacucugcuugaacccggggauacaauaauauuugaggcaaauggaaaucuaauagcgccaagauaugcuuucgcacugaguaggggcuuuggaucaggaaucaucaacucaaaugcaccaauggauaaaugugaugcgaagugccaaacaccucagggagcuauaaacagcagucuuccuuuccagaacguacacccagucacaauaggagaguguccaaaguaugucagaagugcaaaauuaaggaugguuacaggacuaaggaacaucccauccauucaauccagagguuuguuuggagccauugccgguuucauugaagggggguggacuggaaugguagaugguugguaugguuaucaucaucagaaugagcaaggaucuggcuaugcugcagaucaaaaaagcacacaaaaugccauuaaugggauuacaaacaaggugaauucuguaauugagaaaaugaacacucaauucacagcagugggcaaagaauucaacaaauuggaaaggaggauggaaaacuugaacaaaaaaguugaugauggguuuauagacauuuggaccuacaaugcagaacuguugguucuacuggaaaaugaaaggacuuuggauuuccaugacuccaaugugaagaaucuguaugagaaaguaaaaagccaguuaaagaacaaugcuaaagaaauaggaaauggguguuuugaauucuaucacaaguguaacgaugaaugcauggagaguguaaagaauggaacuuaugacuauccaaaauauuccgaagaaucaaaguuaaacagggagaaaauugauggagugaaauuggaaucaaugggagucuaucagauucuggcgaucuacucaacagucgccaguucucugguucuuuuggucucccugggggcaaucagcuucuggauguguuccaaugggucucugcaguguagaauaugcaucuaa

SEQ ID NO: 35118 - RNA, 1698 nt, Artificial Sequence
  derived and/or modified CDS sequence (wt) from hemagglutinin__InfluenzaA__ACU12582
augaaaguaaaacuacugguccuguuaugcacauuuacagcuacauaugcggacacaauauguauaggcuaccaugcuaacaacucgaccgacacuguugacacaguacuugaaaagaaugugacagugacacacucugucaaccugcuugagaacagucacaauggaaaacuaugucuauuaaaaggaauagccccacuacaauuggguaauugcagcguugccggauggaucuuaggaaacccagaaugcgaauuacugauuuccaaggagucauggucuuacauuguagaaaaaccaaauccugagaauggaacauguuacccagggcguuucgcugacuaugaggaacugagggagcaauugaguucaguaucuucauuugagagguucgaaauauuccccaaagaaagcucauggcccaaccacaccguaaccggagugucagcaucaugcucccacaauggggaaagcaguuuuuacagaaauuugcuauggcugacggggaagaaugguuuguacccaaaccugagcaaguccuaugcaaacaacaaaggaaaagaaguccuuguacuaugggguguucaucacccgccaaacauaggugaccaaaauacccucuaucauacagaaaaugcuuauguuucuguagugucuucacauuauagcagaaaauucaccccagaaauagccaaaagacccaaaguaagagaucaagaaggaagaaucaacuacuacuggacucugcuugaacccggggauacaauaauauuugaggcaaauggaaaucuaauagcaccaagauaugcuuucgcacugaguagaggcuuuggaucaggaaucaucaacucaaaugcaccaauggauaaaugugaugcgaagugccaaacaccucagggagcuauaaacagcagucuuccuuuccagaacguacacccagucacaauaggagaguguccaaaguaugucaggagugcaaaauuaaggaugguuacaggacuaaggaacaucccauccauucaauccagagguuuguuuggagccauugccgguuucauugaagggggguggacuggaaugguagaugguugguaugguuaucaucaucagaaugagcaaggaucuggcuaugcugcagaucaaaaaagcacacaaaaugccauuaaugggauuacaaacaaggugaauucuguaauugagaaaaugaacacucaauucacagcagugggcaaagaauucaacaaauuggaaagaaggauggaaaacuugaauaaaaagguugaugauggguuuauagacauuuggacauauaaugcagaacuguugguucuacuggaaaaugaaaggacuuuggauuuccaugacuccaaugugaagaaucuguaugagaaaguaaaaagccaguugaagaauaaugcuaaagaaauaggaaauggguguuuugaauucuaucacaaguguaacgaugaaugcauggagaguguaaagaauggaacuuaugacuauccaaaauauuccgaagaaucaaaguuaaacagggagaaaauugauggagugaaauuggaaucaaugggagucuaucagauucuggcgaucuacucaacagucgccaguucucugguucuuuuggucucccugggggcaaucagcuucuggauguguuccaaugggucuuugcaguguagaauaugcaucuaa

SEQ ID NO: 35119 - RNA, 1698 nt, Artificial Sequence
  derived and/or modified CDS sequence (wt) from hemagglutinin__InfluenzaA__ACU12593
augaaaguaaaacuacugguccuguuaugcacauuuacagcuacauaugcagacacaauauguauaggcuaccaugcuaacaacucgaccgacacuguugacacaguacuugaaaagaaugugacagugacacacucugucaaccugcuugagaacagucacaauggaaaacuaugucuauuaaaaggaauagccccacuacaauuggguaacugcagcguugccggguggaucuuaggaaacccagaaugcgaauuacugauuuccaaggagucaugguccuacauuguagaaaaaccaaauccugagaauggaacauguuacccagggcauuucgcugacuaugaggaacugagggagcaauugaguucaguaucuucauuugagagguucgaaauauuccccaaagaaagcucauggcccaaccacaccguaaccggagugucagcaucaugcucccauaauggggaaagcaguuuuuacagaaauuugcuauggcugacggggaagaaugguuuguacccaaaccugagcaaguccuaugcaaacaacaaagaaaaagaaguccuuguacuaugggguguucaucacccgccaaacauaguugaccaaaagacccucuaucguacagaaaaugcuuauguuucuguagugucuucacauuauagcagaaaauucaccccagaaauagccaaaagacccaaaguaagggaucaagaaggaagaaucaacuacuacuggacucugcuugaacccggggauacaauaauauuugaggcaaauggaaaucuaauagcgccaagauaugcuuucgcacugaguagaggcuuuggaucaggaaucaucaacucaaaugcaccaauggauaaaugugaugcgaagugccaaacaccucagggagcuauaaacagcagucuuccuuuccagaacguacacccagucacaauaggagaguguccaaaguaugucaggagugcaaaauuaaggaugguuacaggacuaaggaacaucccauccauucaauccagagguuuguuuggagccauugccgguuucauugaagggggguggacuggaaugguagaugguugguaugguuaucaucaucagaaugagcaaggaucuggcuaugcugcagaucaaaaaagcacacaaaaugccauugaugggauuacaaacaaggugaauucuguaauugagaaaaugaacacucaauucacagcagugggcaaagaauucaacaaauuggaaagaaggauggaaaacuugaauaaaaaaguugaugauggguuuauagacauuuggacauauaaugcagaacuguugguucuacuggaaaaugaaaggacuuuggauuuccaugacuccaaugugaagaaucuguaugagaaaguaaaaagccaguuaaagaauaaugcuaaagaaauaggaaauggguguuuugaauucuaucacaaguguaacgaugaaugcauggagaguguaaagaauggaacuuaugacuauccaaaauauuccgaagaaucaaaguuaaacagggagaaaauugauggaauaaaauuggaaucaaugggagucuaucagauucuggcgaucuacucaacagucgccaguucucugguucuuuuggucucccugggggcaaucagcuucuggauguguuccaaugggucuuugcaguguagaauaugcaucuaa

SEQ ID NO: 35120 - RNA, 1701 nt, Artificial Sequence; identical to SEQ ID NO: 34681
  derived and/or modified CDS sequence (wt) from hemagglutinin__InfluenzaA__ACU13090

SEQ ID NO: 35121 - RNA, 1701 nt, Artificial Sequence; identical to SEQ ID NO: 34681
  derived and/or modified CDS sequence (wt) from hemagglutinin__InfluenzaA__ACU13091

SEQ ID NO: 35122 - RNA, 1701 nt, Artificial Sequence
  derived and/or modified CDS sequence (wt) from hemagglutinin__InfluenzaA__ACU13092
augaaggcaauacuaguaguucugcuauauacauuugcaaccgcaaaugcagacacauuauguauagguuaucaugcgaacaauucaacagacacuguagacacaguacuagaaaagaauguaacaguaacacacucuguuaaccuucuagaagacaagcauaacgggaaacuaugcaaacuaagagggguagccccauugcauuuggguaaauguaacauugcuggcuggauccugggaaauccagagugugaaucacucuccacagcaagcucaugguccuacauuguggaaacaucuaguucagacaauggaacguguuacccaggagauuucaucgauuaugaggagcuaagagagcaauugagcucagugucaucauuugaaagguuugagauauuccccaagacaaguucauggcccaaucaugacucgaacaaagguguaacggcagcauguccucaugcuggagcaaaaagcuucuacaaaaauuuaauauggcuaguuaaaaaaggaaauucauacccaaagcucagcaaauccuacauuaaugauaaagggaaagaaguccucgugcuauggggcauucaccauccaucuacuagugcugaccaacaaagucucuaucagaaugcagaugcauauguuuuuguggggacaucaagauacagcaagaaguucaagccggaaauagcaauaagacccaaagugagggaucaagaagggagaaugaacuauuacuggacacuaguagagccgggagacaaaauaacauucgaagcaacuggaaaucuagugguaccgagauaugcauucgcaauggaaagaaaugcuggaucugguauuaucauuucagauacaccaguccacgauugcaauacaacuugucagacacccaagggugcuauaaacaccagccucccauuucagaauauacauccgaucacaauuggaaaauguccaaaauauguaaaaagcacaaaauugagacuggccacaggauugaggaaugucccgucuauucaaucuagaggccuauuuggggccauugccgguuucauugaagggggguggacagggaugguagauggaugguacgguuaucaccaucaaaaugagcaggggucaggauaugcagccgaccugaagagcacacagaaugccauugacgagauuacuaacaaaguaaauucuguuauugaaaagaugaauacacaguucacagcaguagguaaagaguucaaccaccuggaaaaaagaauagagaauuuaaauaaaaaaguugaugaugguuuccuggacauuuggacuuacaaugccgaacuguugguucuauuggaaaaugaaagaacuuuggacuaccacgauucaaaugugaagaauuuauaugaaaagguaagaagccaguuaaaaaacaaugccaaggaaauuggaaacggcugcuuugaauuuuaccacaaaugcgauaacacgugcauggaaagugucaaaaaugggacuuaugacuacccaaaauacucagaggaagcaaaauuaaacagagaagaaauagaugggguaaagcuggaaucaacaaggauuuaccagauuuuggcgaucuauucaacugucgccaguucauugguacugguagucucccugggggcaaucaguuucuggaugugcucuaaugggucucuacaguguagaauauguauuuaa

SEQ ID NO: 35123 - RNA, 1701 nt, Artificial Sequence; identical to SEQ ID NO: 34681
  derived and/or modified CDS sequence (wt) from hemagglutinin__InfluenzaA__ACU13093

SEQ ID NO: 35124 - RNA, 1701 nt, Artificial Sequence
  derived and/or modified CDS sequence (wt) from hemagglutinin__InfluenzaA__ACU13094
augaaggcaauacuaguaguucugcuauauacauuugcaaccgcaaaugcagacacauuauguauagguuaucaugcgaacaauucaacagacacuguagacacaguacuagaaaagaauguaacaguaacacacucuguuaaccuucuagaagacaagcauaacgggaaacuaugcaaacuaagagggguagccccauugcauuuggguaaauguaacauugcuggcuggauccugggaaauccagagugugaaucacucuccacagcaagcucaugguccuacauuguggaaacaucuaguucagacaauggaacguguuacccaggagauuucaucgauuaugaggagcuaagagagcaauugagcucagugucaucauuugaaagguuugagauauuccccaagacaaguucauggcccaaucaugacucgaacaaagguguaacggcagcauguccucaugcuggagcaaaaagcuucuacaaaaauuuaauauggcuaguuaaaaaaggaaauucauacccaaagcucagcaaauccuacauuaaugauaaagggaaagaaguccucgugcuauggggcauucaccauccaucuacuagugcugaccaacaaagucucuaucagaaugcagaugcauauguuuuuguggggucaucaagauacagcaagaaguucaagccggaaauagcaauaagacccaaagugaggggucaagaagggagaaugaacuauuacuggacacuaguagagccgggagacaaaauaacauucgaagcaacuggaaaucuagugguaccgagauaugcauucgcaauggaaagaaaugcuggaucugguauuaucauuucagauacaccaguccacgauugcaauacaacuugucagacacccaagggugcuauaaacaccagccucccauuucagaauauacauccgaucacaauuggaaaauguccaaaauauguaaaaagcacaaaauugagacuggccacaggauugaggaaugucccgucuauucaaucuagaggccuauuuggggccauugccgguuucauugaagggggguggacagggaugguagauggaugguacgguuaucaccaucaaaaugagcaggggucaggauaugcagccgaccugaagagcacacagaaugccauugacgaaauuacuaacaaaguaaauucuguuauugaaaagaugaauacacaguucacagcaguagguaaagaguucaaccaccuggaaaaaagaauagagaauuuaaauaaaaaaguugaugaugguuuccuggacauuuggacuuacaaugccgaacuguugguucuauuggaaaaugaaagaacuuuggacuaccacgauucaaaugugaagaacuuauaugaaaagguaagaagccagcuaaaaaacaaugccaaggaaauuggaaacggcugcuuugaauuuuaccacaaaugcgauaacacgugcauggaaagugucaaaaaugggacuuaugacuacccaaaauacucagaggaagcaaaauuaaacagagaagaaauagaugggguaaaacuggaaucaacaaggauuuaccagauuuuggcgaucuauucaacugucgccaguucauugguacugguagucucccugggggcaaucaguuucuggaugugcucuaaugggucucuacaguguagaauauguauuuaa

SEQ ID NO: 35125 - RNA, 1701 nt, Artificial Sequence; identical to SEQ ID NO: 34681
  derived and/or modified CDS sequence (wt) from hemagglutinin__InfluenzaA__ACU13095

SEQ ID NO: 35126 - RNA, 1701 nt, Artificial Sequence
  derived and/or modified CDS sequence (wt) from hemagglutinin__InfluenzaA__ACU13096
augaaggcaauacuaguaguucugcuacauacauuugcaaccgcaaaugcagacacauuauguauagguuaucaugcgaacaauucaacagacacuguagacacaguacuagaaaagaauguaacaguaacacacucuguuaaccuucuagaagacaagcauaacgggaaacuaugcaaacuaagagggguagccccauugcauuuggguaaauguaacauugcuggcuggauccugggaaauccagagugugaaucacucuccacagcaagcucaugguccuacauuguggaaacaucuaguucagacaauggaacguguuacccaggagauuucaucgauuaugaggagcuaagagagcaauugagcucagugucaucauuugaaagguuugagauauuccccaagacaaguucauggcccaaucaugacucgaacaaagguguaacggcagcauguccucaugcuggagcaaaaagcuucuacaaaaauuuaauauggcuaguuaaaaaaggaaauucauacccaaagcucagcaaauccuacauuaaugauaaagggaaagaaguccucguacuauggggcauucaccauccaucuacuagugcugaccaacaaagucucuaucagaaugcagaugcauauguuuuuguggggucaucaagauacagcaagaaguucaagccggaaauagcaauaagacccaaagugagggaucaagaagggagaaugaacuauuacuggacacuaguagagccgggagacaaaauaacauucgaagcaacuggaaaucuagugguaccgagauaugcauucgcaauggaaagaaaugcuggaucugguauuaucauuucagauacaccaguccacgauugcaauacaacuugucagacacccaagggugcuauaaacaccagccucccauuucagaauauacauccgaucacaauuggaaaauguccaaaauauguaaaaagcacaaaauugagacuggccacaggauugaggaaugucccgucuauucaaucuagaggccuauuuggggccauugccgguuucauugaaggaggguggacagggaugguagauggaugguacgguuaucaccaucaaaaugagcaggggucaggauaugcagccgaccugaagagcacacagaaugccauugacgagauuacuaacaaaguaaauucuguuauugaaaagaugaauacacaguucacagcaguagguaaagaguucaaccaccuggaaaaaagaauagagaauuuaaauaaaaaaguugaugaugguuuccuggacauuuggacuuacaaugccgaacuguugguucuauuggaaaaugaaagaacuuuggacuaccacgauucaaaugugaagaacuuauaugaaaagguaagaagccagcuaaaaaacaaugccaaggaaauuggaaacggcugcuuugaauuuuaccacaaaugcgauaacacgugcauggaaagugucaaaaaugggacuuaugacuacccaaaauacucagaggaagcaaaauuaaacagagaagaaauagaugggguaacgcuggaaucaacaaggauuuaccagauuuuggcgaucuauucaacugucgccaguucauuggugcugguagucucccugggggcaaucaguuucuggaugugcucuaaugggucucuacaguguagaauauguauuuaa

SEQ ID NO: 35127 - RNA, 1701 nt, Artificial Sequence; identical to SEQ ID NO: 34681
  derived and/or modified CDS sequence (wt) from hemagglutinin__InfluenzaA__ACU13098

SEQ ID NO: 35128 - RNA, 1701 nt, Artificial Sequence
  derived and/or modified CDS sequence (wt) from hemagglutinin__InfluenzaA__ACU13099
augaaggcaauacuaguaguucugcuauauacauuugcaaccgcaaaugcagacacauuauguauagguuaucaugcgaacaauucaacagacacuguagacacaguacuagaaaagaauguaacaguaacacacucuguuaaccuucuagaagacaagcauaacgggaaacuaugcaaacuaagagggguagccccauugcauuuggguaaauguaacauugcuggcuggauccugggaaauccagagugugaaucacucuccacagcaagcucaugguccuacauuguggaaacaucuaguucagacaauggaacguguuacccaggagauuucaucgauuaugaggagcuaagagagcaauugagcucagugucaucauuugaaagguuugagauauuccccaagacaaguucauggcccaaucaugacucgaacaaagguguaacggcagcauguccucaugcuggagcaaaaagcuucuacaaaaauuuaauauggcuaguuaaaaaaggaaauucauacccaaagcucagcaaauccuacauuaaugauaaagggaaagaaguccucgugcuauggggcauucaccauccaucuacuagugcugaccaacaaagucucuaucagaaugcagaugcauauguuuuuguggggacaucaagauacagcaagaaguucaagccggaaauagcaauaagacccaaagugagggaacaagaagggagaaugaacuauuacuggacacuaguagagccgggagacaaaauaacauucgaagcaacuggaaaucuagugguaccgagauaugcauucgcaauggaaagaaaugcuggaucugguauuaucauuucagauacaccaguccacgauugcaauacaacuugucagacacccaagggugcuauaaacaccagccucccauuucagaauauacauucgaucacaauuggaaaauguccaaaauauguaaaaagcacaaaauugagacuggccacaggauugaggaaugucccgucuauucaaucuagaggccuauuuggggccauugccgguuucauugaagggggguggacagggaugguagauggaugguacgguuaucaccaucaaaaugagcaggggucaggauaugcagccgaccugaagagcacacagaaugccauugacgagauuacuaacaaaguaaauucuguuauugaaaagaugaauacacaguucacagcaguagguaaagaguucaaccaccuggaaaaaagaauagagaauuuaaauaaaaaaguugaugaugguuuccuggacauuuggacuuacaaugccgaacuguugguucuauuggaaaaugaaagaacuuuggacuaccacgauucaaaugugaagaacuuauaugaaaagguaagaagccaguuaaaaaacaaugccaaggaaauuggaaacggcugcuuugaauuuuaccacaaaugcgauaacacgugcauggaaagugucaaaaaugggacuuaugacuacccaaaauacucagaggaagcaaaauuaaacagagaagaaauagaugggguaaagcuggaaucaacaaggauuuaccagauuuuggcgaucuauucaacugucgccaguucauugguacugguagucucccugggggcaaucaguuucuggaugugcucuaaugggucucuacaguguagaauauguauuuaa

SEQ ID NO: 35129 - RNA, 1701 nt, Artificial Sequence
  derived and/or modified CDS sequence (wt) from hemagglutinin__InfluenzaA__ACU13129
augaaggcaauacuaguaguucugcuauauacauuugcaaccgcaaaugcagacacauuauguauagguuaucaugcgaacaauucaacagacacuguagacacaguacuagaaaagaauguaacaguaacacacucuguuaaccuucuagaagacaagcauaacgggaaacuaugcaaacuaagagggguagccccauugcauuuggguaaauguaacauugcuggcuggauccugggaaauccagagugugaaucacucuccacagcaagcucaugguccuacauuguggaaacaucuaguucagacaauggaacguguuacccaggagauuucaucgauuaugaggagcuaagagagcaauugagcucagugucaucauuugaaagguuugagauauuccccaagacaaguucauggcccaaucaugacucgaacaaagguguaacggcagcauguccucaugcuggagcaaaaagcuucuacaaaaauuuaauauggcuaguuaaaaaaggaaauucauacccaaagcucagcaaauccuacauuaaugauaaagggaaagaaguccucgugcuauggggcauucaccauccaucuacuagugcugaccaacaaagucucuaucagaaugcagaugcauauguuuuuguggggacaucaagauacagcaagaaguucaagccggaaauagcaauaagacccaaagugagggaacaagaagggagaaugaacuauuacuggacacuaguagagccgggagacaaaauaacauucgaagcaacuggaaaucuagugguaccgagauaugcauucgcaauggaaagaaaugcuggaucugguauuaucauuucagauacaccaguccacgauugcaauacaacuugucagacacccaagggugcuauaaacaccagccucccauuucagaauauacauccgaucacaauuggaaaauguccaaaauauguaaaaagcacaaaauugagacuggccacaggauugaggaaugucccgucuauucaaucuagaggccuauuuggggccauugccgguuucauugaagggggguggacagggaugguagauggaugguacgguuaucaccaucaaaaugagcaggggucaggauaugcagccgaccugaagagcacacagaaugccauugacgagauuacuaacaaaguaaauucuguuauugaaaagaugaauacacaguucacagcaguaggugaagaguucaaccaccuggaaaaaagaauagagaauuuaaauaaaaaaguugaugaugguuuccuggacauuuggacuuacaaugccgaacuguugguucuauuggaaaaugaaagaacuuuggacuaccacgauucaaaugugaagaacuuauaugaaaagguaagaagccaguuaaaaaacaaugccaaggaaauuggaaacggcugcuuugaauuuuaccacaaaugcgauaacacgugcauggaaagugucaaaaaugggacuuaugacuacccaaaauacucagaggaagcaaaauuaaacagagaagaaauagaugggguaaagcuggaaucaacaaggauuuaccagauuuuggcgaucuauucaacugucgccaguucauugguacugguagucucccugggggcaaucaguuucuggaugugcucuaaugggucucuacaguguagaauauguauuuaa

SEQ ID NO: 35130 - RNA, 1701 nt, Artificial Sequence
  derived and/or modified CDS sequence (wt) from hemagglutinin__InfluenzaA__ACU16795
augaaggcaauacuaguaguucugcuauauacauuugcaaccgcaaaugcagacacauuauguauagguuaucaugcgaacaauucaacagacacuguagacacaguacuagaaaagaauguaacaguaacacacucuguuaaccuucuagaagacaagcauaacgggaaacuaugcaaacuaagagggguagccccauugcauuuggguaaauguaacauugcuggcuggauccugggaaauccagagugugaaucacucuccacagcaagcucaugguccuacauuguggaaacaucuaguucagacaauggaacguguuacccaggagauuucaucgauuaugaggagcuaagagagcaauugagcucagugucaucauuugaaagguuugagauauuccccaagacaaguucauggcccaaucaugacucgaacaaagguguaacggcagcauguccucaugcuggagcaaaaagcuucuacaaaaauuuaauauggcuaguuaaaaaaggaaauucauacccaaagcucagcaaauccuacauuaaugauaaagggaaagaaguccucgugcuauggggcauucaccauccaucuacuagugcugaccaacaaagucucuaucagaaugcagaugcauauguuuuuguggggacaucaagauacagcaagaaguucaagccggaaauagcaauaagacccaaagugagggaucaagaagggagaaugaacuauuacuggacacuaguagagccgggagacaaaauaacauucgaagcaacuggaaaucuagugguaccgagauaugcauucgcaauggaaagaaaugcuggaucugguauuaucauuucagauacaccaguccacgauugcaauacaacuugucagacacccaagggugcuauaaacaccagccucccauuucagaauauacauccgaucacaauuggaaaauguccaaaauauguaaaaagcacaaaauugagacuggccacaggauugaggaaugucccgucuauucaaucuagaggccuauuuggggccauugccgguuucauugaagggggguggacagggaugguagauggaugguacgguuaucaccaucaaaaugagcaggggucaggauaugcagccgaccugaagagcacacagaaugccauugacgagauuacuaacaaaguaaauucuguuauugaaaagaugaauacacaguucacagcaguagguaaagaguucaaccaccuggaaaaaagaauagagaauuuaaauaaaaaaguugaugaugguuuccuggacauuuggacuuacaaugcugaacuguugguucuauuggaaaaugaaagaacuuuggacuaccacgauucaaaugugaagaacuuauaugaaaagguaagaagccaguuaaaaaacaaugccaaggaaauuggaaacggcugcuuugaauuuuaccacaaaugcgauaacacgugcauggaaagugucaaaaaugggacuuaugacuacccaaaauacucagaggaagcaaaauuaaacagagaagaaauagaugggguaaagcuggaaucaacaaggauuuaccagauuuuggcgaucuauucaacugucgccaguucauugguacugguagucucccugggggcaaucaguuucuggaugugcucuaaugggucucuacaguguagaauauguauuuaa

SEQ ID NO: 35131 - RNA, 1701 nt, Artificial Sequence
  derived and/or modified CDS sequence (wt) from hemagglutinin__InfluenzaA__ACU16858
augaaggcaauacuaguaguucugcuauauacauuugcaaccgcaaaugcagacacauuauguauagguuaucaugcgaacaauucaacagacacuguagacacaguacuagaaaagaauguaacaguaacacacucuguuaaccuucuagaagacaagcauaacgggaaacuaugcaaacuaagagggguagccccauugcauuuggguaaauguaacauugcuggcuggauccugggaaauccagagugugaaucacucuccacagcaagcucaugguccuacauuguggaaacaucuaguucagacaauggaacguguuacccaggagauuucaucgauuaugaggagcuaagagagcaauugagcucagugucaucauuugaaagguuugagauauuccccaagacaaguucauggcccaaucaugacucgaacaaagguguaacggcagcauguccucaugcuggagcaaaaagcuucuacaaaaauuuaauauggcuaguuaaaaaaggaaauucauacccaaagcucagcaaauccuacauuaaugauaaagggaaagaaguccucgugcuauggggcauucaccauccaucuacuagugcugaccaacaaagucucuaucagaaugcagaugcauauguuuuuguggggacaucaagauacagcaagaaguucaagccggaaauagcaauaagacccaaagugagggaucaagaagggagaaugaacuauuacuggacacuaguagagccgggagacaaaauaacauucgaagcaacuggaaaucuagugguaccgagauaugcauucgcaauggaaagaaaugcugggucugguauuaucauuucagauacaccaguccacgauugcaauacaacuugucagacacccaagggugcuauaaacaccagccucccauuucagaauauacauccgaucacaauuggaaaauguccaaaauauguaaaaagcacaaaauugagacuggccacaggauugaggaaugucccgucuauucaaucuagaggccuauuuggggccauugccgguuucauugaagggggguggacagggaugguagauggaugguacgguuaucaccaucaaaaugagcaggggucaggauaugcagccgaccugaagagcacacagaaugccauugacgagauuacuaacaaaguaaauucuguuauugaaaagaugaauacacaguucacagcaguagguaaagaguucaaccaccuggaaaaaagaauagagaauuuaaauaaaaaaguugaugaugguuuccuggacauuuggacuuacaaugccgaacuguugguucuauuggaaaaugaaagaacuuuggacuaccacgauucaaaugugaagaacuuauaugaaaagguaagaagccaguuaaaaaacaaugccaaggaaauuggaaacggcugcuuugaauuuuaccacaaaugcgauaacacgugcauggaaagugucaaaaaugggacuuaugacuacccaaaauacucagaggaagcaaaauuaaacagagaagaaauagaugggguaaagcuggaaucaacaaggauuuaccagauuuuggcgaucuauucaacugucgccaguucauugguacugguagucucccugggggcaaucaguuucuggaugugcucuaaugggucucuacaguguagaauauguauuuaa

SEQ ID NO: 35132 - RNA, 1701 nt, Artificial Sequence; identical to SEQ ID NO: 35131
  derived and/or modified CDS sequence (wt) from hemagglutinin__InfluenzaA__ACU16930

SEQ ID NO: 35133 - RNA, 1701 nt, Artificial Sequence; identical to SEQ ID NO: 34714
  derived and/or modified CDS sequence (wt) from hemagglutinin__InfluenzaA__ACU16993

SEQ ID NO: 35134 - RNA, 1701 nt, Artificial Sequence; identical to SEQ ID NO: 34714
  derived and/or modified CDS sequence (wt) from hemagglutinin__InfluenzaA__ACU17059

SEQ ID NO: 35135 - RNA, 1701 nt, Artificial Sequence; identical to SEQ ID NO: 34681
  derived and/or modified CDS sequence (wt) from hemagglutinin__InfluenzaA__ACU17126

SEQ ID NO: 35136 - RNA, 1701 nt, Artificial Sequence; identical to SEQ ID NO: 34772
  derived and/or modified CDS sequence (wt) from hemagglutinin__InfluenzaA__ACU17187

SEQ ID NO: 35137 - RNA, 1701 nt, Artificial Sequence; identical to SEQ ID NO: 34681
  derived and/or modified CDS sequence (wt) from hemagglutinin__InfluenzaA__ACU17258

SEQ ID NO: 35138 - RNA, 1701 nt, Artificial Sequence
  derived and/or modified CDS sequence (wt) from hemagglutinin__InfluenzaA__ACU17389
auggaggcaauacuaguaguucugcuauauacauuugcaaccgcaaaugcagacacauuauguauagguuaucaugcgaacaauucaacagacacuguagacacaguacuagaaaagaauguaacaguaacacacucuguuaaccuucuagaagacaagcauaacgggaaacuaugcaaacuaagagggguagccccauugcauuuggguaaauguaacauugcuggcuggauccugggaaauccagagugugaaucacucuccacagcaagcucaugguccuacauuguggaaacaucuaguucagacaauggaacguguuacccaggagauuucaucgauuaugaggagcuaagagagcaauugagcucagugucaucauuugaaagguuugagauauuccccaagacaaguucauggcccaaucaugacucgaacaaagguguaacggcagcauguccucaugcuggagcaaaaagcuucuacaaaaauuuaauauggcuaguuaaaaaaggaaauucauacccaaagcucagcaaauccuacauuaaugauaaagggaaagaaguccucgugcuauggggcauucaccauccaucuacuagugcugaccaacaaagucucuaucagaaugcagaugcauauguuuuuguggggucaucaagauacagcaagaaguucaagccggaaauagcaauaagacccaaagugagggaucaagaagggagaaugaacuauuacuggacacuaguagagccgggagacaaaauaacauucgaagcaacuggaaaucuagugguaccgagauaugcauucgcaauggaaagaaaugcuggaucugguauuaucauuucagauacaccaguccacgauugcaauacagcuugucagacacccaagggugcuauaaacaccagccucccauuucauaauauacauccgaucacaauuggaaaauguccaaaauauguaaaaagcacaaaauugagacuggccacaggauugaggaaugucccgucuauucaaucuagaggccuauuuggggccauugccgguuucauugaagggggguggacagggaugguagauggaugguacgguuaucaccaucaaaaugagcaggggucaggauaugcagccgaccugaagagcacacagaaugccauugacgagauuacuaacaaaguaaauucuguuauugaaaagaugaauacacaguucacagcaguagguaaagaguucaaccaccuggaaaaaagaauagagaauuuaaauaaaaaaguugaugaugguuuccuggacauuuggacuuacaaugccgaacuguugguucuauuggaaaaugaaagaacuuuggacuaccacgauucaaaugugaagaacuuauaugaaaagguaagaagccaguuaaaaaacaaugccaaggaaauuggaaacggcugcuuugaauuuuaccacaaaugcgauaacacgugcauggaaagugucaaaaaugggacuuaugacuacccaaaauacucagaggaagcaaaauuaaacagagaagaaauagaugggguaaagcuggaaucaacaaggauuuaccagauuuuggcgaucuauucaacugucgccaguucauugguacugguagucucccugggggcaaucaguuucuggaugugcucuaaugggucucuacaguguagaauauguauuuaa

SEQ ID NO: 35139 - RNA, 1701 nt, Artificial Sequence; identical to SEQ ID NO: 34681
  derived and/or modified CDS sequence (wt) from hemagglutinin__InfluenzaA__ACU17450

SEQ ID NO: 35140 - RNA, 1701 nt, Artificial Sequence; identical to SEQ ID NO: 34681
  derived and/or modified CDS sequence (wt) from hemagglutinin__InfluenzaA__ACU17521

SEQ ID NO: 35141 - RNA, 1701 nt, Artificial Sequence; identical to SEQ ID NO: 34705
  derived and/or modified CDS sequence (wt) from hemagglutinin__InfluenzaA__ACU27041

SEQ ID NO: 35142 - RNA, 1698 nt, Artificial Sequence
  derived and/or modified CDS sequence (wt) from hemagglutinin__InfluenzaA__ACU27406
augaaaguaaaacuacugguccuguuaugcacauuuacagcuacauaugcagacacaauauguauaggcuaccaugcuaacaacucgaccgacacuguugacacaguacuugaaaagaaugugacagugacacacucugucaaccugcuugagaacagucacaauggaaaacuaugucuauuaaaaggaauagccccacuacaauuggguaacugcagcguugccggguggaucuuaggaaacccagaaugcgaauuacugauuuccaaggagucaugguccuacauuguagaaaaaccaaauccugagaauggaacauguuacccagggcauuucgcugacuaugaggaacugagggagcaauugaguucaguaucuucauuugagagguucgaaauauuccccaaagaaagcucauggcccaaccacaccguaaccggagugucagcaucaugcucccauaauggggaaagcaguuuuuacagaaauuugcuauggcugacggggaagaaugguuuguacccaaaccugagcaaguccuaugcaaacaacaaagaaaaagaaguccuuguacuaugggguguucaucacccgccaaacauaguugaccaaaagacccucuaucguacagaaaaugcuuauguuucuguagugucuucacauuauagcagaaaauucaccccagaaauagccaaaagacccaaaauaagagaucaagaaggaagaaucaacuacuacuggacucugcuugaacccggggauacaauaauauuugaggcaaauggaaaucuaauagcgccaagauaugcuuucgcacugaguagaggcuuuggaucaggaaucaucaacucaaaugcaccaauggauaaaugugaugcgaaaugccaaacaccucagggagcuauaaacagcagucuuccuuuccagaacguacacccagucacaauaggagaguguccaaaguaugucaggagugcaaaauuaaggaugguuacaggacuaaggaacaucccauccauucaauccagagguuuguuuggagccauugccgguuucauugaagggggguggacuggaaugguagaugguugguaugguuaucaucaucagaaugagcaaggaucuggcuaugcugcagaucaaaaaagcacacaaaaugccauuaaugggauuacaaacaaggugaauucuguaauugagagaaugaacacucaauucacagcagugggcaaagaauucaacaaauuggaaagaaggauggaaaacuugaauaaaaaaguugaugauggguuuauagacauuuggacauauaaugcagaauuguugguucuacuggaaaaugaaaggacuuuggauuuccaugacuccaaugugaagaaucuguaugagaaaguaaaaagccaguuaaagaauaaugcuaaagaaauaggaaauggguguuuugaauucuaucacaaguguaacgaugaaugcauggagaguguaaagaauggaacuuaugacuauccaaaauauuccgaagaaucaaaguuaaacagggagaaaauugauggagugaaauuggaaucaaugggagucuaucagauucuggcgaucuacucaacagucgccaguucucugguucuuuuggucucccugggggcaaucagcuucuggauguguuccaaugggucuuugcaguguagaauaugcaucuaa

SEQ ID NO: 35143 - RNA, 1698 nt, Artificial Sequence
  derived and/or modified CDS sequence (wt) from hemagglutinin__InfluenzaA__ACU27407
augaaaguaaaacuacugguccuguuaugcacauuuacagcuacauaugcagacacaauauguauaggcuaccaugcuaacaacucgaccgacacuguugacacaguacuugaaaagaaugugacagugacacacucugucaaccugcuugagaacagucacaauggaaaacuaugucuauuaaaaggaauagccccacuacaauuggguaacugcagcguugccggguggaucuuaggaaacccagaaugcgaauuacugauuuccaaggagucaugguccuacauuguagaaaaaccaaauccugagaauggaacauguuacccagggcauuucgcugacuaugaggaacugagggagcaauugaguucaguaucuucauuugagagguucgaaauauuccccaaagaaagcucauggcccaaccacaccguaaccggagugucagcaucaugcucccauaauggggaaagcaguuuuuacagaaauuugcuauggcugacggggaagaaugguuuguacccaaaccugagcaaguccuaugcaaacaacaaagaaaaagaaguccuuguacuaugggguguucaucacccgccaaacauaguugaccaaaagacccucuaucguacagaaaaugcuuauguuucuguagugucuucacauuauagcagaaaauucaccccagaaauagccaaaagacccaaaguaagagaucaagaaggaagaaucaacuacuacuggacucugcuugaacccggggauacaauaauauuugaggcaaauggaaaucuaauagcgccaagauaugcuuucgcacugaguagaggcuuuggaucaggaaucaucaacucaaaugcaccaauggauaaaugugaugcgaaaugccaaacaccucagggagcuauaaacagcagucuuccuuuccagaacguacacccagucacaauaggagaguguccaaaguaugucaggagugcaaaauuaaggaugguuacaggacuaaggaacaucccauccauucaauccagagguuuguuuggagccauugccgguuucauugaagggggguggacuggaaugguagaugguugguaugguuaucaucaucagaaugagcaaggaucuggcuaugcugcagaucaaaaaagcacacaaaaugccauuaaugggauuacaaacaaggugaauucuguaauugagaaaaugaacacucaauucacagcagugggcaaagaauucaacaaauuggaaagaaggauggaaaacuugaauaaaaaaguugaugauggguuuauagacauuuggacauauaaugcagaauuguugguucuacuggaaaaugaaaggacuuuggauuuccaugacuccaaugugaagaaucuguaugagaaaguaaaaagccaguuaaagaauaaugcuaaagaaauaggaaauggguguuuugaauucuaucacaaguguaacgaugaaugcauggagaguguaaagaauggaacuuaugacuauccaaaauauuccgaagaaucaaaguuaaacagggagaaaauugauggagugaaauuggaaucaaugggagucuaucagauucuggcgaucuacucaacagucgccaguucucugguucuuuuggucucccugggggcaaucagcuucuggauguguuccaaugggucuuugcaguguagaauaugcaucuaa

SEQ ID NO: 35144 - RNA, 1701 nt, Artificial Sequence; identical to SEQ ID NO: 34668
  derived and/or modified CDS sequence (wt) from hemagglutinin__InfluenzaA__ACU29949

SEQ ID NO: 35145 - RNA, 1701 nt, Artificial Sequence
  derived and/or modified CDS sequence (wt) from hemagglutinin__InfluenzaA__ACU29979
augaaggcaauacuaguaguucugcuauauacauuugcagccgcaaaugcagacacauuauguauagguuaucaugcgaacaauucaacagacacuguagacacaguacuagaaaagaauguaacaguaacacacucuguuaaccuucuagaagacaagcauaacgggaaacuaugcaaacuaagagggguagccccauugcauuuggguaaauguaacauugcuggcuggauccugggaaauccagagugugaaucacucuccacagcaagcucaugguccuacauuguggaaacaucuaguucagacaauggaacguguuacccaggagauuucaucgauuaugaggagcuaagagagcaauugagcucagugucaucauuugaaagguuugagauauuccccaagacaaguucauggcccaaucaugacucgaacaaagguguaacggcagcauguccucaugcuggagcaaaaagcuucuacaaaaauuuaauauggcuaguuaaaaaaggaaauucauacccaaagcucagcaaauccuacauuaaugauaaagggaaagaaguccucgugcuauggggcauucaccauccaucuacuagugcugaccaacaaagucucuaucagaaugcagaugcauauguuuuuguggggacaucaagauacagcaagaaguucaagccggaaauagcaauaagacccaaagugagggaucaagaagggagaaugaacuauuacuggacacuaguagagccgggagacaaaauaacauucgaagcaacuggaaaucuagugguaccgagauaugcauucgcaauggaaagaaaugcuggaucugguauuaucauuucagauacaccaguccacgauugcaauacaacuugucagacacccaagggugcuauaaacaccagccucccauuucagaauauacauccgaucacaauuggaaaauguccaaaauauguaaaaagcacaaaauugagacuggccacaggauugaggaaugucccgucuauucaaucuagaggccuauuuggggccauugccgguuucauugaagggggguggacagggaugguagauggaugguacgguuaucaccaucaaaaugagcaggggucaggauaugcagccgaccugaagagcacacagaaugccauugacgagauuacuaacaaaguaaauucuguuauugaaaagaugaauacacaguucacagcaguagguaaagaguucaaccaccuggaaaaaagaauagagaauuuaaauaaaaaaguugaugaugguuuccuggacauuuggacuuacaaugccgaacuguugguucuauuggaaaaugaaagaacuuuggacuaccacgauucaaaugugaagaacuuauaugaaaagguaagaagccaguuaaaaaacaaugccaaggaaauuggaaacggcugcuuugaauuuuaccacaaaugcgauaacacgugcauggaaagugucaaaaaugggacuuaugacuacccaaaauacucagaggaagcaaaauuaaacagagaagaaauagaugggguaaagcuggaaucaacaaggauuuaccagauuuuggcgaucuauucaacugucgccaguucauugguacugguagucucccugggggcaaucaguuucuggaugugcucuaaugggucucuacaguguagaauauguauuuaa

SEQ ID NO: 35146 - RNA, 1701 nt, Artificial Sequence; identical to SEQ ID NO: 34681
  derived and/or modified CDS sequence (wt) from hemagglutinin__InfluenzaA__ACU29989

SEQ ID NO: 35147 - RNA, 1704 nt, Artificial Sequence
  derived and/or modified CDS sequence (wt) from hemagglutinin__InfluenzaA__ACU29999
augaaggcaauacuaguaguucugcuauauacauuugcaaccgcaaaugcagacacauuauguauagguuaucaugcgaacaauucaacagacacuguagacacaguacuagaaaagaauguaacaguaacacacucuguuaaccuucuagaagacaagcauaacgggaaacuaugcaaacuaagagggguagccccauugcauuuggguaaauguaacauugcuggcuggauccugggaaauccagagugugaaucacucuccacagcaagcucaugguccuacauuguggaaacaucuaguucagacaauggaacguguuacccaggagauuucaucgauuaugaggagcuaagagagcaauugagcucagugucaucauuugaaagguuugagauauuccccaagacaaguucauggcccaaucaugauucgaacaaagguguaacggcagcauguccucaugcuggagcaaaaagcuucuacaaaaauuuaauauggcuaguuaaaaaaggaaauucauacccaaagcucagcaaauccuacauuaaugauaaagggaaagaaguccucgugcuauggggcauucaccauccaucuacuagugcugaccaacaaagucucuaucagaaugcagaugcauauguuuuuguggggacaucaagauacagcaagaaguucaagccggaaauagcaauaagacccaaagugagggaucaagaagggagaaugaacuauuacuggacacuaguagagccgggagacaaaauaacauucgaagcaacuggaaaucuagugguaccgagauaugcauucgcaauggaaagaaaugcuggaucugguauuaucauuucagauacaccaguccacgauugcaauacaacuugucagacacccaagggugcuauaaacaccagccucccauuucagaauauacauccgaucacaauuggaaaauguccaaaauauguaaaaagcacaaaauugagacuggccacaggauugaggaaugucccgucuauucaaucuagaggccuauuuggggccauugccgguuucauugaagggggguggacagggaugguagauggaugguacgguuaucaccaucaaaaugagcaggggucaggauaugcagccgaccugaagagcacacagaaugccauugacgagauuacuaacaaaguaaauucuguuauugaaaagaugaauacacaguucacagcaguagguaaagaguucaaccaccuggaaaaaagaauagagaauuuaaauaaaaaaguugaugaugguuuccuggacauuuggacuuacaaugccgaacuguugguucuauuggaaaaugaaagaacuuuggacuaccacgauucaaaugugaagaacuuauaugaaaagguaagaagccaguuaaaaaacaaugccaaggaaauuggaaacggcugcuuugaauuuuaccacaaaugcgauaacacgugcauggaaagugucaaaaaugggacuuaugacuacccaaaauacucagaggaagcaaaauuaaacagagaagaaauagaugggguaaagcuugaaucaacaaggauuuaccagauuuuggcgaucuauucaacugucgccaguucauugguacugguagucucccugggggcaaucaguuucuggaugugcucuaaugggucucuucuacaguguagaauauguauuuaa

SEQ ID NO: 35148 - RNA, 1704 nt, Artificial Sequence
  derived and/or modified CDS sequence (wt) from hemagglutinin__InfluenzaA__ACU30009
auggaggcaauacuaguaguucugcuauauacauuugcaaccgcaaaugcagacacauuauguauagguuaucaugcgaacaauucaacagacacuguagacacaguacuagaaaagaauguaacaguaacacacucuguuaaccuucuagaagacaagcauaacgggaaacuaugcaaacuaagagggguagccccauugcauuuggguaaauguaacauugcuggcuggauccugggaaauccagagugugaaucacucuccacagcaagcucaugguccuacauuguggaaacaucuaguucagacaauggaacguguuacccaggagauuucaucgauuaugaggagcuaagagagcaauugagcucagugucaucauuugaaagguuugagauauuccccaagacaaguucauggcccaaucaugacucgaacaaagguguaacggcagcauguccucaugcuggagcaaaaagcuucuacaaaaauuuaauauggcuaguuaaaaaaggaaauucauacccaaagcucagcaaauccuacauuaaugauaaagggaaagaaguccucgugcuauggggcauucaccauccaucuacuagugcugaccaacaaagucucuaucagaaugcagaugcauauguuuuuguggggucaucaagauacagcaagaaguucaagccggaaauagcaauaagacccaaagugagggaucaagaagggagaaugaacuauuacuggacacuaguagagccgggagacaaaauaacauucgaagcaacuggaaaucuagugguaccgagauaugcauucgcaauggaaagaaaugcuggaucugguauuaucauuucagauacaccaguccacgauugcaauacaacuugucagacacccaagggugcuauaaacaccagccucccauuucauaauauacauccgaucacaauuggaaaauguccaaaauauguaaaaagcacaaaauugagacuggccacaggauugaggaaugucccgucuauucaaucuagaggccuauuuggggccauugccgguuucauugaagggggguggacagggaugguagauggaugguacgguuaucaccaucaaaaugagcaggggucaggauaugcagccgaccugaagagcacacagaaugccauugacgagauuacuaacaaaguaaauucuguuauugaaaagaugaauacacaguucacagcaguagguaaagaguucaaccaccuggaaaaaagaauagagaauuuaaauaaaaaaguugaugaugguuuccuggacauuuggacuuacaaugccgaacuguugguucuauuggaaaaugaaagaacuuuggacuaccacgauucaaaugugaagaacuuauaugaaaagguaagaagccaguuaaaaaacaaugccaaggaaauuggaaacggcugcuuugaauuuuaccacaaaugcgauaacacgugcauggaaagugucaaaaaugggacuuaugacuacccaaaauacucagaggaagcaaaauuaaacagagaagaaauagaugggguaaaacuggaaucaacaaggauuuaccagauuuuggcgaucuauucaacugucgccaguucauugguacugguagucucccugggggcaaucaguuucuggaugugcucuggauaugggucucuacaguguagaauauguauuuaa

SEQ ID NO: 35149 - RNA, 1701 nt, Artificial Sequence; identical to SEQ ID NO: 35041
  derived and/or modified CDS sequence (wt) from hemagglutinin__InfluenzaA__ACU30019

SEQ ID NO: 35150 - RNA, 1701 nt, Artificial Sequence; identical to SEQ ID NO: 34861
  derived and/or modified CDS sequence (wt) from hemagglutinin__InfluenzaA__ACU30093

SEQ ID NO: 35151 - RNA, 1701 nt, Artificial Sequence
  derived and/or modified CDS sequence (wt) from hemagglutinin__InfluenzaA__ACU30103
augaaggcaauacuaguaguucugcuauauacauuugcaaccgcaaaugcagacacauuauguauagguuaucaugcgaacaauucaacagacacuguagacacaguacuagaaaagaauguaacaguaacacacucuguuaaccuucuagaagacaagcauaacgggaaacuaugcaaacuaagagggguagccccauugcauuuggguaaauguaacauugcuggcuggauccugggaaauccagagugugaaucacucuccacagcaagcucaugguccuacauuguggaaacaucuaguucagacaauggaacguguuacccaggagauuucaucgauuaugaggagcuaagagagcaauugagcucagugucaucauuugaaagguuugagauauuccccaagacaaguucauggcccaaucaugacucgaacaaagggguaacggcagcauguccucaugcuggagcaaaaagcuucuacaaaaauuuaauauggcuaguuaaaaaaggaaauucauacccaaagcucagcaaauccuacauuaaugauaaagggaaagaaguccucgugcuauggggcauucaccauccaucuacuagugcugaccaacaaagucucuaucagaaugcagaugcauauguuuuuguggggacaucaagauacagcaagaaguucaagccggaaauagcaauaagacccaaagugagggaucaagaagggagaaugaacuaucacuggacacuaguagagccgggagacaaaauaacauucgaagcaacuggaaaucuagugguaccgagauaugcauucgcaauggaaagaaaugcuggaucugguauuaucauuucagauacaccaguccacgauugcaauacaacuugucagacacccaagggugcuauaaacaccagccucccauuucagaauauacauccgaucacaauugggaaauguccaaaauauguaaaaagcacaaaauugagacuggccacaggauugaggaaugucccgucuauucaaucuagaggccuauuuggggccauugccgguuucauugaagggggguggacagggaugguagauggaugguacgguuaucaccaucaaaaugagcaggggucaggauaugcagccgaccugaagagcacacagaaugccauugacgagauuacuaacaaaguaaauucuguuauugaaaagaugaauacacaguucacagcaguagguaaagaguucaaccaccuggaaaaaagaauagagaauuuaaauaaaaaaguugaugaugguuuccuggacauuuggacuuacaaugccgaacuguugguucuauuggaaaaugaaagaacuuuggacuaccacgauucaaaugugaagaacuuauaugaaaagguaagaagccaguuaaaaaacaaugccaaggaaauuggaaacggcugcuuugaauuuuaccacaaaugcgauaacacgugcauggaaagugucaaaaaugggacuuaugacuacccaaaauacucagaggaagcaaaauuaaacagagaagaaauagaugggguaaagcuggaaucaacaaggauuuaccagauuuuggcgaucuauucaacugucgccaguucauugguacugguagucucccugggggcaaucaguuucuggaugugcucuaaugggucucuacaguguagaauauguauuuaa

SEQ ID NO: 35152 - RNA, 1704 nt, Artificial Sequence
  derived and/or modified CDS sequence (wt) from hemagglutinin__InfluenzaA__ACU30112
auggaggcaauacuaguaguucugcuauauacauuugcaaccgcaaaugcagacacauuauguauagguuaucaugcgaacaauucaacagacacuguagacacaguacuagaaaagaauguaacaguaacacacucuguuaaccuucuagaagacaagcauaacgggaaacuaugcaaacuaagagggguagccccauugcauuuggguaaauguaacauugcuggcuggauccugggaaauccagagugugaaucacucuccacagcaagcucaugguccuacauuguggaaacaucuaguucagacaauggaacguguuacccaggagauuucaucgauuaugaggagcuaagagagcaauugagcucagugucaucauuugaaagguuugagauauuccccaagacaaguucauggcccaaucaugacucgaacaaagguguaacggcagcauguccucaugcuggagcaaaaagcuucuacaaaaauuuaauauggcuaguuaaaaaaggaaauucauacccaaagcucagcaaauccuacauuaaugauaaagggaaagaaguccucgugcuauggggcauucaccauccaucuacuagugcugaccaacaaagucucuaucagaaugcagaugcauauguuuuuguggggucaucaagauacagcaagaaguucaagccggaaauagcaauaagacccaaagugagggaucaagaagggagaaugaacuauuacuggacacuaguagagccgggagacaaaauaacauucgaagcaacuggaaaucuagugguaccgagauaugcauucgcaauggaaagaaaugcuggaucugguauuaucauuucagauacaccaguccacgauugcaauacaacuugucagacacccaagggugcuauaaacaccagccucccauuucauaauauacauccgaucacaauuggaaaauguccaaaauauguaaaaagcacaaaauugagacuggccacaggauugaggaaugucccgucuauucaaucuagaggccuauuuggggccauugccgguuucauugaagggggguggacagggaugguagauggaugguacgguuaucaccaucaaaaugagcaggggucaggauaugcagccgaccugaagagcacacagaaugccauugacgagauuacuaacaaaguaaauucuguuauugaaaagaugaauacacaguucacagcaguagguaaagaguucaaccaccuggaaaaaagaauagagaauuuaaauaaaaaaguugaugaugguuuccuggacauuuggacuuacaaugccgaacuguugguucuauuggaaaaugaaagaacuuuggacuaccacgauucaaaugugaagaacuuauaugaaaagguaagaagccaguuaaaaaacaaugccaaggaaauuggaaacggcugcuuugaauuuuaccacaaaugcgauaacacgugcauggaaagugucaaaaaugggacuuaugacuacccaaaauacucagaggaagcaaaauuaaacagagaagaaauagaugggguaaagcuggaaucaacaaggauuuaccagauuuuggcgaucuauucaacugucgccaguucauugguacugguagucucccugggggcaaucaguuucuggaugugcucucauaugguccugcuacaguguagaauauguauuuaa

SEQ ID NO: 35153 - RNA, 1701 nt, Artificial Sequence
  derived and/or modified CDS sequence (wt) from hemagglutinin__InfluenzaA__ACU30121
auggaggcaauacuaguaguucugcuauauacauuugcaaccgcaaaugcagacacauuauguauagguuaucaugcgaacaauucaacagacacuguagacacaguacuagaaaagaauguaacaguaacacacucuguuaaccuucuagaagacaagcauaacgggaaacuaugcaaacuaagagggguagccccauugcauuuggguaaauguaacauugcuggcuggauccugggaaauccagagugugaaucacucuccacagcaagcucaugguccuacauuguggaaacaucuaguucagacaauggaacguguuacccaggagauuucaucgauuaugaggagcuaagagagcaauugagcucagugucaucauuugaaagguuugagauauuccccaagacaaguucauggcccaaucaugacucgaacaaagguguaacggcagcauguccucaugcuggagcaaaaagcuucuacaaaaauuuaauauggcuaguuaaaaaaggaaauucauacccaaagcucagcaaauccuacauuaaugauaaagggaaagaaguccucgugcuauggggcauucaccauccaucuacuagugcugaccaacaaagucucuaucagaaugcagaugcauauguuuuuguggggucaucaagauacagcaagaaguucaagccggaaauagcaauaagacccaaagugagggaucaagaagggagaaugaacuauuacuggacacuaguagagccgggagacaaaauaacauucgaagcaacuggaaaucuagugguaccgagauaugcauucgcaauggaaagaaaugcuggaucugguauuaucauuucagauacaccaguccacgauugcaauacaacuugucagacacccaagggugcuauaaacaccagccucccauuucauaauauacauccgaucacaauuggaaaauguccaaaauauguaaaaagcacaaaauugagacuggccacaggauugaggaaugucccgucuauucaaucuagaggccuauuuggggccauugccgguuucauugaagggggguggacagggaugguagauggaugguacgguuaucaccaucaaaaugagcaggggucaggauaugcagccgaccugaagagcacacagaaugccauugacgagauuacuaacaaaguaaauucuguuauugaaaagaugaauacacaguucacagcaguagguaaagaguucaaccaccuggaaaaaagaauagagaauuuaaauaaaaaaguugaugaugguuuccuggacauuuggacuuacaaugccgaacuguugguucuauuggaaaaugaaagaacuuuggacuaccacgauucaaaugugaagaacuuauaugaaaagguaagaaaccaguuaaaaaacaaugccaaggaaauuggaaacggcugcuuugaauuuuaccacaaaugcgauaacacgugcauggaaagugucaaaaaugggacuuaugacuacccaaaauacucagaggaagcaaaauuaaacagagaagaaauagaugggguaaagcuggaaucaacaaggauuuaccagauuuuggcgaucuauucaacugucgccaguucauugguacugguagucucccugggggcaaucaguuucuggaugugcucuaaugggucucuacaguguagaauauguauuuaa

SEQ ID NO: 35154 - RNA, 1701 nt, Artificial Sequence; identical to SEQ ID NO: 34774
  derived and/or modified CDS sequence (wt) from hemagglutinin__InfluenzaA__ACU31124

SEQ ID NO: 35155 - RNA, 1701 nt, Artificial Sequence; identical to SEQ ID NO: 34713
  derived and/or modified CDS sequence (wt) from hemagglutinin__InfluenzaA__ACU31143

SEQ ID NO: 35156 - RNA, 1701 nt, Artificial Sequence; identical to SEQ ID NO: 34713
  derived and/or modified CDS sequence (wt) from hemagglutinin__InfluenzaA__ACU31144

SEQ ID NO: 35157 - RNA, 1701 nt, Artificial Sequence; identical to SEQ ID NO: 34713
  derived and/or modified CDS sequence (wt) from hemagglutinin__InfluenzaA__ACU31145

SEQ ID NO: 35158 - RNA, 1701 nt, Artificial Sequence; identical to SEQ ID NO: 34898
  derived and/or modified CDS sequence (wt) from hemagglutinin__InfluenzaA__ACU31146

SEQ ID NO: 35159 - RNA, 1701 nt, Artificial Sequence; identical to SEQ ID NO: 34681
  derived and/or modified CDS sequence (wt) from hemagglutinin__InfluenzaA__ACU31147

SEQ ID NO: 35160 - RNA, 1701 nt, Artificial Sequence
  derived and/or modified CDS sequence (wt) from hemagglutinin__InfluenzaA__ACU31148
augaaggcaauacuaguaauuaugcuauauacauuugcaaccgcaaaugcagacacauuauguauagguuaucaugcgaacaauucaacagacacuguagacacaguacuagaaaagaauguaacaguaacacacucuguuaaccuucuagaagacaagcauaacgggaaacuaugcaaacuaagagggguagccccauugcauuuggguaaauguaacauugcuggcuggauccugggaaauccagagugugaaucacucuccacagcaagcucaugguccuacauuguggaaacaucuaguucagacaauggaacguguuacccaggagauuucaucgauuaugaggagcuaagagagcaauugagcucagugucaucauuugaaagguuugagauauuccccaagacaaguucauggcccaaucaugacucgaacaaagguguaacggcagcauguccucaugcuggagcaaaaagcuucuacaaaaauuuaauauggcuaguuaaaaaaggaaauucauacccaaagcucagcaaauccuacauuaaugauaaagggaaagaaguccucgugcuauggggcauucaccauccaucuacuagugcugaccaacaaagucucuaucagaaugcagaugcauauguuuuuguggggucaucaagauacagcaagaaguucaagccggaaauagcaauaagacccaaagugagggaucaagaagggagaaugaacuauuacuggacacuaguagagccgggagacaaaauaacauucgaagcaacuggaaaucuagugguaccgagauaugcauucgcaauggaaagaaaugcuggaucugguauuaucauuucagauacaccaguccacgauugcaauacaacuugucagacacccaagggugcuauaaacaccagccucccauuucagaauauacauccgaucacaauuggaaaauguccaaaauauguaaaaagcacaaaauugagacuggccacaggauugaggaaugucccgucuauucaaucuagaggccuauuuggggccauugccgguuucauugaagggggguggacagggaugguagauggaugguacgguuaucaccaucaaaaugagcaggggucaggauaugcagccgaccugaagagcacacagaaugccauugacgagauuacuaacaaaguaaauucuguuauugaaaagaugaauacacaguucacagcaguagguaaagaguucaaccaccuggaaaaaagaauagagaauuuaaauaaaaaaguugaugaugguuuccuggacauuuggacuuacaaugccgaacuguugguucuauuggaaaaugaaagaacuuuggacuaccacgauucaaaugugaagaacuuauaugaaaagguaagaagccagcuaaaaaacaaugccaaggaaauuggaaacggcugcuuugaauuuuaccacaaaugcgauaacacgugcauggaaagugucaaaaaugggacuuaugacuacccaaaauacucagaggaagcaaaauuaaacagagaagaaauagaugggguaaagcuggaaucaacaaggauuuaccagauuuuggcgaucuauucaacugucgccaguucauugguacugguagucucccugggggcaaucaguuucuggaugugcucuaaugggucucuacaguguagaauauguauuuaa

SEQ ID NO: 35161 - RNA, 1701 nt, Artificial Sequence; identical to SEQ ID NO: 34705
  derived and/or modified CDS sequence (wt) from hemagglutinin__InfluenzaA__ACU31149

SEQ ID NO: 35162 - RNA, 1701 nt, Artificial Sequence; identical to SEQ ID NO: 35068
  derived and/or modified CDS sequence (wt) from hemagglutinin__InfluenzaA__ACU31150

SEQ ID NO: 35163 - RNA, 1701 nt, Artificial Sequence; identical to SEQ ID NO: 35068
  derived and/or modified CDS sequence (wt) from hemagglutinin__InfluenzaA__ACU31151

SEQ ID NO: 35164 - RNA, 1701 nt, Artificial Sequence; identical to SEQ ID NO: 35068
  derived and/or modified CDS sequence (wt) from hemagglutinin__InfluenzaA__ACU31152

SEQ ID NO: 35165 - RNA, 1707 nt, Artificial Sequence
  derived and/or modified CDS sequence (wt) from hemagglutinin__InfluenzaA__ACU46644
auggagaaaauagugcuucuuuuugcaauagucagucuuguuaaaagugaucagauuugcauugguuaccaugcaaacaacucgacagagcagguugacacaauaauggaaaagaacguuacuguuacacaugcccaagacauacuggaaaagacacacaacgggaagcucugcgaucuagauggagggaagccucuaauuuugagagauuguaggguagcuggauggcuccucggaaacccaaugugugacgaauucaucaaugugccggaauggucuuacauaguggagaaggccaauccagucaaugaccucuguuacccaggggauuucaaugacuaugaagaauugaaacaccuauugagcagaauaaaccauuuugagaaaauucagaucauccccaaaaguucuugguccagucaugaagccucauuaggggugagcucagcauguccauaccagggaaaguccuccuuuuucagaaaugugguauggcuuaucaaaaagaacaguacauacccaacaauaaagaggagcuacaauaauaccaaccaagaagaucuuuugguacugugguggauucaccauccuaaugaugcggcagagcagacaaagcucuaucaaaacccaaccaccuauauuuccguugggacaucaacacuaaaccagagauugguaccaagaauagcuacuagauccaaaguaaacgggcaaaguggaaggauggaguucuucuggacaauuuuaaaaccgaaugaugcaaucaacuucgagaguaauggaaauuucauugcuccagaauaugcauacaaaauugucaagaaaggggacucaacaauuaugaaaagugaauuggaauaugguaacugcaacaccaagugucaaacuccaaugggggcgauaaacucuaguaugccauuccaccauauacauccucucaccaucggggaaugccccaaauaugugaaaucaaacagauuaguccuugcgacugggcucagaaauagcccucaaagagagagaagaagaaaaaagagaggauuauuuggagcuauagcagguuuuauagagggaggauggcagggaaugguagaugguugguauggguaccaccauagcaaugagcaggggaguggguacgcugcagacaaagaauccacucaaaaggcaauagauggagucaccaauaaggucaacucgaucauugacaaaaugaacacucaguuugaggccguuggaagggaauuuaaccacuuagaaaggagaauagagaauuuaaacaagaagauggaagacggguuccuagaugucuggacuuauaaugcugaacuucugguucucauggaaaaugagagaacucuagacuuucaugacucaaaugucaagaaccuuuacgacaagguccgacuacagcuuagggauaaugcaaaggagcuggguaacgguuguuucgaguucuaucauaaaugugaugaugaauguauggaaaguguaagaaacggaacguaugacuacccgcaguauucagaagaagcaagacuaaaaagagaggaaauaaguggaguaaaauuggaaucgauaggaauuuaccaaauacugucaauuuauucuacaguggcgaguucccuagcacuggcaaucaugguagcuggucuauccuuauggaugugcuccaaugggucguuacaaugcagaauuugcauuuaa

SEQ ID NO: 35166 - RNA, 1701 nt, Artificial Sequence
  derived and/or modified CDS sequence (wt) from hemagglutinin__InfluenzaA__ACU56924
augaaggcaauacuaguaguucugcuauauacauuugcaaccgcaaaugcagacacauuauguauagguuaucaugcgaacaauucaacagacacuguagacacaguacuagaaaagaauguaacaguaacacacucuguuaaccuucuagaagacaagcauaacgggaaacuaugcaaacuaagagggguagccccauugcauuuggguaaauguaacauugcuggcuggauccugggaaauccagagugugaaucacucuccacagcaagcucaugguccuacauuguggaaacaucuaguucagacaauggaacguguuacccaggagauuucaucgauuaugaggagcuaagagagcaauugagcucagugucaucauuugaaagguuugagauauuccccaagacaaguucauggcccaaucaugacucgaacaaagguguaacggcagcauguccucaugcuggagcaaaaagcuucuacaaaaauuuaauauggcuaguuaaaaaaggaaauucauacccaaagcucagcaaauccuacauuaaugauaaagggaaagaaguccucgugcuauggggcauucaccauccaucuacuagugcugaccaacaaagucucuaucagaaugcagaugcauauguuuuuguggggacaucaagauacagcaagaaguucaagccggaaauagcaauaagacccaaagugagggaucgagaagggagaaugaacuauuacuggacacuaguagagccgggagacaaaauaacauucgaagcaacuggaaaucuagugguaccgagauaugcauucgcaauggaaagaaaugcuggaucugguauuaucauuucagauacaccaguccacgauugcaauacaacuugucagacacccaagggugcuauaaacaccagccucccauuucagaauauacauccgaucacaauuggaaaauguccaaaauauguaaaaagcacaaaauugagacuggccacaggauugaggaaugucccgucuauucaaucuagaggccuauuuggggccauugccgguuucauugaagggggguggacagggaugguagauggaugguacgguuaucaccaucaaaaugagcaggggucaggauaugcagccgaccugaagagcacacagaaugccauugacgagauuacuaacaaaguaaauucuguuauugaaaagaugaauacacaguucacagcaguagguaaagaguucaaccaccuggaaaaaagaauagagaauuuaaauaaaaaaguugaugaugguuuccuggacauuuggacuuacaaugccgaacuguugguucuauuggaaaaugaaagaacuuuggacuaccacgauucaaaugugaagaacuuauaugaaaagguaagaagccaguuaaaaaacaaugccaaggaaauuggaaacggcugcuuugaauuuuaccacaaaugcgauaacacgugcauggaaagugucaaaaaugggacuuaugacuacccaaaauacucagaggaagcaaaauuaaacagagaagaaauagaugggguaaagcuggaaucaacaaggauuuaccagauuuuggcgaucuauucaacugucgccaguucauugguacugguagucucccugggggcaaucaguuucuggaugugcucuaaugggucucuacaguguagaauauguauuuaa

SEQ ID NO: 35167 - RNA, 1701 nt, Artificial Sequence
  derived and/or modified CDS sequence (wt) from hemagglutinin__InfluenzaA__ACU56931
augaaggcaauacuaguaguucugcuauauacauuugcaaccgcaaaugcagacacauuauguauagguuaucaugcgaacaauucaacagacacuguagacacaguacuagaaaagaauguaacaguaacacacucuguuaaccuucuagaagacaagcauaacgggaaacuaugcaaacuaagagggguagccccauugcauuuggguaaauguaacauugcuggcuggauccugggaaauccagagugugaaucacucuccacagcaagcucaugguccuacauuguggaaacaucuaguucagacaauggaacguguuacccaggagauuucaucgauuaugaggagcuaagagagcaauugagcucagugucaucauuugaaagguuugagauauuccccaagacaaguucauggcccaaucaugacucgaacaaagguguaacggcagcauguccucaugcuggagcaaaaagcuucuacaaaaauuuaauauggcuaguuaaaaaaggaaauucauacccaaagcucagcaaauccuacauuaaugauaaagggaaagaaguccucgugcuauggggcauucaccauccaucuacuagugcugaccaacaaagucucuaucagaaugcagaugcauauguuuuuguggggacaucaagauacagcaagaaguucaagccggaaauagcaauaagacccaaagugagggaacaagaagggagaaugaacuauuacuggacacuaguagagccgggagacaaaauaacauucgaagcaacuggaaaucuagugguaccgagauaugcauucgcaauggaaagaaaugcuggaucugguauuaucauuucagauacaccaguccacgauugcaauacaacuugucagacacccaagggugcuauaaacaccagccucccauuucagaauauacauccgaucacaauuggaaaauguccaaaauauguaaaaagcacaaaauugagacuggccacuggauugaggaaugucccgucuauucaaucuagaggccuauuuggggccauugccgguuucauugaagggggguggacagggaugguagauggaugguacgguuaucaccaucaaaaugagcaggggucaggauaugcagccgaccugaagagcacacagaaugccauugacgagauuacuaacaaaguaaauucuguuauugaaaagaugaauacacaguucacagcaguagguaaagaguucaaccaccuggaaaaaagaauagagaauuuaaauaaaaaaguugaugaugguuuccuggacauuuggacuuacaaugccgaacuguugguucuauuggaaaaugaaagaacuuuggacuaccacgauucaaaugugaagaacuuauaugaaaagguaagaagccaguuaaaaaacaaugccaaggaaauuggaaacggcugcuuugaauuuuaucacaaaugcgauaacacgugcauggaaagugucaaaaaugggacuuaugacuacccaaaauacucagaggaagcaaaauuaaacagagaagaaauagaugggguaaagcuggaaucaacaaggauuuaccagauuuuggcgaucuauucaacugucgccaguucauugguacugguagucucccugggggcaaucaguuucuggaugugcucuaaugggucucuacaguguagaauauguauuuaa

SEQ ID NO: 35168 - RNA, 1701 nt, Artificial Sequence; identical to SEQ ID NO: 34681
  derived and/or modified CDS sequence (wt) from hemagglutinin__InfluenzaA__ACU64792

SEQ ID NO: 35169 - RNA, 1701 nt, Artificial Sequence; identical to SEQ ID NO: 34898
  derived and/or modified CDS sequence (wt) from hemagglutinin__InfluenzaA__ACU64801

SEQ ID NO: 35170 - RNA, 1701 nt, Artificial Sequence; identical to SEQ ID NO: 34898
  derived and/or modified CDS sequence (wt) from hemagglutinin__InfluenzaA__ACU64812

SEQ ID NO: 35171 - RNA, 1701 nt, Artificial Sequence; identical to SEQ ID NO: 34331
  derived and/or modified CDS sequence (wt) from hemagglutinin__InfluenzaA__ACU79871

SEQ ID NO: 35172 - RNA, 1701 nt, Artificial Sequence
  derived and/or modified CDS sequence (wt) from hemagglutinin__InfluenzaA__ACU79882
augaagaccaucauugcuuugagcuacauuuucugucuggcucucggccaagaccuuccaggaaaugacaacagcacagcaacgcugugccugggacaucaugcggugccaaacggaacacuagugaaaacaaucacagaugaucagauugaagugacuaaugcuacugagcuaguucagagcuccucaacggggaaaauaugcaacaauccucaucgaauccuugauggaauagacugcacacugauagaugcucuauugggggacccucauugugauguuuuucaaaaugagacaugggaccuuuucguugaacgcagcaaagcuuucagcaacuguuacccuuaugaugugccagauuaugccucccuuaggucacuaguugccucgucaggcacucuggaguuuaucacugaggguuucacuuggacuggggucacucagaaugggggaagcaaugcuugcaaaaggggaccugguagcgguuuuuucaguagacugaacugguugaccaaaucaggaagcacauauccagugcugaacgugacuaugccaaacaaugacaauuuugacaaacuauacauuugggggguucaccacccgagcacgaaccaagaacaaaccagccuguauguucaagcaucagggagagucacagucucuaccagaagaagccagcaaacuauaaucccgaauaucugguccagacccuggguaaggggucugucuaguagaauaagcaucuauuggacaauaguuaagccgggagacguacugguaauuaauaguaaugggaaccuaaucgcuccucgggguuauuucaaaaugcgcacugggaaaagcucaauaaugaggucagaugcaccuauugauaccuguauuucugaaugcaucacuccaaauggaagcauucccaaugacaagcccuuucaaaacguaaacaagaucacauauggagcaugccccaaguauguuaagcaaaacacccugaaguuggcaacagggaugcggaauguaccagagaaacaaacuagaggccuauucggcgcaauagcagguuucauagaaaaugguugggagggaaugauagacgguugguacgguuucaggcaucaaaauucugagggcacaggacaagcagcagaucuuaaaagcacucaagcagccaucgaccaaaucaaugggaaauugaacaggguaaucgagaagacgaacgagaaauuccaucaaaucgaaaaggaauucucagaaguagaaggaagaauucaggaccucgagaaauacguugaagacacuaaaauagaucucuggucuuacaaugcggagcuucuugucgcucuggagaaucaacauacaauugaccugacugacucggaaaugaacaagcuguuugaaaaaacaaggaggcaacugagggaaaaugcugaagacaugggcaaugguugcuucaaaauauaccacaaaugugacaacgcuugcauagagucaaucagaaaugggaauuaugaccaugauguauacagagacgaagcauuaaacaaccgguuucagaucaaagguguugaacugaagucuggauacaaagacuggauccuguggauuuccuuugccauaucaugcuuuuugcuuuguguuguuuugcugggguucaucaugugggccugccagagaggcaacauuaggugcaacauuugcauuuga

SEQ ID NO: 35173 - RNA, 1701 nt, Artificial Sequence; identical to SEQ ID NO: 34416
  derived and/or modified CDS sequence (wt) from hemagglutinin__InfluenzaA__ACU79893

SEQ ID NO: 35174 - RNA, 1701 nt, Artificial Sequence; identical to SEQ ID NO: 34417
  derived and/or modified CDS sequence (wt) from hemagglutinin__InfluenzaA__ACU79904

SEQ ID NO: 35175 - RNA, 1698 nt, Artificial Sequence
  derived and/or modified CDS sequence (wt) from hemagglutinin__InfluenzaA__ACU79937
augaaagcaaaacuacuaguccuguuauguacauuuacagcuacauaugcagacacaauauguauaggcuaccaugccaacaacucaaccgacacuguugacacaguacuugagaagaaugugacagugacacacucugucaaccuacuugaggacagucacaauggaaaacuaugucuacuaaaaggaauagccccacuacaauuggguaauugcagcguugccggauggaucuuaggaaacccagaaugcgaaucacugauuucuaaggaaucaugguccuacauuguagagacaccaaacccugagaauggaacauguuacccaggguauuucgccgacuaugaggaacugagggagcaauugaguucaguaucaucauuugagagauucgaaauauuccccaaagaaagcucauggcccaaccacaccguaacaggaguaacggcaucaugcucccauaaugggaaaagcaguuuuuacagaaauuugcuauggcugacggagaaaaauggcuuguacccaaaucugagcaauuccuaugugaacaacaaagagaaagaaguccuuguacuaugggguguucaucacccaucuaacauagggguccaaagggccaucuaucauacagaaaacgcuuaugucucuguagugucuucacauuauagcagaagauucaccccagaaauagcaaaaagacccaaaguaagaggucaggaaggaagaaucaacuacuacuggacucugcuggaacccggggacacaauaauauuugaggcaaauggaaaucuaauagcgccaugguaugcuuucgcacugaguagaggcuuugggucaggaaucaucaccucaaaugcaccaaugaaugaaugugaugcgaagugucaaacaccucagggagcuauaaacaguagucuuccuuuccagaauguacacccagucacaauaggagaguguccaaaguaugucaggaguacaaaauuaaggaugguuacaggacuaaggaauaucccauccauucaauccagagguuuguuuggagccauugccgguuucauugaagggggguggacuggaaugauggaugggugguaugguuaucaucaucagaaugagcaaggaucuggcuaugcugcagaucaaaaaagcacacaaaaugccauuaacgggauuacaaauaaggugaauucuguaauugagaaaaugaacacucaauucacagcugugggcaaagaauucaacaaauuagaaagaaggauggaaaacuuaaauaaaaaaguugaugauggauuucuagacauuuggacauauaaugcagaauuguugguucuacuggaaaaugaaaggacuuuggauuuccaugacucaaaugugaagaaucuguaugagaaagugaaaagccaauuaaagaauaaugccaaagaaauagggaacggguguuuugaauucuaucacaaguguaacaaugaaugcauggaaagugugaaaaauggaacuuaugacuauccaaaauauuccgaagaaucaaaguuaaacagggagaaaauugauggagugaaauuggaaucaaugggagucuaucagauucuggcgaucuacucaacugucgccaguucacugguucuuuuggucucccugggggcaaucagcuucuggauguguuccaaugggucuuugcaguguagaauaugcaucuga

SEQ ID NO: 35176 - RNA, 1689 nt, Artificial Sequence
  derived and/or modified CDS sequence (wt) from hemagglutinin__InfluenzaA__ACU79948
auggccaucauuuaucucauucuccuguucacagcagugagaggggaccagauaugcauuggauaccaugccaauaauuccacagagaaggucgacacaauucuagagcggaacgucacugugacucaugccaaggacauucuugagaagacccauaacggaaaguuaugcaaacuaaacggaaucccuccacuugaacuaggggacuguagcauugccggauggcuccuuggaaauccagaaugugauaggcuucuaagugugccagaaugguccuauauaauggagaaagaaaacccgagagacgguuuguguuauccaggcagcuucaaugauuaugaagaauugaaacaucuccucagcagcgugaaacauuucgagaaaguaaagauucugcccaaagauagauggacacagcauacaacaacuggagguucacgggccugcgcggugucugguaauccaucauucuucaggaacauggucuggcugacaaagaaaggaucagauuauccgguugccaaaggaucguacaacaauacaagcggagaacaaaugcuaauaauuuggggggugcaccaucccaaugaugagacagaacaaagaacauuguaccagaaugugggaaccuauguuuccguaggcacaucaacauugaacaaaaggucaaccccagaaauagcaacaaggccuaaagugaauggacaaggagguagaauggaauucucuuggacccucuuggauaugugggacaccauaaauuuugagaguacugguaaucuaauugcaccagaguauggauucaaaauaucgaaaagagguaguucagggaucaugaaaacagaaggaacacuugagaacugugagaccaaaugccaaacuccuuugggagcaauaaauacaacauugccuuuucacaauguccacccacugacaauaggugagugccccaaauauguaaaaucggagaaguuggucuuagcaacaggacuaaggaauguuccccagauugaaucaagaggauuguuuggggcaauagcugguuuuauagaaggaggauggcaaggaaugguugaugguugguauggauaccaucacagcaaugaccagggaucaggguaugcagcagacaaagaauccacucaaaaggcauuugauggaaucaccaacaauguaaauucugugauugaaaagaugaacacccaauuugaagcuguugggaaagaauucaguaacuuagagagaagacuggagaacuugaacaaaaagauggaagacggguuucuagauguguggacauacaaugcugagcuucuaguucugauggaaaaugagaggacacuugacuuucaugauucuaaugucaagaaucuguaugauaaagucagaaugcagcugagagacaacgucaaagaacuaggaaauggauguuuugaauuuuaucacaaaugugaugaugaaugcaugaauagugugaaaaacgggacguaugauuaucccaaguaugaagaagagucuaaacuaaauagaaaugaaaucaaagggguaaaauugagcagcauggggguuuaucaaauccuugccauuuaugcuacaguagcagguucucugucacuggcaaucaugauggcugggaucucuuucuggaugugcuccaacgggucucugcagugcaggaucugcauauga

SEQ ID NO: 35177 - RNA, 1689 nt, Artificial Sequence
  derived and/or modified CDS sequence (wt) from hemagglutinin__InfluenzaA__ACU79959
auggccaucauuuaucucauucuccuguucacagcagugagaggggaccagauaugcauuggauaccaugccaauaauuccacagagaaggucgacacaauucuagagcggaacgucacugugacucaugccaaggacauucuugagaagacccauaacggaaaguuaugcaaacuaaacggaaucccuccacuugaacuaggggacuguagcauugccggauggcuccuuggaaauccagaaugugauaggcuucuaagugugccagaaugguccuauauaauggagaaagaaaacccgagagacgguuuguguuauccaggcagcuucaaugauuaugaagaauugaaacaucuccucagcagcgugaaacauuucgagaaaguaaagauucugcccaaagauagauggacacagcauacaacaacuggagguucacgggccugcgcggugucugguaauccaucauucuucaggaacauggucuggcugacaaagaaaggaucagauuauccgguugccaaaggaucguacaacaauacaagcggagaacaaaugcuaauaauuuggggggugcaccaucccaaugaugagacagaacaaagaacauuguaccagaaugugggaaccuauguuuccguaggcacaucaacauugaacaaaaggucaaccccagaaauagcaacaaggccuaaagugaauggacaaggagguagaauggaauucucuuggacccucuuggauaugugggacaccauaaauuuugagaguacugguaaucuaauugcaccagaguauggauucaaaauaucgaaaagagguaguucagggaucaugaaaacagaaggaacacuugagaacugugagaccaaaugccaaacuccuuugggagcaauaaauacaacauugccuuuucacaauguccacccacugacaauaggugagugccccaaauauguaaaaucggagaaguuggucuuagcaacaggacuaaggaauguuccccagauugaaucaagaggauuguuuggggcaauagcugguuuuauagaaggaggauggcaaggaaugguugaugguugguauggauaccaucacagcaaugaccagggaucaggguaugcagcagacaaagaauccacucaaaaggcauuugauggaaucaccaacaagguaaauucugugauugaaaagaugaacacccaauuugaagcuguugggaaagaauucaguaacuuagagagaagacuggagaacuugaacaaaaagauggaagacggguuucuagauguguggacauacaaugcugagcuucuaguucugauggaaaaugagaggacacuugacuuucaugauucuaaugucaagaaucuguaugauaaagucagaaugcagcugagagacaacgucaaagaacuaggaaauggauguuuugaauuuuaucacaaaugugaugaugaaugcaugaauagugugaaaaacgggacguaugauuaucccaaguaugaagaagagucuaaacuaaauagaaaugaaaucaaagggguaaaauugagcagcauggggguuuaucaaauccuugccauuuaugcuacaguagcagguucucugucacuggcaaucaugauggcugggaucucuuucuggaugugcuccaacgggucucugcagugcaggaucugcauauga

SEQ ID NO: 35178 - RNA, 1701 nt, Artificial Sequence
  derived and/or modified CDS sequence (wt) from hemagglutinin__InfluenzaA__ACU79970
augaagacuaucauugcuuugagcuacauucaaugucugguuuucgcucaaaaauuuccuggaaaugacaacagcacggcaacgcugugccuugggcaccaugcaguaccaaacggaacgauagugaaaacaaucacgaaugaccaaauugaaguuacuaaugcuacugagcugguucagaguuccucaacaggugaaauaugcgacaguccucaucagauccuugauggagaaaacugcacacuaauagaugcucuauugggagacccucagugugauggcuuccaaaauaagaauugggaccuuuuuguugaacgcagcaaagccuacagcaacuguuacccuuaugaugugccggauuaugccucccuuaggucacuaguugccucauccggcacacuggaguuuaacaaugaaagcuucaauuggacuggagucacucaaaacggaacaagcucugcuugcauaaggagaucuaauaacaguuucuuuaguaaauugaauugguugacccacucaaaauucaaauacccagcauugaacgugacuaugccaaacaaugaaaauuuugacaaauuguacauuugggggguucaccacccggguacggacaaugaccaaaucuuccuguaugcucaagcaucaggaagaaucacagucucuaccaaaagaagccaacaaacuguaaucccgaauaucggaucuagacccagaguaaggaauaucccuagcagaauaagcaucuauuggacaauaguaaaaccgggagacauacuuuugauuaacagcacagggaaucuaauugcuccuagggguuacuucaaaauacgaagugggaaaagcucaauaaugagaucagaugcacccauuggcaaaugcaauucugaaugcaucacuccaaauggaagcauucccaaugacaaaccauuccaaaauguaaacaggaucacauacggggccugucccagauauguuaagcaaaacacucugaaauuggcaacagggaugcgaaauguaccagagaaacaaacuagaggcauauuuggcgcaaucgcugguuucauagaaaaugguugggagggaaugguggaugguugguacgguuucaggcaucaaaauucugagggaauaggacaagcagcagaucucaaaagcacucaagcagcaaucgaucaaaucaaugggaagcugaauagguugaucgggaaaaccaacgagaaauuccaucagauugaaaaagaauucucagaagucgaagggagaauucaggaccuugagaaauauguugaggacaccaaaauagaucucuggucauacaacgcggagcuucuuguugcccuggagaaccaacauacaauugaucuaacugauucagaaaugaacaaacuguuugaaaaaacaaagaagcaacugagggaaaaugcugaggauaugggcaaugguuguuucaaaaucuaccacaaaugugacaaugccugcauaggaucaaucagaaauggaacuuaugaccacgaugucuacagagaugaagcauuaaacaaccgguuccagaucaagggcguugagcugaagucaggauacaaagauuggauccuauggauuuccuuugccauaucauguuuuuugcuuugcauugcuuuguugggguucaucaugugggccugccaaaaaggcaacauuaggugcaacauuugcauuuga

SEQ ID NO: 35179 - RNA, 1698 nt, Artificial Sequence
  derived and/or modified CDS sequence (wt) from hemagglutinin__InfluenzaA__ACU79981
augaaaguaaaacuacugguccuguuaugcacauuuacagcuacauaugcagacacaauauguauaggcuaccaugcuaacaacucgaccgacacuguugacacaguacuugaaaggaaugugacagugacacacucugucaaccugcuugagaacagucacaauggaaaacuaugucuauuaaaaggaauagccccacuacaauuggguaauugcagcguugccggguggaucuuaggaaacccagaaugcgaauuacugauuuccaaggagucaugguccuacauuguagaaaaaccaaauccugagaauggaacauguuacccagggcauuucgcugacuaugaggaacugagggagcaauugaguucaguaucuucauuugagagguucgaaauauuccccaaagaaagcucauggcccaaccacaccguaaccggagugucagcaucaugcucccauaauggggaaagcaguuuuuacagaaauuugcuauggcugacggggaagaaugguuuguacccaaaccugagcaaguccuaugcaaacaacaaagaaaaagaaguccuuguacuaugggguguucaucacccgccaaacauaggugaccaaaaggcccucuaucauacagaaaaugcuuauguuucuguagugucuucacauuauagcagaaaauucaccccagaaauagccaaaagacccaaaguaagagaucaagaaggaagaaucaacuacuacuggacucugcuuaaacccggggauacaauaauauuugaggcaaauggaaaucuaauagcgccaagauaugcuuucgcacugaguagaggcuuuggaucaggaaucaucaacucaaaugcaccaauggauaaaugugaugcgaagugccaaacaccucagggagcuauaaacagcagucuuccuuuccagaacguacacccagucacaauaggagaguguccaaaauaugucaggagugcaaaauuaaggaugguuacaggacuaaggaacaucccauccauucaauccagagguuuguuuggagccauugccgguuucauugaagggggguggacuggaaugguagaugguugguaugguuaucaucaucagaaugagcaaggaucuggcuaugcugcagaucaaaaaagcacacaaaaugccauuaaugggauuacaaacaaggugaauucuguaauugagaaaaugaacacucaauucacagcagugggcaaagaauucaacaaauuggaaagaaggauggaaaacuugaauaaaaaaguugaugauggguuuauagacauuuggacauauaaugcagaacuguugguucuacuggaaaaugaaaggacuuuggauuuccaugacuccaaugugaagaaucuguaugagaaaguaaaaagccaguuaaagaauaaugcuaaagaaauaggaaauggguguuuugaauucuaucacaaguguaacgaugaaugcauggagaguguaaagaauggaacuuaugacuauccaaaauauuccgaagaaucaaaguuaaacagggagaaaauugauggagugaaauuggaaucaaugggagucuaucagauucuggcgaucuacucaacagucgccaguucucugguucuuuuggucucccugggggcaaucagcuucuggauguguuccaaugggucuuugcaguguagaauaugcaucuaa

SEQ ID NO: 35180 - RNA, 1698 nt, Artificial Sequence
  derived and/or modified CDS sequence (wt) from hemagglutinin__InfluenzaA__ACU79992
augaaaguaaaacuacugguccuauuaugcacauuuacagcuacauaugcggacacaauauguaucggcuaccaugccaacaacucaaccgacacuguugacacaguacuugaaaagaaugugacagugacacacucugucaaccugcuugaggacaaccacaauggaaaacuaugucuauuaaaaggaaaagccccauuacaauuggguaacugcagcguugccggguggaucuuaggaaacccagaaugcggauuacugauuuccaaggagucaugguccuacauuguagaaagaccaaauccugagaauggaacauguuacccagggcauuucgccgacuaugaggaacugagggagcaauugaguucaguaucuucauuugagagguucgaaauauuccccaaagaaagcucauggcccaaccacaccguaaccggaguaucagcaucaugcucccauaacggggaaagcagcuuuuacaaaaauuugcuauggcugacgggaaagaaugguuuguacccaaaccugagcaaguccuaugcaaacaacaaagagaaagaaguccucguacuaugggguguucaucacccgccaaacauaggugaccaaaugacccucuaucauaaagaaaaugcuuaugucucuguagugucuucacauuauagcagaaaauucaccccagaaauagccaaaagacccaaaguaagagaucaagaaggaagaaucaacuacuacuggacucugcuugaacccggggauacaauaauauuugaggcaaaugggaaucuaauagcgccaagauaugcuuucgcacugaguagaggcuuuggaucaggaaucaucaacucaaaugcaccaauggaugaaugugaugcgaagugccaaacaccucagggagcuauaaacagcagucuuccuuuccagaauguacacccagucacaauaggagaauguccaaaguaugucaggagugcaaaauuaaggaugguuacaggacuaaggaacaucccauccauucaauccagagguuuguuuggagccauugccgguuucauugaagggggguggacuggaaugguagaugguugguaugguuaucaucaccagaaugagcaaggaucuggcuaugcugcagaucaaaaaagcacacaaaaugccauuaaugggauuacaaacaaggugaacucuguaauugagaagaugaacacucaauucacagcuguaggcaaagaauucaacaaauuggaaagaaggauggaaaacuuaaauaaaaaaguugaugacggguuuauagacguuuggacauauaaugcagaacuguugguucuacuagaaaaugaaaggacuuuggauuuccaugacuccaaugugaagaauuuguaugagaaaguaaaaaaccaauuaaaaaauaaugccaaagaaauaggaaauggguguuuugaauuuuaucacaaguguaacgaugaaugcauggagaguguaaaaaauggaacuuaugauuauccaaaauauuccgaagaaucaaaguuaagcagggagaaaauugauggagugaaauuggaaucaaugggagucuaucagauucuggcgaucuacucaacagucgccaguucucugguucuuuuggucucccugggggcaaucagcuucuggauguguuccaaugggucuuugcaguguagaauaugcaucuaa

SEQ ID NO: 35181 - RNA, 1701 nt, Artificial Sequence
  derived and/or modified CDS sequence (wt) from hemagglutinin__InfluenzaA__ACU80003
augaagacuaucauugcuuugagcuacauucuaugucugguuuucgcucaaaaacuuccuggaaaugacaacagcacggcaacgcugugccuugggcaccaugcaguaccaaacggaacgauagugaaaacaaucacgaaugaccaaauugaaguuacuaaugcuacugagcugguucagaguuccucaacaggugaaauaugcgacaguccucaucagauccuugauggagaaaacugcacacuaauagaugcucuauugggagacccucagugugauggcuuccaaaauaagaaaugggaccuuuuuguugaacgcagcaaagccuacagcaacuguuacccuuaugaugugccggauuaugccucccuuaggucacuaguugccucauccggcacacuggaguuuaacaaugaaagcuucaauuggacuggagucacucaaaacggaacaagcucugcuugcauaaggagaucuaauaacaguuucuuuaguagauugaauugguugacccacuuaaaauucaaauacccagcauugaacgugacuaugccaaacaaugaacaauuugacaaauuguacauuugggggguucaccacccggguacggacaaugaccaaaucuuccuguaugcucaagcaucaggaagaaucacagucucuaccaaaagaagccaacaaacuguaaucccgaauaucggaucuagacccagaguaaggaauaucccuagcagaauaagcaucuauuggacaauaguaaaaccgggagacauacuuuugauuaacagcacagggaaucuaauugcuccuagggguuacuucaaaauacgaagugggaaaagcucaauaaugagaucagaugcacccauuggcaaaugcaauucugaaugcaucacuccaaauggaagcauucccaaugacaaaccauuccaaaauguaaacaggaucacauacggggccugucccagauauguuaagcaaaacacucugaaauuggcaacagggaugcgaaauguaccagagaaacaaacuagaggcauauuuggcgcaaucgcggguuucauagaaaaugguugggagggaaugguggacgguugguacgguuucaggcaucaaaauucugagggaagaggacaagcagcagaucucaaaagcacucaagcagcaaucgaucaaaucaaugggaagcugaauagauugaucgggaaaaccaacgagaaauuccaucagauugaaaaagaauucucagaagucgaagggagaauucaggaccuugagaaauauguugaggacacuaaaauagaucucuggucauacaacgcggagcuucuuguugcccuggagaaccaacauacaauugaucuaacugacucagaaaugaacaaacuguuugaaaaaacaaagaagcaacugagggaaaaugcugaggauaugggcaaugguuguuucaaaauauaccacaaaugugacaaugccugcauaggaucaaucagaaauggaacuuaugaccacgauguauacagagaugaagcauuaaacaaccgguuccagaucaagggaguugagcugaagucaggguacaaagauuggauccuauggauuuccuuugccauaucauguuuuuugcuuuguguugcuuuguugggguucaucaugugggccugccaaaaaggcaacauuaggugcaacauuugcauuuga

SEQ ID NO: 35182 - RNA, 1698 nt, Artificial Sequence
  derived and/or modified CDS sequence (wt) from hemagglutinin__InfluenzaA__ACU80025
augaaaguaaaacuacugguccuguuaugcacauuugcagcuacauaugcagacacaauauguauaggcuaccaugcuaacaacucgaccgacacuguugacacaguacuugaaaagaaugugacagugacacacucugucaaccugcuugagaacagucacaauggaaaacuaugucuauuaaaaggaauagccccacuacaauuggguaauugcagcguugccggguggaucuuaggaaacccagaaugcgaauugcugauuuccaaggagucaugguccuacauuguagaaaaaccaaauccugagaauggaacauguuacccagggcauuucgcugacuaugaggaacugagggagcaauugaguucaguaucuucauuugagagguucgaaauauuccccaaagaaagcucauggcccaaccacaccguaaccggagugucagcaucaugcucccauaauggggaaagcaguuuuuacagaaauuugcuauggcugacggggaagaaugguuuguacccaaaccugagcaaguccuaugcaaacaacaaagaaaaagaaguccuuguacuaugggguguucaucacccgccaaacauaggugaccaaaaggcccucuaucauacagaaaaugcuuaugucucuguagugucuucacauuauagcagaaaauucaccccagaaauagccaaaagacccaaaguaagagaucaagaaggaagaaucaauuacuacuggacucugcuugaacccggggauacaauaauauuugaggcaaauggaaaucuaauagcgccaagauaugcuuucgcacugaguagaggcuuuggaucaggaaucaucaacucaaaugcaccaauggauaaaugugaugcgaagugccaaacaccucagggagcuauaaacagcagucuuccuuuccagaacguacacccagucacaauaggagaguguccaaaguaugucaggagugcaaaauuaaggaugguuacaggacuaaggaacaucccauccauucaauccagagguuuguuuggagccauugccgguuucauugaagggggguggacuggaaugguagaugguugguaugguuaucaucaucagaaugagcaaggaucuggcuaugcugcagaucaaaaaagcacacaaaaugccauuaaugggauuacaaacaaggugaauucuguaauugagaaaaugaacacucaauucacagcagugggcaaagaauucaacaaauuggaaagaaggauggaaaacuugaauaaaaaaguugaugauggguuuauagacauuuggacauauaaugcagaacuguugguucuacuggaaaaugaaaggacuuuggauuuccaugacuccaaugugaagaaucuguaugagaaaguaaaaagccaguuaaagaauaaugcuaaagaaauaggaaauggguguuuugaauucuaucacaaguguaacgaugaaugcauggagaguguaaagaauggaacuuaugacuauccaaaauauuccgaagaaucaaaguuaaacagggagaaaauugauggagugaaauuggaaucaaugggagucuaucagauucuggcgaucuacucaacagucgccaguucucugguucuuuuggucucccugggggcaaucagcuucuggauguguuccaaugggucuuugcaguguagaauaugcaucuaa

SEQ ID NO: 35183 - RNA, 1701 nt, Artificial Sequence
  derived and/or modified CDS sequence (wt) from hemagglutinin__InfluenzaA__ACU80036
augaagacuaucauugcuuugagcuacauucuaugucugguuuucgcucaaaaacuuccuggaaaugacaacagcacggcaacgcugugccuugggcaccaugcaguaccaaacggaacgauagugaaaacaaucacgaaugaccaaauugaaguuacuaaugcuacugagcugguucagaguuccucaacaggugaaauaugcgacaguccucaucagauccuugauggagaaaacugcacacuaauagaugcucuauugggagacccucagugugauggcuuccaaaauaagaaaugggaccuuuuuguugaacgcagcaaagccuacagcaacuguuacccuuaugaugugccggauuaugccucccuuaggucacuaguugccucauccggcacacuggaguuuaacaaugaaagcuucaauuggacuggagucacucaaaacggaacaagcucugcuugcauaaggagaucuaauaacaguuucuuuaguagauugaauugguugacccacuuaaaauucaaauacccagcauugaacgugacuaugccaaacaaugaacaauuugacaaauuguacauuugggggguucaccacccggguacggacaaugaccaaaucuuccuguaugcucaagcaucaggaagaaucacagucucuaccaaaagaagccaacaaacuguaaucccgaauaucggaucuagacccagaguaaggaauaucccuagcagaauaagcaucuauuggacaauaguaaaaccgggagacauacuuuugauuaacagcacagggaaucuaauugcuccuagggguuacuucaaaauacgaagugggaaaagcucaauaaugagaucagaugcacccauuggcaaaugcaguucugaaugcaucacuccaaauggaagcauucccaaugacaaaccauuccaaaauguaaacaggaucacauacggggccugucccagauauguuaagcaaaacacucugaaauuggcaacagggaugcgaaauguaccagagaaacaaacuagaggcauauuuggcgcaaucgcggguuucauagaaaaugguugggagggaaugguggaugguugguacgguuucaggcaucaaaauucugagggaagaggacaagcagcagaucucaaaagcacucaagcagcaaucgaucaaaucaaugggaagcugaauagauugaucgggaaaaccaacgagaaauuccaucagauugaaaaagaauucucagaagucgaagggagaauucaggaccuugagaaauauguugaggacacuaaaauagaucucuggucauacaacgcggagcuucuuguugcccuggagaaccaacauacaauugaucuaacugacucagaaaugaacaaacuguuugaaaaaacaaagaagcaacugagggaaaaugcugaggauauaggcaaugguuguuucaaaauauaccacaaaugugacaaugccugcauaggaucaaucagaaauggaacuuaugaccacgauguauacagagaugaagcauuaaacaaccgguuccagaucaagggaguugagcugaagucaggguacaaagauuggauccuauggauuuccuuugccauaucauguuuuuugcuuuguguugcuuuguugggguucaucaugugggccugccaaaaaggcaacauuaggugcaacauuugcauuuga

SEQ ID NO: 35184 - RNA, 1698 nt, Artificial Sequence; identical to SEQ ID NO: 34655
  derived and/or modified CDS sequence (wt) from hemagglutinin__InfluenzaA__ACU80047

SEQ ID NO: 35185 - RNA, 1701 nt, Artificial Sequence
  derived and/or modified CDS sequence (wt) from hemagglutinin__InfluenzaA__ACU80058
augaagaccaucauugcuuugagcuacauucuaugucugguuuucgcucaaaaacuucccggaaaugacaacagcacggcaacgcugugccuugggcaccaugcaguaccaaacggaacgauagugaaaacaaucacgaaugaccaaauugaaguuacuaaugccacugagcugguucagaguuccucaacagguggaauaugcgacaguccucaucagauccuugauggagaaaacugcacacuaauagaugcucuauugggagacccucagugugauggcuuccaaaauaagaaaugggaccuuuuuguugaacgcagcaaagccugcagcaacuguuacccuuaugaugugccggauuaugccucccuuaggucacuaguugccucauccggcacacuggaguuuaacaaugaaagcuucaauuggacuggagucacucaaaauggaacaagcucugcuugcaaaaggagaucuaauaacaguuucuuuaguagauugaauugguugacccacuuaaaauucaaauacccagcauugaacgugacuaugccaaacaaugaaaaauuugacaaauuguacauuugggggguucaccacccggguacggacaaugaccaaaucuuccuguaugcucaagcaucaggaagaaucacagucucuaccaaaagaagccaacaaacuguaaucccgaauaucggaucuagacccagaguaaggaauauccccagcagaauaagcaucuauuggacaauaguaaaaccgggagacauacuuuugauuaacagcacagggaaucuaauugcuccuagggguuacuucaaaauacgaagugggaaaagcucaauaaugagaucagaugcacccauuggcaaaugcaauucugaaugcaucacuccaaauggaagcauucccaaugacaaaccauuucaaaauguaaacaggaucacauauggggccugucccagauauguuaagcaaaacacucugaaauuggcaacagggaugcgaaauguaccagagaaacaaacuagaggcauauuuggcgcaaucgcggguuucauagaaaaugguugggagggaaugguggaugguugguacgguuucaggcaucaaaauucugagggaauaggacaagcagcagaucucaaaagcacucaagcagcaaucaaucaaaucaaugggaagcugaauagguugaucgggaaaaccaacgagaaauuccaucagauugaaaaagaauucucagaaguagaagggagaauucaggaccucgagaaauauguugaggacacuaaaauagaucucuggucauacaacgcggagcuucuuguugcccuggagaaccaacauacaauugaucuaacugacucagaaaugaacaaacuguuugaaagaacaaagaagcaacugagggaaaaugcugaggauaugggcaaugguuguuucaaaauauaccacaaaugugacaaugccugcauaggaucaaucagaaauggaacuuaugaccaugauguauacagagaugaagcauuaaacaaccgguuccagaucaaaggcguugagcugaagucaggauacaaagauuggauccuauggauuuccuuugccauaucauguuuuuugcuuuguguugcuuuguugggguucaucaugugggccugccaaaaaggcaacauuaggugcaacauuugcauuuga

SEQ ID NO: 35186 - RNA, 1698 nt, Artificial Sequence; identical to SEQ ID NO: 34598
  derived and/or modified CDS sequence (wt) from hemagglutinin__InfluenzaA__ACU80069

SEQ ID NO: 35187 - RNA, 1698 nt, Artificial Sequence
  derived and/or modified CDS sequence (wt) from hemagglutinin__InfluenzaA__ACU80080
augaaaguaaaacuacugguccuguuaugcacauuuacagcuacauaugcagacacaauauguauaggcuaccaugcuaacaacucgaccgacacuguugacacaguacuugaaaagaaugugacagugacacacucugucaaccugcuugagaacagucacaauggaaaacuaugucuauuaaaaggaauagccccacuacaauuggguaacugcagcguugccggguggaucuuaggaaacccagaaugcgaauuacugauuuccaaggagucaugguccuacauuguagaaaaaccaaauccugagaauggaacauguuacccagggcauuucgcugacuaugaggaacugagggagcaauugaguucaguaucuucauuugagagguucgaaauauuccccaaagaaagcucauggcccaaccacaccguaaccggagugucagcaucaugcucccauaauggggaaagcaguuuuuacagaaauuugcuauggcugacggggaagaaugguuuguacccaaaccugagcaaguccuaugcaaacaacaaagaaaaagaaguccuuguacuaugggguguucaucacccgccaaacauaguugaccaaaagacccucuaucguacagaaaaugcuuauguuucuguagugucuucacauuauagcagaaaauucaccccagaaauagccaaaagacccaaaguaagagaucaagaaggaagaaucaacuacuacuggacucugcuugaacccggggauacaauaauauuugaggcaaauggaaaucuaauagcgccaagauaugcuuucgcacugaguagaggcuuuggaucaggaaucaucaacucaaaugcaccaauggauaaaugugaugcgaagugccaaacaccucagggagcuauaaacagcagucuuccuuuccagaacguacacccagucacaauaggagaguguccaaaguaugucaggagugcaaaauuaaggaugguuacaggacuaaggaacaucccauccauucaauccagagguuuguuuggagccauugccgguuucauugaagggggguggacuggaaugguagaugguugguaugguuaucaucaucagaaugagcaaggaucuggcuaugcugcagaucaaaaaagcacacaaaaugccauuaaugggauuacaaacaaggugaauucuguaauugagaaaaugaacacucaauucacagcagugggcaaagaauucaacaaauuggaaagaaggauggaaaacuugaauaaaaaaguugaugauggguuuauagacauuuggacauauaaugcagaacuguugguucuacuggaaaaugaaaggacuuuggauuuccaugacuccaaugugaagaaucuguaugagaaaguaaaaagccaguuaaagaauaaugcuaaagaaauaggaaauggguguuuugaauucuaucacaaguguaacgaugaaugcauggagaguguaaagaauggaacuuaugacuauccaaaauauuccgaagaaucaaaguuaaacagggagaaaauugauggaauaaaauuggaaucaaugggagucuaucagauucuggcgaucuacucaacagucgccaguucucugguucuuuuggucucccugggggcaaucagcuucuggauguguuccaaugggucuuugcaguguagaauaugcaucuaa

SEQ ID NO: 35188 - RNA, 1698 nt, Artificial Sequence
  derived and/or modified CDS sequence (wt) from hemagglutinin__InfluenzaA__ACU80091
augaaaguaaaacuacugguccuguuaugcacauuuacagcuacauaugcagacacaauauguauaggcuaccaugcuaacaacucaaccgacacuguugacacaguacuugaaaagaaugugacagugacacauucugucaaccugcuugagaacagucacaauggaaaacuaugucuauuaaaaggaauagccccacuacaauuggguaauugcagcguugccggauggaucuuaggaaacccagaaugcggauuacugauuuccaaggagucaugguccuacauuguagaaaaaccaaacccugagaauggaacauguuacccagggcauuucgcugacuaugaggaacugagggagcaauugaguucaguaucuucauuugagagguucgaaauauuccccaaagaaagcucauggcccaaccacaccguaaccggagugucagcaucaugcucccauaauggagaaagcaguuuuuacagaaauuugcuauggcugacggggaagaaugguuuguacccaaaccugagcaaguccuaugcaaacaacaaagaaaaagaaguccuuguacuaugggguguucaucacccgccaaacauaggugaccaaaaggcccucuaucauacagaaaaugcuuauguuucuguagugucuucacauuauagcagaaaauucaccccagaaauagccaaaagacccaaaguaagagaucaagaaggaagaaucaacuacuacuggacucuacuugaacccggggauacaauaauauuugaggcaaauggaaaucuaauagcgccaagauaugcuuucgcacugaguagaggcuuuggaucaggaaucaucaacucaaaugcaccaauggauaaaugugaugcgaagugccaaacaccucagggagcuauaaacagcagucuuccuuuccagaacguacacccagucacaauaggagaguguccaaaguaugucaggagugcaaaauuaaggaugguuacaggacuaaggaacaucccauccauucaauccagagguuuguuuggagccauugccgguuucauugaagggggguggacuggaaugguagaugguugguaugguuaucaucaucagaaugagcaaggaucuggcuaugcugcagaucaaaaaagcacacaaaaugccauuaaugggauuacaaacaaggugaauucuguaauugagaaaaugaacacucaauucacagcagugggcaaagaauucaacaaauuggaaagaaggauggaaaacuugaauaaaaaaguugaugauggguuuauagacauuuggacauauaaugcagaacuguugguucuacuggaaaaugaaaggacuuuggauuuccaugacuccaaugugaagaaucuguaugagaaaguaaaaagccaguuaaagaauaaugcuaaagaaauaggaaauggguguuuugaauucuaucacaaguguaacgaugaaugcauggagaguguaaagaauggaacuuaugacuauccaaaauauuccgaagaaucaaaguuaaacagggagaaaauugauggggugaaauuggaaucaaugggagucuaucagauucuggcgaucuacucaacagucgccaguucucugguucuuuuggucucccugggggcaaucagcuucuggauguguuccaaugggucuuugcaguguagaauaugcaucuaa

SEQ ID NO: 35189 - RNA, 1701 nt, Artificial Sequence
  derived and/or modified CDS sequence (wt) from hemagglutinin__InfluenzaA__ACU80102
augaagacuaucauugcuuugagcuacauucuaugucugguuuucgcucaaaaauuuccuggaaaugacaacagcacggcaacgcugugccuugggcaccaugcaguaccaaacggaacgauagugaaaacaaucacgaaugaccaaauugaaguuacuaaugcuacugagcugguucagaguuccucaacaggugaaauaugcgacaguccucaucagauccuugauggagaaaacugcacacuaauagaugcucuauugggagacccucagugugauggcuuccaaaauaagaauugggaccuuuuuguugaacgcagcaaagccuacagcaacuguuacccuuaugaugugccggauuaugccucccuuagaucacuaguugccucauccggcacacuggaguuuaacaaugaaagcuucaauuggacuggagucacucaaaacggaacaagcucugcuugcauaaggagaucuaauaacaguuucuuuaguagauugaauugguugacccacucaaaauucaaauacccagcauugaacgugacuaugccaaacaaugaaaauuuugacaaauuguacauuugggggguucaccacccggguacggacaaugaccaaaucuuccuguaugcucaagcaucaggaagaaucacagucucuaccaaaagaagccaacaaacuguaaucccgaauaucggaucuagacccagaguaaggaauaucccuagcagaauaagcaucuauuggacaauaguaaaaccgggagacauacuuuugauuaacagcacagggaaucuaauugcuccuagggguuacuucaaaauacgaagugggaaaagcucaauaaugagaucagaugcacccauuggcaaaugcaauucugaaugcaucacuccaaauggaagcauucccaaugacaaaccauuccaaaauguaaacaggaucacauacggggccugucccagauauguuaagcaaaacacucugaaauuggcaacagggaugcgaaauguaccagagaaacaaacuagaggcauauuuggcgcaaucgcugguuucauagaaaaugguugggagggaaugguggaugguugguacgguuucaggcaucaaaauucugagggaauaggacaagcagcagaucucaaaagcacucaagcagcaaucgaucaaaucaaugggaagcugaauagguugaucgggaaaaccaacgagaaauuccaucagauugaaaaagaauucucagaagucgaagggagaauucaggaccuugagaaauauguugaggacaccaaaauagaucucuggucauacaacgcggagcuucuuguugcccuggagaaccaacauacaauugaucuaacugauucagaaaugaacaaacuguuugaaaaaacaaagaagcaacugagggaaaaugcugaggauaugggcaaugguuguuucaaaaucuaccacaaaugugacaaugccugcauaggaucaaucagaaauggaacuuaugaccacgaugucuacagagaugaagcauuaaacaaccgguuccagaucaagggcguugagcugaagucaggauacaaagauuggauccuauggauuuccuuugccauaucauguuuuuugcuuugcauugcuuuguugggguucaucaugugggccugccaaaaaggcaacauuaggugcaacauuugcauuuga

SEQ ID NO: 35190 - RNA, 1701 nt, Artificial Sequence
  derived and/or modified CDS sequence (wt) from hemagglutinin__InfluenzaA__ACU80113
augaagacuaucauugcuuugagcuacauucuaugucugguuuucgcucaaaaauuuccuggaaaugacaacagcacggcaacgcugugccuugggcaccaugcaguaccaaacggaacgauagugaaaacaaucacgaaugaccaaauugaaguuacuaaugcuacugagcugguucagaguuccucaacaggugaaauaugcgacaguccucaucagauccuugauggagaaaacugcacacuaauagaugcucuauugggagacccucagugugauggcuuccaaaauaagaauugggaccuuuuuguugaacgcagcaaagccuacagcaacuguuacccuuaugaugugccggauuaugccucccuuaggucacuaguugccucauccggcacacuggaguuuaacaaugaaagcuucaauuggacuggagucacucaaaacggaacaagcucugcuugcauaaggagaucuaauaacaguuucuuuaguagauugaauugguugacccacucaaaauucaaauacccagcauugaacgugacuaugccaaacaaugaaaauuuugacaaauuguacauuugggggguucaccacccggguacggacaaugaccaaaucuuccuguaugcucaagcaucaggaagaaucacagucucuaccaaaagaagccaacaaacuguaaucccgaauaucggaucuagacccagaguaaggaauaucccuagcagaauaagcaucuauuggacaauaguaaaaccgggagacauacuuuugauuaacagcacagggaaucuaauugcuccuagggguuacuucaaaauacgaagugggaaaagcucaauaaugagaucagaugcacccauuggcaaaugcaauucugaaugcaucacuccaaauggaagcauucccaaugacaaaccauuccaaaauguaaacaggaucacauacggggccugucccagauauguuaagcaaaacacucugaaauuggcaacagggaugcgaaauguaccagagaaacaaacuagaggcauauuuggcgcaaucgcugguuucauagaaaaugguugggagggaaugguggaugguugguacgguuucaggcaucaaaauucugagggaauaggacaagcagcagaucucaaaagcacucaagcagcaaucgaucaaaucaaugggaagcugaauagguugaucgggaaaaccaacgagaaauuccaucagauugaaaaagaauucucagaaaucgaagggagaauucaggaccuugagaaauauguugaggacaccaaaauagaucucuggucauacaacgcggagcuucuuguugcccuggagaaccaacauacaauugaucuaacugauucagaaaugaacaaacuguuugaaaaaacaaagaagcaacugagggaaaaugcugaggauaugggcaaugguuguuucaaaaucuaccacaaaugugacaaugccugcauaggaucaaucagaaauggaacuuaugaccacgaugucuacagagaugaagcauuaaacaaccgguuccagaucaagggcguugagcugaagucaggauacaaaaauuggauccuauggauuuccuuugccauaucauguuuuuugcuuugcauugcuuuguugggguucaucaugugggccugccaaaaaggcaacauuaggugcaacauuugcauuuga

SEQ ID NO: 35191 - RNA, 1701 nt, Artificial Sequence
  derived and/or modified CDS sequence (wt) from hemagglutinin__InfluenzaA__ACU80135
augaagacuaucauugcuuugagcuacauucuaugucugguuuucgcucaaaaauuuccuggaaaugacaacagcacggcaacgcugugccuugggcaccaugcaguaccaaacggaacgauggugaaaacaaucacgaaugaccaaauugaaguuacuaaugcuacugagcugguucagaguuccucaacaggugaaauaugcgacaguccucaucagauccuugauggggaaaacugcacacuaauagaugcucuauugggagacccucagugugauggcuuccaaaauaagaauugggaccuuuuuguugaacgcagcaaagccuacagcaacuguuacccuuaugaugugccggauuaugccucccuuaggucacuaguugccucauccggcacacuggaguuuaacaaugaaagcuucaauuggacuggagucacucaaaacggaacaagcucugcuugcauaaggagaucuaauaacaguuucuuuaguagauugaauugguugacccacucaaaauucaaauacccagcauugaacgugacuaugccaaacaaugaaaauuuugacaaauuguacauuugggggguucaccacccggguacggacaaugaccaaaucuuccuguaugcucaagcaucaggaagaaucacagucucuaccaaaagaagccaacaaacuguaaucccgaauaucggaucuagacccagaguaaggaauaucccuagcagaauaagcaucuauuggacaauaguaaaaccgggagacauacuuuugauuaacagcacagggaaucuaauugcuccuagggguuacuucaaaauacgaagugggaaaagcucaauaaugagaucagaugcacccauuggcaaaugcaauucugaaugcaucacuccaaauggaagcauucccaaugacaaaccauuccaaaauguaaacaggaucacauacggggccugucccagauauguuaagcaaaacacucugaaauuggcaacagggaugcgaaauguaccagagaaacaaacuagaggcauauuuggcgcaaucgcugguuucauagaaaaugguugggagggaaugguggaugguugguacgguuucaggcaucaaaauucugagggaauaggacaagcagcagaucucaaaagcacucaagcagcaaucgaucaaaucaaugggaagcugaauagguugaucgggaaaaccaacgagaaauuccaucagauugaaaaagaauucucagaagucgaagggagaauucaggaccuugagaaauauguugaggacaccaaaauagaucucuggucauacaacgcggagcuucuuguugcccuggagaaccaacauacaauugaucuaacugauucagaaaugaacaaacuguuugaaaaaacaaagaagcaacugagggaaaaugcugaggauaugggcaaugguuguuucaaaaucuaccacaaaugugacaaugccugcauaggaucaaucagaaauggaacuuaugaccacgaugucuacagagaugaagcauuaaacaaccgguuccagaucaagggcguugagcugaagucaggauacaaagauuggauccuauggauuuccuuugccauaucauguuuuuugcuuugcauugcuuuguugggguucaucaugugggccugccaaaaaggcaacauuaggugcaacauuugcauuuga

SEQ ID NO: 35192 - RNA, 1701 nt, Artificial Sequence
  derived and/or modified CDS sequence (wt) from hemagglutinin__InfluenzaA__ACU80146
augaagacuaucauugcuuugagcuacauucuaugucugguuuucgcucaaaaacuuccuggaaaugacaacagcacggcaacgcugugccuugggcaccaugcaguaccaaacggaacgauagugaaaacaaucacgaaugaccaaauugaaguuacuaaugcuacugagcugguucagaguuccucaacaggugaaauaugcgacaguccucaucagauccuugauggagaaaacugcacacuaauagaugcucuauugggagacccucagugugauggcuuccaaaauaagaaaugggaccuuuuuguugaacgcagcaaagccuacagcaacuguuacccuuaugaugugccggauuaugccucccuuaggucacuaguugccucauccggcacacuggaguuuaacaaugaaagcuucaauuggacuggagucacucaaaacggaacaagcucugcuugcauaaggagaucuaauaacaguuucuuuaguagauugaauugguugacccacucaaaauucaaauacccagcauugaacgugacuaugccaaacaaugaagaauuugacaaauuguacauuugggggguucaccacccggguacggacaaugaccaaaucuuccuguaugcucaagcaucaggaagaaucacagucucuaccaaaagaagccaacaaacuguaaucccgaauaucggaucuagacccagaguaaggaauauccccagcagaauaagcaucuauuggacaauaguaaaaccgggagacauacuuuugauuaacagcacagggaaucuaauugcuccuagggguuacuucaaaauacgaagugggaaaagcucaauaaugagaucagaugcacccauuggcaaaugcaauucugaaugcaucacuccaaauggaagcauucccaaugacaaaccauuccaaaauguaaacaggaucacauacggggccugucccagauauguuaagcaaaacacucugaaauuggcaacagggaugcgaaauguaccagagaaacaaacuagaggcauauuuggcgcaaucgcggguuucauagaaaaugguugggagggaaugguggaugguugguacgguuucaggcaucaaaauucugagggaauaggacaagcagcagaucucaaaagcacucaagcagcaaucgaucaaaucaauggaaagcugaauagguugaucgggaaaaccaacgagaaauuccaucagauugaaaaagaauucucagaagucgaagggaggauucaggaccuugagaaauauguugaggacaccaaaauagaucucuggucauacaacgcggagcuucuuguugcccuggagaaccaacauacaauugaucuaacugacucagaaaugaacaaacuguuugaaaaaacaaagaagcaacugagggaaaaugcugaggauaugggcaaugguuguuucaaaauauaccacaaaugugacaaugccugcauaggaucaaucagaaauggaacuuaugaccacgauguauacagagaugaagcauuaaacaaccgguuccagaucaagggcguugagcugaaaucaggauacaaagauuggauccuauggauuuccuuugccauaucauguuuuuugcuuuguguugcuuuguugggguuaaucaugugggccugccaaaaaggcaacauuaggugcaacauuugcauuuga

SEQ ID NO: 35193 - RNA, 1701 nt, Artificial Sequence; identical to SEQ ID NO: 34535
  derived and/or modified CDS sequence (wt) from hemagglutinin__InfluenzaA__ACU80157

SEQ ID NO: 35194 - RNA, 1698 nt, Artificial Sequence
  derived and/or modified CDS sequence (wt) from hemagglutinin__InfluenzaA__ACU80168
augaaaguaaaacuacugguccuguuaugcacauuugcagcuacauaugcagacacaauauguauaggcuaccaugcuaacaacucgaccgacacuguugacacaguacuugaaaagaaugugacagugacacacucugucaaccugcuugagaacagucacaauggaaaacuaugucuauuaaaaggaauagccccacuacaauuggguaauugcagcguugccggguggaucuuaggaaacccagaaugcgaauugcugauuuccaaggagucaugguccuacauuguagaaaaaccaaauccugagaauggaacauguuacccagggcauuucgcugacuaugaggaacugagggagcaauugaguucaguaucuucauuugagagguucgaaauauuccccaaagaaagcucauggcccaaccacaccguaaccggagugucagcaucaugcucccauaauggggaaagcaguuuuuacagaaauuugcuauggcugacggggaagaaugguuuguacccaaaccugagcaaguccuaugcaaacaacaaagaaaaagaaguccuuguacuaugggguguucaucacccgccaaacauaggugaccaaaaggcccucuaucauacagaaaaugcuuaugucucuguagugucuucacauuauagcagaaaauucaccccagaaauagccaaaagacccaaaguaagagaucaagaaggaagaaucaauuacuacuggacucugcuugaacccggggauacaauaauauuugaggcaaaugggaaucuaauagcgccaagauaugcuuucgcacugaguagaggcuuuggaucaggaaucaucaacucaaaugcaccaauggauaaaugugaugcgaagugccaaacaccucagggagcuauaaacagcagucuuccuuuccagaacguacacccagucacaauaggagaguguccaaaguaugucaggagugcaaaauuaaggaugguuacaggacuaaggaacaucccauccauucaauccagagguuuguuuggagccauugccgguuucauugaagggggguggacuggaaugguagaugguugguaugguuaucaucaucagaaugagcaaggaucuggcuaugcugcagaucaaaaaagcacacaaaaugccauuaaugggauuacaaacaaggugaauucuguaauugagaaaaugaacacucaauucacagcagugggcaaagaauucaacaaauuggaaagaaggauggaaaacuugaauaaaaaaguugaugauggguuuauagacauuuggacauauaaugcagaacuguugguucuacuggaaaaugaaaggacuuuggauuuccaugacuccaaugugaagaaucuguaugagaaaguaaaaagccaguuaaagaauaaugcuaaagaaauaggaaauggguguuuugaauucuaucacaaguguaacgaugaaugcauggagaguguaaagaauggaacuuaugacuauccaaaauauuccgaagaaucaaaguuaaacagggagaaaauugauggagugaaauuggaaucaaugggagucuaucagauucuggcgaucuacucaacagucgccaguucucugguucuuuuggucucccugggggcaaucagcuucuggauguguuccaaugggucuuugcaguguagaauaugcaucuaa

SEQ ID NO: 35195 - RNA, 1701 nt, Artificial Sequence
  derived and/or modified CDS sequence (wt) from hemagglutinin__InfluenzaA__ACU80179
augaagacuaucauugcuuugagcuacauucuaugucugguuuucgcucaaaaacuuccuggaaaugacaacagcacggcaacgcugugccuugggcaccaugcaguaccaaacggaacgauagugaaaacaaucacgaaugaccaaauugaaguuacuaaugcuacugagcugguucagaguuccucaacaggugaaauaugcgacaguccucaucagauccuugauggagaaaacugcacacuaauagaugcucuauugggagacccucagugugauggcuuccaaaauaagaaaugggaccuuuuuguugaacgcagcaaagccuacagcaacuguuacccuuaugaugugccggauuaugccucccuuaggucacuaguugccucauccggcacacuggaguuuaacaaugaaagcuucaauuggacuggagucacucaaaacggaacaagcucugcuugcauaaggagaucuaauaacaguuucuuuaguagauugaauugguugacccacuuaaaauucaaauacccagcauugaacgugacuaugccaaacaaugaacaauuugacaaauuguacauuugggggguucaccacccggguacggacaaugaccaaaucuuccuguaugcucaagcaucaggaagaaucacagucucuaccaaaagaagccaacaaacuguaaucccgaauaucggaucuagacccagaguaaggaauaucccuagcagaauaagcaucuauuggacaauaguaaaaccgggagacauacuuuugauuaacagcacagggaaucuaauugcuccuagggguuacuucaaaauacgaagugggaaaagcucaauaaugagaucagaugcacccauuggcaaaugcaauucugaaugcaucacuccaaauggaagcauucccaaugacaaaccauuccaaaauguaaacaggaucacauacggggccugucccagauauguuaagcaaaacacucugaaauuggcaacagggaugcgaaauguaccagagaaacaaacuagaggcauauuuggcgcaaucgcggguuucauagaaaaugguugggagggaaugguggaugguugguacgguuucaggcaucaaaauucugagggaagaggacaagcagcagaucucaaaagcacucaagcagcaaucgaucaaaucaaugggaagcugaauagauugaucgggaaaaccaacgagaaauuccaucagauugaaaaagaauucucagaagucgaagggagaauucaggaccuugagaaauauguugaggacaccaaaauagaucucuggucauacaacgcggagcuucuuguugcccuggagaaccaacauacaauugaucuaacugacucagaaaugaacaaacuguuugaaaaaacaaagaagcaacugagggaaaaugcugaggauaugggcaaugguuguuucaaaauauaccacaaaugugacaaugccuguauaggaucaaucagaaauggaacuuaugaccacgauguauacagagaugaagcauuaaacaaccgguuccagaucaagggaguugagcugaagucaggguacaaagauuggauccuauggauuuccuuugccauaucauguuuuuugcuuuguguugcuuuguugggguucaucaugugggccugccaaaaaggcaacauuaggugcaacauuugcauuuga

SEQ ID NO: 35196 - RNA, 1701 nt, Artificial Sequence
  derived and/or modified CDS sequence (wt) from hemagglutinin__InfluenzaA__ACU80190
augaagacuaucauugcuuugagcuacauucuaugucugguuuucgcucaaaaacuuccuggaaaugacaacagcacggcaacgcugugccuugggcaccaugcaguaccaaacggaacgauagugaaaacaaucacgaaugaccaaauugaaguuacuaaugcuacugagcugguucagaguuccucaacaggugaaauaugcgacaguccucaucagauccuugauggagaaaacugcacacuaauagaugcucuauugggagacccucagugugauggcuuccaaaauaagaaaugggaccuuuuuguugaacgcagcaaagccuacagcaacuguuacccuuaugaugugccggauuaugccucccuuaggucacuaguugccucauccggcacacuggaguuuaacaaugaaagcuucaauuggacuggagucacucaaaacggaacaagcucugcuugcauaaggagaucuaauaacaguuucuuuaguagauugaauugguugacccacucaaaauucaaauacccagcauugaacgugacuaugccaaacaaugaagaauuugacaaauuguacauuugggggguucaccacccggguacggacaaugaccaaaucuuccuguaugcucaagcaucaggaagaaucacagucucuaccaaaagaagccaacaaacuguaaucccgaauaucggaucuagacccagaguaaggaauauccccagcagaauaagcaucuauuggacaauaguaaaaccgggagacauacuuuugauuaacagcacagggaaucuaauugcuccuagggguuacuucaaaauacgaagugggaaaagcucaauaaugagaucagaugcacccauuggcaaaugcaauucugaaugcaucacuccaaauggaagcauucccaaugacaaaccauuccaaaauguaaacaggaucacauacggggccugucccagauauguuaagcaaaacacucugaaauuggcaacagggaugcgaaauguaccagagaaacaaacuagaggcauauuuggcgcaaucgcggguuucauagaaaaugguugggagggaaugguggaugguugguacgguuucaggcaucaaaauucugagggaauaggacaagcagcagaucucaaaagcacucaagcagcaaucgaucaaaucaauggaaagcugaauagguugaucgggaaaaccaacgagaaauuccaucagauugaaaaagaauucucagaagucgaagggaggauucaggaccuugagaaauauguugaggacaccaaaauagaucucuggucauacaacgcggagcuucuuguugcccuggagaaccaacauacaauugaucuaacugacucagaaaugaacaaacuguuugaaaaaacaaagaagcaacugagggaaaaugcugaggauaugggcaaugguuguuucaaaauauaccacaaaugugacaaugccugcauaggaucaaucagaaauggaacuuaugaccacgauguauacagagaugaagcauuaaacaaccgguuccagaucaagggcauugagcugaaaucaggauacaaagauuggauccuauggauuuccuuugccauaucauguuuuuugcuuuguguugcuuuguugggguucaucaugugggccugccaaaaaggcaacauuaggugcaacauuugcauuuga

SEQ ID NO: 35197 - RNA, 1701 nt, Artificial Sequence
  derived and/or modified CDS sequence (wt) from hemagglutinin__InfluenzaA__ACU80201
augaagacuaucauugcuuugagcuacauucuaugucugguuuucgcucaaaaacuuccuggaaaugacaacagcacggcaacgcugugccuugggcaccaugcaguaccaaacggaacgauagugaaaacaaucacgaaugaccaaauugaaguuacuaaugcuacugagcugguucagaguuccucaacaggugaaauaugcgacaguccucaucagauccuugauggagaaaacugcacacuaauagaugcucuauugggagacccucagugugauggcuuccaaaauaagaaaugggaccuuuuuguugaacgcagcaaagccuacagcaacuguuacccuuaugaugugccggauuaugccucccuuaggucacuaguugccucauccggcacacuggaguuuaacaaugaaagcuucaauuggacuggagucacucaaaacggaacaagcucugcuugcauaaggagaucuaauaacaguuucuuuaguagauugaauugguugacccacuuaaaauucaaauacccagcauugaacgugacuaugccaaacaaugaacaauuugacaaauuguacauuugggggguucaccacccggguacggacaaugaccaaaucuuccuguaugcucaagcaucaggaagaaucacagucucuaccaaaagaagccaacaaacuguaaucccgaauaucggaucuagacccagaguaaggaauaucccuagcagaauaagcaucuauuggacaauaguaaaaccgggagacauacuuuugauuaacagcacagggaaucuaauugcuccuagggguuacuucaaaauacgaagugggaaaagcucaauaaugagaucagaugcacccauuggcaaaugcaauucugaaugcaucacuccaaauggaagcauucccaaugacaaaccauuccaaaauguaaacaggaucacauacggggccugucccagauauguuaagcaaaacacucugaaauuggcaacagggaugcgaaauguaccagagaaacaaacuagaggaauauuuggcgcaaucgcggguuucauagaaaaugguugggagggaaugguggaugguugguacgguuucaggcaucaaaauucugagggaagaggacaagcagcagaucucaaaagcacucaagcagcaaucgaucaaaucaaugggaagcugaauagauugaucgggaaaaccaacgagaaauuccaucagauugaaaaagaauucucagaagucgaagggagaauucaggaccuugagaaauauguugaggacaccaaaauagaucucuggucauacaacgcggagcuucuuguugcccuggagaaccaacauacaauugaucuaacugacucagaaaugaacaaacuguuugaaaaaacaaagaagcaacugagggaaaaugcugaggauaugggcaaugguuguuucaaaauauaccacaaaugugacaaugccugcauaggaucaaucagaaauggaacuuaugaccacgauguauacagagaugaagcauuaaacaaccgguuccagaucaagggaguugagcugaagucaggguacaaagauuggauccuauggauuuccuuugccauaucauguuuuuugcuuuguguugcuuuguugggguucaucaugugggccugccaaaaaggcaacauuaagugcaacauuugcauuuga

SEQ ID NO: 35198 - RNA, 1701 nt, Artificial Sequence; identical to SEQ ID NO: 34529
  derived and/or modified CDS sequence (wt) from hemagglutinin__InfluenzaA__ACU80212

SEQ ID NO: 35199 - RNA, 1698 nt, Artificial Sequence
  derived and/or modified CDS sequence (wt) from hemagglutinin__InfluenzaA__ACU80234
augaaaguaaaacuacugguccuguuaugcacauuugcagcuacauaugcagacacaauauguauaggcuaccaugcuaacaacucgaccgacacuguugacacaguacuugaaaagaaugugacagugacacacucugucaaccugcuugagaacagucacaauggaaaacuaugucuauuaaaaggaauagccccacuacaauuggguaauugcagcguugccggguggaucuuaggaaacccagaaugcgaauugcugauuuccaaggagucaugguccuacauuguagaaaaaccaaauccugagaauggaacauguuacccagggcauuucgcugacuaugaggaacugagggagcaauugaguucaguaucuucauuugagagguucgaaauauuccccaaagaaagcucauggcccaaccacaccguaaccggagugucagcaucaugcucccauaauggggaaagcaguuuuuacaaaaauuugcuauggcugacggggaagaaugguuuguacccaaaccugagcaaguccuaugcaaacaacaaagaaaaagaaguccuuguacuaugggguguucaucacccgccaaacauaggugaccaaaaggcccucuaucauacagaaaaugcuuaugucucuguagugucuucacauuauagcagaaaauucaccccagaaauagccaaaagacccaaaguaagagaucaagaaggaagaaucaauuacuacuggacucugcuugaacccggggauacaauaauauuugaggcaaauggaaaucuaauagcgccaagauaugcuuucgcacugaguagaggcuuuggaucaggaaucaucaacucaaaugcaccaauggauaaaugugaugcgaagugccaaacaccucagggagcuauaaacagcagucuuccuuuccagaacguacacccagucacaauaggagaguguccaaaguaugucaggagugcaaaauuaaggaugguuacaggacuaaggaacaucccauccauucaauccagagguuuguuuggagccauugccgguuucauugaagggggguggacuggaaugguagaugguugguaugguuaucaucaucagaaugagcaaggaucuggcuaugcugcagaucaaaaaagcacacaaaaugccauuaaugggauuacaaacaaggugaauucuguaauugagaaaaugaacacucaauucacagcagugggcaaagaauucaacaaauuggaaagaaggauggaaaacuugaauaaaaaaguugaugauggguuuauagacauuuggacauauaaugcagaacuguugguucuacuggaaaaugaaaggacuuuggauuuccaugacuccaaugugaagaaucuguaugagaaaguaaaaagccaguuaaagaauaaugcuaaagaaauaggaaauggguguuuugaauucuaucacaaguguaacgaugaaugcauggagaguguaaagaauggaacuuaugacuauccaaaauauuccgaagaaucaaaguuaaacagggagaaaauugauggagugaaauuggaaucaaugggagucuaucagauucuggcgaucuacucaacagucgccaguucucugguucuuuuggucucccugggggcaaucagcuucuggauguguuccaaugggucuuugcaguguagaauaugcaucuaa

SEQ ID NO: 35200 - RNA, 1701 nt, Artificial Sequence
  derived and/or modified CDS sequence (wt) from hemagglutinin__InfluenzaA__ACU80245
augaagacuaucauugcuuugagcuacauucuaugucugguuuucgcucaaaaauuuccuggaaaugacaacagcacggcaacgcugugccuugggcaccaugcaguaccaaacggaacgauagugaaaacaaucacgaaugaccaaauugaaguuacuaaugcuacugagcugguucagaguuccucaacaggugaaauaugcgacaguccucaucagauccuugauggagaaaacugcacacuaauagaugcucuauugggagacccucagugugauggcuuccaaaauaagaauugggaccuuuuuguugaacgcagcaaagccuacagcaacuguuacccuuaugaugugccggauuaugccucccuuaggucacuaguugccucauccggcacacuggaguuuaacaaugaaagcuucaauuggacuggagucacucaaaacggaacaagcucugcuugcauaaggagaucuaauaacaguuucuuuaguagauugaauugguugacccacucaaaauucaaauacccagcauugaacgugacuaugccaaacaaugaaaauuuugacaaauuguacauuugggggguucaccacccggguacggacaaugaccaaaucuuccuguaugcucaagcaucaggaagaaucacagucucuaccaaaagaagccaacaaacuguaaucccgaauaucggaucuagacccagaguaaggaauaucccaagcagaauaagcaucuauuggacaauaguaaaaccgggagacauacuuuugauuaacagcacagggaaucuaauugcuccuagggguuacuucaaaauacgaagugggaaaagcucaauaaugagaucagaugcacccauuggcagaugcaauucugaaugcaucacuccaaauggaagcauucccaaugacaaaccauuccaaaauguaaacaggaucacauacggggccugucccagauauguuaagcaaaacacucugaaauuggcaacagggaugcgaaauguaccagagaaacaaacuagaggcauauuuggcgcaaucgcugguuucauagaaaaugguugggagggaaugguggaugguugguacgguuucaggcaucaaaauucugagggaauaggacaagcagcagaucucaaaagcacucaagcagcaaucgaucaaaucaaugggaagcugaauagguugaucgggaaaaccaacgagaaauuccaucagauugaaaaagaauucucagaagucgaagggagaauucaggaccuugagaaauauguugaggacaccaagauagaucucuggucauacaacgcggagcuucuuguugcccuggagaaccaacauacaauugaucuaacugauucagaaaugaacaaacuguuugaaaaaacaaagaagcaacugagggaaaaugcugaggauaugggcaaugguuguuucaaaaucuaccacaaaugugacaaugccugcauaggaucaaucagaaauggaacuuaugaccacgaugucuacagagaugaagcuuuaaacaaccgguuccagaucaagggcguugagcugaagucaggauacaaagauuggauccuauggauuuccuuugccauaucauguuuuuugcuuugcauugcuuuguugggguucaucaugugggccugccaaaaaggcaacauuaggugcaacauuugcauuuga

SEQ ID NO: 35201 - RNA, 1701 nt, Artificial Sequence; identical to SEQ ID NO: 34569
  derived and/or modified CDS sequence (wt) from hemagglutinin__InfluenzaA__ACU80256

SEQ ID NO: 35202 - RNA, 1698 nt, Artificial Sequence
  derived and/or modified CDS sequence (wt) from hemagglutinin__InfluenzaA__ACU80267
augaaaguaaaacuacugguccuguuaugcacauuuacagcuacauaugcagacacaauauguauaggcuaccaugcuaacaacucgaccgacacuguugacacaguacuugaaaagaaugugacagugacacacucugucaaccugcuugagaacagucacaauggaaaacuaugucuauuaaaaggaauagccccacuacaauuggguaauugcagcguugccggguggaucuuaggaaacccagaaugcgaauuacugauuuccaaggagucaugguccuacauuguagaaaaaccaaauccugagaauggaacauguuacccagggcauuucgcugacuaugaggaacugagggagcaauugaguucaguaucuucauuugagagguucgaaauauuccccaaagaaagcucauggcccaaccacaccguaaccggagugucagcaucaugcucccacaauggggaaagcaguuuuuacagaaauuugcuauggcugacggggaagaaugguuuguacccaaaccugagcaaguccuaugcaaacaacaaagaaaaagaaguccuuguacuaugggguguucaucacccgccaaacauaggugaccaaaaggcccucuaucauacagaaaaugcuuauguuucuguagugucuucacauuauagcagaaaauucaccccagaaauagccaaaagacccaaaguaagagaucaagaaggaagaaucaacuacuacuggacucugcuugaacccggggauacaauaauauuugaggcaaauggaaaucuaauagcaccaagauaugcuuucgcacugaguagaggcuuuggaucaggaaucaucaacucaaaugcaccaauggauaaaugugaugcgaagugccaaacaccucagggagcuauaaacagcagucuuccuuuccagaacguacacccagucacaauaggagaguguccaaaguaugucaggagugcaaaauuaaggaugguuacaggacuaaggaacaucccauccauucaauccagagguuuguuuggagccauugccgguuucauugaagggggguggacuggaaugguagaugguugguaugguuaucaucaucagaaugagcaaggaucuggcuaugcugcagaucaaaaaagcacacaaaaugccauuaaugggauuacaaacaaggugaauucuguaauugagaaaaugaacacucaauucaccgcagugggcaaagaauucaacaaauuggaaagaaggauggaaaacuugaauaaaaaaguugaugauggguuuauagacauuuggacauauaaugcagaacuguugguucuacuggaaaacgaaaggacuuuggauuuccaugacuccaaugugaagaaucuguaugagaaaguaaaaagccaguuaaagaauaaugcuaaagaaauaggaaauggguguuuugaguucuaucacaaguguaacgaugaaugcauggagaguguaaagaauggaacuuaugacuauccaaaauauuccgaagaaucaaaguuaaacagggagaaaauugauggagugaaauuggaaucaaugggagucuaucagauucuggcgaucuacucaacagucgccaguucucugguucuuuuggucucccugggggcaaucagcuucuggauguguuccaaugggucuuugcaguguagaauaugcaucuaa

SEQ ID NO: 35203 - RNA, 1698 nt, Artificial Sequence; identical to SEQ ID NO: 35182
  derived and/or modified CDS sequence (wt) from hemagglutinin__InfluenzaA__ACU80278

SEQ ID NO: 35204 - RNA, 1701 nt, Artificial Sequence; identical to SEQ ID NO: 34529
  derived and/or modified CDS sequence (wt) from hemagglutinin__InfluenzaA__ACU80289

SEQ ID NO: 35205 - RNA, 1701 nt, Artificial Sequence; identical to SEQ ID NO: 34569
  derived and/or modified CDS sequence (wt) from hemagglutinin__InfluenzaA__ACU80300

SEQ ID NO: 35206 - RNA, 1701 nt, Artificial Sequence
  derived and/or modified CDS sequence (wt) from hemagglutinin__InfluenzaA__ACU80311
augaggacuaucauugcuuugagcuacauucuaugucugguuuucgcucaaaaauuuccuggaaaugacaacagcacggcaacgcugugccuugggcaccaugcaguaccaaacggaacgauagugaaaacaaucacgaaugaccaaauugaaguuacuaaugcuacugagcugguucagaguuccucaacaggugaaauaugcgacaguccucaucagauccuugauggagaaaacugcacacuaauagaugcucuauugggagacccucagugugauggcuuccaaaauaagaauugggaccuuuuuguugaacgcagcaaagccuacagcaacuguuacccuuaugaugugccggauuaugccucccuuaggucacuaguugccucauccggcacacuggaguuuaacaaugaaagcuucaauuggacuggagucacucaaaacggaacaagcucugcuugcauaaggagaucuaauaacaguuucuuuaguagauugaauugguugacccacucaaaauucaaauacccagcauugaacgugacuaugccaaacaaugaaaauuuugacaaauuguacauuugggggguucaccacccggguacggacaaugaccaaaucuuccuguaugcucaagcaucaggaagaaucacagucucuaccaaaagaagccaacaaacuguaaucccgaauaucggaucuagacccagaguaaggaauaucccuagcagaauaagcaucuauuggacaauaguaaaaccgggagacauacuuuugauuaacagcacagggaaucuaauugcuccuagggguuacuucaaaauacgaagugggaaaagcucaauaaugagaucagaugcacccauuggcaaaugcaauucugaaugcaucacuccaaauggaagcauucccaaugacaaaccauuccaaaauguaaacaggaucacauacggggccugucccagauauguuaagcaaaacacucugaaauuggcaacagggaugcgaaauguaccagagaaacaaacuagaggcauauuuggcgcaaucgcugguuucauagaaaaugguugggagggaaugguggaugguugguacgguuucaggcaucaaaauucugagggaauaggacaagcagcagaucucaaaagcacucaagcagcaaucgaucaaaucaaugggaagcugaauagguugaucgggaaaaccaacgagaaauuccaucagauugaaaaagaauucucagaagucgaagggagaauucaggaccuugagaaauauguugaggacaccaaaauagaucucuggucauacaacgcggagcuucuuguugcccuggagaaccaacauacaauugaucuaacugauucagaaaugaacaaacuguuugaaaaaacaaagaagcaacugagggaaaaugcugaggauaugggcaaugguuguuucaaaaucuaccacaaaugugacaaugccugcauaggaucaaucagaaauggaacuuaugaccacgaugucuacagagaugaagcauuaaacaaccgguuccagaucaagggcguugagcugaagucaggauacaaagauuggauccuauggauuuccuuugccauaucauguuuuuugcuuugcauugcuuuguugggguucaucaugugggccugccaaaaaggcaacauuaggugcaacauuugcauuuga

SEQ ID NO: 35207 - RNA, 1701 nt, Artificial Sequence; identical to SEQ ID NO: 35189
  derived and/or modified CDS sequence (wt) from hemagglutinin__InfluenzaA__ACU80322

SEQ ID NO: 35208 - RNA, 1701 nt, Artificial Sequence; identical to SEQ ID NO: 34535
  derived and/or modified CDS sequence (wt) from hemagglutinin__InfluenzaA__ACU80333

SEQ ID NO: 35209 - RNA, 1701 nt, Artificial Sequence; identical to SEQ ID NO: 34569
  derived and/or modified CDS sequence (wt) from hemagglutinin__InfluenzaA__ACU80344

SEQ ID NO: 35210 - RNA, 1701 nt, Artificial Sequence
  derived and/or modified CDS sequence (wt) from hemagglutinin__InfluenzaA__ACU80355
augaagacuaucauugcuuugagcuacauucuaugucugguuuucgcucaaaaauuuccuggaaaugacaacagcacggcaacgcugugccuugggcaccaugcaguaccaaacggaacgauagugaaaacaaucacgaaugaccaaauugaaguuacuaaugcuacugagcugguucagaguuccucaacaggugaaauaugcgacaguccucaucagauccuugauggagaaaacugcacacuaauagaugcucuauugggagacccucagugugauggcuuccaaaauaagaauugggaccuuuuuguugaacgcagcaaagccuacagcaacuguuacccuuaugaugugccggauuaugccucccuuaggucacuaguugccucauccggcacacuggaguuuaacaaugaaagcuucaauuggacuggagucacucaaaacggaacaagcucugcuugcauaaggagaucuaauaacaguuucuuuaguagauugaauugguugacccacucaaaauucaaauacccagcauugaacgugacuaugccaaacaaugaaaauuuugacaaauuguacauuugggggguccaccacccggguacggacaaugaccaaaucuuccuguaugcucaagcaucaggaagaaucacagucucuaccaaaagaagccaacaaacuguaaucccgaauaucggaucuagacccagaguaaggaauaucccuagcagaauaagcaucuauuggacaauaguaaaaccgggagacauacuuuugauuaacagcacagggaaucuaauugcuccuagggguuacuucaaaauacgaagugggaaaagcucaauaaugagaucagaugcacccauuggcaaaugcaauucugaaugcaucacuccaaauggaagcauucccaaugacaaaccauuccaaaauguaaacaggaucacauacggggccugucccagauauguuaagcaaaacacucugaaauuggcaacagggaugcgaaauguaccagagaaacaaacuagaggcauauuuggcgcaaucgcugguuucauagaaaaugguugggagggaaugguggaugguugguacgguuucaggcaucaaaauucugagggaauaggacaagcagcagaucucaaaagcacucaagcagcaaucgaucaaaucaaugggaagcugaauagguugaucgggaaaaccaacgagaaauuccaucagauugaaaaagaauucucagaagucgaagggagaauucaggaccuugagaaauauguugaggacaccaaaauagaucucuggucauacaacgcggagcuucuuguugcccuggagaaccaacauacaauugaucuaacugauucagaaaugaacaaacuguuugaaaaaacaaagaagcaacugagggaaaaugcugaggauaugggcaaugguuguuucaaaaucuaccacaaaugugacaaugccugcauaggaucaaucagaaauggaacuuaugaccacgaugucuacagagaugaagcauuaaacaaccgguuccagaucaagggcguugagcugaagucaggauacaaagauuggauccuauggauuuccuuugccauaucauguuuuuugcuuugcauugcuuuguugggguucaucaugugggccugccaaaaaggcaacauuaggugcaacauuugcauuuga

SEQ ID NO: 35211 - RNA, 1701 nt, Artificial Sequence; identical to SEQ ID NO: 34569
  derived and/or modified CDS sequence (wt) from hemagglutinin__InfluenzaA__ACU80366

SEQ ID NO: 35212 - RNA, 1701 nt, Artificial Sequence
  derived and/or modified CDS sequence (wt) from hemagglutinin__InfluenzaA__ACU80377
augaagacuaucauugcuuugagcuacauucuaugucugguuuucgcucaaaaauuuccuggaaaugacaacagcacggcaacgcugugccuugggcaccaugcaguaccaaacggaacgauagugaaaacaaucacgaaugaccaaauugaaguuacuaaugcuacugagcugguucagaguuccucaacaggugaaauaugcgacaguccucaucagauccuugauggagaaaacugcacacuaauagaugcucuauugggagacccucagugugauggcuuccaaaauaagaauugggaccuuuuuguugaacgcagcaaagccuacagcaacuguuacccuuaugaugugccggauuaugccucccuuaggucacuaguugccucauccggcacacuggaguuuaacaaugaaagcuucaauuggacuggagucacucaaaacggaacaagcucugcuugcauaaggagaucuaauaacaguuucuuuaguagauugaauugguugacccacucaaaauucaaauacccagcauugaacgugacuaugccaaacaaugaaaauuuugacaaauuguacauuugggggguucaccacccggguacggacaaugaccaaaucuuccuguaugcucaagcaucaggaagaaucacagucucuaccaaaagaagccaacaaacuguaaucccgaauaucggaucuagacccagaguaaggaauaucccuagcagaauaagcaucuauuggacaauaguaaaaccgggagacauacuuuugauuaacagcacagggaaucuaauugcuccuagggguuacuucaaaauacgaagugggaaaagcucaauaaugagaucagaugcacccauuggcaaaugcaauuuugaaugcaucacuccaaauggaagcauucccaaugacaaaccauuccaaaauguaaacaggaucacauacggggccugucccagauauguuaagcaaaacacucugaaauuggcaacagggaugcgaaauguaccagagaaacaaacuagaggcauauuuggcgcaaucgcugguuucauagaaaaugguugggagggaaugguggaugguugguacgguuucaggcaucaaaauucugagggaauaggacaagcagcagaucucaaaagcacucaagcagcaaucgaucaaaucaaugggaagcugaauagguugaucgggaaaaccaacgagaaauuccaucagauugaaaaagaauucucagaagucgaagggagaauucaggaccuugagaaauauguugaggacaccaaaauagaucucuggucauacaacgcggagcuucuuguugcccuggagaaccaacauacaauugaucuaacugauucagaaaugaacaaacuguuugaaaaaacaaggaagcaacugagggaaaaugcugaggauaugggcaaugguuguuucaaaaucuaccacaaaugugacaaugccugcauaggaucaaucagaaauggaacuuaugaccacgaugucuacagagaugaagcauuaaacaaccgguuccagaucaagggcguugagcugaagucaggauacaaagauuggauccuauggauuuccuuugccaugucauguuuuuugcuuugcauugcuuuguugggguucaucaugugggccugccaaaaaggcaacauuaggugcaacauuugcauuuga

SEQ ID NO: 35213 - RNA, 1701 nt, Artificial Sequence
  derived and/or modified CDS sequence (wt) from hemagglutinin__InfluenzaA__ACU80388
augaagacuaucauugcuuugagcuacauucuaugucugguuuucgcucaaaaauuuccuggaaaugacaacagcacggcaacgcugugccuugggcaccaugcaguaccaaacggaacgauagugaaaacaaucacgaaugaccaaauugaaguuacuaaugcuacugagcugguucagaguuccucaacaggugaaauaugcgacaguccucaucagauccuugauggagaaaacugcacacuaauagaugcucuauugggagacccucagugugauggcuuccaaaauaagaauugggaccuuuuuguugaacgcagcaaagccuacagcaacuguuacccuuaugaugugccggauuaugccucccuuaggucacuaguugccucauccggcacacuggaguuuaacaaugaaagcuucaauuggacuggagucacucaaaacggaacaagcucugcuugcauaaggagaucuaauaacaguuucuuuaguagauugaauugguugacccacucaaaauucaaauacccagcauugaacgugacuaugccaaacaaugaaaauuuugacaaauuguacauuugggggguucaccacccggguacggacaaugaccaaaucuuccuguaugcucaagcaucaggaagaaucacagucucuaccaaaagaagccaacaaacuguaaucccgaauaucggaucuagacccagaguaaggaauaucccuagcagaauaagcaucuauuggacaauaguaaaaccgggagacauacuuuugauuaacagcacagggaaucuaauugcuccuagggguuacuucaaaauacgaagugggaaaagcucaauaaugagaucagaugcacccauuggcaaaugcaauucugaaugcaucacuccaaauggaagcauucccaaugacaaaccauuccaaaauguaaacaggaucacauacggggccugucccagauauguuaagcaaaacacucugaaauuggcaacagggaugcgaaauguaccagagaaacaaacuagaggcauauuuggcgcaaucgcugguuucauagaaaaugguugggagggaaugguggaugguugguacgguuucaggcaucaaaauucugagggaauaggacaagcagcagaccucaaaagcacucaagcagcaaucgaucaaaucaaugggaagcugaauagguugaucgggaaaaccaacgagaaauuccaucagauugaaaaagaauucucagaagucgaagggagaauucaggaccuugagaaauauguugaggacaccaaaauagaucucuggucauacaacgcggagcuucuuguugcccuggagaaccaacauacaauugaucuaacugauucagaaaugaacaaacuguuugaaaaaacaaagaagcaacugagggaaaaugcugaggauaugggcaaugguuguuucaaaaucuaccacaaaugugacaaugccugcauaggaucaaucagaaauggaacuuaugaccacgaugucuacagagaugaagcauuaaacaaccgguuccagaucaagggcguugagcugaagucaggauacaaagauuggauccuauggauuuccuuugccauaucauguuuuuugcuuugcauugcuuuguugggguucaucaugugggccugccaaaaaggcaacauuaggugcaacauuugcauuuga

SEQ ID NO: 35214 - RNA, 1701 nt, Artificial Sequence; identical to SEQ ID NO: 34535
  derived and/or modified CDS sequence (wt) from hemagglutinin__InfluenzaA__ACU80399

SEQ ID NO: 35215 - RNA, 1698 nt, Artificial Sequence
  derived and/or modified CDS sequence (wt) from hemagglutinin__InfluenzaA__ACU80410
augaaaguaaaacuacugguccuguuaugcacauuuacagcuacauaugcagacacaauauguauaggcuaccaugcuaacaacucgaccgacacuguugacacaguacuugaaaagaaugugacaguaacacacucugucaaccugcuugagaacagucacaauggaaaacuaugucuauuaaaaggaauagccccacuacaauuggguaauugcagcguugccggguggaucuuaggaaacccagaaugcgaauuacugauuuccaaggagucaugguccuacauuguagaaaaaccaaauccugagaauggaacauguuacccagggcauuucgcugacuaugaggaacugagggagcaauugaguucaguaucuucauuugagagguucgaaauauuccccaaagaaagcucauggcccaaccauaccguaaccggagugucagcaucaugcucccauaauggagagagcaguuuuuacagaaauuugcuauggcugacggggaagaaugguuuguacccaaaccugagcaaguccuaugcaaacaacaaagaaaaagaaguccuugugcuaugggguguucaucacccgccaaacauaggugaccaaaaggcccucuaucauacagaaaaugcuuaugucucuguagugucuucacauuauagcagaaaauucacuccagaaauagccaaaagacccaaaguaagagaucaagaaggaagaaucaauuacuacuggacucugcuugaacccggggauacaauaauauuugaggcaaauggaaaucuaauagcgccaagauaugcuuucgcacugaguagaggcuuuggaucaggaaucaucaacucaaaugcaccaauggauaaaugugaugcgaagugccaaacaccucagggagcuauaaacagcagucuuccuuuccagaacguacacccagucacaauaggagaguguccaaaguaugucaggagugcaaaauuaaggaugguuacaggacuaaggaacaucccauccauucaauccagagguuuguuuggagccauugccgguuucauugaagggggguggacuggaaugguagaugguugguaugguuaucaucaucagaaugagcaaggaucuggcuaugcugcagaucaaaaaagcacacaaaaugccauuaaugggauuacaaacaaggugaauucuguaauugagaaaaugaacacucaauucacagcagugggcaaagaauucaacaaauuggaaagaaggauggaaaacuugaauaaaaaaguugaugauggguuuauagacauuuggacauauaaugcagaacuguugguucuacuggaaaaugaaaggacuuuggauuuccaugacuccaaugugaagaaucuguaugagaaaguaaaaaaccaguuaaagaauaaugcuaaagaaauaggaaauggguguuuugaauucuaucacaaguguaacgaugaaugcauggagaguguaaagaauggaacuuaugacuauccaaaauauuccgaagaaucaaaguuaaacagggagaaaauugauggagugaaauuggaaucaaugggagucuaucagauucuggcgaucuacucaacagucgccaguucucugguucuuuuggucucccugggggcaaucagcuucuggauguguuccaaugggucuuugcaguguagaauaugcaucuaa

SEQ ID NO: 35216 - RNA, 1701 nt, Artificial Sequence
  derived and/or modified CDS sequence (wt) from hemagglutinin__InfluenzaA__ACU80424
augaagacuaucauugcuuugagcuacauucuaugucugguuuucgcucaaaaauuuccuggaaaugacaacagcacggcaacgcugugccuugggcaccaugcaguaccaaacggaacgauagugaaaacaaucacgaaugaccaaauugaaguuacuaaugcuacugagcugguucagaguuccucaacaggugaaauaugcgacaguccucaucagauccuugauggagaaaacugcacacuaauagaugcucuauugggagacccucagugugauggcuuccaaaauaagaauugggaccuuuuuguugaacgcagcaaagccuacagcaacuguuacccuuaugaugugccggauuaugccucccuuaggucacuaguugccucauccggcacacuggaguuuaacaaugaaagcuucaauuggacuggagucacucaaaacggaacaagcucugcuugcauaaggagaucuaauaacaguuucuuuaguagauugaauugguugacccacucaaaauucaaauacccagcauugaacgugacuaugccaaacaaugaaaauuuugacaaauuguacauuugggggguucaccacccggguacggacaaugaccaaaucuuccuguaugcucaagcaucaggaagaaucacagucucuaccaaaagaagccaacaaacuguaaucccgaauaucggaucuagacccagaguaaggaauaucccuagcagaauaagcaucuauuggacaauaguaaaaccgggagacauacuuuugauuaacagcacagggaaucuaauugcuccuagggguuacuucaaaauacgaagugggaaaagcucaauaaugagaucagaugcacccauuggcaaaugcaauuuugaaugcaucacuccaaauggaagcauucccaaugacaaaccauuccaaaauguaaacaggaucacauacggggccugucccagauauguuaagcaaaacacucugaaauuggcaacagggaugcgaaauguaccagagaaacaaacuagaggcauauuuggcgcaaucgcugguuucauagaaaaugguugggagggaaugguggaugguugguacgguuucaggcaucaaaauucugagggaauaggacaagcagcagaucucaaaagcacucaagcagcaaucgaucaaaucaaugggaagcugaauagguugaucgggaaaaccaacgagaaauuccaucagauugaaaaagaauucucagaagucgaagggagaauucaggaccuugagaaauauguugaggacaccaaaauagaucucuggucauacaacgcggagcuucuuguugcccuggagaaccaacauacaauugaucuaacugauucagaaaugaacaaacuguuugaaaaaacaaggaagcaacugagggaaaaugcugaggauaugggcaaugguuguuucaaaaucuaccacaaaugugacaaugccugcauaggaucaaucagaaauggaacuuaugaccacgaugucuacagagaugaagcauuaaacaaccgguuccagaucaagggcguugagcugaagucaggauacaaagauuggauccuauggauuuccuuugccauaucauguuuuuugcuuugcauugcuuuguugggguucaucaugugggccugccaaaaaggcaacauuaggugcaacauuugcauuuga

SEQ ID NO: 35217 - RNA, 1701 nt, Artificial Sequence; identical to SEQ ID NO: 35216
  derived and/or modified CDS sequence (wt) from hemagglutinin__InfluenzaA__ACU80435

SEQ ID NO: 35218 - RNA, 1698 nt, Artificial Sequence
  derived and/or modified CDS sequence (wt) from hemagglutinin__InfluenzaA__ACU80446
augaaaguaaaacuacugguccuguuaugcacauuuacagcuacauaugcagacacaauauguauaggcuaccaugcuaacaacucgaccgacacuguugacacaguacuugaaaagaaugugacagugacacacucugucaaccugcuugagaacagucacaauggaaaacuaugucuauuaaaaggaauagccccacuacaauuggguaacugcagcguugccggguggaucuuaggaaacccagaaugcgaauuacugauuuccaaggagucaugguccuacauuguagaaaaaccaaauccugagaauggaacauguuacccagggcauuucgcugacuaugaggaacugagggagcaauugaguucaguaucuucauuugagagguucgaaauauuccccaaagaaagcucauggcccaaccacaccguaaccggagugucagcaucaugcucccauaauggggaaagcaguuuuuacagaaauuugcuauggcugacggggaagaaugguuuguacccaaaccugagcaaguccuaugcaaacaacaaagaaaaagaaguccuuguacuaugggguguucaucacccgccaaacauaggugaccaaaagacccucuaucauacagaaaaugcuuauguuucuguagugucuucacauuauagcagaaaauucaccccagaaauagccaaaagacccaaaguaagagaucaagaaggaagaaucaacuacuacuggacucugcuugaacccggggauacaauaauauuugaggcaaauggaaaucuaauagcgccaagauaugcuuucgcacugaguagaggcuuuggaucaggaaucaucaacucaaaugcaccaauggauaaaugugaugcgaagugccaaacaccucagggagcuauaaacagcagucuuccuuuccagaacguacacccagucacaauaggagaguguccaaaguaugucaggagugcaaaauuaaggaugguuacaggacuaaggaacaucccauccauucaauccagagguuuguuuggagccauugccgguuucauugaagggggguggacuggaaugguagaugguugguaugguuaucaucaucagaaugagcaaggaucuggcuaugcugcagaucaaaaaagcacacaaaaugccauuaaugggauuacaaacaaggugaauucuguaauugagaaaaugaacacucaauucacagcagugggcaaagaauucaacaaauuggaaagaaggauggaaaacuugaauaaaaaaguugaugauggguuuauagacauuuggacauauaaugcagaacuguugguucuacuggaaaaugaaaggacuuuggauuuccaugacuccaaugugaagaaucuguaugagaaaguaaaaagccaguuaaagaauaaugcuaaagaaauaggaaauggguguuuugaauucuaucacaaguguaacgaugaaugcauggagaguguaaagaauggaacuuaugacuauccaaaauauuccgaagaaucaaaguuaaacagggagaaaauugauggagugaaauuggaaucaauggaagucuaucagauucuggcgaucuacucaacagucgccaguucucugguucuuuuggucucccugggggcaaucagcuucuggauguguuccaaugggucuuugcaguguagaauaugcaucuga

SEQ ID NO: 35219 - RNA, 1701 nt, Artificial Sequence
  derived and/or modified CDS sequence (wt) from hemagglutinin__InfluenzaA__ACU80458
augaagacuaucauugcuuugagcuacauucuaugucugguuuucgcucaaaaacuuccuggaaaugacaacagcacggcaacgcugugccuugggcaccaugcaguaccaaacggaacaauagugaaaacaaucacuaaugaccaaauugaaguuacuaaugcuacugagcugguucagaguuccucaacaggugaaauaugcgacaguccucaucagauccuugauggagaaaacugcacacuaauagaugcucuauugggagacccucagugugauggcuuccaaaauaagaaaugggaccuuuuuguugaacgcagcaaagccuacagcaacuguuacccuuaugaugugccggauuaugccucccuuaggucacuaguugccucauccggcacacuggaguuuaacaaugaaagcuucaauuggacuggagucacucaaaacggaacaagcucugcuugcauaaggagaucuaauaacaguuucuuuaguagauugaauugguugacccacuuaaaauucaaauacccagcauugaacgugacuaugccaaacaaugaacaauuugacaaauuguacauuugggggguucaccacccggguacggacaaugaccaaaucuuccuguaugcucaagcaucaggaagaaucacagucucuaccaaaagaagccaacaaacuguaaucccgaauaucggaucuagacccagaguaaggaauaucccuagcagaauaagcaucuauuggacaauaguaaaaccgggagacauacuuuugauuaacagcacagggaaucuaauugcuccuagggguuacuucaaaauacgaagugggaaaagcucaauaaugagaucagaugcacccauuggcaaaugcaauucugaaugcaucacuccaaauggaagcauucccaaugacaaaccauuccaaaauguaaacaggaucacauacggggccugucccagauauguuaagcaaaacacucugaaauuggcaacagggaugcgaaauguaccagagaaacaaacuagaggcauauuuggcgcaaucgcggguuucauagaaaaugguugggagggaaugguggaugguugguacgguuucaggcaucaaaauucugagggaagaggacaagcagcagaucucaaaagcacucaagcagcaaucgaucaaaucaaugggaagcugaauagauugaucgggaaaaccaacgagaaauuccaucagauugaaaaagaauucucagaagucgaagggagaauucaggaccuugagaaauauguugaggacacuaaaauagaucucuggucauacaacgcggagcuucuuguugcccuggagaaccaacauacaauugaucuaacugacucagaaaugaacaaacuguuugaaaaaacaaagaagcaacugagggaaaaugcugaggauaugggcaaugguuguuucaaaauauaccacaaaugugacaaugccugcauaggaucaaucagaaauggaacuuaugaccacgauguauacagagaugaagcauuaaacaaccgguuccagaucaagggaguugagcugaagucaggguacaaagauuggauccuauggauuuccuuugccauaucauguuuuuugcuuuguguugcuuuguugggguucaucaugugggccugccaaaaaggcaacauuaggugcaacauuugcauuuga

SEQ ID NO: 35220 - RNA, 1701 nt, Artificial Sequence
  derived and/or modified CDS sequence (wt) from hemagglutinin__InfluenzaA__ACU80470
augaagacuaucauugcuuugagcuacauucuaugucugguuuucgcucaaaaacuuccuggaaaugacaacagcacggcaacgcugugccuugggcaccaugcaguaccaaacggaacgauagugaaaacaaucacgaaugaccaaauugaaguuacuaaugcuacugagcugguucagaguuccucaacaggugaaauaugcgacaguccucaucagauccuugauggagaaaacugcacacuaauagaugcucuauugggagacccucagugugauggcuuccaaaauaagaaaugggaccuuuuuguugaacgcagcaaagccuacagcaacuguuacccuuaugaugugccggauuaugccucccuuaggucacuaguugccucauccggcacacuggaguuuaacaaugaaagcuucaauuggacuggagucacucaaaacggaacaagcucugcuugcauaaggagaucuaauaacaguuucuuuaguagauugaauugguugacccacuuaaaauucaaauacccagcauugaacgugacuaugccaaacaaugaacaauuugacaaauuguacauuugggggguucaccacccggguacggacaaugaccaaaucuuccuguaugcucaagcaucaggaagaaucacagucucuaccaaaagaagccaacaaacuguaaucccgaauaucggaucuagacccagaguaaggaauaucccuagcagaauaagcaucuauuggacaauaguaaaaccgggagacauacuuuugauuaacagcacagggaaucuaauugcuccuagggguuacuucaaaauacgaagugggaaaagcucaauaaugagaucagaugcacccauuggcaaaugcaauucugaaugcaucacuccaaauggaagcauucccaaugacaaaccauuccaaaauguaaacagaaucacauacggggccugucccagauauguuaagcaaaacacucugaaauuggcaacagggaugcgaaauguaccagagaaacaaacuagaggcauauuuggcgcaaucgcggguuucauagaaaaugguugggagggaaugguggaugguugguacgguuucaggcaucaaaauucugagggaagaggacaagcagcagaucucaaaagcacucaagcagcaaucgaucaaaucaaugggaagcugaauagauugaucgggaaaaccaacgagaaauuccaucagauugaaaaagaauucucagaagucgaagggagaauucaggaccuugagaaauauguugaggacacuaaaauagaucucuggucauacaacgcggagcuucuuguugcccuggagaaccaacauacaauugaucuaacugacucagaaaugaacaaacuguuugaaaaaacaaagaagcaacugagggaaaaugcugaggauaugggcaaugguuguuucaaaauauaccacaaaugugacaaugccugcauaggaucaaucagaaauggaacuuaugaccacgauguauacagagaugaagcauuaaacaaccgguuccagaucaagggaguugagcugaagucaggguacaaagauuggauccuauggauuuccuuugccauaucauguuuuuugcuuuguguugcuuuguugggguucaucaugugggccugccaaaaaggcaacauuaggugcaacauuugcauuuga

SEQ ID NO: 35221 - RNA, 1701 nt, Artificial Sequence
  derived and/or modified CDS sequence (wt) from hemagglutinin__InfluenzaA__ACU80600
augaagacuaucauugcuuugagcuacauucuaugucugguuuucgcucaaaaauuuccuggaaaugacaacagcacggcaacgcugugccuugggcaccaugcaguaccaaacggaacgauagugaaaacaaucacgaaugaccaaauugaaguuacuaaugcuacugagcugguucagaguuccucaacaggugaaauaugcgacaguccucaucagauccuugauggagaaaacugcacacuaauagaugcucuauugggagacccucagugugauggcuuccaaaacaagaauugggaccuuuuuguugaacgcagcaaagccuacagcaacuguuacccuuaugaugugccagauuaugccucccuuaggucacuaguugccucauccggcacacuggaguuuaacaaugaaagcuucaauuggacuggagucacucaaaacggaacaagcucugcuugcauaaggagaucuaauaacaguuucuuuaguagauugaauugguugacccacucaaaauucaaauacccagcauugaacgugacuaugccaaacaaugaaaauuuugacaaauuguacauuugggggguucaccacccggguacggacaaugaccaaaucuuccuguaugcucaagcaucaggaagaaucacagucucuaccaaaagaagccaacaaacuguaaucccgaauaucggaucuagacccagaguaaggaauaucccuagcagaauaagcaucuauuggacaauaguaaaaccgggagacauacuuuugauuaacagcacagggaaucuaauugcuccuagggguuacuucaaaauacgaagugggaaaagcucaauaaugagaucagaugcacccauuggcaaaugcaauucugaaugcaucacuccaaauggaagcauucccaaugacaaaccauuccaaaauguaaacaggaucacauacggggccugucccagauauguuaagcaaaacacucugaaauuggcaacagggaugcgaaauguaccagagaaacaaacuagaggcauauuuggcgcaaucgcugguuucauagaaaaugguugggagggaaugguggaugguugguacgguuucaggcaucaaaauucugagggaauaggacaagcagcagaucucaaaagcacucaagcagcaaucgaucaaaucaaugggaagcugaauagguugaucgggaaaaccaacgagaaauuccaucagauugaaaaagaauucucagaagucgaagggagaauucaggaccuugagaaauauguugaggacaccaaaauagaucucuggucauacaacgcggagcuucuuguugcccuggagaaccaacauacaauugaucuaacugauucagaaaugaacaaacuguuugaaaaaacaaagaagcaacugagggaaaaugcugaggauaugggcaaugguuguuucaaaaucuaccacaaaugugacaaugccugcauaggaucaaucagaaauggaacuuaugaccacgaugucuacagagaugaagcauuaaacaaccgguuccagaucaagggcguugagcugaagucaggauacaaagauuggauccuauggauuuccuuugccauaucauguuuuuugcuuugcauugcuuuguugggguucaucaugugggccugccaaaaaggcaacauuaggugcaacauuugcauuuga

SEQ ID NO: 35222 - RNA, 1701 nt, Artificial Sequence; identical to SEQ ID NO: 35216
  derived and/or modified CDS sequence (wt) from hemagglutinin__InfluenzaA__ACU80611

SEQ ID NO: 35223 - RNA, 1701 nt, Artificial Sequence; identical to SEQ ID NO: 34569
  derived and/or modified CDS sequence (wt) from hemagglutinin__InfluenzaA__ACU80622

SEQ ID NO: 35224 - RNA, 1701 nt, Artificial Sequence; identical to SEQ ID NO: 34535
  derived and/or modified CDS sequence (wt) from hemagglutinin__InfluenzaA__ACU80633

SEQ ID NO: 35225 - RNA, 1701 nt, Artificial Sequence
  derived and/or modified CDS sequence (wt) from hemagglutinin__InfluenzaA__ACU80644
augaagacuaucauugcuuugagcuacauucuaugucugguuuucgcucaaaaacuuccuggaaaugacaacagcacggcaacgcugugccuugggcaccaugcaguaccaaacggaacgauagugaaaacaaucacgaaugaccaaauugaaguuacuaaugcuacugagcugguucagaguuccucaacaggugaaauaugcgacaguccucaucagauccuugauggagaaaacugcacacuaauagaugcucuauugggagacccucagugugauggcuuccaaaauaagaaaugggaccuuuuuguugaacgcagcaaagccuacagcaacuguuacccuuaugaugugccggauuaugccucccuuaggucacuaguugccucauccggcacacuggaguuuaacaaugaaagcuucaauuggacuggagucacucaaaacggaacaagcucugcuugcauaaggagaucuaauaacaguuucuuuaguagauugaauugguugacccacucaaaauucaaauacccagcauugaacgugacuaugccaaacaaugaagaauuugacaaauuguacauuugggggguucaccacccggguacggacaaugaccaaaucuuccuguaugcucaagcaucaggaagaaucacagucucuaccaaaagaagccaacaaacuguaaucccgaauaucggaucuagacccagaguaaggaauauccccagcagaauaagcaucuauuggacaauaguaaaaccgggagacauacuuuugauuaacagcacagggaaucuaauugcuccuagggguuacuucaaaauacgaagugggaaaagcucaauaaugagaucagaugcacccauuggcaaaugcaauucugaaugcaucacuccaaauggaagcauucccaaugacaaaccauuccaaaauguaaacaggaucacauacggggccugucccagauauguuaagcaaaacacucugaaauuggcaacagggaugcgaaauguaccagagaaacaaacuagaggcauauuuggcgcaaucgcggguuucauagaaaaugguugggagggaaugguggaugguugguacgguuucaggcaucaaaauucugagggaauaggacaagcagcagaucucaaaagcacucaagcagcaaucgaucaaaucaauggaaagcugaauagguugaucgggaaaaccaacgagaaauuccaucagauugaaaaagaauucucagaagucgaagggaggauucaggaccuugagaaauauguugaggacaccaaaauagaucucuggucauacaacgcggagcuucuuguugcccuggagaaccaacauacaauugaucuaacugacucagaaaugaacaaacuguuugaaaaaacaaagaagcaacugagggaaaaugcugaggauaugggcaaugguuguuucaaaauauaccacaaaugugacaaugccugcauaggaucaaucagaaauggaacuuaugaccacgauguauacagagaugaagcauuaaacaaccgguuccagaucaagggcguugagcugaaaucaggauacaaagauuggauccuauggauuuccuuugccauaucauguuuuuugcuuuguguugcuuuguugggguucaucaugugggccugccaaaaaggcaacauuaggugcaacauuugcauuuga

SEQ ID NO: 35226 - RNA, 1701 nt, Artificial Sequence
  derived and/or modified CDS sequence (wt) from hemagglutinin__InfluenzaA__ACU80655
augaagacuaucauugcuuugagcuacauucuaugucugguuuucgcucaaaaacuuccuggaaaugacaacagcacggcaacgcugugccuugggcaccaugcaguaccaaacggaacgauagugaaaacaaucacgaaugaccaaauugaaguuacuaaugcuacugagcugguucagaguuccucaacaggugaaauaugcgacaguccucaucagauccuugauggagaaaacugcacacuaauagaugcucuauugggagacccucagugugauggcuuccaaaauaagaaaugggaccuuuuuguugaacgcagcaaagccuacagcaacuguuacccuuaugaugugccggauuaugccucccuuaggucacuaguugccucauccggcacacuggaguuuaacaaugaaagcuucaauuggacuggagucacucaaaacggaacaagcucugcuugcauaaggagaucuaauaacaguuucuuuaguagauugaauugguugacccacuuaaaauucaaauacccagcauugaacgugacuaugccaaacaaugaacaauuugacaaauuguacauuugggggguucaccacccggguacggacaaugaccaaaucuuccuguaugcucaagcaucaggaagaaucacagucucuaccaaaagaagccaacaaacuguaaucccgaauaucggaucuagacccagaguaaggaauaucccuagcagaauaagcaucuauuggacaauaguaaaaccgggagacauacuuuugauuaacagcacagggaaucuaauugcuccuagggguuacuucaaaauacgaagugggaaaagcucaauaaugagaucagaugcacccauuggcaaaugcaauucugaaugcaucacuccaaauggaagcauucccaaugacaaaccauuccaaaauguaaacaggaucacauacggggccugucccagauauguuaagcaaaacacucugaaauuggcaacagggaugcgaaauguaccagagaaacaaacuagaggcauauuuggcgcaaucgcagguuucauagaaaaugguugggagggaaugguggaugguugguacgguuucaggcaucaaaauucugagggaagaggacaagcagcagaucucaaaagcacucaagcagcaaucgaucaaaucaaugggaagcugaauagauugaucgggaaaaccaacgagaaauuccaucagauugaaaaagaauucucagaagucgaagggagaauucaggaccuugagaaauauguugaggacaccaaaauagaucucuggucauacaacgcggagcuucuuguugcccuggagaaccaacauacaauugaucuaacugacucagaaaugaacaaacuguuugaaaaaacaaagaagcaacugagggaaaaugcugaggauaugggcaaugguuguuucaaaauauaccacaaaugugacaaugccugcauaggaucaaucagaaauggaacuuaugaccacgauguauacagagaugaagcauuaaacaaccgguuccagaucaagggaguugagcugaagucaggguacaaagauuggauccuauggauuuccuuugccauaucauguuuuuugcuuuguguugcuuuguugggguucaucaugugggccugccaaaaaggcaacauuaggugcaacauuugcauuuga

SEQ ID NO: 35227 - RNA, 1701 nt, Artificial Sequence
  derived and/or modified CDS sequence (wt) from hemagglutinin__InfluenzaA__ACU80666
augaagacuaucauugcuuugagcuacauucuaugucugguuuucgcucaaaaacuuccuggaaaugacaacagcacggcaacgcugugccuugggcaccaugcaguaccaaacggaacgauagugaaaacaaucacgaaugaccaaauugaaguuacuaaugcuacugagcugguucagaguuccucaacaggugaaauaugcgacaguccucaucagauccuugauggagaaaacugcacacuaauagaugcucuauugggagacccucagugugauggcuuccaaaauaagaaaugggaccuuuuuguugaacgcagcaaagccuacagcaacuguuacccuuaugaugugccggauuaugccucccuuaggucacuaguugccucauccggcacacuggaguuuaacaaugaaagcuucaauuggacuggagucacucaaaacggaacaagcucugcuugcauaaggagaucuaauaacaguuucuuuaguagauugaauugguugacccacuuaaaauucaaauacccagcauugaacgugacuaugccaaacaaugaacaauuugacaaauuguacauuugggggguucaccacccggguacggacaaugaccaaaucuuccuguaugcucaagcaucaggaagaaucacagucucuaccaaaagaagccaacaaacuguaaucccgaauaucggaucuagacccagaguaaggaauaucccuagcagaauaagcaucuauuggacaauaguaaaaccgggagacauacuuuugauuaacagcacagggaaucuaauugcuccuagggguuacuucaaaauacgaagugggaaaagcucaauaaugagaucagaugcacccauuggcaaaugcaauucugaaugcaucacuccaaauggaagcauucccaaugacaaaccauuccaaaauguaaacaggaucacauacggggccugucccagauauguuaagcaaaacacucugaaauuggcaacagggaugcgaaauguaccagagaaacaaacuagaggcauauuuggcgcaaucgcggguuucauagaaaaugguugggagggaaugguggaugguugguacgguuucaggcaucaaaauucugagggaagaggacaagcagcagaucucaaaagcacucaagcagcaaucgaucaaaucaaugggaagcugaauagauugaucgggaaaaccaacgagaaauuccaucagaucgaaaaagaauucucagaagucgaagggagaauucaggaccuugagaaauauguugaggacaccaaaauagaucucuggucauacaacgcggagcuucuuguugcccuggagaaccaacauacaauugaucuaacugacucagaaaugaacaaacuguuugaaaaaacaaagaagcaacugagggaaaaugcugaggauaugggcaaugguuguuucaaaauauaccacaaaugugacaaugccugcauaggaucaaucagaaauggaacuuaugaccacgauguauacagagaugaagcauuaaacaaccgguuccagaucaagggaguugagcugaagucaggguacaaagauuggauccuauggauuuccuuugccauaucauguuuuuugcuuuguguugcuuuguugggguucaucaugugggccugccaaaaaggcaacauuaggugcaacauuugcauuuga

SEQ ID NO: 35228 - RNA, 1701 nt, Artificial Sequence
  derived and/or modified CDS sequence (wt) from hemagglutinin__InfluenzaA__ACU80677
augaagacuaucauugcuuugagcuacauucuaugucugguuuucgcucaaaaacuuccuggaaaugacaacagcacggcaacgcugugccuugggcaccaugcaguaccaaacggaacaauagugaaaacaaucacgaaugaccaaauugaaguuacuaaugcuacugagcugguucagaguuccucaacaggugaaauaugcgacaguccucaucagauccuugauggagaaaacugcacacuaauagaugcucuauugggagacccucagugugauggcuuccaaaauaagaaaugggaccuuuuuguugaacgcagcaaagccuacagcaacuguuacccuuaugaugugccggauuaugccucccuuaggucacuaguugccucauccggcacacuggaguuuaacaaugaaagcuucaauuggacuggagucacucaaaacggaacaagcucugcuugcauaaggagaucuaauaacaguuucuuuaguagauugaauugguugacccacuuaaaauucaaauacccagcauugaacgugacuaugccaaacaaugaaaaauuugacaaauuguacauuugggggguucaccacccggguacggacaaugaccaaaucuuccuguaugcucaagcaucaggaagaaucacagucucuaccaaaagaagccaacaaacuguaauuccgaauaucggaucuagacccagaguaaggaauauccccagcagaauaagcaucuauuggacaauaguaaaaccgggagacauacuuuugauuaacagcacagggaaucuaauugcuccuagggguuacuucaaaauacgaagugggaaaagcucaauaaugagaucagaugcacccauuggcaaaugcaauucugaaugcaucacuccaaauggaagcauucccaaugacaaaccauuccaaaauguaaacaggaucacauacggggccugucccagauauguuaagcaaaacacuuugaaauuggcaacagggaugcgaaauguaccagagaaacaaacuagaggcauauuuggcgcaaucgcggguuucauagaaaaugguugggaaggaaugguggaugguugguacgguuucaggcaucaaaauucugagggaauaggacaagcagcagaucucaaaagcacucaagcagcaaucgaucaaaucaaugggaagcugaauagguugaucgggaaaaccaacgagaaauuccaucagauugaaaaagaauucucagaagucgaagggaggauccaggaccuugagaaauauguugaggacaccaaaauagaucucuggucauacaacgcggagcuucuuguugcccuggagaaccaacauacaauugaucuaacugacucagaaaugaacaaacuguuugaaaaaacaaagaagcaacugagggaaaaugcugaggauaugggcaaugguuguuucaaaauauaccacaaaugugacaaugccugcauaggaucaaucagaaauggaacuuaugaccacgauguauacagagaugaagcauuaaacaaccgguuccagaucaagggcguugagcugaagucaggauacaaagauuggauccuauggauuuccuuugccauaucauguuuuuugcuuuguguugcuuuguugggguucaucaugugggccugccaaaaaggcaacauuaggugcaacauuugcauuuga

SEQ ID NO: 35229 - RNA, 1701 nt, Artificial Sequence
  derived and/or modified CDS sequence (wt) from hemagglutinin__InfluenzaA__ACU80688
augaagacuaucauugcuuugagcuacauucuaugucugguuuucgcucaaaaacuuccuggaaaugacaacagcacggcaacgcugugccuugggcaccaugcaguaccaaacggaacgauagugaaaacaaucacgaaugaccaaauugaaguuacuaaugcuacugagcugguucagaguuccucaacaggugaaauaugcgacaguccucaucagauccuugauggagaaaacugcacacugauagaugcucuauugggagacccucagugugauggcuuccaaaauaagaaaugggaccuuuuuguugaacgcagcaaagccuacagcaacuguuacccuuaugaugugccggauuaugccucccuuaggucacuaguugccucauccggcacacuggaguuuaacaaugaaagcuucaauuggacuggagucacucaaaacggaacaagcucugcuugcauaaggagaucuaauaacaguuucuuuaguagauugaauugguugacccacuuaaaauucaaauacccagcauugaacgugacuaugccaaacaaugaacaauuugacaaauuguacauuugggggguucaccacccggguacggacaaugaccaaaucuuccuguaugcucaagcaucaggaagaaucacagucucuaccaaaagaagccaacaaacuguaaucccgaauaucggaucuagacccagaguaaggaauaucccuagcagaauaagcaucuauuggacaauaguaaaaccgggagacauacuuuugauuaacagcacagggaaucuaauugcuccuagggguuacuucaaaauacgaagugggaaaagcucaauaaugagaucagaugcacccauuggcaaaugcaauucugaaugcaucacuccaaauggaagcauucccaaugacaaaccauuccaaaauguaaacaggaucacauacggggccugucccagauauguuaagcaaaacacucugaaauuggcaacagggaugcgaaauguaccagagaaacaaacuagaggcauauuuggcgcaaucgcggguuucauagaaaaugguugggagggaaugguggaugguugguacgguuucaggcaucaaaauucugagggaagaggacaagcagcagaucucaaaagcacucaagcagcaaucgaucaaaucaaugggaagcugaauagauugaucgggaaaaccaacgagaaauuccaucagauugaaaaagaauucucagaagucgaagggagaauucaggaccuugagaaauauguugaggacacuaaaauagaucucuggucauacaacgcggagcuucuuguugcccuggagaaccaacauacaauugaucuaacugacucagaaaugaacaaacuguuugaaaaaacaaagaagcaacugagggaaaaugcugaggauaugggcaaugguuguuucaaaauauaccacaaaugugacaaugccugcauaggaucaaucagaaauggaacuuaugaccacgauguauacagagaugaagcauuaaacaaccgguuccagaucaagggaguugagcugaagucaggguacaaagauuggauccuauggauuuccuuugccauaucauguuuuuugcuuuguguugcuuuguugggguucaucaugugggccugccaaaaaggcaacauuaggugcaacauuugcauuuga

SEQ ID NO: 35230 - RNA, 1701 nt, Artificial Sequence; identical to SEQ ID NO: 34569
  derived and/or modified CDS sequence (wt) from hemagglutinin__InfluenzaA__ACU80699

SEQ ID NO: 35231 - RNA, 1701 nt, Artificial Sequence; identical to SEQ ID NO: 34569
  derived and/or modified CDS sequence (wt) from hemagglutinin__InfluenzaA__ACU80710

SEQ ID NO: 35232 - RNA, 1701 nt, Artificial Sequence
  derived and/or modified CDS sequence (wt) from hemagglutinin__InfluenzaA__ACU80721
augaagacuaucauugcuuugagcuacauucuaugucugguuuucgcucaaaaacuuccuggaaaugacaacagcacggcaacgcugugccuugggcaccaugcaguaccaaacggaacgauagugaaaacaaucacgaaugaccaaacugaaguuacuaaugcuacugagcugguucagaguuccucaacaggugaaauaugcgacaguccucaucagauccuugauggagaaaacugcacacuaauagaugcucuauugggagacccucagugugauggcuuccaaaauaagaaaugggaccuuuuuguugaacgcagcaaagccuacagcaacuguuacccuuaugaugugccggauuaugccucccuuaggucacuaguugccucauccggcacacuggaguuuaacaaugaaagcuucaauuggacuggagucacucaaaacggaacaagcucugcuugcauaaggagaucuaauaacaguuucuuuaguagauugaauugguugacccacuuaaaauucaaauacccagcauugaacgugacuaugccaaacaaugaacaauuugacaaauuguacauuugggggguucaccacccggguacggacaaugaccaaaucuuccuguaugcucaagcaucaggaagaaucacagucucuaccaaaagaagccaacaaacuguaaucccgaauaucggaucuagacccagaguaaggaauaucccuagcagaauaagcaucuauuggacaauaguaaaaccgggagacauacuuuugauuaacagcacagggaaucuaauugcuccuagggguuacuucaaaauacgaagugggaaaagcucaauaaugagaucagaugcacccauuggcaaaugcaauucugaaugcaucacuccaaauggaagcauucccaaugacaaaccauuccaaaauguaaacaggaucacauacggggccugucccagauauguuaagcaaaacacucugaaauuggcaacagggaugcgaaauguaccagagaaacaaacuagaggcauauuuggcgcaaucgcggguuucauagaaaaugguugggagggaaugguggaugguugguacgguuucaggcaucaaaauucugagggaagaggacaagcagcagaucucaaaagcacucaagcagcaaucgaucaaaucaaugggaagcugaauagauugaucgggaaaaccaacgagaaauuccaucagauugaaaaagaauucucagaagucgaagggagaauucaggaccuugagaaauauguugaggacacuaaaauagaccucuggucauacaacgcggagcuucuuguugcccuggagaaccaacauacaauugaucuaacugacucagaaaugaacaaacuguuugaaaaaacaaagaagcaacugagggaaaaugcugaggauaugggcaaugguuguuucaaaauauaccacaaaugugacaaugccugcauaggaucaaucagaaauggaacuuaugaccacgauguauacagagaugaagcauuaaacaaccgguuccagaucaagggaguugagcugaagucaggguacaaagauuggauccuauggauuuccuuugccauaucauguuuuuugcuuuguguugcuuuguugggguucaucaugugggccugccaaaaaggcaacauuaggugcaacauuugcauuuga

SEQ ID NO: 35233 - RNA, 1701 nt, Artificial Sequence; identical to SEQ ID NO: 34548
  derived and/or modified CDS sequence (wt) from hemagglutinin__InfluenzaA__ACU80732

SEQ ID NO: 35234 - RNA, 1701 nt, Artificial Sequence
  derived and/or modified CDS sequence (wt) from hemagglutinin__InfluenzaA__ACU80743
augaagacuaucauugcuuugagcuacauucuaugucugguuuucgcucaaaaacuuccuggaaaugacaacagcacggcaacgcugugccuugggcaccaugcaguaccaaacggaacgauagugaaaacaaucacuaaugaccaaauugaaguuacuaaugcuacugagcugguucagaguuccucaacaggugaaauaugcgacaguccucaucagauccuugauggagaaaacugcacacuaauagaugcucuauugggagacccucagugugauggcuuccaaaauaagaaaugggaccuuuuuguugaacgcagcaaagccuacagcaacuguuacccuuaugaugugccggauuaugccucccuuaggucacuaguugccucauccggcacacuggaguuuaacaaugaaagcuucaauuggacuggagucacucaaaacggaacaagcucugcuugcauaaggagaucuaauaacaguuucuuuaguagauugaauugguugacccacuuaaaauucaaauacccagcauugaacgugacuaugccaaacaaugaacaauuugacaaauuguacauuugggggguucaccacccggguacggacaaugaccaaaucuuccuguaugcucaagcaucaggaagaaucacagucucuaccaaaagaagccaacaaacuguaaucccgaauaucggaucuagacccagaguaaggaauaucccuagcagaauaagcaucuauuggacaauaguaaaaccgggagacauacuuuugauuaacagcacagggaaucuaauugcuccuagggguuacuucaaaauacgaagugggaaaagcucaauaaugagaucagaugcacccauuggcaaaugcaauucugaaugcaucacuccaaauggaagcauucccaaugacaaaccauuccaaaauguaaacaggaucacauacggggccugucccagauauguuaagcaaaacacucugaaauuggcaacagggaugcgaaauguaccagagaaacaaacuagaggcauauuuggcgcaaucgcggguuucauagaaaaugguugggagggaaugguggaugguugguacgguuucaggcaucaaaauucugagggaagaggacaagcagcagaucucaaaagcacucaagcagcaaucgaucaaaucaaugggaagcugaauagauugaucgggaaaaccaacgagaaauuccaucagauugaaaaagaauucucagaagucgaagggagaauucaggaccuugagaaauauguugaggacacuaaaauagaucucuggucauacaacgcggagcuucuuguugcccuggagaaccaacauacaauugaucuaacugacucagaaaugaacaaacuguuugaaaaaacaaagaagcaacugagggaaaaugcugaggauaugggcaaugguuguuucaaaauauaccacaaaugugacaaugccugcauaggaucaaucagaaauggaacuuaugaccacgauguauacagagaugaagcauuaaacaaccgguuccagaucaagggaguugagcugaagucaggguacaaagauuggauccuauggauuuccuuugccauaucauguuuuuugcuuuguguugcuuuguugggguucaucaugugggccugccaaaaaggcaacauuaggugcaacauuugcauuuga

SEQ ID NO: 35235 - RNA, 1701 nt, Artificial Sequence
  derived and/or modified CDS sequence (wt) from hemagglutinin__InfluenzaA__ACU80754
augaagacuaucauugcuuugagcuacauucuaugucugguuuucgcucaaaaacuuccuggaaaugacaacagcacggcaacgcugugccuugggcaccaugcaguaccaaacggaacgauagugaaaacaaucacgaaugaccaaauugaaguuacuaaugcuacugagcugguucagaguuccucaacaggugaaauaugcgacaguccucaucagauccuugauggagaaaacugcacacuaauagaugcucuauugggagacccucagugugauggcuuccaaaauaagaaaugggaccuuuuuguugaacgcagcaaagccuacagcaacuguuacccuuaugaugugccggauuaugccucccuuaggucacuaguugccucauccggcacacuggaguuuaacaaugaaagcuucaauuggacuggagucacucaaaacggaacaagcucugcuugcauaaggagaucuaauaacaguuucuuuaguagauugaauugguugacccacuuaaaauucaaauacccagcauugaacgugacuaugccaaacaaugaacaauuugacaaauuguacauuugggggguucaccacccggguacggacaaugaccaaaucuuccuguaugcucaagcaucaggaagaaucacagucucuaccaaaagaagccaacaaacuguaaucccgaauaucggaucuagacccagaguaaggaauaucccuagcagaauaagcaucuauuggacaauaguaaaaccgggagacauacuuuugauuaacagcacagggaaucuaauugcuccuagggguuacuucaaaauacgaagugggaaaagcucaauaaugagaucagaugcacccauuggcaaaugcaauucugaaugcaucacuccaaauggaagcauucccaaugacaaaccauuccaaaauguaaacaggaucacauacggggccugucccagauauguuaagcaaaacacucugaaauuggcaacagggaugcgaaauguaccagagaaacaaacuagaggcauauuuggcgcaaucgcggguuucauagaaaaugguugggagggaaugguggaugguugguacgguuucaggcaucaaaauucugagggaagaggacaagcagcagaucucaaaagcacucaagcagcaaucgaucaaaucaaugggaagcugaauagauugaucgggaaaaccaacgagaaauuccaucagauugaaaaagaauucucagaagucgaagggagaauucaggaccuugagaaauauguugaggacaccaaaauagaucucuggucauacaacgcggagcuucuuguugcccuggagaaccaacauacaauugaucuaacugacucagaaaugaacaaacuguuugaaaaaacaaagaagcaacugagggaaaaugcugaggauaugggcaaugguuguuucaaaauauaccacaaaugugacaaugccugcauaggaucaaucagaaauggaacuuaugaccacgauguauacagagaugaagcauuaaacaaccgguuccagaucaagggaguugagcugaagucaggguacaaagauuggauccuauggauuuccuuugccauaucauguuuuuugcuuuguguuguuuuguugggguucaucaugugggccugccaaaaaggcaacauuaggugcaacauuugcauuuga

SEQ ID NO: 35236 - RNA, 1701 nt, Artificial Sequence
  derived and/or modified CDS sequence (wt) from hemagglutinin__InfluenzaA__ACU80765
augaagacuaucauugcuuugagcuacauucuaugucugguuuucgcucaaaaacuuccuggaaaugacaacagcacggcaacgcugugccuugggcaccaugcaguaccaaacggaacgauagugaaaacaaucacgaaugaccaaauugaaguuacuaaugcuacugagcugguucagaguuccucaacaggugaaauaugcgacaguccucaucagauccuugauggagaaaacugcacacuaauagaugcucuauugggagacccucagugugauggcuuccaaaauaagaaaugggaccuuuuuguugaacgcagcaaagccuacagcaacuguuacccuuaugaugugccggauuaugccucccuuaggucacuaguugccucauccggcacacuggaguuuaacaaugaaagcuucaauuggacuggagucacucaaaacggaacaagcucugcuugcauaaggagaucuaauaacaguuucuuuaguagauugaauugguugacccacucaaaauucaaauacccagcauugaacgugacuaugccaaacaaugaagaauuugacaaauuguacauuugggggguucaccacccggguacggacaaugaccaaaucuuccuguaugcucaagcaucaggaagaaucacagucucuaccaaaagaagccaacaaacuguaaucccgaauaucggaucuagacccagaguaaggaauauccccagcagaauaagcaucuauuggacaauaguaaaaccgggagacauacuuuugauuaacagcacagggaaucuaauugcuccuagggguuacuucaaaauacgaagugggaaaagcucaauaaugagaucagaugcacccauuggcaaaugcaauucugaaugcaucacuccaaauggaagcauucccaaugacaaaccauuccaaaauguaaacaggaucacauacggggccugucccagauauguuaagcaaaacacucugaaauuggcaacagggaugcggaauguaccagagaaacaaacuagaggcauauuuggcgcaaucgcggguuucauagaaaaugguugggagggaaugguggaugguugguacgguuucaggcaucaaaauucugagggaauaggacaagcagcagaucucaaaagcacucaagcagcaaucgaucaaaucaauggaaagcugaauagguugaucgggaaaaccaacgagaaauuccaucagauugaaaaagaauucucagaagucgaagggaggauucaggaccuugagaaauauguugaggacaccaaaauagaucucuggucauacaacgcggagcuucuuguugcccuggagaaccaacauacaauugaucuaacugacucagaaaugaacaaacuguuugaaaaaacaaagaagcaacugagggaaaaugcugaggauaugggcaaugguuguuucaaaauauaccacaaaugugacaaugccugcauaggaucaaucagaaauggaacuuaugaccacgauguauacagagaugaagcauuaaacaaccgguuccagaucaagggcguugagcugaaaucaggauacaaagauuggauccuauggauuuccuuugccauaucauguuuuuugcuuuguauugcuuuguugggguucaucaugugggccugccaaaaaggcaacauuaggugcaacauuugcauuuga

SEQ ID NO: 35237 - RNA, 1701 nt, Artificial Sequence
  derived and/or modified CDS sequence (wt) from hemagglutinin__InfluenzaA__ACU80787
augaagacuaucauugcuuugagcuacauucuaugucugguuuucgcucaaaaacuuccuggaaaugacaacagcacggcaacgcugugccuugggcaccaugcaguaccaaacggaacgauagugaaaacaaucacgaaugaccaaauugaaguuacuaaugcuacugagcugguucagaguuccucaacaggugaaauaugcgacaguccucaucagauccuugauggagaaaacugcacacuaauagaugcucuauugggagacccucagugugauggcuuccaaaauaagaaaugggaccuuuuuguugaacgcagcaaagccuacagcaacuguuacccuuaugaugugccggauuaugccucccuuaggucacuaguugccucauccggcacacuggaguuuaacaaugaaagcuucaauuggacuggagucacucaaaacggaacaagcucugcuugcauaaggagaucuaauaacaguuucuuuaguagauugaauugguugacccacuuaaaauucaaauacccagcauugaacgugacuaugccaaacaaugaacaauuugacaaauuguacauuugggggguucaccacccggguacggacaaugaccaaaucuuccuguaugcucaagcaucaggaagaaucacagucucuaccaaaagaagccaacaaacuguaaucccgaauaucggaucuagacccagaguaaggaauaucccuagcagaauaagcaucuauuggacaauaguaaaaccgggagacauacuuuugauuaacagcacagggaaucuaauugcuccuagggguuacuucaaaauacgaagugggaaaagcucaauaaugagaucagaugcacccauuggcaaaugcaauucugaaugcaucacuccaaauggaagcauucccaaugacaaaccauuccaaaauguaaacaggaucacauacggggccugucccagauauguuaagcaaaacacucugaaauuggcaacagggaugcgaaauguaccagagaaacaaacuagaggcauauuuggcgcaaucgcggguuucauagaaaaugguugggagggaaugauggaugguugguacgguuucaggcaucaaaauucugagggaagaggacaagcagcagaucucaaaagcacucaagcagcaaucgaucaaaucaaugggaagcugaauagauugaucgggaaaaccaacgagaaauuccaucagauugaaaaagaauucucagaagucgaagggagaauucaggaccuugagaaauauguugaggacaccaaaauagaucucuggucauacaacgcggagcuucuuguugcccuggagaaccaacauacaauugaucuaacugacucagaaaugaacaaacuguuugaaaaaacaaagaagcaacugagggaaaaugcugaggauaugggcaaugguuguuucaaaauauaccacaaaugugacaaugccugcauaggaucaaucagaaauggaacuuaugaccacgauguauacagagaugaagcauuaaacaaccgguuccagaucaagggaguugagcugaagucaggguacaaagauuggauccuauggauuuccuuugccauaucauguuuuuugcuuuguguugcuuuguugggguucaucaugugggccugccaaaaaggcaacauuaggugcaacauuugcauuuga

SEQ ID NO: 35238 - RNA, 1701 nt, Artificial Sequence; identical to SEQ ID NO: 34574
  derived and/or modified CDS sequence (wt) from hemagglutinin__InfluenzaA__ACU80798

SEQ ID NO: 35239 - RNA, 1701 nt, Artificial Sequence
  derived and/or modified CDS sequence (wt) from hemagglutinin__InfluenzaA__ACU81103
augaagacuaucauugcuuugagcuacauucuaugucugguuuucgcucaaaaacuuccuggaaaugacaacagcacggcaacgcugugccuugggcaccaugcaguaccaaacggaacgauagugaaaacaaucacgaaugaccaaauugaaguuacuaaugcuacugagcugguucagaguuccucaacaggugaaauaugcgacaguccucaucagauccuugauggagaaaacugcacacuaauagaugcucuauugggagacccucagugugauggcuuccaaaauaagaaaugggaccuuuuuguugaacgcagcaaagccuacagcaacuguuacccuuaugaugugccggauuaugccucccuuaggucacuaguugccucauccggcacacuggaguuuaacaaugaaagcuucaauuggacuggagucacucaaaacggaacaagcucugcuugcauaaggagaucuaauaacaguuucuuuaguagauugaauugguugacccacuuaaaauucaaauacccagcauugaacgugacuaugccaaacaaugaacaauuugacaaauuguacauuugggggguucaccacccggguacggacaaugaccaaaucuuccuguaugcucaagcaucaggaagaaucacagucucuaccaaaagaagccaacaaacuguaaucccgaauaucggaucuagacccagaguaaggaauaucccuagcagaauaagcaucuauuggacaauaguaaaaccgggagacauacuuuugauuaacagcacagggaaucuaauugcuccuagggguuacuucaaaauacgaagugggaaaagcucaauaaugagaucagaugcacccauuggcaaaugcaauucugaaugcaucacuccaaauggaagcauucccaaugacaaaccauuccaaaauguaaacaggaucacauacggggccugucccagauauguuaagcaaaacacucugaaauuggcaacagggaugcgaaauguaccagagaaacaaacuagaggcauauuuggcgcaaucgcggguuucauagaaaaugguugggagggaaugguggaugguugguacgguuucaggcaucaaaauucugagggaagaggacaagcagcagaucucaaaagcacucaagcagcaaucgaucaaaucaaugggaagcugaauagauugaucgggaaaaccaacgagaaauuccaucagauugaaaaagaauucucagaagucgaagggagaauucaggaccuugagaaauauguugaggacacuaaaauagaucucuggucauacaacgcggagcuucuuguugcccuggagaaccaacauacaauugaucuaacugacucagaaaugaacaaacuguuugaaaaaacaaagaagcaacugagggaaaaugcugaggauaugggcaaugguuguuucaaaauauaccacaaaugugacaaugccugcauaggaucaaucagaaauggaacuuaugaccacgauguauacagagaugaagcauuaaacaaccgguuucagaucaagggaguugagcugaagucaggguacaaagauuggauccuauggauuuccuuugccauaucauguuuuuugcuuuguguugcuuuguugggguucaucaugugggccugccaaaaaggcaacauuaggugcaacauuugcauuuga

SEQ ID NO: 35240 - RNA, 1701 nt, Artificial Sequence
  derived and/or modified CDS sequence (wt) from hemagglutinin__InfluenzaA__ACU87270
augaaggcaauacuaguaguucugcuauauacauuugcaaccgcaaaugcagacacauuauguauagguuaucaugcgaacaauucaacagacacuguagacacaguacuagaaaagaauguaacaguaacacacucuguuaaccuucuagaagacaagcauaacgggaaacuaugcaaacuaagagggguagccccauugcauuuggguaaauguaacauugcuggcuggauccugggaaauccagagugugaaucacucuccacagcaagcucaugguccuacauuguggaaacaucuaguucagacaauggaacguguuacccaggagauuucaucgauuaugaggagcuaagagagcaauugagcucagugucaucauuugaaagguuugagauauuccccaagacaaguucauggcccaaucaugacucgaacaaagguguaacggcagcauguccucaugcuggagcaaaaagcuucuacaaaaauuuaauauggcuaguuaaaaaaggaaauucauacccaaagcucagcaaauccuacauuaaugauaaagggaaagaaguccucgugcuauggggcauucaccauccaucuacuagugcugaccaacaaagucucuaucagaaugcagaugcauauguuuuuguggggacaucaagauacagcaagaaguucaagccggaaauagcaauaagacccaaagugagggaucgagaagggagaaugaacuauuacuggacacuaauagagccgggagacaaaauaacauucgaagcaacuggaaaucuagugguaccgagauaugcauucgcaauggaaagaaaugcuggaucugguauuaucauuucagauacaccaguccacgauugcaauacaacuugucagacacccaagggugcuauaaacaccagccucccauuucagaauauacauccgaucacaauuggaaaauguccaaaauauguaaaaagcacaaaauugagacuggccacaggauugaggaaugucccgucuauucaaucuagaggccuauuuggggccauugccgguuucauugaagggggguggacagggaugguagauggaugguacgguuaucaccaucaaaaugagcaggggucaggauaugcagccgaccugaagagcacacagaaugccauugacgagauuacuaacaaaguaaauucuguuauugaaaagaugaauacacaguucacagcaguagguaaagaguucaaccaccuggaaaaaagaauagagaauuuaaauaaaaaaguugaugaugguuuccuggacauuuggacuuacaaugccgaacuguugguucuauuggaaaaugaaagaacuuuggacuaccacgauucaaaugugaagaacuuauaugaaaagguaagaagccaguuaaaaaacaaugccaaggaaauuggaaacggcugcuuugaauuuuaccacaaaugcgauaacacgugcauggaaagugucaaaaaugggacuuaugacuacccaaaauacucagaggaagcaaaauuaaacagagaagaaauagaugggguaaagcuggaaucaacaaggauuuaccagauuuuggcgaucuauucaacugucgccaguucauugguacugguagucucccugggggcaaucaguuucuggaugugcucuaaugggucucuacaguguagaauauguauuuaa

SEQ ID NO: 35241 - RNA, 1701 nt, Artificial Sequence
  derived and/or modified CDS sequence (wt) from hemagglutinin__InfluenzaA__ACV04228
augaaggcaauacuaguaguucugcuauauacauuugcaaccgcaaaugcagacacauuauguauagguuaucaugcgaacaauucaacagacacuguagacacaguacuagaaaagaauguaacaguaacacacucuguuaaccuucuagaagacaagcauaacgggaaacuaugcaaacuaagagggguagccccauugcauuuggguaaauguaacauugcuggcuggauccugggaaauccagagugugaaucacucuccacagcaagcucaugguccuacauuguggaaacaucuaguucagacaauggaacguguuacccaggagauuucaucgauuaugaggagcuaagagagcaauugagcucagugucaucauuugaaagguuugagauauuccccaagacaaguucauggcccaaucaugacucgaacaaagguguaacggcagcauguccucaugcuggagcaaaaagcuucuacaaaaauuuaauauggcuaguuaaaaaaggaaauucauacccaaagcucagcaaauccuacauuaaugauaaagggaaagaaguccucgugcuauggggcauucaccauccaucuacuagugcugaccaacaaagucucuaucagaaugcagaugcauauguuuuuguggggacaucaagauacagcaagaaguucaagccggaaauagcaauaagacccaaagugagggaucaagaagggagaaugaacuauuacuggacacuaguagagccgggagacaaaauaacauucgaagcaacuggaaaucuagugguaccgagauaugcauucgcaauggaaagaaaugcuggaucugguauuaucauuucagauacaccaguccacgauugcaauacaacuugucagacacccaagggugcuauaaacaccagccucccauuucagaauauacauccgaucacaauuggaaaauguccaaaauauguaaaaagcacaaaauugagacuggccacaggauugaggaaugucccgucuauucaaucuagaggccuauuuggggccauugccgguuucauugaagggggguggacagggaugguagauggaugguacgguuaucaccaucaaaaugagcaggggucaggauaugcagccgaccugaagagcacacagaaugccauugacgagauuacuaacaaaguaaauucuguuauugaaaagaugaauacacaguucacagcaguagguaaagaguucaaccaccuggaaaaaagaauagagaauuuaaauaaaaaaguugaugaugguuuccuggacauuuggacuuacaaugccgaacuguugguucuauuggaaaaugaaagaacuuuggacuaccacgauucaaaugugaagaacuuauaugaaaagguaagaagccaguuaaaaaacaaugccaaggaaauuggaaacggcugcuuugaauuuuaccacaaaugcgauaacacgugcauggaaagugucaaaaaugggacuuaugacuacccaaaauacucagaggaagcaaaauuaaacagagaagaaauagaugggguaaagcuugaaucaacaaggauuuaccagauuuuggcgaucuauucaacugucgccaguucauugguacugguagucucccugggggcaaucaguuucuggaugugcucuaaugggucucuacaguguagaauauguauuuaa

SEQ ID NO: 35242 - RNA, 1701 nt, Artificial Sequence; identical to SEQ ID NO: 34681
  derived and/or modified CDS sequence (wt) from hemagglutinin__InfluenzaA__ACV04238

SEQ ID NO: 35243 - RNA, 1701 nt, Artificial Sequence
  derived and/or modified CDS sequence (wt) from hemagglutinin__InfluenzaA__ACV04248
auggaggcaauacuaguaguucugcuauauacauuugcaaccgcaaaugcagacacauuauguauagguuaucaugcgaacaauucaacagacacuguagacacaguacuagaaaagaauguaacaguaacacacucuguuaaccuucuagaagacaagcauaacgggaaacuaugcaaacuaagagggguagccccauugcauuuggguaaauguaacauugcuggcuggauccugggaaauccagagugugaaucacucuccacagcaagcucaugguccuacauuguggaaacaucuaguucagacaauggaacguguuacccaggagauuucaucgauuaugaggagcuaagagagcaauugagcucagugucaucauuugaaagguuugagauauuccccaagacaaguucauggcccaaucaugacucgaacaaagguauaacggcagcauguccucaugcuggagcaaaaagcuucuacaaaaauuuaauauggcuaguuaaaaaaggaaauucauacccaaagcucagcaaauccuacauuaaugauaaagggaaagaaguccucgugcuauggggcauucaccauccaucuacuagugcugaccaacaaagucucuaucagaaugcagaugcauauguuuuuguggggucaucaagauacagcaagaaguucaagccggaaauagcaauaagacccaaagugagggaucaagaagggagaaugaacuauuacuggacacuaguagagccgggagacaaaauaacauucgaagcaacuggaaaucuagugguaccgagauaugcauucgcaauggaaagaaaugcuggaucugguauuaucauuucagauacaccaguccacgauugcaauacaacuugucagacacccaagggugcuauaaacaccagccucccauuucauaauauacauccgaucacaauuggaaaauguccaaaauauguaaaaagcacaaaauugagacuggccacaggauugaggaaugucccgucuauucaaucuagaggccuauuuggggccauugccgguuucauugaagggggguggacagggaugguagauggaugguacgguuaucaccaucaaaaugagcaggggucaggauaugcagccgaccugaagagcacacagaaugccauugacgagauuacuaacaaaguaaauucuguuauugaaaagaugaauacacaguucacagcaguagguaaagaguucaaccaccuggaaaaaagaauagagaauuuaaauaaaaaaguugaugaugguuuccuggacauuuggacuuacaaugccgaacuguugguucuauuggaaaaugaaagaacuuuggacuaccacgauucaaaugugaagaacuuauaugaaaagguaagaagccaguuaaaaaacaaugccaaggaaauuggaaacggcugcuuugaauuuuaccacaaaugcgauaacacgugcauggaaagugucaaaaaugggacuuaugacuacccaaaauacucagaggaagcaaaauuaaacagagaagaaauagaugggguaaagcuggaaucaacaaggauuuaccagauuuuggcgaucuauucaacugucgccaguucauugguacugguagucucccugggggcaaucaguuucuggaugugcucuaaugggucucuacaguguagaauauguauuuaa

SEQ ID NO: 35244 - RNA, 1701 nt, Artificial Sequence; identical to SEQ ID NO: 34681
  derived and/or modified CDS sequence (wt) from hemagglutinin__InfluenzaA__ACV04258

SEQ ID NO: 35245 - RNA, 1701 nt, Artificial Sequence; identical to SEQ ID NO: 34681
  derived and/or modified CDS sequence (wt) from hemagglutinin__InfluenzaA__ACV04268

SEQ ID NO: 35246 - RNA, 1701 nt, Artificial Sequence; identical to SEQ ID NO: 34681
  derived and/or modified CDS sequence (wt) from hemagglutinin__InfluenzaA__ACV04278

SEQ ID NO: 35247 - RNA, 1701 nt, Artificial Sequence; identical to SEQ ID NO: 34681
  derived and/or modified CDS sequence (wt) from hemagglutinin__InfluenzaA__ACV04288

SEQ ID NO: 35248 - RNA, 1701 nt, Artificial Sequence
  derived and/or modified CDS sequence (wt) from hemagglutinin__InfluenzaA__ACV04298
augaaggcaauacuaguaguucugcuauauacauuugcaaccgcaaaugcagacacauuauguauagguuaucaugcgaacaauucaacagacacuguagacacaguacuagaaaagaauguaacaguaacacacucuguuaaccuucuagaagacaagcauaacgggaaacuaugcaaacuaagagggguagccccauugcauuuggguaaauguaacauugcuggcuggauccugggaaauccagagugugaaucacucuccacagcaagcucaugguccuacauuguggaaacaucuaguucagacaauggaacguguuacccaggagauuucaucgauuaugaggagcuaagagagcaauugagcucagugucaucauuugaaagguuugagauauuccccaagacaaguucauggcccaaucaugacucgaacaaagguguaacggcagcauguccucaugcuggagcaaaaagcuucuacaaaaauuuaauauggcuaguuaaaaaaggaaauucauacccaaagcucagcaaauccuacauuaaugauaaagggaaagaaguccucgugcuauggggcauucaccauccaucuacuagugcugaccaacaaagucucuaucagaaugcagaugcauauguuuuuguggggacaucaagauacagcaagaaguucaagccggaaauagcaauaagacccaaagugagggaucaagaagggagaaugaacuauuacuggacacuaguagagccgggagacaaaauaacauucgaagcaacuggaaaucuagugguaccgagauaugcauucgcaauggaaagaaaugcuggaucugguauuaucauuucagauacaccaguccacgauugcaauacaacuugucagacacccaagggugcuauaaacaccagccucccauuucagaauauacauccggucacaauuggaaaauguccaaaauauguaaaaagcacaaaauugagacuggccacaggauugaggaaugucccgucuauucaaucuagaggccuauuuggggccauugccgguuucauugaagggggguggacagggaugguagauggaugguacgguuaucaccaucaaaaugagcaggggucaggauaugcagccgaccugaagagcacacagaaugccauugacgagauuacuaacaaaguaaauucuguuauugaaaagaugaauacacaguucacagcaguagguaaagaguucaaccaccuggaaaaaagaauagagaauuuaaauaaaaaaguugaugaugguuuccuggacauuuggacuuacaaugccgaacuguugguucuauuggaaaaugaaagaacuuuggacuaccacgauucaaaugugaagaacuuauaugaaaagguaagaagccaguuaaaaaacaaugccaaggaaauuggaaacggcugcuuugaauuuuaccacaaaugcgauaacacgugcauggaaagugucaaaaaugggacuuaugacuacccaaaauacucagaggaagcaaaauuaaacagagaagaaauagaugggguaaagcuggaaucaacaaggauuuaccagauuuuggcgaucuauucaacugucgccaguucauugguacugguagucucccugggggcaaucaguuucuggaugugcucuaaugggucucuacaguguagaauauguauuuaa

SEQ ID NO: 35249 - RNA, 1701 nt, Artificial Sequence; identical to SEQ ID NO: 34895
  derived and/or modified CDS sequence (wt) from hemagglutinin__InfluenzaA__ACV04308

SEQ ID NO: 35250 - RNA, 1701 nt, Artificial Sequence
  derived and/or modified CDS sequence (wt) from hemagglutinin__InfluenzaA__ACV04318
augaaggcaauacuaguaguucugcuauauacauuugcaaccgcaaaugcagacacauuauguauagguuaucaugcgaacaauucaacagacacuguagacacaguacuagaaaagaauguaacaguaacacacucuguuaaccuucuagaagacaagcauaacgggaaacuaugcaaacuaagagggguagccccauugcauuuggguaaauguaacauugcuggcuggauccugggaaauccagagugugaaucacucuccacagcaagcucaugguccuacauuguggaaacaucuaguucagacaauggaacguguuacccaggagauuucaucgauuaugaggagcuaagagagcaauugagcucagugucaucauuugaaagguuugagauauuccccaagacaaguucauggcccaaucaugacucgaacaaagguguaacggcagcauguccucaugcuggagcaaaaagcuucuacaaaaauuuaauauggcuaguuaaaaaaggaaauucauacccaaagcucagcaaauccuacauuaaugauaaagggaaagaaguccucgugcuauggggcauucaccauccaucuacuagugcugaccaacaaagucucuaucagaaugcagaugcauauguuuuuguggggacaucaagauacagcaagaaguucaagccggaaauagcaauaagacccaaagugagggaucaagaagggagaaugaacuauuacuggacacuaguagagccgggagacaaaauaacauucgaagcaacuggaaaucuagugguaccgagauaugcauucgcaauggaaagaaaugcuggaucugguauuaucauuucagauacaccaguccacaauugcaauacaacuugucagacacccaagggugcuauaaacaccagccucccauuucagaauauacauccgaucacaauuggaaaauguccaaaauauguaaaaagcacaaaauugagacuggccacaggauugaggaaugucccgucuauucaaucuagaggccuauuuggggccauugccgguuucauugaagggggguggacagggaugguagauggaugguacgguuaucaccaucaaaaugagcaggggucaggauaugcagccgaccugaagagcacacagaaugccauugacgagauuacuaacaaaguaaauucuguuauugaaaagaugaauacacaguucacagcaguagguaaagaguucaaccaccuggaaaaaagaauagagaauuuaaauaaaaaaguugaugaugguuuccuggacauuuggacuuacaaugccgaacuguugguucuauuggaaaaugaaagaacuuuggacuaccacgauucaaaugugaagaacuuauaugaaaagguaagaagccaguuaaaaaacaaugccaaggaaauuggaaacggcugcuuugaauuuuaccacaaaugcgauaacacgugcauggaaagugucaaaaaugggacuuaugacuacccaaaauacucagaggaagcaaaauuaaacagagaagaaauagaugggguaaagcuggaaucaacaaggauuuaccagauuuuggcgaucuauucaacugucgccaguucauugguacugguagucucccugggggcaaucaguuucuggaugugcucuaaugggucucuacaguguagaauauguauuuaa

SEQ ID NO: 35251 - RNA, 1701 nt, Artificial Sequence; identical to SEQ ID NO: 34681
  derived and/or modified CDS sequence (wt) from hemagglutinin__InfluenzaA__ACV04328

SEQ ID NO: 35252 - RNA, 1701 nt, Artificial Sequence; identical to SEQ ID NO: 34681
  derived and/or modified CDS sequence (wt) from hemagglutinin__InfluenzaA__ACV04338

SEQ ID NO: 35253 - RNA, 1701 nt, Artificial Sequence; identical to SEQ ID NO: 34965
  derived and/or modified CDS sequence (wt) from hemagglutinin__InfluenzaA__ACV04358

SEQ ID NO: 35254 - RNA, 1701 nt, Artificial Sequence
  derived and/or modified CDS sequence (wt) from hemagglutinin__InfluenzaA__ACV04368
augaaggcaauacuaguaguucugcuauauacauuugcaaccgcaaaugcagacacauuauguauagguuaucaugcgaacaauucaacagacacuguagacacaguacuagaaaagaauguaacaguaacacacucuguuaaccuucuagaagacaagcauaacgggaaacuaugccaacuaagagggguagccccauugcauuuggguaaauguaacauugcuggcuggauccugggaaauccagagugugaaucacucuccacagcaagcucaugguccuacauuguggaaacaucuaguucagacaauggaacguguuacccaggagauuucaucgauuaugaggagcuaagagagcaauugagcucagugucaucauuugaaagguuugagauauuccccaagacaaguucauggcccaaucaugacucgaacaaagguguaacggcagcauguccucaugcuggagcaaaaagcuucuacaaaaauuuaauauggcuaguuaaaaaaggaaauucauacccaaagcucagcaaauccuacauuaaugauaaagggaaagaaguccucgugcuauggggcauucaccauccaucuacuagugcugaucaacaaagucucuaucagaaugcagaugcauauguuuuuguggggacaucaagauacagcaagaaguucaagccggaaauagcaauaagacccaaagugagggaucaagaagggagaaugaacuauuacuggacacuaguagagccgggagacaaaauaacauucgaagcaacuggaaaucuagugguaccgagauaugcauucgcaauggaaagaaaugcuggaucugguauuaucauuucagauacaccaguccacgauugcaauacaacuugucagacacccaagggugcuauaaacaccagccucccauuucagaauauacauccgaucacaauuggaaaauguccaaaauauguaaaaagcacaaaauugagacuggccacaggauugaggaaugucccgucuauucaaucuagaggccuauuuggggccauugccgguuucauugaagggggguggacagggaugguagauggaugguacgguuaucaccaucaaaaugagcaggggucaggauaugcagccgaccugaagagcacacagaaugccauugacgagauuacuaacaaaguaaauucuguuauugaaaagaugaauacacaguucacagcaguagguaaagaguucaaccaccuggaaaaaagaauagagaauuuaaauaaaaaaguugaugaugguuuccuggacauuuggacuuacaaugccgaacuguugguucuauuggaaaaugaaagaacuuuggacuaccacgauucaaaugugaagaacuuauaugaaaagguaagaagccaguuaaaaaacaaugccaaggaaauuggaaacggcugcuuugaauuuuaccacaaaugcgauaacacgugcauggaaagugucaaaaaugggacuuaugacuacccaaaauacucagaggaagcaaaauuaaacagagaagaaauagaugggguaaagcuggaaucaacaaggauuuaccagauuuuggcgaucuauucaacugucgccaguucauugguacugguagucucccugggggcaaucaguuucuggaugugcucuaaugggucucuacaguguagaauauguauuuaa

SEQ ID NO: 35255 - RNA, 1701 nt, Artificial Sequence
  derived and/or modified CDS sequence (wt) from hemagglutinin__InfluenzaA__ACV04378
augaaggcaauacuaguaguucugcuauauacauuugcaaccgcaaaugcagacacauuauguauagguuaucaugcgaacaauucaacagacacuguagacacaguacuagaaaagaauguaacaguaacacacucuguuaaccuucuagaagacaagcauaacgggaaacuaugcaaacuaagagggguagccccauugcauuuggguaaauguaacauugcuggcuggauccugggaaauccagagugugaaucacucuccacagcaagcucaugguccuacauuguggaaacaucuaguucagacaauggaacguguuacccaggagauuucaucgauuaugaggagcuaagagagcaauugagcucagugucaucauuugaaagguuugagauauuccccaagacaaguucauggcccaaucaugacucgaacaaagguguaacggcagcauguccucaugcuggagcaaaaagcuucuacaaaaauuuaauauggcuaguuaaaaaaggaaauucauacccaaagcucagcaaauccuacauuaaugauaaagggaaagaaguccucgugcuauggggcauucaccauccaucuacuagugcugaccaacaaagucucuaucagaaugcagaugcauauguuuuuguggggacaucaagauacagcaagaaguucaagccggaaauagcaauaagacccaaagugagggaucaagaagggagaaugaacuauuacuggacacuaguagagccgggagacaaaauaacauucgaagcaacuggaaaucuagugguaccgagauaugcauucgcaauggaaagaaaugcuggaucugguauuaucauuucagauacaccaguccacgauugcaauacaacuugucagacacccaagggugcuauaaacaccagccucccauuucagaauauacauccgaucacaauuggaaaauguccaaaauauguaaaaagcacaaaauugagacuggccacaggauugaggaauaucccgucuauucaaucuagaggccuauuuggggccauugccgguuucauugaagggggguggacagggaugguagauggaugguacgguuaucaccaucaaaaugagcaggggucaggauaugcagccgaccugaagagcacacagaaugccauugacgagauuacuaacaaaguaaauucuguuauugaaaagaugaauacacaguucacagcaguagguaaagaguucaaccaccuggaaaaaagaauagagaauuuaaauaaaaaaguugaugaugguuuccuggacauuuggacuuacaaugccgaacuguugguucuauuggaaaaugaaagaacuuuggacuaccacgauucaaaugugaagaacuuauaugaaaagguaagaagccaguuaaaaaacaaugccaaggaaauuggaaacggcugcuuugaauuuuaccacaaaugcgauaacacgugcauggaaagugucaaaaaugggacuuaugacuacccaaaauacucagaggaagcaaaauuaaacagagaagaaauagaugggguaaagcuggaaucaacaaggauuuaccagauuuuggcgaucuauucaacugucgccaguucauugguacugauagucucccugggggcaaucaguuucuggaugugcucuaaugggucucuacaguguagaauauguauuuaa

SEQ ID NO: 35256 - RNA, 1701 nt, Artificial Sequence; identical to SEQ ID NO: 34965
  derived and/or modified CDS sequence (wt) from hemagglutinin__InfluenzaA__ACV04388

SEQ ID NO: 35257 - RNA, 1701 nt, Artificial Sequence; identical to SEQ ID NO: 34714
  derived and/or modified CDS sequence (wt) from hemagglutinin__InfluenzaA__ACV04398

SEQ ID NO: 35258 - RNA, 1701 nt, Artificial Sequence; identical to SEQ ID NO: 34925
  derived and/or modified CDS sequence (wt) from hemagglutinin__InfluenzaA__ACV04408

SEQ ID NO: 35259 - RNA, 1701 nt, Artificial Sequence; identical to SEQ ID NO: 34681
  derived and/or modified CDS sequence (wt) from hemagglutinin__InfluenzaA__ACV04489

SEQ ID NO: 35260 - RNA, 1701 nt, Artificial Sequence; identical to SEQ ID NO: 34681
  derived and/or modified CDS sequence (wt) from hemagglutinin__InfluenzaA__ACV04499

SEQ ID NO: 35261 - RNA, 1701 nt, Artificial Sequence
  derived and/or modified CDS sequence (wt) from hemagglutinin__InfluenzaA__ACV04509
augaaggcaauacuaguaguucugcuauauacauuugcaaccgcaaaugcagacacauuauguauagguuaucaugcgaacaauucaacagacacuguagacacaguacuagaaaagaauguaacaguaacacacucuguuaacauucuagaagacaagcauaacgggaaacuaugcaaacuaagagggguagccccauugcauuuggguaaauguaacauugcuggcuggauccugggaaauccagagugugaaucacucuccacagcaagcucaugguccuacauuguagaaacaucuaguucagacaauggaacguguuacccaggagauuucaucgauuaugaggagcuaagagagcaauugagcucagugucaucauuugaaagguuugagauauuccccaagacaaguucauggcccaaucaugacucgaacaaagguguaacggcagcauguccucaugcuggagcaaaaagcuucuacaaaaauuuaauauggcuaguuaaaaaaggaaauucauacccaaagcucagcaaauccuacauuaaugauaaagggaaagaaguccucgugcuauggggcauucaccauccaucuacuagugcugaccaacaaagucucuaucagaaugcagaugcauauguuuuuguggggucaucaagauacagcaagaaguucaagccggaaauagcaauaagacccaaagugagggaucaagaagggagaaugaacuauuacuggacacuaguagagccgggagacaaaauaacauucgaagcaacuggaaaucuagugguaccgagauaugcauucgcaauggaaagaaaugcuggaucugguauuaucauuucagauacaccaguccacgauugcaauacaacuugucagacacccaagggugcuauaaacaccagccucccauuucagaauauacauccgaucacaauuggaaaauguccaaaauauguaaaaagcacaaaauugagacuggccacaggauugaggaaugucccgucuauucaaucuagaggccuauuuggggccauugccgguuucauugaagggggguggacagggaugguagauggaugguacgguuaucaccaucaaaaugagcaggggucaggauaugcagccgaccugaagagcacacagaaugccauugacgagauuacuaacaaaguaaauucuguuauugaaaagaugaauacacaguucacagcaguagguaaagaguucaaccaccuggaaaaaagaauagagaauuuaaauaaaaaaguugaugaugguuuccuggacauuuggacuuacaaugccgaacuguugguucuauuggaaaaugaaagaacuuuggacuaccacgauucaaaugugaagaacuuauaugaaaagguaagaagccagcuaaaaaacaaugccaaggaaauuggaaacggcugcuuugaauuuuaccacaaaugcgauaacacgugcauggaaagugucaaaaaugggacuuaugacuacccaaaauacucagaggaagcaaaauuaaacagagaagaaauagaugggguaaagcuggaaucaacaaggauuuaccagauuuuggcgaucuauucaacugucgccaguucauugguacugguagucucccugggggcaaucaguuucuggaugugcucuaaugggucucuacaguguagaauauguauuuaa

SEQ ID NO: 35262 - RNA, 1701 nt, Artificial Sequence; identical to SEQ ID NO: 34681
  derived and/or modified CDS sequence (wt) from hemagglutinin__InfluenzaA__ACV04519

SEQ ID NO: 35263 - RNA, 1701 nt, Artificial Sequence
  derived and/or modified CDS sequence (wt) from hemagglutinin__InfluenzaA__ACV04529
augaaggcaauacuaguaguucugcuauauacauuugcaaccgcaaaugcagacacauuauguauagguuaucaugcgaacaauucaacagacacuguagacacaguacuagaaaagaauguaacaguaacacacucuguuaaccuucuagaagacaagcauaacgggaaacuaugcaaacuaagagggguagccccauugcauuuggguaaauguaacauugcuggcuggauccugggaaauccagagugugaaucacucuccacagcaagcucaugguccuacauuguggaaacaucuaguucagacaauggaacguguuacccaggagauuucaucgauuaugaggagcuaagagagcaauugagcucagugucaucauuugaaagguuugagauauuccccaagacaaguucauggcccaaucaugacucgaacaaagguguaacggcagcauguccucaugcuggagcaaaaagcuucuacaaaaauuuaauauggcuaguuaaaaaaggaaauucauacccaaagcucagcaaauccuacauuaaugauaaagggaaagaaguccucgugcuauggggcauucaccauccaucuacuagugcugaccaacaaagucucuaucagaaugcagaugcauauguuuuuguagggacaucaagauacagcaagaaguucaagccggaaauagcaauaagacccaaagugagggaucaagaagggagaaugaacuauuacuggacacuaguagagccgggagacaaaauaacauucgaagcaacuggaaaucuagugguaccgagauaugcauucgcaauggaaagaaaugcuggaucugguauuaucauuucagauacaccaguccacgauugcaauacaacuugucagacacccaagggugcuauaaacaccagccucccauuucagaauauacauccgaucacaauuggaaaauguccaaaauauguaaaaagcacaaaauugagacuggccacaggauugaggaaugucccgucuauucaaucuagaggccuauuuggggccauugccgguuucauugaagggggguggacagggaugguagauggaugguacgguuaucaccaucaaaaugagcaggggucaggauaugcagccgaccugaagagcacacagaaugccauugacgagauuacuaacaaaguaaauucuguuauugaaaagaugaauacacaguucacagcaguagguaaagaguucaaccaccuggaaaaaagaauagagaauuuaaauaaaaaaguugaugaugguuuccuggacauuuggacuuacaaugccgaacuguugguucuauuggaaaaugaaagaacuuuggacuaccacgauucaaaugugaagaacuuauaugaaaagguaagaagccaguuaaaaaacaaugccaaggaaauuggaaacggcugcuuugaauuuuaccacaaaugcgauaacacgugcauggaaagugucaaaaaugggacuuaugacuacccaaaguacucagaggaagcaaaauuaaacagagaagaaauagaugggguaaagcuggaaucaacaaggauuuaccagauuuuggcgaucuauucaacugucgccaguucauugguacugguagucucccugggggcaaucaguuucuggaugugcucuaaugggucucuacaguguagaauauguauuuaa

SEQ ID NO: 35264 - RNA, 1701 nt, Artificial Sequence; identical to SEQ ID NO: 34681
  derived and/or modified CDS sequence (wt) from hemagglutinin__InfluenzaA__ACV04549

SEQ ID NO: 35265 - RNA, 1701 nt, Artificial Sequence
  derived and/or modified CDS sequence (wt) from hemagglutinin__InfluenzaA__ACV04559
augaaggcaauacuaguaguucugcuauauacauuugcaaccgcaaaugcagacacauuauguauagguuaucaugcgaacaauucaacagacacuguagacacaguacuagaaaagaauguaacaguaacacacucuguuaaccuucuagaagacaagcauaacgggaaacuaugcaaacuaagagggguagccccauugcauuuggguaaauguaacauugcuggcuggauccugggaaauccagagugugaaucacucuccacagcaagcucaugguccuacauuguggaaacaucuaguucagacaauggaacguguuacccaggagauuucaucgauuaugaggagcuaagagagcaauugagcucagugucaucauuugaaagguuugagauauuccccaagacaaguucauggcccaaucaugacucaaacaaagguguaacggcagcauguccucaugcuggagcaaaaagcuucuacaaaaauuuaauauggcuaguuaaaaaaggaaauucauacccaaagcucagcaaauccuacauuaaugauaaagggaaagaaguccucgugcuauggggcauucaccauccaucuacuagugcugaccaacaaagucucuaucagaaugcagaugcauauguuuuuguggggacaucaagauacagcaagaaguucaagccggaaauagcaauaagacccaaagugagggaucaagaagggagaaugaacuauuacuggacacuaguagagccgggagacaaaauaacauucgaagcaacuggaaaucuagugguaccgagauaugcauucgcaauggaaagaaaugcuggaucugguauuaucauuucagauacaccaguccacgauugcaauacaacuugucagacacccaagggugcuauaaacaccagccucccauuucagaauauacauccgaucacaauuggaaaauguccaaaauauguaaaaagcacaaaauugagacuggccacaggauugaggaaugucccgucuauucaaucuagaggccuauuuggggccauugccgguuucauugaagggggguggacagggaugguagauggaugguacgguuaucaccaucaaaaugagcaggggucaggauaugcagccgaccugaagagcacacagaaugccauugacgagauuacuaacaaaguaaauucuguuauugaaaagaugaauacacaguucacagcaguagguaaagaguucaaccaccuggaaaaaagaauagagaauuuaaauaaaaaaguugaugaugguuuccuggacauuuggacuuacaaugccgaacuguugguucuauuggaaaaugaaagaacuuuggacuaccacgauucaaaugugaagaacuuauaugaaaagguaagaagccaguuaaaaaacaaugccaaggaaauuggaaacggcugcuuugaauuuuaccacaaaugcgauaacacgugcauggaaagugucaaaaaugggacuuaugacuacccaaaauacucagaggaagcaaaauuaaacagagaagaaauagaugggguaaagcuggaaucaacaaggauuuaccagauuuuggcgaucuauucaacugucgccaguucauugguacugguagucucccugggggcaaucaguuucuggaugugcucuaaugggucucuacaguguagaauauguauuuaa

SEQ ID NO: 35266 - RNA, 1701 nt, Artificial Sequence; identical to SEQ ID NO: 34681
  derived and/or modified CDS sequence (wt) from hemagglutinin__InfluenzaA__ACV04579

SEQ ID NO: 35267 - RNA, 1701 nt, Artificial Sequence
  derived and/or modified CDS sequence (wt) from hemagglutinin__InfluenzaA__ACV04751
auggaggcaauacuaguaguuaugcuauauacauuugcaaccgcaaaugcagacacauuauguauagguuaucaugcgaacaauucaacagacacuguagacacaguacuagaaaagaauguaacaguaacacacucuguuaaccuucuagaagacaagcauaacgggaaacuaugcaaacuaagagggguagccccuuugcguuuggguaaauguaacauugcuggcuggauccugggaaauccagagugugaaucacucuccacagcaagcucaugguccuacauuguggaaacaucuaguucagacaauggaacguguuacccaggagauuucaucgauuaugaggagcuaagagagcaauugagcucagugucaucauuugaaagauuugagauauuccccaagacaaguucauggcccaaucaugacucgaacaaagguguaacggcagcauguccucaugcuggagcaaaaagcuucuacaaaaauuuaauauggcuaguuaaaaaaggaaauucauacccaaagcucagcaaauccuacauuaaugauaaagggaaagaaguccucgugcuauggggcauucaccauccaucuacuagugcugaccaacaaagucucuaucagaaugcagaugcauauguuuuuguggggacaucaagauacaguaagaaguucaagccggaaauagcaauaagacccaaagugagggaucaagaagggagaaugaacuauuacuggacacuaguagagccgggagacaaaauaacauucgaagcaacuggaaaucuagugguaccgagauaugcauucgcaauggaaagaaaugcuggaucugguauuaucauuucagauacaccaguccacaauugcaauacaacuugucagacacccaagggugcuauaaacaccagccucccauuucagaauauacauccgaucacaauuggaaaauguccaaaauauguaaaaagcacaaaauugagacuggccacaggauugaggaaugucccgucuauucaaucuagaggccuauuuggggccauugccgguuucauugaagggggguggacagggaugguagauggaugguacgguuaucaccaucaaaaugagcaggggucaggauaugcagccgaucugaagagcacacagaaugccauugacgagauuacuaacaaaguaaauucuguuauugaaaagaugaauacacaguucacagcaguagguaaagaguucaaccaccuggaaaaaagaauagagaauuuaaauaaaaaaguugaugaugguuuccuggacauuuggacuuacaaugccgaacuguugguucuauuggaaaaugaaagaacuuuggacuaccacgauucaaaugugaagaacuuauaugaaaagguaagaagccaguuaaaaaacaauaccaaggaaauuggaaacggcugcuuugaauuuuaccacaaaugcgauaacacgugcauggaaagugucaaaaaugggacuuaugacuacccaaaauacucagaggaagcaaaauuaaacagagaagaaauagaugggguaaagcuggaaucaacaaggauuuaccagauuuuggcgaucuauucaacugucgccaguucauugguacugguagucucccugggggcaaucaguuucuggaugugcucuaaugggucucuacaguguagaauauguauuuaa

SEQ ID NO: 35268 - RNA, 1701 nt, Artificial Sequence
  derived and/or modified CDS sequence (wt) from hemagglutinin__InfluenzaA__ACV04752
auggaggcaauacuaguaguucugcuauauacauuugcaaccgcaaaugcagacacauuauguauagguuaucaugcgaacaauucaacagacacuguagacacaguacuagaaaagaauguaacaguaacacacucuguuaacauucuagaagacaagcauaacgggaaacuaugcaaacuaagagggguagccccauugcauuuggguaaauguaacauugcuggcuggauccuggaaaauccagagugugaaucacucuccacagcaagcucaugguccuacauuguggaaacaucuaguucagacaauggaacguguuacccaggagauuucaucgauuaugaggagcuaagagagcaauugagcucagugucaucauuugaaagguuugagauauuccccaagacaaguucauggcccaaucaugacucgaacaaagguguaacggcagcauguccucaugcuggagcaaaaagcuucuacaaaaauuuaauauggcuaguuaaaaaaggaaauucauacccaaagcucagcaaauccuacauuaaugauaaagggaaagaaguccucguucuauggggcauucaccauccaucuacuagugcugaccaacaaagucucuaucagaaugcagaugcauauguuuuuguggggucaucaagauacagcaagaaguucaagccggaaauagcaauaagacccaaagugagggaucaagaagggagaaugaacuauuacuggacacuaguagagccgggagacaaaauaacauucgaagcaacuggaaaucuagugguaccgagauaugcauucgcaauggaaagaaaugcuggaucugguauuaucauuucagauacaccaguccacgauugcaauacaacuugucagacacccaagggugcuauaaacaccagccucccauuucauaauauacauccgaucacaauuggaaaauguccaaaauauguaaaaagcacaaaauugagacuggccacaggauugaggaaugucccgucuauucaaucuagaggccuauuuggggccauugccgguuucauugaagggggguggacagggaugguagauggaugguacgguuaucaccaucaaaaugagcaggggucaggauaugcagccgaccugaagagcacacagaaugccauugacgagauuacuaacaaaguaaauucuguuauugaaaagaugaauacacaguucacagcaguagguaaagaguucaaccaccuggaaaaaagaauagagaauuuaaauaaaaaaguugaugaugguuuccuggacauuuggacuuacaaugccgaacuguugguucuauuggaaaaugaaagaacuuuggacuaccacgauucaaaugugaagaacuuauaugaaaagguaagaagccaguuaaaaaacaaugccaaggaaauuggaaacggcugcuuugaauuuuaccacaaaugcgauaacacgugcauggaaagugucaaaaaugggacuuaugacuacccaaaauacucagaggaagcaaaauuaaacagagaagaaauagaugggguaaagcuggaaucaacaaggauuuaccagauuuuggcgaucuauucaacugucgccaguucauugguacugguagucucccugggggcaaucaguuucuggaugugcucuaaugggucucuacaguguagaauauguauuuaa

SEQ ID NO: 35269 - RNA, 1701 nt, Artificial Sequence
  derived and/or modified CDS sequence (wt) from hemagglutinin__InfluenzaA__ACV04753
auggaggcaauacuaguaguucugcuauauacauuugcaaccgcaaaugcagacacuuuauguauagguuaucaugcgaacaauucaacagacacuguagacacaguacuagaaaagaauguaacaguaacacacucuguuaaccuucuagaagacaagcauaacgggaaacuaugcaaacuaagagggguagccccauugcauuuggguaaauguaacauugcuggcuggauccugggaaauccagagugugaaucacucuccacagcaagcucaugguccuacauuguggaaacaucuaguucagacaauggaacguguuacccaggagauuucaucgauuaugaggagcuaagagagcaauugagcucagugucaucauuugaaagguuugagauauuccccaagacaaguucauggcccaaucaugacucgaacaaagguguaacggcagcauguccucaugcuggagcaaaaagcuucuacaaaaauuuaauauggcuaguuaaaaaaggaaauucauacccaaagcucagcaaauccuacauuaaugauaaagggaaagaaguccucgugcuauggggcauucaccauccaucuacuagugcugaccaacaaagucucuaucagaaugcagaugcauauguuuuuguggggacaucaagauacagcaagaaguucaagccggaaauagcaauaagacccaaagugagggaucgagaagggagaaugaacuauuacuggacacuaguagagccgggagacaaaauaacauucgaagcaacuggaaaucuagugguaccgagauaugcauucgcaauggaaagaaaugcuggaucugguauuaucauuucagauacaccaguccacgauugcaauacaacuugucagacacccaagggugcuauaaacaccagccucccauuucagaauauacauccgaucacaauuggaaaauguccaaaauauguaaaaagcacaaaauugagacuggccacaggauugaggaaugucccgucuauucaaucuagaggccuauuuggggccauugccgguuucauugaagggggguggacagggaugguagauggaugguacgguuaucaccaucaaaaugagcaggggucaggauaugcagccgaccugaagagcacacagaaugccauugacgagauuacuaacaaaguaaauucuguuauugaaaagaugaauacacaguucacagcaguagguaaagaguucaaccaccuggaaaaaagaauagagaauuuaaauaaaaagguugaugaugguuuccuggacauuuggacuuacaaugccgaacuguugguuuuauuggaaaaugaaagaacuuuggacuaccacgauucaaaugugaagaacuuauaugaaaagguaagaagccaguuaaaaaacaaugccaaggaaauuggaaacggcugcuuugaauuuuaccacaaaugcgauaacacgugcauggaaagugucaaaaaugggacuuaugacuacccaaaauacucagaggaagcaaaauuaaacagagaagaaauagaugggguaaagcuggaaucaacaaggauuuaccagauuuuggcgaucuauucaacugucgccaguucauugguacugguagucucccugggggcaaucaguuucuggaugugcucuaaugggucucuacaguguagaauauguauuuaa

SEQ ID NO: 35270 - RNA, 1701 nt, Artificial Sequence
  derived and/or modified CDS sequence (wt) from hemagglutinin__InfluenzaA__ACV04754
auggaggcaauacuaguaguucugcuauauacauuugcaaccgcaaaugcagacacauuauguauagguuaucaugcgaacaauucaacagacacuguagacacaguacuagaaaagaauguaccaguaacacacucuguuaaccuucuaaaagacaagcauaacgggaaacuaugcaaacuaagagggguagccccauugcauuuggguaaauguaacauugcuggcuggauccugggaaauccagagugugaaucacucuccacagcaagcucaugguccuacauuguggaaacaucuaguucagacaauggaacguguuacccaggagauuucaucgauuaugaggagcuaagagagcaauugagcucagugucaucauuugaaagguuugagauauuccccaagacaaguucauggcccaaucaugaaucgaacaaagguguaacggcagcauguccucaugcuggagcaaaaagcuucuacaaaaauuuaauauggcuaguuaaaaaaggaaauucauacccaaagcucagcaaauccuacauuaaugauaaagggaaagaaguccucgugcuauggggcauucaccauccaucuacuagugcugaccaacaaagucucuaucagaaugcagaugcauauguuuuuguggggacaucaagauacagcaagaaguucaagccggaaauagcaauaagacccaaagugagggaucaagaagggagaaugaacuauuacuggacacuaguagagccgggagacaaaauaacauucgaagcaacuggaaaucuagugguaccgagauaugcauucgcaauggaaagaaaugcuggaucugguauuaucauuucagauacaccaguccacgauugcaauacaacuugucagacacccaagggugcuauaaacaccagccucccauuucagaauauacauccgaucacaauuggaaaauguccaaaauauguaaaaagcacaaaauugagacuggccacaggauugaggaaugucccgucuauucaaucuagaggcguauuuggggccauugccgguuucauugaagggggguggacagggaugguagauggaugguacgguuaucaccaucaaaaugagcaggggucaggauaugcagccgaccugaagagcacacagaaugccauugacgagauuacuaacaaaguaaauucuguuauugaaaagaugaauacacaguucacagcaguagguaaagaguucaaccaccuggaaaaaagaauagagaauuuaaauaaaaaaguugaugaugguuuccuggacauuuggacuuacaaugccgaacuguugguucuauuggaaaaugaaagaacuuuggacuaccacgauucaaaugugaagaacuuauaugaaaagguaagaagccaguuaaaaaacaaugccaaggaaauuggaaacggcugcuuugaauuuuaccacaaaugcgauaacacgugcauggaaagugucaaaaaugggacuuaugacuacccaaaauacucagaggaagcaaaauuaaacagagaagaaauagaugggguaaagcuggaaucaacaaggauuuaccagauuuuggcgaucuauucaacugucgccaguucauugguacugguagucucccugggggcaaucaguuucuggaugugcucuaaugggucucuacaguguagaauauguauuuaa

SEQ ID NO: 35271 - RNA, 1701 nt, Artificial Sequence; identical to SEQ ID NO: 35166
  derived and/or modified CDS sequence (wt) from hemagglutinin__InfluenzaA__ACV04755

SEQ ID NO: 35272 - RNA, 1701 nt, Artificial Sequence
  derived and/or modified CDS sequence (wt) from hemagglutinin__InfluenzaA__ACV33084
augaaggcaauacuaguaguucugcuauauacauuugcaaccgcaaaugcagacacauuauguauagguuaucaugcgaacaauucaacagacacuguagacacaguacuagaaaagaauguaacaguaacacacucuguuaacauucuagaagacaagcauaacgggaaacuaugcaaacuaagagggguagccccauugcauuuggguaaauguaacauugcuggcuggauccugggaaauccagagugugaaucacucuccacagcaagcucaugguccuacauuguggaaacaucuaguucagacaauggaacguguuacccaggagauuucaucgauuaugaggagcuaagagagcaauugagcucagugucaucauuugaaagguuugagauauuccccaagacaaguucauggcccaaucaugacucgaacaaagguguaacggcagcauguccucaugcuggagcaaaaagcuucuacaaaaauuuaauauggcuaguuaaaaaaggaaauucauacccaaagcucagcaaauccuacauuaaugauaaagggaaagaaguccucgugcuauggggcauucaccauccaucuacuagugcugaccaacagagucucuaucagaaugcagaugcauauguauuuguggggucaucaagauacagcaagaaguucaagccggaaauagcaauaagacccaaagugagggaucaagaagggagaaugaacuauuacuggacacuaguagagccgggagacaaaauaacauucgaagcaacuggaaaucuagugguaccgagauaugcauucgcaauggaaagaaaugcuggaucugguauuaucauuucagauacaccaguccacgauugcaauacaacuugucagacacccaagggugcuauaaacaccagccucccauuucagaauauacauccgaucacaauuggaaaauguccaaaauauguaaaaagcacaaaauugagacuggccacaggauugaggaaugucccgucuauucaaucuagaggccuauuuggggccauugccgguuucauugaagggggguggacagggaugguagauggaugguacgguuaucaccaucaaaaugagcaggggucaggauaugcagccgaccugaagagcacacagaaugccauugacgagauuacuaacaaaguaaauucuguuauugaaaagaugaauacacaguucacagcaguagguaaagaguucaaccaccuggaaaaaagaauagagaauuuaaauaaaaaaguugaugaugguuuccuggacauuuggacuuacaaugccgaacuguugguucuauuggaaaaugaaagaacuuuggacuaccacgauucaaaugugaagaacuuauaugaaaagguaagaagccagcuaaaaaacaaugccaaggaaauuggaaacggcugcuuugaauuuuaccacaaaugcgauaacacgugcauggaaagugucaaaaaugggacuuaugacuacccaaaauacucagaggaagcaaaauuaaacagagaagaaauagaugggguaaagcuggaaucaacaaggauuuaccagauuuuggcgaucuauucaacugucgccaguucauugguacugguagucucccugggggcaaucaguuucuggaugugcucuaaugggucucuacaguguagaauauguauuuaa

SEQ ID NO: 35273 - RNA, 1701 nt, Artificial Sequence
  derived and/or modified CDS sequence (wt) from hemagglutinin__InfluenzaA__ACV33094
augaaggcaauacuaguaguucugcuauauacauuugcaaccgcaaaugcagacacauuauguauagguuaucaugcgaacaauucaacagacacuguagacacaguacuagaaaagaauguaacaguaacacacucuguuaaccuucuagaagacaagcauaacgggaaacuaugcaaacuaagagggguagccccauugcauuuggguaaauguaacauugcuggcuggauccugggaaauccagagugugaaucacucuccacagcaagcucaugguccuacauuguggaaacaucuaguucagacaauggaacguguuacccaggagauuucaucgauuaugaggagcuaagagagcaauugagcucagugucaucauuugaaagguuugagauauuccccaagacaaguucauggcccaaucaugacucgaacaaagguguaacggcagcauguccucaugcuggagcaaaaagcuucuacaaaaauuuaauauggcuaguuaaaaaaggaaauucauacccaaagcucagcaaauccuacauuaaugauaaagggaaagaaguccucgugcuauggggcauucaccauccaucuacuagugcugaccaacaaagucucuaucagaaugcagaugcauauguuuuuguggggacaucaagauacagcaagaaguucaagccggaaauagcaauaagacccaaagugagggaucaagaagggagaaugaacuauuacuggacacuaguagagccgggagacaaaauaacauucgaagcaacuggaaaucuagugguaccgagauaugcauucgcaauggaaagaaaugcuggaucugguauuaucauuucagauacaccaguccacgauugcaauacaacuugucagacacccaagggugcuauaaacaccagccucccauuucagaauauacauccgaucacaauuggaaaauguccaaaauauguaaaaagcacaaaauugagacuggccacaggauugaggaaugucccgucuauucaaucuagaggccuauuuggggccauugccgguuucauugaagggggguggacagggaugguagauggaugguacgguuaucaccaucaaaaugagcaggggucaggauaugcagccgaccugaagagcacacagaaugccauugacgagauuacuaacaaaguaaauucuguuauugaaaagaugaauacacaguucacagcaguagguaaagaguucaaccaccuggaaaaaagaauagagaauuuaaauaaaaaaguugaugaugguuuccuggacauuuggacuuacaaugccgaacuguugguucuauuggaaaaugaaagaacuuuggacuaccacgauucaaaugugaagaacuuauaugaaaagguaagaagccaguuaaaaaacaaugccaaggaaauuggaaacggcugcuuugaauuuuaccacaaaugcgauaacacgugcauggaaagugucaaaaaugggacuuaugacuacccaaaauacucagaggaagcaaaauuaaacagagaagaaauagaugggguaaagcuggaaucaacaaggauuuaccagauucuggcgaucuauucaacugucgccaguucauugguacugguagucucccugggggcaaucaguuucuggaugugcucuaaugggucucuacaguguagaauauguauuuaa

SEQ ID NO: 35274 - RNA, 1701 nt, Artificial Sequence; identical to SEQ ID NO: 34681
  derived and/or modified CDS sequence (wt) from hemagglutinin__InfluenzaA__ACV33104

SEQ ID NO: 35275 - RNA, 1701 nt, Artificial Sequence; identical to SEQ ID NO: 34681
  derived and/or modified CDS sequence (wt) from hemagglutinin__InfluenzaA__ACV33114

SEQ ID NO: 35276 - RNA, 1701 nt, Artificial Sequence
  derived and/or modified CDS sequence (wt) from hemagglutinin__InfluenzaA__ACV33124
augaaggcaauacuaguaguucugcuauauacauuugcaaccgcaaaugcagacacauuauguauagguuaucaugcgaacaauucaacagacacuguagacacaguacuagaaaagaauguaacaguaacacacucuguuaaccuucuagaagacaagcauaacgggaaacuaugcaaacuaagagggguagccccauugcauuuggguaaauguaacauugcuggcuggauccugggaaauccagagugugaaucacucuccacagcaagcucaugguccuacauuguggaaacaucuaguucagacaauggaacguguuacccaggagauuucaucgauuaugaggagcuaagagagcaauugagcucagugucaucauuugaaagguuugagauauuccccaagacaaguucauggcccaaucaugacucgaacaaagguguaacggcagcauguccucaugcuggagcaaaaagcuucuacaaaaauuuaauauggcuaguuaaaaaaggaaauucauacccaaagcucagcaaauccuacauuaaugauaaagggaaagaaguccucgugcuauggggcauucaccauccaucuacuagugcugaccaacaaagucucuaucagaaugcagaugcauauguuuuuguagggacaucaagauacagcaagaaguucaagccggaaauagcaauaagacccaaagugagggaucaagaagggagaaugaacuauuacuggacacuaguagagccgggagacaaaauaacauucgaagcaacuggaaaucuagugguaccgagauaugcauucgcaauggaaagaaaugcuggaucugguauuaucauuucagauacaccaguccacgauugcaauacaacuugucagacacccaagggugcuauaaacaccagccucccauuucagaauauacauccgaucacaauuggaaaauguccaaaauauguaaaaagcacaaaauugagacuggccacaggauugaggaaugucccgucuauucaaucuagaggccuauuuggggccauugccgguuucauugaagggggguggacagggaugguagauggaugguacgguuaucaccaucaaaaugagcaggggucaggauaugcagccgaccugaagagcacacagaaugccauugacgagauuacuaacaaaguaaauucuguuauugaaaagaugaauacacaguucacagcaguagguaaagaguucaaccaccuggaaaaaagaauagagaauuuaaauaaaaaaguugaugaugguuuccuggacauuuggacuuacaaugccgaacuguugguucuauuggaaaaugaaagaacuuuggacuaccacgauucaaaugugaagaacuuauaugaaaagguaagaagccaguuaaaaaacaaugccaaggaaauuggaaacggcugcuuugaauuuuaccacaaaugcgauaacacgugcauggaaagugucaaaaaugggacuuaugacuacccaaaauacucagaggaagcaaaauuaaacagagaagaaauagaugggguaaagcuggaaucaacaaggauuuaccagauuuuggcgaucuauucaacugucgccaguucauugguacugguagucucccugggggcaaucaguuucuggaugugcucuaaugggucucuacaguguagaauauguauuuaa

SEQ ID NO: 35277 - RNA, 1701 nt, Artificial Sequence; identical to SEQ ID NO: 35276
  derived and/or modified CDS sequence (wt) from hemagglutinin__InfluenzaA__ACV33134

SEQ ID NO: 35278 - RNA, 1701 nt, Artificial Sequence; identical to SEQ ID NO: 35243
  derived and/or modified CDS sequence (wt) from hemagglutinin__InfluenzaA__ACV33144

SEQ ID NO: 35279 - RNA, 1701 nt, Artificial Sequence
  derived and/or modified CDS sequence (wt) from hemagglutinin__InfluenzaA__ACV33154
augaaggcaauacuaguaguucugcuauauacauuugcaaccgcaaaugcagacacauuauguauagguuaucaugcgaacaauucaacagacacuguagacacaguacuagaaaagaauguaacaguaacacacucuguuaaccuucuagaagacaagcauaacgggaaacuaugcaaacuaagagggguagccccauugcauuuggguaaauguaacauugcuggcuggauccugggaaauccagagugugaaucacucuccacagcaagcucaugguccuacauuguggaaacaucuaguucagacaauggaacguguuacccaggagauuucaucgauuaugaggagcuaagagagcaauugagcucagugucaucauuugaaagguuugagauauuccccaagacaaguucauggcccaaucaugacucgaacaaagguguaacggcagcauguccucaugcuggagcaaaaagcuucuacaaaaauuuaauauggcuaguuaaaaaaggaaauucauacccaaagcucagcaaauccuacauuaaugauaaagggaaagaaguccucgugcuauggggcauucaccauccaucuacuagugcugaccaacaaagucucuaucagaaugcagaugcauauguuuuuguggggacaucaagauacagcaagaaguucaagccggaaauagcaauaagacccaaagugagggaucaagaagggagaaugaacuauuacuggacacuaguagagccgggagacaaaauaacauucgaagcaacuggaaaucuagugguaccgagauaugcauucgcaauggaaagaaaugcuggaucugguauuaucauuucagauacaccaguccacgauugcaauacaacuugucagacacccaagggugcuauaaacaccagccucccauuucagaauauacauccgaucacaauugggaaauguccaaaauauguaaaaagcacaaaauugagacuggccacaggauugaggaaugucccgucuauucaaucuagaggccuauuuggggccauugccgguuucauugaagggggguggacagggaugguagauggaugguacgguuaucaccaucaaaaugagcaggggucaggauaugcagccgaccugaagagcacacagaaugccauugacgagauuacuaacaaaguaaauucuguuauugaaaagaugaauacacaguucacagcaguagguaaagaguucaaccaccuggaaaaaagaauagagaauuuaaauaaaaaaguugaugaugguuuccuggacauuuggacuuacaaugccgaacuguugguucuauuggaaaaugaaagaacuuuggacuaccacgauucaaaugugaagaacuuauaugaaaagguaagaagccaguuaaaaaacaaugccaaggaaauuggaaacggcugcuuugaauuuuaccacaaaugcgauaacacgugcauggaaagugucaaaaaugggacuuaugacuacccaaaauacucagaggaagcaaaauuaaacagagaagaaauagaugggguaaagcuggaaucaacaaggauuuaccagauuuuggcgaucuauucaacugucgccaguucauugguacugguagucucccugggggcaaucaguuucuggaugugcucuaaugggucucuacaguguagaauauguauuuaa

SEQ ID NO: 35280 - RNA, 1701 nt, Artificial Sequence; identical to SEQ ID NO: 34681
  derived and/or modified CDS sequence (wt) from hemagglutinin__InfluenzaA__ACV33164

SEQ ID NO: 35281 - RNA, 1701 nt, Artificial Sequence; identical to SEQ ID NO: 34681
  derived and/or modified CDS sequence (wt) from hemagglutinin__InfluenzaA__ACV33174

SEQ ID NO: 35282 - RNA, 1701 nt, Artificial Sequence
  derived and/or modified CDS sequence (wt) from hemagglutinin__InfluenzaA__ACV41981
augaaggcaauacuaguaguucugcuauauacauuugcaaccgcaaaugcagacacauuauguauagguuaucaugcgaacaauucaacagacacuguagacacaguacuagaaaagaauguaacaguaacacacucuguuaaccuucuagaagacaagcauaacgggaaacuaugcaaacuaagagggguagccccauugcauuuggguaaauguaacauugcuggcuggauccugggaaauccagagugugaaucacucuccacagcaagcucaugguccuacauuguggaaacaucuaguucagacaauggaacguguuacccaggagauuucaucgauuaugaggagcuaagagagcaauugagcucagugucaucauuugaaagguuugagauauuccccaagacaaguucauggcccaaucaugacucgaacaaagguguaacggcagcauguccucaugcuggagcaaaaagcuucuacaaaaauuuaauauggcuaguuaaaaaaggaaauucauacccaaagcucagcaaauccuacauuaaugauaaagggaaagaaguccucgugcuauggggcauucaccauccaucuacuagugcugaccaacaaagucucuaucagaaugcagaugcauauguuuuuguggggucaucaagauacagcaagaaguucaagccggaaauagcaauaagacccaaagugagggaucaagaagggagaaugaacuauuacuggacacuaguagagccgggagacaaaauaacauucgaagcaacuggaaaucuagugguaccgagauaugcauucgcaauggaaagaaaugcuggaucugguauuaucauuucagauacaccaguccacgauugcaauacaacuugucagacacccaagggugcuauaaacaccagccucccauuucagaauauacauccgaucacaauuggaaaauguccaaaauauguaaaaagcacaaaauugagacuggccacaggauugaggaaugucccgucuauucaaucuagaggccuauuuggggccauugccgguuucauugaagggggguggacagggaugguagauggaugguacgguuaucaccaucaaaaugagcaggggucaggauaugcagccgaccugaagagcacacagaaugccauugacgagauuacuaacaaaguaaauucuguuauugaaaagaugaauacacaguucacagcaguagguaaagaguucaaccaccuggaaaaaagaauagagaacuuaaauaaaaaaguugaugaugguuuccuggacauuuggacuuacaaugccgaacuguugguucuauuggaaaaugaaagaacuuuggacuaccacgauucaaaugugaagaacuuauaugaaaagguaagaagccagcuaaaaaacaaugccaaggaaauuggaaacggcugcuuugaauuuuaccacaaaugcgauaacacgugcauggaaagugucaaaaaugggacuuaugacuacccaaaauacucagaggaagcaaaauuaaacagagaagaaauagaugggguaaagcuggaaucaacaaggauuuaccagauuuuggcgaucuauucaacugucgccaguucauugguacugguagucucccugggggcaaucaguuucuggaugugcucuaaugggucucuacaguguagaauauguauuuaa

SEQ ID NO: 35283 - RNA, 1701 nt, Artificial Sequence; identical to SEQ ID NO: 34747
  derived and/or modified CDS sequence (wt) from hemagglutinin__InfluenzaA__ACV41991

SEQ ID NO: 35284 - RNA, 1701 nt, Artificial Sequence; identical to SEQ ID NO: 34747
  derived and/or modified CDS sequence (wt) from hemagglutinin__InfluenzaA__ACV42001

SEQ ID NO: 35285 - RNA, 1701 nt, Artificial Sequence; identical to SEQ ID NO: 34980
  derived and/or modified CDS sequence (wt) from hemagglutinin__InfluenzaA__ACV42008

SEQ ID NO: 35286 - RNA, 1701 nt, Artificial Sequence; identical to SEQ ID NO: 34681
  derived and/or modified CDS sequence (wt) from hemagglutinin__InfluenzaA__ACV42018

SEQ ID NO: 35287 - RNA, 1701 nt, Artificial Sequence; identical to SEQ ID NO: 34328
  derived and/or modified CDS sequence (wt) from hemagglutinin__InfluenzaA__ACV49501

SEQ ID NO: 35288 - RNA, 1701 nt, Artificial Sequence
  derived and/or modified CDS sequence (wt) from hemagglutinin__InfluenzaA__ACV49512
augaagaccaucauugcuuugagcuacauuuucugucuggcucucggccaagaccuuccaggaaaugacaacagcacagcaacgcugugccugggacaucaugcggugccaaacggaacacuagugaaaacaaucacagaugaucagauugaagugacuaaugcuacugagcuaguucagagcuccucaacggggaaaauaugcaacaauccucaucgaauccuugauggaauagacugcacacugauagaugcucuauugggggacccucauugugauguuuuucaaaaugagacaugggaccuuuucguugaacgcagcaaagcuuucagcaacuguuacccuuaugaugugccagauuaugccucccuuaggucacuaguugccucgucaggcacucuggaguuuaucacugaggguuucacuuggacuggggucacucagaaugggggaagcaaugcuugcaaaaggggaccugguagcgguuuuuucaguagacugaacugguugaccaaaucaggaagcacauauccagugcugaacgugacuaugccaaacaaugacaauuuugacaaacuauacauuugggggguucaccacccgagcacgaaccaagaacaaaccagccuguauguucaagcaucagggagagucacagucucuaccagaagaagccagcaaacuauaaucccgaauaucgaguccagacccuggguaaggggucugucuaguagaauaagcaucuauuggacaauaguuaagccgggagacguacugguaauuaauaguaaugggaaccuaaucgcuccucgggguuauuucaaaaugcgcacugggaaaagcucaauaaugaggucagaugcaccuauugauaccuguauuucugaaugcaucacuccaaauggaagcauucccaaugacaagcccuuucaaaacguaaacaagaucacauauggagcaugccccaaguauguuaagcaaaacacccugaaguuggcaacagggaugcggaauguaccagagaaacaaacuagaggccuauucggcgcaauagcagguuucauagaaaaugguugggagggaaugauagacgguugguacgguuucaggcaucaaaauucugagggcacaggacaagcagcagaucuuaaaagcacucaagcagccaucgaccaaaucaaugggaaauugaacaggguaaucgagaagacgaacgagaaauuccaucaaaucgaaaaggaauucucagaaguagaagggagaauucaggaccucgagaaauacguugaagacacuaaaauagaucucuggucuuacaaugcggagcuucuugucgcucuggagaaucaacauacaauugaccugacugacucggaaaugaacaagcuguuugaaaaaacaaggaggcaacugagggaaaaugcugaagacaugggcaaugguugcuucaaaauauaccacaaaugugacaacgcuugcauagagucaaucagaaaugggacuuaugaccaugauguauacagagacgaagcauuaaacaaccgguuucagaucaaagauguugaacugaagucuggauacaaagacuggauccuguggauuuccuuugccauaucaugcuuuuugcuuuguguuguuuugcugggguuuaucaugugggccugccagagaggcaacauuaggugcaacauuugcauuuga

SEQ ID NO: 35289 - RNA, 1701 nt, Artificial Sequence; identical to SEQ ID NO: 34419
  derived and/or modified CDS sequence (wt) from hemagglutinin__InfluenzaA__ACV49523

SEQ ID NO: 35290 - RNA, 1698 nt, Artificial Sequence
  derived and/or modified CDS sequence (wt) from hemagglutinin__InfluenzaA__ACV49545
augaaggcaaaccuacugguccuguuaugugcacuugcagcugcagaugcagacacaauauguauaggcuaccaugcgaacaauucaaccgacacuguugacacaguacucgagaagaaugugacagugacacacucuguuaaccugcucgaagacagccacaacggaaaacuauguagauuaaaaggaauagccccacuacaauuggggaaauguaacaucgccggauggcucuugggaaacccagaaugcgacccacugcuuccagugagaucaugguccuacauuguagaaacaccaaacucugagaauggaauauguuauccaggagauuucaucgacuaugaggagcugagggagcaauugagcucagugucaucauucgaaagauucgaaauauuucccaaagaaagcucauggcccaaccacaacacaaacggaguaacggcagcaugcucccaugaggggaaaagcaguuuuuacagaaauuugcuauggcugacggagaaggagggcucauacccaaagcugaaaaauucuuaugugaacaaaaaagggaaagaaguccuuguacugugggguauucaucacccgccuaacaguaaggaacaacagaaucucuaucagaaugaaaaugcuuaugucucuguagugacuucaaauuauaacaggagauuuaccccggaaauagcagaaagacccaaaguaagagaucaagcugggaggaugaacuauuacuggaccuugcuaaaacccggagacacaauaauauuugaggcaaauggaaaucuaauagcaccaauguaugcuuucgcacugaguagaggcuuuggguccggcaucaucaccucaaacgcaucaaugcaugaguguaacacgaagugucaaacaccccugggagcuauaaacagcagucucccuuaccagaauauacacccagucacaauaggagagugcccaaaauacgucaggagugccaaauugaggaugguuacaggacuaaggaacauuccguccauucaauccagaggucuauuuggagccauugccgguuuuauugaagggggauggacuggaaugauagauggaugguaugguuaucaucaucagaaugaacagggaucaggcuaugcagcggaucaaaaaagcacacaaaaugccauuaacgggauuacaaacaaggugaacacuguuaucgagaaaaugaacauucaauucacagcuguggguaaagaauucaacaaauuagaaaaaaggauggaaaauuuaaauaaaaaaguugaugauggauuucuggacauuuggacauauaaugcagaauuguuaguucuacuggaaaaugaaaggacucuggauuuccaugacucaaaugugaagaaucuguaugagaaaguaaaaagccaauuaaagaauaaugccaaagaaaucggaaauggauguuuugaguucuaccacaagugugacaaugaaugcauggaaaguguaagaaaugggacuuaugauuaucccaaauauucagaagagucaaaguugaacagggaaaagguagauggagugaaauuggaaucaauggggaucuaucagauucuggcgaucuacucaacugucgccaguucacuggugcuuuuggucucccugggggcaaucaguuucuggauguguucuaauggaucuuugcagugcagaauaugcaucuga

SEQ ID NO: 35291 - RNA, 1701 nt, Artificial Sequence
  derived and/or modified CDS sequence (wt) from hemagglutinin__InfluenzaA__ACV49556
augaaggcaagacuacugauccuguugugugcacuugcagcuacagaugcagacacaauauguauaggcuaccaugcgaacaauucaaccgacacuguugacacaguacucgagaagaaugugacagugacacacucuguuaaccugcucgaagacagccacaacgggaaacuauguagauuaaaaggaauagccccauuacaauuggggaaauguaacaucgccggauggaucuugggaaacccagaaugcgacucauugcuuccagcgaguucaugguccuacauuguagaaacaccaaacucuaagaauggaauauguuauccaggagauuucaucgacuaugaggaacugagggagcaauugagcucaguaucaucauucgaaagauucgaaauauuucccaaggaaagcucauggcccaaacacagcacaaccaaaggaguaacggcagcaugcucccaugcaggaaagagcaguuuuuacagaaauuugcuauggcugacgaagaaggaggacucauacccaaagcugagcaauuccuaugugaacaagaaagggaaagaaguccuuguacuaugggguguucaucacccgucuagcaguaaagagcaacagacucucuaucagaaugaaaaugcuuaugucucuguagugucuucaaauuauaacaggagauucaucccggaaauagcagaaagacccgaaguaaaagaucaagcugggaggauaaacuauuacuggaccuugcuagaacccggagacacaauaauauuugaggcuaauggaaaucuaguagcaccaugguaugcuuucgcacugaguagaggcuuuggguccggcaucaucaccucaaacgcaucaaugcaugaguguaacacgaagugucaaacaccccagggagcuauaaacagcagucucccuuuccagaauauacacccagucacaauaggagagugcccaaaauacgucaagagugccaaauugaggaugguuacaggacuaagaaacaucccauccauucaauccaggggucuauuuggagccauugccgguuuuauugaaggaggauggacuggaaugauagauggaugguaugguuaucaucaucagaaugaacagggaucaggcuaugcagcggaucaaaaaagcacacaaaaugccauuaacgggauuacaaacaaggugaacucuguuaucgagaaaaugaacacucaauucacugcuguggguaaagaauucaacaacuuagaaaaaaggauggaaaauuuaaauaaaaaaguugaugauggauuccuggacauuuggacguauaaugcagaauuguuaguucuacuggaaaaugaaagaacucuggauuuccaugacucaaaugugaaaaaucuguaugagaaaguaaaaauccaauuaaagaauaaugccaaagaaaucggaaauggguguuuugaguucuaccacaagugugacaaugaaugcauggaaagugugagaaaugggacuuaugauuauccaaaauauucaaaagaaucaaaguugaacagggaaaagauagauggagugaaauuggaaucaaugggggucuaucagauucuggcgaucuacucaacugucgccaguucacuggugcuuuuggucucccugggggcaaucaguuucuggauguguucuaaugggucuuugcagugcagaauaugcaucuga

SEQ ID NO: 35292 - RNA, 1701 nt, Artificial Sequence
  derived and/or modified CDS sequence (wt) from hemagglutinin__InfluenzaA__ACV49567
augaaagcaaaacuacugauccuguuaugugcacuuacagcuacagaugcagacacaauauguauaggcuaccaugcgaacaacucaaccgacacuguugacacaguacucgaaaagaaugugacagugacacacucuguaaaccuacucgaagacagccacaacgggaaauuaugcagauuaaaaggaauagccccacuacaauuggggaaauguaacauugccggauggaucuuaggaaacccagaaugcgaaucacugcuuucuaagagaucaugguccuacauugcagaaacaccaaacucugagaauggagcauguuacccaggagauuucgccgacuaugaggaacugagggagcaauugagcucagugucaucauucgagagauucgaaauauuccccaaggaaagaucauggcccaaacacaacauaaccagaggaguaacggcagcaugcucccaugcggggaaaagcaguuuuuacaaaaauuugcucuggcugacggagacagauggcucauacccaaagcugagcaaguccuaugugaacaauaaagagaaagaaguccuugugcuaugggguguucaucacccgucuaacauagaggaucaaaagacccucuaucggaaagaaaaugcuuaugucucuguagugucuucaaauuauaacaggagauucaccccggaaauagcagaaagacccaaaguaagaggucaagcagggagaauuaacuauuacuggacuuugcuagaacccggagacacaauaauauuugaggcaaauggaaaucuaauagcgccaugguaugcuuucgcacugaguagagacuuuggaucaggaaucaucaccucaaacgcaucaauggaugaaugugacacgaagugucaaacaccccagggagcuauaaacaguagucucccuuuucagaauauacacccagucacaauaggagagugcccaaaauacgucaagaguaccaaauugaggaugguuacaggauuaaggaacaucccauccauucaauccagaggucuguuuggagccauugccgguuucauugaggggggauggacuggaaugauagauggaugguaugguuaccaucaucagaaugaacagggaucuggcuaugcugcggaucaaaaaagcacacaaaaugcaauuaacuggauuacaaauaaggugaacucuguuaucgagaaaaugaacacucaauucacagcuguggguaaagaauucaacaaauuagaaaaaagaauggaaaacuuaaauaaaaaaguugaugauggguuucuggacauuuggacauauaaugcagaauuguugguucuacuggaaaaugaaaggacuuuggauuuccaugacucaaaugugaagaaucuguaugagaaaguaaaaaaccaauuaaggaauaaugcaaaggaaauaggaaacggguguuuugaguucuaccacaaguguaacaaugaaugcauggaaaguguaaaaaauggaacuuaugauuacccaaaauauucagaggaaucaaaguuaaacagggaaaaaauugauggagugaaauuggaaucaaugggggucuaucagauucuggcgaucuacucaacugucgccaguucacuggugcuucuggucucccugggggcaaucagcuucuggauguguucuaaugggucuuugcaaugcagaauaugcaucuga

SEQ ID NO: 35293 - RNA, 1689 nt, Artificial Sequence
  derived and/or modified CDS sequence (wt) from hemagglutinin__InfluenzaA__ACV49578
auggccaucauuuaucucauacuccuguucacagcagugaggggggaccagauaugcauuggauaccaugccaauaauuccacagaaaaggucgacacaauccuagagcggaaugucacugugacucaugccaaggacauccuugagaagacccauaacggaaagcuaugcaaacuaaacggaaucccuccacuugaacuaggggacuguagcauugccggauggcuccuuggaaauccagaaugugauaggcuucuaagggugccagaaugguccuauauaauggagaaagaaaacccgaaauacaguuuguguuacccaggcagcuucaaugacuaugaagaauugaaacaucuccucagcagcguaaaacauuucgagaaaguaaagauucugcccaaagauagauggacacagcauacaacaacuggagguucaagggccugcgcggugucagguaacccaucauucuucaggaacauggucuggcugacaaagaaaggaccaaauuauccgguugccaaaggaucguacaacaauacgagcggagaacaaaugcuaauaauuuggggagugcaccauccuauugaugaggcagaacaaauagcauuguaccagaaagugggaaccuauguuucugcaagcacaucaacauugaacaaaaggucaaccccagaaauagcagcaaggccugaagugaauggacuaggaaguagaauggaauucucuuggacccucuuggauaugugggacaccauaaauuuugagagcacugguaaucuaguugcaccagaguauggauucaaaauaucgaaaagagguaguucagggaucaugaagacagaaggaacacuugagaacugugagaccaaaugccaaacuccuuugggagcaauaaauacaacacuaccuuuucacaauguccacccacugacaauaggugaaugccccaaauauguaaaaucggagaaauuggucuuagcaacaggacuaaggaauguuccccagauugaaucaagaggauuguuuggggcaauagcugguuuuauagaaggaggauggcaaggaaugguugaugguugguauggauaccaucacagcaaugaccagggaucaggguaugcagcagacaaagaauccacucaaaaggcauuugauggaaucaccaacaagguaaauucugugauugaaaagaugaacacccaauuugaagcuguugggaaagaauucaguaacuuagagaaaagacuggagaacuugaacaaaaagauggaagacggguuucuagauguguggacauacaaugcugagcuucuaguucugauggaaaaugagaggacacuugacuuucaugauucuaaugucaagaaucuguaugauaaagucagaaugcagcugagagacaacgucaaagaacuaggaaauggauguuuugaauuuuaucacaaaugugacgaugaaugcauggauagugugaaaaacgggacguaugauuaucccaaguaugaagaagaaucuaaacuaaauagaaaugaaaucaaagggguaaaauugagcagcauggggguuuaucaaauccuugccauuuaugcuacaguagcagguucucugucacuggcaaucaugauggcugggaucucuuucuggaugugcuccaacgggucucugcagugcagaaucugcauauga

SEQ ID NO: 35294 - RNA, 1689 nt, Artificial Sequence; identical to SEQ ID NO: 35293
  derived and/or modified CDS sequence (wt) from hemagglutinin__InfluenzaA__ACV49589

SEQ ID NO: 35295 - RNA, 1689 nt, Artificial Sequence
  derived and/or modified CDS sequence (wt) from hemagglutinin__InfluenzaA__ACV49600
auggccaucauuuaucucauucuccuguucacagcagugagaggggaccagauaugcauuggauaccaugccaauaauuccacagagaaggucgacacaauucuagagcggaacgucacugugacucaugccaaggacauucuugagaagacccauaacggaaaguuaugcaaacuaaacggaaucccuccacuugaacuaggggacuguagcauugccggauggcuccuuggaaauccagaaugugauaggcuucuaagugugccagaaugguccuauauaauggagaaagaaaacccgagagacgguuuguguuauccaggcagcuucaaugauuaugaagaauugaaacaucuccucagcagcgugaaacauuucgagaaaguaaagauucugcccaaagauagauggacacagcauacaacaacuggagguucacgggccugcgcggugucugguaauccaucauucuucaggaacauggucuggcugacagagaaaggaucaaauuauccgguugccaaaggaucguacaacaauacaagcggagaacaaaugcuaauaauuuggggggugcaccaucccaaugaugagacagaacaaagaacauuguaccagaaugugggaaccuauguuuccguaggcacaucaacauugaacaaaaggucaaccccagaaauagcaacaaggccuaaagugaauggacaaggagguagaauggaauucucuuggacccucuuggauaugugggacaccauaaauuuugagaguacugguaaucuaauugcaccagaguauggauucaaaauaucgaaaagagguaguucagggaucaugaaaacagaaggaacacuugagaacugugagaccaaaugccaaacuccuuugggagcaauaaauacaacauugccuuuucacaauguccacccacugacaauaggugagugccccaaauauguaaaaucggagaaguuggucuuagcaacaggacuaaggaauguuccccagauugaaucaagaggauuguuuggggcaauagcugguuuuauagaaggaggauggcaaggaaugguugaugguugguauggauaccaucacagcaaugaccagggaucaggguaugcagcagacaaagaauccacucaaaaggcauuugauggaaucaccaacaagguaaauucugugauugaaaagaugaacacccaauuugaagcuguugggaaagaauucaguaacuuagagagaagacuggagaacuugaacaaaaagauggaagacggguuucuagauguguggacauacaaugcugagcuucuaguucugauggaaaaugagaggacacuugacuuucaugauucuaaugucaagaaucuguaugauaaagucagaaugcagcugagagacaacgucaaagaacuaggaaauggauguuuugaauuuuaucacaaaugugaugaugaaugcaugaauagugugaaaaacgggacguaugauuaucccaaguaugaagaagagucuaaacuaaauagaaaugaaaucaaagggguaaaauugagcagcauggggguuuaucaaauccuugccauuuaugcuacaguagcagguucucugucacuggcaaucaugauggcugggaucucuuucuggaugugcuccaacgggucucugcagugcaggaucugcauauga

SEQ ID NO: 35296 - RNA, 1689 nt, Artificial Sequence
  derived and/or modified CDS sequence (wt) from hemagglutinin__InfluenzaA__ACV49611
auggccaucauuuaucucauucuccuguucacagcagugagaggggaccagauaugcauuggauaccaugccaauaauuccacagagaaggucgacacaauucuagagcggaacgucacugugacucaugccaaggacauucuugagaagacccauaacggaaaguuaugcaaacuaaacggaaucccuccacuugaacuaggggacuguagcauugccggauggcuccuuggaaauccagaaugugauaggcuucuaagugugccagaaugguccuauauaauggagaaagaaaacccgagagacgguuuguguuauccaggcagcuucaaugauuaugaagaauugaaacaucuccucagcagcgugaaacauuucgagaaaguaaagauucugcccaaagauagauggacacagcauacaacaacuggagguucacgggccugcgcggugucugguaauccaucauucuucaggaacauggucuggcugacagagaaaggaucaaauuauccgguugccaaaggaucguacaacaauacaagcggagaacaaaugcuaauaauuuggggggugcaccaucccaaugaugagacagaacaaagaacauuguaccagaaugugggaaccuauguuuccguaggcacaucaacauugaacaaaaggucaaccccaaaaauagcaacaaggccuaaagugaauggacaaggagguagaauggaauucucuuggacccucuuggauaugugggacaccauaaauuuugagaguacugguaaucuaauugcaccagaguauggauucaaaauaucgaaaagagguaguucagggaucaugaaaacagaaggaacacuugagaacugugagaccaaaugccaaacuccuuugggagcaauaaauacaacauugccuuuucacaauguccacccacugacaauaggugagugccccaaauauguaaaaucggagaaguuggucuuagcaacaggacuaaggaauguuccccagauugaaucaagaggauuguuuggggcaauagcugguuuuauagaaggaggauggcaaggaaugguugaugguugguauggauaccaucacagcaaugaccagggaucaggguaugcagcagacaaagaauccacucaaaaggcauuugauggaaucaccaacaagguaaauucugugauugaaaagaugaacacccaauuugaagcuguugggaaagaauucaguaacuuagagagaagacuggagaacuugaacaaaaagguggaagacggguuucuagauguguggacauacaaugcugagcuucuaguucugauggaaaaugagaggacacuugacuuucaugauucuaaugucaagaaucuguaugauaaagucagaaugcagcugagagacaacgucaaagaacuaggaaauggauguuuugaauuuuaucacaaaugugaugaugaaugcaugaauagugugaaaaacgggacguaugauuaucccaaguaugaagaagagucuaaacuaaauagaaaugaaaucaaagggguaaaauugagcagcauggggguuuaucaaauccuugccauuuaugcuacaguagcagguucucugucacuggcaaucaugauggcugggaucucuuucuggaugugcuccaacgggucucugcagugcaggaucugcauauga

SEQ ID NO: 35297 - RNA, 1701 nt, Artificial Sequence
  derived and/or modified CDS sequence (wt) from hemagglutinin__InfluenzaA__ACV49633
augaagacuaucauugcuuugagcuacauuuuaugucugguuuucgcucaaaaacuucccggaaaugacaacagcacggcaacgcugugccugggacaccaugcagugccaaacggaacgcuagugaaaacaaucacgaaugaccaaauugaagugacuaaugcuacugagcugguucagaguuccucaacagguagaauaugcgacaguccucaccgaauccuugauggaaaaaacugcacacugauagaugcucuauugggagacccucauugugauggcuuccaaaauaaggagugggaccuuuuuguugaacgcagcaaagcuuacagcaacuguuacccuuaugaugugccggauuaugcuucccuuaggucacuaguugccucauccggcacccuggaguuuaccaaugaaggcuucaauuggacuggagucgcucaggauggaacaagcuaugcuugcaaaaggggaucuguuaaaaguuucuuuaguagauugaauugguugcacaaauuagaauacaaauauccagcacugaacgugacuaugccaaacaaugacaaauuugacaaauuguacauuugggggguucaccacccgaguacggacaguguccaaaccagccuauauguucaagcaucagggagagucacagucucuaccaaaagaagccaacaaacuguaaucccgaauaucgggucuagacccuggguaagggguaucuccagcagaauaagcaucuauuggacaauaguaaaaccgggagacauacuuuugauuaacagcacagggaaucuaauugcuccucgggguuacuucaaaauacgaagugggaaaagcucaauaaugaggucagaugcacccauuggcaacugcaauucugaaugcaucacuccaaauggaagcauucccaaugacaaaccuuuucaaaauguaaacaggaucacauauggggccugucccagauauguuaagcaaaacacucugaaauuggcaacagggaugcggaauguaccagagaaacaaacuagaggcauauucggcgcaaucgcagguuucauagaaaaugguugggagggaaugguagacgguugguacgguuucaggcaucaaaauucugagggcacaggacaagcagcagaucuuaaaagcacucaagcagcaaucaaccaaaucaacgggaaacugaauagguuaaucgagaaaacgaacgagaaauucccucaaaucgaaaaagaauucucagaaguagaagggagaauucaggaccucgagaaauauguugaagacacuaaaauagaucucuggucuuacaacgcggagcuucuuguugcccuggagaaccaacauacaauugaucuaacugacucagaaaugaacaaacuguuugaaagaacaaggaagcaacugagggaaaaugcugaggacaugggcaaugguugcuucaaaauauaccacaaaugugacaaugccugcauagggucaaucagaaauggaacuuaugaccaugauguauacagagacgaagcauuaaacaaccgguuccagaucaaagguguugagcugaagucaggauacaaagauuggauccuauggauuuccuuugccauaucaugcuuuuugcuuuguguuguuuugcugggguucaucaugugggccugccaaaaaggcaacauuaggugcaacauuugcauuuga

SEQ ID NO: 35298 - RNA, 1701 nt, Artificial Sequence; identical to SEQ ID NO: 34368
  derived and/or modified CDS sequence (wt) from hemagglutinin__InfluenzaA__ACV49644

SEQ ID NO: 35299 - RNA, 1698 nt, Artificial Sequence; identical to SEQ ID NO: 35187
  derived and/or modified CDS sequence (wt) from hemagglutinin__InfluenzaA__ACV49676

SEQ ID NO: 35300 - RNA, 1701 nt, Artificial Sequence
  derived and/or modified CDS sequence (wt) from hemagglutinin__InfluenzaA__ACV53450
augaaggcaauacuaguaguucugcuauauacauuugcaaccgcaaaugcagacacauuauguauagguuaucaugcgaacaauucaacagacacuguagacacaguacuagaaaagaauguaacaguaacacacucuguuaaccuucuagaagacaagcauaacggaaaacuaugcaaacuaagagggguagccccauugcauuuggguaaauguaacauugcuggcuggauccugggaaauccagagugugaaucacucuccacagcaagcucaugguccuacauuguggaaacaucuaguucagacaauggaacguguuacccaggagauuucaucgauuaugaggagcuaagagagcaauugagcucagugucaucauuugaaagguuugagauauuccccaagacaaguucauggcccaaucaugacucgaacaaagguguaacggcagcauguccucaugcuggagcaaaaagcuucuacaaaaauuuaauauggcuaguuaaaaaaggaaauucauacccaaagcucagcaaauccuacauuaaugauaaagggaaagaaguccucgugcuauggggcauucaccauccaucuacuagugcugaccaacagagucucuaucagaaugcagaugcauauguuuuuguggggucaucaagauacagcaagaaguucaagccggaaauagcaauaagacccaaagugagggaucaagaagggagaaugaacuauuacuggacacuaguagagccgggagacaaaauaacauucgaagcaacuggaaaucuagugguaccgagauaugcauucgcaauggaaagaaaugcuggaucugguauuaucauuucagauacaccaguccacgauugcaauacaacuugucagacacccaagggugcuauaaacaccagccucccauuucagaauauacauccgaucacaauuggaaaauguccaaaauauguaaaaagcacaaaauugagacuggccacaggauugaggaaugucccgucuauucaaucuagaggccuauuuggggccauugccgguuucauugaagggggguggacagggaugguagauggaugguacgguuaucaccaucaaaaugagcaggggucaggauaugcagccgaccugaagagcacacagaaugccauugacgagauuacuaacaaaguaaauucuguuauugaaaagaugaauacacaguucacagcaguagguaaagaguucaaccaccuggaaaaaagaauagagaauuuaaauaaaaaaguugaugaugguuuccuggacauuuggacuuacaaugccgaacuguugguucuauuggaaaaugaaagaacuuuggacuaccacgauucaaaugugaagaacuuauaugaaaagguaagaagccagcuaaaaaacaaugccaaggaaauuggaaacggcugcuuugaauuuuaccacaaaugcgauaacacgugcauggaaagugucaaaaaugggacuuaugacuacccaaaauacucagaggaagcaaaauuaaacagagaagaaauagaugggguaaagcuggaaucaacaaggauuuaccagauuuuggcgaucuauucaacugucgccaguucauugguacugguagucucccugggggcaaucaguuucuggaugugcucuaaugggucucuacaguguagaauauguauuuaa

SEQ ID NO: 35301 - RNA, 1701 nt, Artificial Sequence; identical to SEQ ID NO: 34676
  derived and/or modified CDS sequence (wt) from hemagglutinin__InfluenzaA__ACV53460

SEQ ID NO: 35302 - RNA, 1701 nt, Artificial Sequence; identical to SEQ ID NO: 35078
  derived and/or modified CDS sequence (wt) from hemagglutinin__InfluenzaA__ACV53480

SEQ ID NO: 35303 - RNA, 1701 nt, Artificial Sequence
  derived and/or modified CDS sequence (wt) from hemagglutinin__InfluenzaA__ACV53490
auggaggcaauacuaguaguucugcuauauacauuugcaaccgcaaaugcagacacauuauguauagguuaucaugcgaacaauucaacagacacuguagacacaguacuagaaaagaauguaacaguaacacacucuguuaaccuucuagaagacaagcauaacgggaaacuaugcaaacuaagagggguagccccauugcauuuggguaaaugugacauugcuggcuggauccugggaaauccagagugugaaucacucuccacagcaagcucaugguccuacauuguggaaacaucuaguucagacaauggaacguguuacccaggagauuucaucgauuaugaggagcuaagagagcaauugagcucagugucaucauuugaaagguuugagauauuccccaagacaaguucauggcccaaucaugacucgaacaaagguguaacggcagcauguccucaugcuggagcaaaaagcuucuacaaaaauuuaauauggcuaguuaaaaaaggaaauucauacccaaagcucagcaaauccuacauuaaugauaaagggaaagaaguccucgugcuauggggcauucaccauccaucuacuagugcugaccaacaaagucucuaucagaaugcagaugcauauguuuuuguggggucaucaagauacagcaagaaguucaagccggaaauagcaauaagacccaaagugagggaucaagaagggagaaugaacuauuacuggacacuaguagagccgggagacaaaauaacauucgaagcaacuggaaaucuagugguaccgagauaugcauucgcaauggaaagaaaugcuggaucugguauuaucauuucagauacaccaguccacgauugcaauacaacuugucagacacccaagggugcuauaaacaccagccucccauuucauaauauacauccgaucacaauuggaaaauguccaaaauauguaaaaagcacaaaauugagacuggccacaggauugaggaaugucccgucuauucaaucuagaggccuauuuggggccauugccgguuucauugaagggggguggacagggaugguagauggaugguacgguuaucaccaucaaaaugagcaggggucaggauaugcagccgaccugaagagcacacagaaugccauugacgagauuacuaacaaaguaaauucuguuauugaaaagaugaauacacaguucacagcaguagguaaagaguucaaccaccuggaaacaagaauagagaauuuaaauaaaaaaguugaugaugguuuccuggacauuuggacuuacaaugccgaacuguugguucuauuggaaaaugaaagaacuuuggacuaccacgauucaaaugugaagaacuuauaugaaaagguaagaagccaguuaaaaaacaaugccaaggaaauuggaaacggcugcuuugaauuuuaccacaaaugcgauaacacgugcauggaaagugucaaaaaugggacuuaugacuacccaaaauacucagaggaagcaaaauuaaacagagaagaaauagaugggguaaagcuggaaucaacaaggauuuaccagauuuuggcgaucuauucaacugucgccaguucauugguacugguagucucccugggggcaaucaguuucuggaugugcucuaaugggucucuacaguguagaauauguauuuaa

SEQ ID NO: 35304 - RNA, 1701 nt, Artificial Sequence
  derived and/or modified CDS sequence (wt) from hemagglutinin__InfluenzaA__ACV53500
auggaggcaauacuaguaguucugcuauauacauuugcaaccgcaaaugcagacacauuauguauagguuaucaugcgaacaauucaacagacacuguagacacaguacuagaaaagaauguaacaguaacacacucuguuaaccuucuagaagacaagcauaacgggaaacuaugcaaacuaagagggguagccccauugcauuuggguaaauguaacauugcuggcuggauccugggaaauccagagugugaaucacucuccacagcaagcucaugguccuacauuguggaaacaucuaguucagacaauggaacguguuacccaggagauuucaucgauuaugaggagcuaagagagcaauugagcucagugucaucauuugaaagguuugagauauuccccaagacaaguucauggcccaaucaugacucgaacaaagguguaacggcagcauguccucaugcuggagcaaaaagcuucuacaaaaauuuaauauggcuaguuaaaaaaggaaauucauacccaaagcucagcaaauccuacauuaaugauaaagggaaagaaguccucgugcuauggggcauucaccauccaucuacuagugcugaccaacaaagucucuaucagaaugcagaugcauauguuuuuguggggucaucaagauacagcaagaaguucaagccggaaauagcaauaagacccaaagugagggaucaagaagggagaaugaacuauuacuggacacuaguagagccgggagacaaaauaacauucgaagcaacuggaaaucuagugguaccgagauaugcauucgcaauggaaagaaaugcuggaucugguauuaucauuucagauacaccaguccacgauugcaauacaacuugucagacacccaagggugcuauaaacaccagccucccauuucauaauauacauccgaucacaauuggaaaauguccaaaauauguaaaaagcacaaaauugagacuggccacaggauugaggaaugucccgucuauucaaucuagaggccuauuuggggccauugccgguuucauugaagggggguggacagggaugguagauggaugguacgguuaucaccaucaaaaugagcaggggucaggauaugcagccgaccugaagagcacacagaaugccauugacgagauuacuaacaaaguaaauucuguuauugaaaagaugaauacacaguucacagcaguagguaaagaguucaaccaccuggaaacaagaauagagaauuuaaauaaaaaaguugaugaugguuuccuggacauuuggacuuacaaugccgaacuguugguucuauuggaaaaugaaagaacuuuggacuaccacgauucaaaugugaagaacuuauaugaaaagguaagaagccaguuaaaaaacaaugccaaggaaauuggaaacggcugcuuugaauuuuaccacaaaugcgauaacacgugcauggaaagugucaaaaaugggacuuaugacuacccaaaauacucagaggaagcaaaauuaaacagagaagaaauagaugggguaaagcuggaaucaacaaggauuuaccagauuuuggcgaucuauucaacugucgccaguucauugguacugguagucucccugggggcaaucaguuucuggaugugcucuaaugggucucuacaguguagaauauguauuuaa

SEQ ID NO: 35305 - RNA, 1701 nt, Artificial Sequence
  derived and/or modified CDS sequence (wt) from hemagglutinin__InfluenzaA__ACV53880
augaaggcaauacuaguaguucugcuauauacauuugcaaccgcaaaugcagacacauuauguauagguuaucaugcgaacaauucaacagacacuguagacacaguacuagaaaagaauguaacaguaacacacucuguuaaccuucuagaagacaagcauaacgggaaacuaugcaaacuaagagggguagccccauugcauuuggguaaauguaacauugcuggcuggauccugggaaauccagagugugaaucacucuccacagcaagcucaugguccuacauuguggaaacaucuaguucagacaauggaacguguuacccaggagauuucaucgauuaugaggagcuaagagagcaauugagcucagugucaucauuugaaagguuugagauauuccccaagacaaguucauggcccaaucaugacucgaacaaagguguaacgacagcauguccucaugcuggagcaaaaagcuucuacaaaaauuuaauauggcuaguuaaaaaaggaaauucauacccaaagcucagcaaauccuacauuaaugauaaagggaaagaaguccucgugcuauggggcauucaccauccaucuacuagugcugaccaacaaagucucuaucagaaugcagaugcauauguuuuuguggggacaucaagauacagcaagaaguucaagccggaaauagcaauaagacccaaagugagggaucaagaagggagaaugaacuauuacuggacacuaguagagccgggagacaaaauaacauucgaagcaacuggaaaucuagugguaccgagauaugcauucgcaauggaaagaaaugcuggaucugguauuaucauuucagauacaccaguccacgauugcaauacaacuugucagacacccaagggugcuauaaacaccagccucccauuucagaauauacauccgaucacaauuggaaaauguccaaaauauguaaaaagcacaaaauugagacuggccacaggauugaggaaugucccgucuauucaaucuagaggccuauuuggggccauugccgguuucauugaagggggguggacagggaugguagauggaugguacgguuaucaccaucaaaaugagcaggggucaggauaugcagccgaccugaagagcacacagaaugccauugacgagauuacuaacaaaguaaauucuguuauugaaaagaugaauacacaguucacagcaguagguaaagaguucaaccaccuggaaaaaagaauagagaauuuaaauaaaaaaguugaugaugguuuccuggacauuuggacuuacaaugccgaacuguugguucuauuggaaaaugaaagaacuuuggacuaccacgauucaaaugugaagaacuuauaugaaaagguaagaagccaguuaaaaaacaaugccaaggaaauuggaaacggcugcuuugaauuuuaccacaaaugugauaacacgugcauggaaagugucaaaaaugggacuuaugacuacccaaaauacucagaggaagcaaaauuaaacagagaagaaauagaugggguaaagcuggaaucaacaaggauuuaccagauuuuggcgaucuauucaacugucgccaguucauugguacugguagucucccugggggcaaucaguuucuggaugugcucuaaugggucucuacaguguagaauauguauuuaa

SEQ ID NO: 35306 - RNA, 1701 nt, Artificial Sequence; identical to SEQ ID NO: 34714
  derived and/or modified CDS sequence (wt) from hemagglutinin__InfluenzaA__ACV53881

SEQ ID NO: 35307 - RNA, 1701 nt, Artificial Sequence; identical to SEQ ID NO: 34705
  derived and/or modified CDS sequence (wt) from hemagglutinin__InfluenzaA__ACV53882

SEQ ID NO: 35308 - RNA, 1701 nt, Artificial Sequence
  derived and/or modified CDS sequence (wt) from hemagglutinin__InfluenzaA__ACV53883
augaaggcaauacuaguaguucugcuauauacauuugcaaccgcaaaugcagacacauuauguauagguuaucaugcgaacaauucaacagacacuguagacacaguacuagaaaagaauguaacaguaacacacucuguuaaccuucuagaagacaagcauaacgggaaacuaugcaaacuaagagggguagccccauugcauuuggguaaauguaacauugcuggcuggauccugggaaauccagagugugaaucacucuccacagcaagcucaugguccuacauuguggaaacaucuaguucagacaauggaacguguuacccaggagauuucaucgauuaugaggagcuaagagagcaauugagcucagugucaucauuugaaagguuugagauauuccccaagacaaguucauggcccaaucaugacucgaacaaagguguaacggcagcaugcccucaugcuggagcaaaaagcuucuacaaaaauuuaauauggcuaguuaaaaaaggaaauucauacccaaagcucagcaaauccuacauuaaugauaaagggaaagaaguccucgugcuauggggcauucaccauccaucuacuagugcugaccaacaaagucucuaucagaaugcagaugcauauguuuuuguggggacaucaagauacagcaagaaguucaagccggaaauagcaauaagacccaaagugagggaucaagaagggagaaugaacuauuacuggacacuaguagagccgggagacaaaauaacauucgaagcaacuggaaaucuagugguaccgagauaugcauucgcaauggaaagaaaugcuggaucugguauuaucauuucagauacaccaguccacgauugcaauacaacuugucagacacccaagggugcuauaaacaccagccucccauuucagaauauacauccgaucacaauuggaaaauguccaaaauauguaaaaagcacaaaauugagacuggccacaggauugaggaaugucccgucuauucaaucuagaggccuauuuggggccauugccgguuucauugaagggggguggacagggaugguagauggaugguacgguuaucaccaucaaaaugagcaggggucaggauaugcagccgaccugaagagcacacagaaugccauugacgagauuacuaacaaaguaaauucuguuauugaaaagaugaauacacaguucacagcaguagguaaagaguucaaccaccuggaaaaaagaauagagaauuuaaauaaaaaaguugaugaugguuuccuggacauuuggacuuacaaugccgaacuguugguucuauuggaaaaugaaagaacuuuggacuaccacgauucaaaugugaagaacuuauaugaaaagguaagaagccaguuaaaaaacaaugccaaggaaauuggaaacggcugcuuugaauuuuaccacaaaugcgauaacacgugcauggaaagugucaaaaaugggacuuaugacuacccaaaauacucagaggaagcaaaauuaaacagagaagaaauagaugggguaaagcuggaaucaacaaggauuuaccagauuuuggcgaucuauucaacugucgccaguucauugguacugguagucucccugggggcaaucaguuucuggaugugcucuaaugggucucuacaguguagaauauguauuuaa

SEQ ID NO: 35309 - RNA, 1701 nt, Artificial Sequence
  derived and/or modified CDS sequence (wt) from hemagglutinin__InfluenzaA__ACV53885
augaaggcaauacuaguaguucugcuauauacauuugcaaccgcaaaugcagacacauuauguauagguuaucaugcgaacaauucaacagacacuguagacacaguacuagaaaagaauguaacaguaacacacucuguuaaccuucuagaagacaagcauaacgggaaacuaugcaaacuaagagggguagccccauugcauuuggguaaauguaacauugcuggcuggauccugggaaauccagagugugaaucacucuccacagcaagcucaugguccuacauuguggaaacaucuaguucagacaauggaacguguuacccaggagauuucaucgauuaugaggagcuaagagagcaauugagcucagugucaucauuugaaagguuugagauauuccccaagacaaguucauggcccaaucaugacucgaacaaagguguaacggcagcauguccucaugcuggagcaaaaagcuucuacaaaaauuuaauauggcuaguuaaaaaaggaaauucauacccaaagcucagcaaauccuacauuaaugauaaagggaaagaaguccucgugcuauggggcauucaccauccaucuacuagugcugaccaacaaagucucuaucagaaugcagaugcauauguuuuuguggggacaucaagauacagcaagaaguucaagccggaaauagcaauaagacccaaagugagggaucaagaagggagaaugaacuauuacuggacacuaguagagccgggagacaaaauaacauucgaagcaacuggaaaucuagugguaccgagauaugcauucgcaauggaaagaaaugcuggaucugguauuaucauuucagauacaccaguccacgauugcaauacaacuugucagacacccaagggugcuauaaacaccagccucccauuucagaauauacauccgaucacaauuggaaaauguccaaaauauguaaaaagcacaaaauugagacuggccacaggauugaggaaugucccuucuauucaaucuagaggccuauuuggggccauugccgguuucauugaagggggguggacagggaugguagauggaugguacgguuaucaccaucaaaaugagcaggggucaggauaugcagccgaccugaagagcacacagaaugccauugacgagauuacuaacaaaguaaauucuguuauugaaaagaugaauacacaguucacagcaguagguaaagaguucaaccaccuggaaaaaagaauagagaauuuaaauaaaaaaguugaugaugguuuccuggacauuuggacuuacaaugccgaacuguugguucuauuggaaaaugaaagaacuuuggacuaccacgauucaaaugugaagaacuuauaugaaaagguaagaagccaguuaaaaaacaaugccaaggaaauuggaaacggcugcuuugaauuuuaccacaaaugcgauaacacgugcauggaaagugucaaaaaugggacuuaugacuacccaaaauacucagaggaagcaaaauuaaacagagaagaaauagaugggguaaagcuggaaucaacaaggauuuaccagauuuuggcgaucuauucaacugucgccaguucauugguacugguagucucccugggggcaaucaguuucuggaugugcucuaaugggucucuacaguguagaauauguauuuaa

SEQ ID NO: 35310 - RNA, 1701 nt, Artificial Sequence
  derived and/or modified CDS sequence (wt) from hemagglutinin__InfluenzaA__ACV53899
augaaggcaauacuaguaguucugcuauauacauuugcaaccgcaaaugcagacacauuauguauagguuaucaugcgaacaauucaacagacacuguagacacaguacuagaaaagaauguaacaguaacacacucuguuaaccuucuagaagacaagcauaacgggaaacuaugcaaacuaagagggguagccccauugcauuuggguaaauguaacauugcuggcuggauccugggaaauccagagugugaaucacucuccacagcaagcucaugguccuacauuguggaaacaucuaguucagacaauggaacguguuacccaggagauuucaucgauuaugaggagcuaagagagcaauugagcucagugucaucauuugaaagguuugagauauuccccaagacaaguucauggcccaaucaugacucgaacaaagguguaacggcagcauguccucaugcuggagcaaaaagcuucuacaaaaauuuaauauggcuaguuaaaaaaggaaauucauacccaaagcucagcaaauccuacauuaaugauaaagggaaagaaguccucgugcuauggggcauucaccauccaucuacuagugcugaccaacaaagucucuaucagaaugcagaugcauauguuuuuguggggacaucaagauacagcaagaaguucaagccggaaauagcaauaagacccaaagugagggaucaagaagggagaaugaacuauuacuggacacuaguagagccgggagacaaaauaacauucgaagcaacuggaaaucuagugguaccgagauaugcauucgcaauggaaagaaaugcuggaucugguauuaucauuucagauacaccaguccacgauugcaauacaacuugucagacacccgagggugcuauaaacaccagccucccauuucaaaauauacauccgaucacaauuggaaaauguccaaaauauguaaaaagcacaaaauugagacuggccacaggauugaggaaugucccgucuauucaaucuagaggccuauuuggggccauugccgguuucauugaagggggguggacagggaugguagauggaugguacgguuaucaccaucaaaaugagcaggggucaggauaugcagccgaccugaagagcacacagaaugccauugacgagauuacuaacaaaguaaauucuguuauugaaaagaugaauacacaguucacagcaguagguaaagaguucaaccaccuggaaaaaagaauagagaauuuaaauaaaaaaguugaugaugguuuccuggacauuuggacuuacaaugccgaacuguugguucuauuggaaaaugaaagaacuuuggacuaccacgauucaaaugugaagaacuuauaugaaaagguaagaagccaguuaaaaaacaaugccaaggaaauuggaaacggcugcuuugaauuuuaccacaaaugcgauaacacgugcauggaaagugucaaaaaugggacuuaugacuacccaaaauacucagaggaagcaaaauuaaacagagaagaaauagaugggguaaagcuggaaucaacaaggauuuaccagauuuuggcgaucuauucaacugucgccaguucauugguacugguagucucccugggggcaaucaguuucuggaugugcucuaaugggucucuacaguguagaauauguauuuaa

SEQ ID NO: 35311 - RNA, 1701 nt, Artificial Sequence
  derived and/or modified CDS sequence (wt) from hemagglutinin__InfluenzaA__ACV53909
augaaggcaauacuaguaguucugcuauauacauuugcaaccgcaaaugcagacacauuauguauagguuaucaugcgaacaauucaacagacacuguagacacaguacuagaaaagaauguaacaguaacacacucuguuaaccuucuagaagacaagcauaacgggaaacuaugcaaacuaagagggguagccccauugcauuuggguaaauguaacauugcuggcuggauccugggaaauccagagugugaaucacucuccacagcaagcucaugguccuacauuguggaaacaucuaguucagacaauggaacguguuacccaggagauuucaucgauuaugaggagcuaagagagcaauugagcucagugucaucauuugaaagguuugagauauuccccaagacaaguucauggcccaaucaugacucgaacaaagguguaacggcagcauguccucaugcuggagcaaaaagcuucuacaaaaauuuaauauggcuaguuaaaaaaggaaauucauacccaaagcucagcaaauccuacauuaaugauaaagggaaagaaguccucgugcuauggggcauucaccauccaucuacuagugcugaccaacaaagucucuaucagaaugcagaugcauauguuuuuguggggacaucaagauacagcaagaaguucaagccggaaauagcaauaagacccaaagugagggaucaagaagggagaaugaacuauuacuggacacuaguagagccgggagacaaaauaacauucgaagcaacuggaaaucuagugguaccgagauaugcauucgcaauggaaagaaaugcuggaucugguauuaucauuucagauacaccaguccacgauugcaauacaacuugucagacacccaagggugcgauaaacaccagccuaccauuucagaauauacauccgaucacaauuggaaaauguccaaaauauguaaaaagcacaaaauugagacuggccacaggauugaggaaugucccgucuauucaaucuagaggccuauuuggggccauugccgguuucauugaagggggguggacagggaugguagauggaugguacgguuaucaccaucaaaaugagcaggggucaggauaugcagccgaccugaagagcacacagaaugccauugacgagauuacuaacaaaguaaauucuguuauugaaaagaugaauacacaguucacagcaguagguaaagaguucaaccaccuggaaaaaagaauagagaauuuaaauaaaaaaguugaugaugguuuccuggacauuuggacuuacaaugccgaacuguugguucuauuggaaaaugaaagaacuuuggacuaccacgauucaaaugugaagaacuuauaugaaaagguaagaagccaguuaaaaaacaaugccaaggaaauuggaaacggcugcuuugaauuuuaccacaaaugcgauaacacgugcauggaaagugucaaaaaugggacuuaugacuacccaaaauacucagaggaagcaaaauuaaacagagaagaaauagaugggguaaagcuggaaucaacaaggauuuaccagauuuuggcgaucuauucaacugucgccaguucauugguacugguagucucccugggggcaaucaguuucuggaugugcucuaaugggucucuacaguguagaauauguauuuaa

SEQ ID NO: 35312 - RNA, 1701 nt, Artificial Sequence
  derived and/or modified CDS sequence (wt) from hemagglutinin__InfluenzaA__ACV67220
augaaggcaauacuaguaguucugcuauauacauuugcaaccgcaaaugcagacacauuauguauagguuaucaugcgaacaauucaacagacacuguagacacaguacuagaaaagaauguaacaguaacacacucuguuaaccuucuagaagacaagcauaacgggaaacuaugcaaacuaagagggguagccccauugcauuuggguaaauguaacauugcuggcuggauccugggaaauccagagugugaaucacucuccacagcaagcucaugguccuacauuguggaaacaucuaguucagacaauggaacguguuacccaggagauuucaucgauuaugaggagcuaagagagcaauugagcucagugucaucauuugaaagguuugagauauuccccaagacaaguucauggcccaaucaugacucgaacaaagguguaacggcagcauguccucaugcuggagcaaaaagcuucuacaaaaauuuaauauggcuaguuaaaaaaggaaauucauacccaaagcucagcaaauccuacauuaaugauaaagggaaagaaguccucgugcuauggggcauucaccauccaucuacuagugcugaccaacaaagucucuaucagaaugcagaugcauauguuuuuguggggacaucaagauacagcaagaaguucaagccggaaauagcaauaagacccaaagugagggaucaagaagggagaaugaacuauuacuggacacuaguagagccgggagacaaaauaacauucgaagcaacuggaaaucuagugguaccgagauaugcauucgcaauggaaagaaaugcuggaucugguauuaucauuucagauacaccaguccacgauugcaauacaacuugucagacacccaagggugcuauaaacaccagccucccauuucagaauauacauccgaucacaauuggaaaauguccaaaauauguaaaaagcacaaaauugagacuggccacaggauugaggaaugucccgucuauucaaucuagaggccuauuuggggccauugccgguuucauugaagggggguggacagggaugguagauggaugguacgguuaccaccaucaaaaugagcaggggucaggauaugcagccgaccugaagagcacacagaaugccauugacgagauuacuaacaaaguaaauucuguuauugaaaagaugaauacacaguucacagcaguagguaaagaguucaaccaccuggaaaaaagaauagagaauuuaaauaaaaaaguugaugaugguuuccuggacauuuggacuuacaaugccgaacuguugguucuauuggaaaaugaaagaacuuuggacuaccacgauucaaaugugaagaacuuauaugaaaagguaagaagccaguuaaaaaacaaugccaaggaaauuggaaacggcugcuuugaauuuuaccacaaaugcgauaacacgugcauggaaagugucaaaaaugggacuuaugacuacccaaaauacucagaggaagcaaaauuaaacagagaagaaauagaugggguaaagcuggaaucaacaaggauuuaccagauuuuggcgaucuauucaacugucgccaguucauugguacugguagucucccugggggcaaucaguuucuggaugugcucuaaugggucucuacaguguagaauauguauuuaa

SEQ ID NO: 35313 - RNA, 1701 nt, Artificial Sequence
  derived and/or modified CDS sequence (wt) from hemagglutinin__InfluenzaA__ACV67221
augaaggcaauacuaguaguucugcuauauacauuugcaaccgcaaaugcagacacauuauguauagguuaucaugcgaacaauucaacagacacuguagacacaguacuagaaaagaauguaacaguaacacacucuguuaaccuucuagaagacaagcauaacgggaaacuaugcaaacuaagagggguagccccauugcauuuggguaaauguaacauugcuggcuggauccugggaaauccagaguguggaucacucuccacagcaagcucaugguccuacauuguggaaacaucuaguucagacaauggaacguguuacccaggagauuucaucgauuaugaggagcuaagagagcaauugagcucagugucaucauuugaaagguuugagauauuccccaagacaaguucauggcccaaucaugacucgaacaaagguguaacggcagcauguccucaugcuggagcaaaaagcuucuacaaaaauuuaauauggcuaguuaaaaaaggaaauucauacccaaagcucagcaaauccuacauuaaugauaaagggaaagaaguccucgugcuauggggcauucaccauccaucuacuagugcugaccaacaaagucucuaucagagugcagaugcauauguuuuuguggggacaucaagauacagcaagaaguucaagccggaaauagcaauaagacccaaagugagggaucaagaagggagaaugaacuauuacuggacacuaguagagccgggagacaaaauaacauucgaagcaacuggaaaucuagugguaccgagauaugcauucgcaauggaaagaaaugcuggaucugguauuaucauuucagauacaccaguccacgauugcaauacaacuugucagacacccaagggugcuauaaacaccagccucccauuucagaauauacauccgaucacaauuggaaaauguccaaaauauguaaaaagcacaaaauugagacuggccacaggauugaggaaugucccgucuauucaaucuagaggccuauuuggggccauugccgguuucauugaagggggguggacagggaugguagauggaugguacgguuaucaccaucaaaaugagcaggggucaggauaugcagccgaccugaagagcacacagaaugccauugacgagauuacuaacaaaguaaauucuguuauugaaaagaugaauacacaguucacagcaguagguaaagaguucaaccaccuggaaaaaagaauagagaauuuaaauaaaaaaguugaugaugguuuccuggacauuuggacuuacaaugccgaacuguugguucuauuggaaaaugaaagaacuuuggacuaccacgauucaaaugugaagaacuuauaugaaaagguaagaagccaguuaaaaaacaaugccaaggaaauuggaaacggcugcuuugaauuuuaccacaaaugcgauaacacgugcauggaaagugucaaaaaugggacuuaugacuacccaaaauacucagaggaagcaaaauuaaacagagaagaaauagaugggguaaagcuggaaucaacaaggauuuaccagauuuuggcgaucuauucaacugucgccaguucauugguacugguagucucccugggggcaaucaguuucuggaugugcucuaaugggucucuacaguguagaauauguauuuaa

SEQ ID NO: 35314 - RNA, 1701 nt, Artificial Sequence; identical to SEQ ID NO: 34705
  derived and/or modified CDS sequence (wt) from hemagglutinin__InfluenzaA__ACV67222

SEQ ID NO: 35315 - RNA, 1701 nt, Artificial Sequence; identical to SEQ ID NO: 34747
  derived and/or modified CDS sequence (wt) from hemagglutinin__InfluenzaA__ACV67223

SEQ ID NO: 35316 - RNA, 1701 nt, Artificial Sequence; identical to SEQ ID NO: 34965
  derived and/or modified CDS sequence (wt) from hemagglutinin__InfluenzaA__ACV67224

SEQ ID NO: 35317 - RNA, 1701 nt, Artificial Sequence; identical to SEQ ID NO: 34898
  derived and/or modified CDS sequence (wt) from hemagglutinin__InfluenzaA__ACV67225

SEQ ID NO: 35318 - RNA, 1701 nt, Artificial Sequence
  derived and/or modified CDS sequence (wt) from hemagglutinin__InfluenzaA__ACV67226
augaaggcaauacuaguaguucugcuauauacauuugcaaccgcaaaugcagacacauuauguauagguuaucaugcgaacaauucaacagacacuguagacacaguacuagaaaagaauguaacaguaacacacucuguuaaccuucuagaagacaagcauaacgggaaacuaugcaaacuaagagggguagccccauugcauuuggguaaauguaacauugcuggcuggauccugggaaauccagagugugaaucacucuccacagcaagcucaugguccuacauuguggaaacaucuaguucagacaauggaacguguuacccaggagauuucaucgauuaugaggagcuaagagagcaauugagcucagugucaucauuugaaagguuugagauauuccccaagacaaguucauggcccaaucaugacucgaacaaagguguaacggcagcauguccucaugcuggagcaaaaagcuucuacaaaaauuuaauauggcuaguuaaaaaaggaaauucauacccaaagcucagcaaauccuacauuaaugauaaagggaaagaaguccucgugcuauggggcauucaccauccaucuacuagugcugaccaacaaagccucuaucagaaugcagaugcauauguuuuuguggggacaucaagauacagcaagaaguucaagccggaaauagcaauaagacccaaagugagggaucaagaagggagaaugaacuauuacuggacacuaguagagccgggagacaaaauaacauucgaagcaacuggaaaucuagugguaccgagauaugcauucgcaauggaaagaaaugcuggaucugguauuaucauuucagauacaccaguccacgauugcaauacaacuugucagacacccaagggugcuauaaacaccagccucccauuucagaauauacauccgaucacaauuggaaaauguccaaaauauguaaaaagcacaaaauugagacuggccacaggauugaggaaugucccgucuauucaaucuagaggccuauuuggggccauugccgguuucauugaagggggguggacagggaugguagauggaugguacgguuaucaccaucaaaaugagcaggggucaggauaugcagccgaccugaagagcacacagaaugccauugacgagauuacuaacaaaguaaauucuguuauugaaaagaugaauacacaguucacagcaguagguaaagaguucaaccaccuggaaaaaagaauagagaauuuaaauaaaaaaguugaugaugguuuccuggacauuuggacuuacaaugccgaacuguugguucuauuggaaaaugaaagaacuuuggacuaccacgauucaaaugugaagaacuuauaugaaaagguaagaagccaguuaaaaaacaaugccaaggaaauuggaaacggcugcuuugaauuuuaccacaaaugcgauaacacgugcauggaaagugucaaaaaugggacuuaugacuacccaaaauacucagaggaagcaaaauuaaacagagaagagauagaugggguaaagcuggaaucaacaaggauuuaccagauuuuggcgaucuauucaacugucgccaguucauugguacugguagucucccugggggcaaucaguuucuggaugugcucuaaugggucucuacaguguagaauauguauuuaa

SEQ ID NO: 35319 - RNA, 1701 nt, Artificial Sequence
  derived and/or modified CDS sequence (wt) from hemagglutinin__InfluenzaA__ACV67227
augaaggcaauacuaguaguucugcuauauacauuugcaaccgcaaaugcagacacauuauguauagguuaucaugcgaacaauucaacagacacuguagacacaguacuagaaaagaauguaacaguaacacacucuguuaaccuucuagaagacaagcauaacgggaaacuaugcaaacuaagagggguagccccauugcauuuggguaaauguaacauugcuggcuggauccugggaaauccagagugugaaucacucuccacagcaagcucaugguccuacauuguggaaacaucuaguucagacaauggaacguguuacccaggagauuucaucgauuaugaggagcuaagagagcaauugagcucagugucaucauuugaaagguuugagauauuccccaagacaaguucauggcccaaucaugacucgaacaaagguguaacggcagcauguccucaugcuggagcaaaaagcuucuacaaaaauuuaauauggcuaguuaaaaaaggaaauucauacccaaagcucagcaaauccuacauuaaugauaaagggaaagaaguccucgugcuauggggcauucaccauccaucuacuagugcugaccaacaaagucucuaucagaaugcagaugcauauguuuuuguggggacaucaagauacagcaagaaguucaagccggaaauagcaauaagacccaaagugagggaucaagaagggagaaugaacuauuacuggacacuaguagagccgggagacaaaauaacauucgaagcaacuggaaaucuagugguaccgagauaugcauucgcaauggaaagaaaugcuggaucugguauuaucauuucaaauacaccaguccacgauugcaauacaacuugucagacacccaagggugcuauaaacaccagccucccauuucagaauauacauccgaucacaauuggaaaauguccaaaauauguaaaaagcacaaaauugagacuggccacaggauugaggaaugucccgucuauucaaucuagaggccuauuuggggccauugccgguuucauugaagggggguggacagggaugguagauggaugguacgguuaucaccaucaaaaugagcaggggucaggauaugcagccgaccugaagagcacacagaaugccauugacgagauuacuaacaaaguaaauucuguuauugaaaagaugaauacacaguucacagcaguagguaaagaguucaaccaccuggaaaaaagaauagagaauuuaaauaaaaagguugaugaugguuuccuggacauuuggacuuacaaugccgaacuguugguucuauuggaaaaugaaagaacuuuggacuaccacgauucaaaugugaagaacuuauaugaaaagguaagaagccaguuaaaaaacaaugccaaggaaauuggaaacggcugcuuugaauuuuaccacaaaugcgauaacacgugcauggaaagugucaaaaaugggacuuaugacuacccaaaauacucagaggaagcaaaauuaaacagagaagaaauagaugggguaaagcuggaaucaacaaggauuuaccagauuuuggcgaucuauucaacugucgccaguucauugguacugguagucucccugggggcaaucaguuucuggaugugcucuaaugggucucuacaguguagaauauguauuuaa

SEQ ID NO: 35320 - RNA, 1701 nt, Artificial Sequence; identical to SEQ ID NO: 34965
  derived and/or modified CDS sequence (wt) from hemagglutinin__InfluenzaA__ACV67228

SEQ ID NO: 35321 - RNA, 1701 nt, Artificial Sequence
  derived and/or modified CDS sequence (wt) from hemagglutinin__InfluenzaA__ACV67229
augaaggcaauacuaguaguucugcuauauacauuugcaaccgcaaaugcagacacauuauguauagguuaucaugcgaacaauucaacagacacuguagacacaguacuagaaaagaauguaacaguaacacacucuguuaaccuucuagaagacaagcauaacgggaaacuaugcaaacuaagagggguagccccauugcauuuggguaaauguaacauugcuggcuggauccugggaaauccagagugugaaucacucuccacagcaagcucaugguccuacauuguggaaacaucuaguucagacaauggaacguguuacccaggagauuucaucgauuaugaggagcuaagagagcaauugagcucagugucaucauuugaaagguuugagauauuccccaagacaaguucauggcccaaucaugacucgaacaaagguguaacggcagcauguccucaugcuggagcaaaaagcuucuacaaaaauuuaauauggcuaguuaaaaaaggaaauucauacccaaagcucagcaaauccuacauuaaugauaaagggaaagaaguccucgugcuauggggcauucaccauccaucuacuagugcugaccaacaaagucucuaucagaaugcagaugcauauguuuuuguggggacaucaagauacagcaagaaguucaagccggaaauagcaauaagacccaaagugagggaucaagaagggagaaugaacuauuacuggacacuaguagagccgggagacaaaauaacauucgaagcaacuggaaaucuagugguaccgagauaugcauucgcaauggaaagaaaugcuggaucugguauuaucauuucagauacaccaguccacgauugcaauacaacuugucagacacccaagggugcuauaaacaccagccucccauuucagaauauacauccgaucacaauuggaaaauguccaaaauauguaaaaagcacaaaauugagacuggccacaggauugaggaaugucccgucuauucaaucuagaggccuauuuggggccauugccgguuucauugaagggggguggacagggaugguagauggaugguacgguuaucaccaucaaaaugagcaggggucaggauaugcagccgaccugaagagcacacagaaucccauugacgagauuacuaacaaaguaaauucuguuauugaaaagaugaauacacaguucacagcaguagguaaagaguucaaccaccuggaaaaaagaauagagaauuuaaauaaaaaaguugaugaugguuuccuggacauuuggacuuacaaugccgaacuguugguucuauuggaaaaugaaagaacuuuggacuaccacgauucaaaugugaagaacuuauaugaaaagguaagaagccaguuaaaaaacaaugccaaggaaauuggaaacggcugcuuugaauuuuaccacaaaugcgauaacacgugcauggaaagugucaaaaaugggacuuaugacuacccaaaauacucagaggaagcaaaauuaaacagagaagaaauagaugggguaaagcuggaaucaacaaggauuuaccagauuuuggcgaucuauucaacugucgccaguucauugguacugguagucucccugggggcaaucaguuucuggaugugcucuaaugggucucuacaguguagaauauguauuuaa

SEQ ID NO: 35322 - RNA, 1701 nt, Artificial Sequence
  derived and/or modified CDS sequence (wt) from hemagglutinin__InfluenzaA__ACV67230
augaaggcaauacuaguaguucugcuauauacauuugcaaccgcaaaugcagacacauuauguauagguuaucaugcgaacaauucaacagacacuguagacacaguacuagaaaagaauguaacaguaacacacucuguuaaccuucuagaagacaagcauaacgggaaacuaugcaaacuaagagggguagccccauugcauuuggguaaauguaacauugcuggcuggauccugggaaauccagagugugaaucacucuccacagcaagcucaugguccuacauuguggaaacaucuaguucagacaauggaacguguuacccaggagauuucaucgauuaugaggaacuaagagagcaauugagcucagugucaucauuugaaagguuugagauauuccccaagacaaguucauggcccaaucaugacucgaacaaagguguaacggcagcauguccucaugcuggagcaaaaagcuucuacaaaaauuuaauauggcuaguuaaaaaaggaaauucauacccaaagcucagcaaauccuacauuaaugauaaagggaaagaaguccucgugcuauggggcauucaccauccaucuacuagugcugaccaacaaagucucuaucagaaugcagaugcauauguuuuuguggggucaucaagauacagcaagaaguucaagccggaaauagcaauaaggcccaaagugagggaucaagaagggagaaugaacuauuacuggacacuaguagagccgggagacaaaauaacauucgaagcaacuggaaaucuagugguaccgagauaugcauucgcaauggaaagaaaugcuggaucugguauuaucauuucagauacaccaguccacgauugcaauacaacuugucagacacccaagggugcuauaaacaccagccucccauuucagaauauacauccgaucacaauuggaaaauguccaaaauauguaaaaagcacaaaauugagacuggccacaggauugaggaaugucccgucuauucaaucuagaggccuauuuggggccauugccgguuucauugaagggggguggacagggaugguagauggaugguacgguuaucaccaucaaaaugagcaggggucaggauaugcagccgaccugaagagcacacagaaugccauugacgagauuacuaacaaaguaaauucuguuauugaaaagaugaauacacaguucacagcaguagguaaagaguucaaccaccuggaaaaaagaauagagaauuuaaauaaaaaaguugaugaugguuuccuggacauuuggacuuacaaugccgaacuguugguucuauuggaaaaugaaagaacuuuggacuaccacgauucaaaugugaagaacuuauaugaaaagguaagaagccagcuaaaaaacaaugccaaggaaauuggaaacggcugcuuugaauuuuaccacaaaugcgauaacacgugcauggaaagugucaaaaaugggacuuaugacuacccaaaauacucagaggaagcaaaauuaaacagagaagaaauagaugggguaaagcuggaaucaacaaggauuuaccagauuuuggcgaucuauucaacugucgccaguucauugguacugguagucucccugggggcaaucaguuucuggaugugcucuaaugggucucuacaguguagaauauguauuuaa

SEQ ID NO: 35323 - RNA, 1701 nt, Artificial Sequence; identical to SEQ ID NO: 34681
  derived and/or modified CDS sequence (wt) from hemagglutinin__InfluenzaA__ACV67231

SEQ ID NO: 35324 - RNA, 1701 nt, Artificial Sequence
  derived and/or modified CDS sequence (wt) from hemagglutinin__InfluenzaA__ACV67232
augaaggcaauacuaguaguucugcuauauacauuugcaaccgcaaaugcagacacauuauguauagguuaucaugcgaacaauucaacagacacuguagacacaguacuagaaaagaauguaacaguaacacacucuguuaaccuucuagaagacaagcauaacgggaaacuaugcaaacuaagagggguagccccauugcauuuggguaaauguaacauugcuggcuggauccugggaaauccagagugugaaucacucuccacagcaagcucaugguccuacauuguggaaacaucuaguucagacaauggaacguguuacccaggagauuucaucgauuaugaggagcuaagagagcaauugagcucagugucaucauuugaaagguuugagauauuccccaagacaaguucauggcccaaucaugacucgaacaaagguguaacggcagcauguccucaugcuggagcaaaaagcuucuacaaaaauuuaauauggcuaguuaaaaaaggaaauucauacccaaagcucagcaaauccuacauuaaugauaaagggaaagaaguccucgugcuauggggcauucaccauccaucuacuagugcugaccaacaaagucucuaucagaaugcagaugcauauguuuuuguggggacaucaagauacagcaagaaguucaagccggaaauagcaauaagacccaaagugagggaucaagaagggagaaugaacuauuacuggacacuaguagagccgggagacaaaauaacauucgaagcaacuggaaaucuagugguaccgagauaugcauucgcaauggaaagaaaugcuggaucugguauuaucauuucagauacaccaguccacgauugcaauacaacuugucagacacccaagggugcuauaaacaccagccucccauuucagaauauacauccgaucacaauuggaaaauguccaaaauauguaaaaagcacaaaauugagacuggccacaggauugaggaaugucccgucuauucaaucuagaggccuauuuggggccauugccgguuucauugaagggggguggacagggaugguagauggaugguacgguuaucaccaucaaaaugagcaggggucaggauaugcagccgaccugaagagcacacagaaugccauugacgagauuacuaacaaaguaaauucuguuauugaaaagaugaauacacaguucacagcaguagguaaagaguucaaccaccuggaaaaaagaauagagaauuuaaauaaaaaaguugaugaugguuuccuggacauuuggacuuacaaugccgaacuguugguucuauuggaaaaugaaagaacuuuggacuaccacgauucaaaugugaagaacuuauaugaaaagguaagaagccaguuaaaaaacaaugccaaggaaauuggaaacggcugcuuugaauuuuaccacaaaugcgauaacacgugcauggaaagugucaaaaaugggacuuaugacuacccaaaauacucagaggaagcaaaauuaaacagagaagaaauagaugggguaaagcuggaaucaacaaggauuuaccagauuuuggcgaucuauucaacugucgccaguucauugguacugguagucucccugggggcaaucaguuucuggaugugcucuaaugggucucuacaguguagaauauguauuuga

SEQ ID NO: 35325 - RNA, 1701 nt, Artificial Sequence; identical to SEQ ID NO: 34957
  derived and/or modified CDS sequence (wt) from hemagglutinin__InfluenzaA__ACV67233

SEQ ID NO: 35326 - RNA, 1701 nt, Artificial Sequence
  derived and/or modified CDS sequence (wt) from hemagglutinin__InfluenzaA__ACV67234
auggaggcaauacuaguaguucugcuauauacauuugcaaccgcaaaugcagacacauuauguauagguuaucaugcgaacaauucaacagacacuguagacacaguacuagaaaagaauguaacaguaacacacucuguuaaccuucuagaagacaagcauaacgggaaacuaugcaaacuaagagggguagccccauugcauuuggguaaauguaacauugcuggcuggauccugggaaauccagagugugaaucacucuccacagcaagcucaugguccuacauuguggaaacaucuaguucagacaauggaacguguuacccaggagauuucaucgauuaugaggagcuaagagagcaauugagcucagugucaucauuugaaagguuugagauauuccccaagacaaguucauggcccaaucaugacucgaacaaagguguaacggcagcauguccucaugcuggagcaaaaagcuucuacaaaaauuuaauauggcuaguuaaaaaaggaaauucauacccaaagcucagcaaauccuacauuaaugauaaagggaaagaaguccucgugcuauggggcauucaccauccaucuacuagugcugaccaacaaagucucuaucagaaugcagaugcauauguuuuuguggggucaucaagauacagcaagaaguucaagccagaaauagcaauaagacccaaagugagggaucaagaagggagaaugaacuauuacuggacacuaguagagccgggagacaaaauaacauucgaagcaacuggaaaucuagugguaccgagauaugcauucgcaauggaaagaaaugcuggaucugguauuaucauuucagauacaccaguccacgauugcaauacaacuugucagacacccaagggugcuauaaacaccagccucccauuucauaauauacauccgaucacaauuggaaaauguccaaaauauguaaaaagcacaaaauugagacuggccacaggauugaggaaugucccgucuauucaaucuagaggccuauuuggggccauugccgguuucauugaagggggguggacagggaugguagauggaugguacgguuaucaccaucaaaaugagcaggggucaggauaugcagccgaccuaaagagcacacagaaugccauugacgagauuacuaacaaaguaaauucuguuauugaaaagaugaauacacaguucacagcaguagguaaagaguucaaccaccuggaaaaaagaauagagaauuuaaauaaaaaaguugaugaugguuuccuggacauuuggacuuacaaugccgaacuguugguucuauuggaaaaugaaagaacuuuggacuaccacgauucaaaugugaagaacuuauaugaaaagguaagaagccaguuaaaaaacaaugccaaggaaauuggaaacggcugcuuugaauuuuaccacaaaugcgauaacacgugcauggaaagugucaaaaaugggacuuaugacuacccaaaauacucagaggaagcaaaauuaaacagagaagaaauagaugggguaaagcuggaaucaacaaggauuuaccagauuuuggcgaucuauucaacugucgccaguucauugguacugguagucucccugggggcaaucaguuucuggaugugcucuaaugggucucuacaguguagaauauguauuuaa

SEQ ID NO: 35327 - RNA, 1701 nt, Artificial Sequence
  derived and/or modified CDS sequence (wt) from hemagglutinin__InfluenzaA__ACV67235
augaaggcaauacuaguaguucugcuauauacauuugcaaccgcaaaugcagacacauuauguauagguuaucaugcgaacaauucaacagacacuguagacacaguacuagaaaagaauguaacaguaacacacucuguuaaccuucuagaagacaagcauaacgggaaacuaugcaaacuaagagggguagccccauugcauuuggguaaauguaacauugcuggcuggauccugggaaauccagagugugaaucacucuccacagcaagcucaugguccuacauuguggaaacaucuaguucagacaauggaacguguuacccaggagauuucaucgauuaugaggagcuaagagagcaauugagcucagugucaucauuugaaagguuugagauauuccccaagacaaguucauggcccaaucaugacucgaacaaagguguaacggcagcauguccucaugcuggagcaaaaagcuucuacaaaaauuuaauauggcuaguuaaaaaaggaaauucauacccaaagcucagcaaauccuacauuaaugauaaagggaaagaaguccucgugcuauggggcauucaccauccaucuacuagugcugaccaacaaagucucuaucagaaugcagaugcauauguuuuuguggggucaucaagauacagcaagaaguucaagccggaaauagcaauaagacccaaagugagggaucaagaagggagaaugaacuauuacuggacacuaguagagccgggagacaaaauaacauucgaagcaacuggaaaucuagugguaccgagauaugcauucgcaauggaaagaaaugcuggaucugguauuaucauuucagauacaccaguccacgauugcaauacaacuugucagacacccaagggugcuauaaacaccagccucccauuucagaauauacauccgaucacaauuggaaaauguccaaaauauguaaaaagcacaaaauugagacuggccacaggauugaggaaugucccgucuauucaaucuagaggccuauuuggggccauugccgguuucauugaagggggguggacagggaugguagauggaugguacgguuaucaccaucaaaaugagcaggggucaggauaugcagccgaccugaagagcacacagaaugccauugacgagauuacuaacaaaguaaauucuguuauugaaaagaugaauacacaguucacagcaguagguaaagaguucaaccaccuggaaaaaagaauagagaauuuaaauaaaaaaguugaugaugguuuccuggacauuuggacuuacaaugccgaacuguugguucuauuggaaaaugaaagaacuuuggacuaccacgauucaaaugugaagaacuuauaugaaaagguaagaagccagcuaaaaaacaaugccaaugaaauuggaaacggcugcuuugaauuuuaccacaaaugcgauaacacgugcauggaaagugucaaaaaugggacuuaugacuacccaaaauacucagaggaagcaaaauuaaacagagaagaaauagaugggguaaagcuggaaucaacaaggauuuaccagauuuuggcgaucuauucaacugucgccaguucauugguacugguagucucccugggggcaaucaguuucuggaugugcucuaaugggucucuacaguguagaauauguauuuaa

SEQ ID NO: 35328 - RNA, 1701 nt, Artificial Sequence; identical to SEQ ID NO: 34925
  derived and/or modified CDS sequence (wt) from hemagglutinin__InfluenzaA__ACV67236

SEQ ID NO: 35329 - RNA, 1701 nt, Artificial Sequence
  derived and/or modified CDS sequence (wt) from hemagglutinin__InfluenzaA__ACV67238
augaaggcaauacuaguaguucugcuauauacauuugcaaccgcaaaugcagacacauuauguauagguuaucaugcgaacaauucaacagacacuguagacacaguacuagaaaagaauguaacaguaacacacucuguuaaccuucuagaagacaagcauaacgggaaacuaugcaaacuaagagggguagccccauugcauuuggguaaauguaacauugcuggcuggauccugggaaauccagagugugaaucacucuccacagcaagcucaugguccuacauuguggaaacaucuaguucagacaauggaacguguuacccaggagauuucaucgauuaugaggagcuaagagagcaauugagcucagugucaucauuugaaagguuugagauauuccccaagacaaguucauggcccaaucaugacucgaacaaagguguaacggcagcauguccucaugcuggagcaaaaagcuucuacaaaaauuuaauauggcuaguuaaaaaaggaaauucauacccaaagcucagcaaauccuacauuaaugauaaagggaaagaaguccucguacuauggggcauucaccauccaucuacuagugcugaccaacaaagucucuaucagaaugcagaugcauauguuuuuguggggucaucaagauacagcaagaaguucaagccggaaauagcaauaagacccaaagugagggaucaagaagggagaaugaacuauuacuggacacuaguagagccgggagacaaaauaacauucgaagcaacuggaaaucuagugguaccgagauaugcauucgcaauggaaagaaaugcuggaucugguauuaucauuucagauacaccaguccacgauugcaauacaacuugucagacacccaagggugcuauaaacaccagccucccauuucagaauauacauccgaucacaauuggaaaauguccaaaauauguaaaaagcacaaaauugagacuggccacaggauugaggaaugucccgucuauucaaucuagaggccuauuuggggccauugccgguuucauugaaggaggguggacagggaugguagauggaugguacgguuaucaccaucaaaaugagcaggggucaggauaugcagccgaccugaagagcacacagaaugccauugacgagauuacuaacaaaguaaauucuguuauugaaaagaugaauacacaguucacagcaguagguaaagaguucaaccaccuggaaaaaagaauagagaauuuaaauaaaaaaguugaugaugguuuccuggacauuuggacuuacaaugccgaacuguugguucuauuggaaaaugaaagaacuuuggacuaccacgauucaaaugugaagaacuuauaugaaaagguaagaagccagcuaaaaaacaaugccaaggaaauuggaaacggcugcuuugaauuuuaccacaaaugcgauaacacgugcauggaaagugucaaaaaugggacuuaugacuacccaaaauacucagaggaagcaaaauuaaacagagaagaaauagaugggguaaagcuggaaucaacaaggauuuaccagauuuuggcgaucuauucaacugucgccaguucauuggugcugguagucucccugggggcaaucaguuucuggaugugcucuaaugggucucuacaguguagaauauguauuuaa

SEQ ID NO: 35330 - RNA, 1701 nt, Artificial Sequence
  derived and/or modified CDS sequence (wt) from hemagglutinin__InfluenzaA__ACV67239
augaaggcaauacuaguaguucugcuauauacauuuacaaccgcaaaugcagacacauuauguauagguuaucaugcgaacaauucaacagacacuguagacacaguacuagaaaagaauguaacaguaacacacucuguuaaccuucuagaagacaagcauaacgggaaacuaugcaaacuaagagggguagccccauugcauuuggguaaauguaacauugcuggcuggauccugggaaauccagagugugaaucacucuccacagcaagcucaugguccuacauuguggaaacaucuaguucagacaauggaacguguuacccaggagauuucaucgauuaugaggagcuaagagagcaauugagcucagugucaucauuugaaagguuugagauauuccccaagacaaguucauggcccaaucaugacucgaacaaagguguaacggcagcauguccucaugcuggagcaaaaagcuucuacaaaaauuuaauauggcuaguuaaaaaaggaaauucauacccaaagcucagcaaauccuacauuaaugauaaagggaaagaaguccucgugcuauggggcauucaccauccaucuacuagugcugaccaacaaagucucuaucagaaugcagaugcauauguuuuuguggggucaucaagauacagcaagaaguucaagccggaaauagcaauaagacccaaagugagggaucaagaagggagaaugaacuauuacuggacacuaguagagccgggagacaaaauaacauucgaagcaacuggaaaucuagugguaccgagauaugcauucgcaauggaaagaaaugcuggaucugguauuaucauuucagauacaccaguccacgauugcaauacaacuugucagacacccaagggugcuauaaacaccagccucccauuucagaauauacauccgaucacaauuggaaaauguccaaaauauguaaaaagcacaaaauugagacuggccacaggauugaggaaugucccgucuauucaaucuagaggccuauuuggggccauugccgguuucauugaagggggguggacagggaugguagauggaugguacgguuaucaccaucaaaaugagcaggggucaggauaugcagccgaccugaagagcacacagaaugccauugacgagauuacuaacaaaguaaauucuguuauugaaaagaugaauacacaguucacagcaguagguaaagaguucaaccaccuggaaaaaagaauagagaauuuaaauaaaaaaguugaugaugguuuccuggacauuuggacuuacaaugccgaacuguugguucuauuggaaaaugaaagaacuuuggacuaccacgauucaaaugugaagaacuuauaugaaaagguaagaagccagcuaaaaaacaaugccaaggaaauuggaaacggcugcuuugaauuuuaccacaaaugcaauaacacgugcauggaaagugucaaaaaugggacuuaugacuacccaaaauacucagaggaagcaaaauuaaacagagaagaaauagaugggguaaagcuggaaucaacaaggauuuaccagauuuuggcgaucuauucaacugucgccaguucauugguacugguagucucccugggggcaaucaguuucuggaugugcucuaaugggucucuacaguguagaauauguauuuaa

SEQ ID NO: 35331 - RNA, 1701 nt, Artificial Sequence; identical to SEQ ID NO: 34925
  derived and/or modified CDS sequence (wt) from hemagglutinin__InfluenzaA__ACV67240

SEQ ID NO: 35332 - RNA, 1701 nt, Artificial Sequence
  derived and/or modified CDS sequence (wt) from hemagglutinin__InfluenzaA__ACV67241
augaaggcaauacuaguaguucugcuauauacauuugcaaccgcaaaugcagacacauuauguauagguuaucaugcgaacaauucaacagacacuguagacacaguacuagaaaagaauguaacaguaacacacucuguuaaccuucuagaagacaagcauaacgggaaacuaugcaaacuaagagggguagccccauugcauuuggguaaauguaacauugcuggcuggauccugggaaauccagagugugaaucacucuccacagcaagcucaugguccuacauuguggaaacaucuaguucagacaauggaacguguuacccaggagauuucaucgauuaugaggagcuaagagagcaauugagcucagugucaucauuugaaagguuugagauauuccccaagacaaguucauggcccaaucaugacucgaacaaagguguaacggcagcauguccucaugcuggagcaaaaagcuucuacaaaaauuuaauauggcuaguuaaaaauggaaauucauacccaaagcucagcaaauccuacauuaaugauaaagggaaagaaguccucgugcuauggggcauucaccauccaucuacuagugcugaccaacaaagucucuaucagaaugcagaugcauauguuuuuguggggacaucaagauacagcaagaaguucaagccggaaauagcaauaagacccaaagugagggaucaagaagggagaaugaacuauuacuggacacuaguagagccgggagacaaaauaacauucgaagcaacuggaaaucuagugguaccgagauaugcauucgcaauggaaagaaaugcuggaucugguauuaucauuucagauacaccaguccacgauugcaauacaacuugucagacacccaagggugcuauaaacaccagccucccauuucagaauauacauccgaucacaauuggaaaauguccaaaauauguaaaaagcacaaaauugagacuggccacaggauugaggaaugucccgucuauucaaucuagaggccuauuuggggccauugccgguuucauugaagggggguggacagggaugguagauggaugguacgguuaucaccaucaaaaugagcaggggucaggauaugcagccgaccugaagagcacacagaaugccauugacgagauuacuaacaaaguaaauucuguuauugaaaagaugaauacacaguucacagcaguagguaaagaguucaaccaccuggaaaaaagaauagagaauuuaaauaaaaagguugaugaugguuuccuggacauuuggacuuacaaugccgaacuguugguucuauuggaaaaugaaagaacuuuggacuaccacgauucaaaugugaagaacuuauaugaaaagguaagaagccaguuaaaaaacaaugccaaggaaauuggaaacggcugcuuugaauuuuaccacaaaugcgauaacacgugcauggaaagugucaaaaaugggacuuaugacuacccaaaauacucagaggaagcaaaauuaaacagagaagaaauagaugggguaaagcuggaaucaacaaggauuuaccagauuuuggcgaucuauucaacugucgccaguucauugguacugguagucucccugggggcaaucaguuucuggaugugcucuaaugggucucuacaguguagaauauguauuuaa

SEQ ID NO: 35333 - RNA, 1701 nt, Artificial Sequence; identical to SEQ ID NO: 34965
  derived and/or modified CDS sequence (wt) from hemagglutinin__InfluenzaA__ACV67242

SEQ ID NO: 35334 - RNA, 1701 nt, Artificial Sequence
  derived and/or modified CDS sequence (wt) from hemagglutinin__InfluenzaA__ACV67244
augaaggcaauacuaguaguucugcuauauacauuugcaaccgcaaaugcagacacauuauguauagguuaucaugcgaacaauucaacagacacuguagacacaguacuagaaaagaauguaacaguaacacacucuguuaacauucuagaagacaagcauaacgggaaacuaugcaaacuaagagggguagccccauugcauuuggguaaauguaacauugcuggcuggauccugggaaauccagagugugaaucacucuccacagcaagcucaugguccuacauuguggaaacaucuaguucagacaauggaacgugcuacccaggagauuucaucgauuaugaggagcuaagagagcaauugagcucagugucaucauuugaaagguuugagauauuccccaagacaaguucauggcccaaucaugacucgaacaaagguguaacggcagcauguccucaugcuggagcaaaaagcuucuacaaaaauuuaauauggcuaguuaaaaaaggaaauucauacccaaagcucagcaaauccuacauuaaugauaaagggaaagaaguccucgugcuauggggcauucaccauccaucuacuagugcugaccaacaaagucucuaucagaaugcagaugcauauguuuuuguggggucaucaagauacagcaagaaguucaagccggaaauagcaauaagacccaaagugagggaucaagaagggagaaugaacuauuacuggacacuaguagagccgggagacaaaauaacauucgaagcaacuggaaaucuagugguaccgagauaugcauucgcaauggaaagaaaugcuggaucugguauuaucauuucagauacaccaguccacgauugcaauacaacuugucagacacccaagggugcuauaaacaccagccucccauuucagaauauacauccgaucacaauuggaaaauguccaaaauauguaaaaagcacaaaauugagacuggccacaggauugaggaaugucccgucuauucaaucuagaggccuauuuggggccauugccgguuucauugaagggggguggacagggaugguagauggaugguacgguuaucaccaucaaaaugagcaggggucaggauaugcagccgaccugaagagcacacagaaugccauugacgagauuacuaacaaaguaaauucuguuauugaaaagaugaauacacaguucacagcaguagguaaagaguucaaccaccuggaaaaaagaauagagaauuuaaauaaaaaaguugaugaugguuuccuggacauuuggacuuacaaugccgaacuguugguucuauuggaaaaugaaagaacuuuggacuaccacgauucaaaugugaagaacuuauaugaaaagguaagaagccagcuaaaaaacaaugccaaggaaauuggaaacggcugcuuugaauuuuaccacaaaugcgauaacacgugcauggaaagugucaaaaaugggacuuaugacuacccaaaauacucagaggaagcaaaauuaaacagagaagaaauagaugggguaaagcuggaaucaacaaggauuuaccagauuuuggcgaucuauucaacugucgccaguucauugguacugguagucucccugggggcaaucaguuucuggaugugcucuaaugggucucuacaguguagaauauguauuuaa

SEQ ID NO: 35335 - RNA, 1701 nt, Artificial Sequence
  derived and/or modified CDS sequence (wt) from hemagglutinin__InfluenzaA__ACV67246
augaaggcaauacuaguaguucugcuauauacauuuacaaccgcaaaugcagacacauuauguauagguuaucaugcgaacaauucaacagacacuguagacacaguacuagaaaagaauguaacaguaacacacucuguuaaccuucuagaagacaagcauaacgggaaacuaugcaaacuaagagggguagccccauugcauuuggguaaauguaacauugcuggcuggauccugggaaauccagagugugaaucacucuccacagcaagcucaugguccuacauuguggaaacaucuaguucagacaauggaacguguuacccaggagauuucaucgauuaugaggaacuaagagagcaauugagcucagugucaucauuugaaagguuugagauauuccccaagacaaguucauggcccaaucaugacucgaacaaagguguaacggcagcauguccucaugcuggagcaaaaagcuucuacaaaaauuuaauauggcuaguuaaaaaaggaaauucauacccaaagcucagcaaauccuacauuaaugauaaagggaaagaaguccucgugcuauggggcauucaccauccaucuacuagugcugaccaacaaagucucuaucagaaugcagaugcauauguuuuuguggggucaucaagauacagcaagaaguucaagccggaaauagcaauaaggcccaaagugagggaucaagaagggagaaugaacuauuacuggacacuaguagagccgggagacaaaauaacauucgaagcaacuggaaaucuagugguaccgagauaugcauucgcaauggaaagaaaugcuggaucugguauuaucauuucagauacaccaguccacgauugcaauacaacuugucagacacccaagggugcuauaaacaccagccucccauuucagaauauacauccgaucacaauuggaaaauguccaaaauauguaaaaagcacaaaauugagacuggccacaggauugaggaaugucccgucuauucaaucuagaggccuauuuggggccauugccgguuucauugaagggggguggacagggaugguagauggaugguacgguuaucaccaucaaaaugagcaggggucaggauaugcagccgaccugaagagcacacagaaugccauugacgagauuacuaacaaaguaaauucuguuauugaaaagaugaauacacaguucacagcaguagguaaagaguucaaccaccuggaaaaaagaauagagaauuuaaauaaaaaaguugaugaugguuuccuggacauuuggacuuacaaugccgaacuguugguucuauuggaaaaugaaagaacuuuggacuaccacgauucaaaugugaagaacuuauaugaaaagguaagaagccagcuaaaaaacaaugccaaggaaauuggaaacggcugcuuugaauuuuaccacaaaugcgauaacacgugcauggaaagugucaaaaaugggacuuaugacuacccaaaauacucagaggaagcaaaauuaaacagagaagaaauagaugggguaaagcuggaaucaacaaggauuuaccagauuuuggcgaucuauucaacugucgccaguucauugguacugguagucucccugggggcaaucaguuucuggaugugcucuaaugggucucuacaguguagaauauguauuuaa

SEQ ID NO: 35336 - RNA, 1701 nt, Artificial Sequence; identical to SEQ ID NO: 35305
  derived and/or modified CDS sequence (wt) from hemagglutinin__InfluenzaA__ACV67247

SEQ ID NO: 35337 - RNA, 1701 nt, Artificial Sequence; identical to SEQ ID NO: 34705
  derived and/or modified CDS sequence (wt) from hemagglutinin__InfluenzaA__ACV70073

SEQ ID NO: 35338 - RNA, 1701 nt, Artificial Sequence; identical to SEQ ID NO: 34705
  derived and/or modified CDS sequence (wt) from hemagglutinin__InfluenzaA__ACV70093

SEQ ID NO: 35339 - RNA, 1701 nt, Artificial Sequence; identical to SEQ ID NO: 34705
  derived and/or modified CDS sequence (wt) from hemagglutinin__InfluenzaA__ACV70103

SEQ ID NO: 35340 - RNA, 1701 nt, Artificial Sequence; identical to SEQ ID NO: 34705
  derived and/or modified CDS sequence (wt) from hemagglutinin__InfluenzaA__ACV70113

SEQ ID NO: 35341 - RNA, 1701 nt, Artificial Sequence; identical to SEQ ID NO: 34705
  derived and/or modified CDS sequence (wt) from hemagglutinin__InfluenzaA__ACV70123

SEQ ID NO: 35342 - RNA, 1701 nt, Artificial Sequence; identical to SEQ ID NO: 34705
  derived and/or modified CDS sequence (wt) from hemagglutinin__InfluenzaA__ACV70154

SEQ ID NO: 35343 - RNA, 1701 nt, Artificial Sequence
  derived and/or modified CDS sequence (wt) from hemagglutinin__InfluenzaA__ACV70164
augaaggcaauacuaguaguucugcuauauacauuuacaaccgcaaaugcagacacauuauguauagguuaucaugcgaacaauucaacagacacuguagacacaguacuagaaaagaauguaacaguaacacacucuguuaaccuucuagaagacaagcauaacgggaaacuaugcaaacuaagagggguagccccauugcauuuggguaaauguaacauugcuggcuggauccugggaaauccagagugugaaucacucuccacagcaagcucaugguccuacauuguggaaacaucuaguucagacaauggaacguguuacccaggagauuucaucgauuaugaggagcuaagagaacaauugagcucagugucaucauuugaaagauuugagauauuccccaagacaaguucauggcccaaucaugacucgaacaaagguguaacggcagcauguccucaugcuggagcaaaaagcuucuacaaaaauuuaauauggcuaguuaaaaaaggaaauucauacccaaagcucagcaaauccuacauuaaugauaaagggaaagaaguccucgugcuauggggcauucaccauccaucuacuagugcugaccaacaaagucucuaucagaaugcagaugcauauguuuuuguggggucaucaagauacagcaagaaguucaagccggaaauagcaauaagacccaaagugagggaucaagaggggagaaugaacuauuacuggacacuaguagagccgggagacaaaauaacauucgaagcaacuggaaaucuagugguaccgagauaugcauucgcaauggaaagaaaugcuggaucugguauuaucauuucagauacaccaguccacgauugcaauacaacuugucagacacucaagggugcuauaaacaccagccucccauuucagaauauacauccgaucacaauuggaaaauguccaaaauauguaaaaagcacaaaauugagacuggccacaggauugaggaaugucccgucuauucaaucuagaggccuauuuggggccauugccgguuucauugaagggggguggacagggaugguagauggaugguacgguuaucaccaucaaaaugagcaggggucaggauaugcagccgaccugaagagcacacagaaugccauugacgagauuacuaacaaaguaaauucuguuauugaaaagaugaauacacaguucacagcaguagguaaagaguucaaccaccuggaaaaaagaauagagaauuuaaauaaaaaaguugaugaugguuuccuggacauuuggacuuacaaugccgaacuguugguucuauuggaaaaugaaagaacuuuggacuaccacgauucaaaugugaagaacuuauaugaaaagguaagaagccagcuaaaaaacaaugccaaggaaauuggaaacggcugcuuugaauuuuaccacaaaugcgauaacacgugcauggaaagugucaaaaaugggacuuaugacuacccaaaauacucagaggaagcaaaauuaaacagagaagaaauagaugggguaaagcuggaaucaacaaggauuuaccagauuuuggcgaucuauucaacugucgccaguucauugguacugguagucucccugggggcaaucaguuucuggaugugcucuaaugggucucuacaguguagaauauguauuuaa

SEQ ID NO: 35344 - RNA, 1701 nt, Artificial Sequence; identical to SEQ ID NO: 34705
  derived and/or modified CDS sequence (wt) from hemagglutinin__InfluenzaA__ACV70174

SEQ ID NO: 35345 - RNA, 1701 nt, Artificial Sequence
  derived and/or modified CDS sequence (wt) from hemagglutinin__InfluenzaA__ACV70184
augaaggcaauacuaguaguucugcuauauacauuugcaaccgcaaaugcagacacauuauguauagguuaucaugcgaacaauucaacagacacuguagacacaguacuagaaaagaauguaacaguaacacacucuguuaaccuucuagaagacaagcauaacgggaaacuaugcaaacuaagagggguagccccauugcauuuggguaaauguaacauugcuggcuggauccugggaaauccagagugugaaucacucuccacagcaagcucaugguccuacauuguggaaacaucuaguucagacaauggaacguguuacccaggagauuucaucgauuaugaggagcuaagagagcaauugagcucagugucaucauuugaaagguuugagauauuccccaagacaaguucauggcccaaucaugacucgaacaaagguguaacggcagcauguccucaugcuggagcaaaaagcuucuacaaaaauuuaauauggcuaguuaaaaaaggaaauucauacccaaagcucagcaaauccuacauuaaugauaaagggaaagaaguccucgugcuauggggcauucaccauccaucuacuagugcugaccaacaaagucucuaucagaaugcagaugcauauguuuuuguggggucaucaagauacagcaagaaguucaagccggaaauagcaauaagacccaaagugagggaucaagaagggagaaugaacuauuacuggacacuaguagagccgggagacaaaauaacauucgaagcaacuggaaaucuagugguaccgagauaugcauucgcaauggaaagaaaugcuggaucugguauuaucauuucagauacaccaguccacgauugcaauacaacuugucagacacccaagggugcuauaaacaccagccucccauuucagaauauacauccgaucacaauuggaaaauguccaaaauauguaaaaagcacaaaauugagacuggccacaggauugaggaaugucccgucuauucaaucuagaggccuauuuggggccauugccgguuucauugaagggggguggacagggaugguagauggaugguacgguuaucaccaucaaaaugagcaggggucaggauaugcagccgaccugaagagcacacagaaugccauugacgagauuacuaacaaaguaaauucuguuauugaaaagaugaauacacaguucacagcaguagguaaagaguucaaccaccuagaaaaaagaauagagaauuuaaauaaaaaaguugaugaugguuuccuggacauuuggacuuacaaugccgaacuguugguucuauuggaaaaugaaagaacuuuggacuaccacgauucaaaugugaagaacuuauaugaaaagguaagaagccaguuaaaaaacaaugccaaggaaauuggaaacggcugcuuugaauuuuaccacaaaugcgauaacacgugcauggaaagugucaaaaaugggacuuaugacuacccaaaauacucagaggaagcaaaauuaaacagagaagaaauagaugggguaaagcuggaaucaacaaggauuuaccagauuuuggcgaucuauucaacugucgccaguucauugguacugguagucucccugggggcaaucaguuucuggaugugcucuaaugggucucuacaguguagaauauguauuuaa

SEQ ID NO: 35346 - RNA, 1701 nt, Artificial Sequence; identical to SEQ ID NO: 34705
  derived and/or modified CDS sequence (wt) from hemagglutinin__InfluenzaA__ACV70194

SEQ ID NO: 35347 - RNA, 1701 nt, Artificial Sequence
  derived and/or modified CDS sequence (wt) from hemagglutinin__InfluenzaA__ACV70204
augaaggcaauacuaguaguucugcuauauacauuugcaaccgcaaaugcagacacauuauguauagguuaucaugcgaacaauucaacagacacuguagacacaguacuagaaaagaauguaacaguaacacacucuguuaaccuuuuagaagacaagcauaacgggaaacuaugcaaacuaagagggguagccccauugcauuuggguaaauguaacauugcuggcuggauccugggaaauccagagugugaaucacucuccacagcaagcucaugguccuacauuguggaaacaucuaguucagacaauggaacguguuacccaggagauuucaucgauuaugaggagcuaagagagcaauugagcucagugucaucauuugaaagguuugagauauuccccaagacaaguucauggcccaaucaugacucgaacaaagguguaacggcagcauguccucaugcuggagcaaaaagcuucuacaaaaauuuaauauggcuaguuaaaaaaggaaauucauacccaaagcucagcaaauccuacauuaaugauaaagggaaagaaguccucguacuauggggcauucaccauccaucuacuagugcugaccaacaaagucucuaucagaaugcagaugcauauguuuuuguggggucaucaagauacagcaagaaguucaagccggaaauagcaauaagacccaaagugagggaucaagaagggagaaugaacuauuacuggacacuaguagagccgggagacaaaauaacauucgaagcaacuggaaaucuagugguaccgagauaugcauucgcaauggaaagaaaugcuggaucugguauuaucauuucagauacaccaguccacgauugcaauacaacuugucagacacccaagggugcuauaaacaccagccucccauuucagaauauacauccgaucacaauuggaaaauguccaaaauauguaaaaagcacaaaauugagacuggccacaggauugaggaaugucccgucuauucaaucuagaggccuauuuggggccauugccgguuucauugaagggggguggacagggaugguagauggaugguacgguuaucaccaucaaaaugagcaggggucaggauaugcagccgaccugaagagcacacagaaugccauugacgagauuacuaacaaaguaaauucuguuauugaaaagaugaauacacaguucacagcaguagguaaagaguucaaccaccuggaaaaaagaauagagaauuuaaauaaaaaaguugaugaugguuuccuggacauuuggacuuacaaugccgaacuguugguucuauuggaaaaugaaagaacuuuggacuaccacgauucaaaugugaagaacuuauaugaaaagguaagaagccaguuaaaaaacaaugccaaggaaauuggaaacggcugcuuugaauuuuaccacaaaugcgauaacacgugcauggaaagugucaaaaaugggacuuaugacuacccaaaauacucagaggaagcaaaauuaaacagagaagaaauagaugggguaaagcuggaaucaacaaggauuuaccagauuuuggcgaucuauucaacugucgccaguucauugguacugguagucucccugggggcaaucaguuucuggaugugcucuaaugggucucuacaguguagaauauguauuuaa

SEQ ID NO: 35348 - RNA, 1701 nt, Artificial Sequence; identical to SEQ ID NO: 34676
  derived and/or modified CDS sequence (wt) from hemagglutinin__InfluenzaA__ACV70214

SEQ ID NO: 35349 - RNA, 1701 nt, Artificial Sequence; identical to SEQ ID NO: 34705
  derived and/or modified CDS sequence (wt) from hemagglutinin__InfluenzaA__ACV70224

SEQ ID NO: 35350 - RNA, 1701 nt, Artificial Sequence; identical to SEQ ID NO: 34705
  derived and/or modified CDS sequence (wt) from hemagglutinin__InfluenzaA__ACV70234

SEQ ID NO: 35351 - RNA, 1701 nt, Artificial Sequence
  derived and/or modified CDS sequence (wt) from hemagglutinin__InfluenzaA__ACV70254
augaaggcaauacuaguaguucugcuauauacauuugcaaccgcaaaugcagacacauuauguauagguuaucaugcgaacaauucaacagacacuguagacacaguacuagaaaagaauguaacaguaacacacucuguuaaccuucuagaagacaagcauaacggaaaacuaugcaaacuaagagggguagccccauugcauuuggguaaauguaacauugcuggcuggauccugggaaauccagagugugaaucacucuccacagcaagcucaugguccuacauuguggaaacaucuaguucagacaauggaacguguuacccaggagauuucaucgauuaugaggagcuaagagagcaauugagcucagugucaucauuugaaagguuugagauauuccccaagacaaguucauggcccaaucaugacucgaacaaagguguaacggcagcauguccucaugcuggagcaaaaagcuucuacaaaaauuuaauauggcuaguuaaaaaaggaaauucauacccaaagcucagcaaauccuacauuaaugauaaagggaaagaaguccucgugcuauggggcauucaccauccaucuacuagugcugaccaacaaagucucuaucagaaugcagaugcauauguuuuuguggggucaucaagauacagcaagaaguucaagccggaaauagcaauaagacccaaagugagggaucaagaagggagaaugaacuauuacuggacacuaguagagccgggagacaaaauaacauucgaagcaacuggaaaucuagugguaccgagauaugcauucgcaauggaaagaaaugcuggaucugguauuaucauuucagauacaccaguccacgauugcaauacaacuugucagacacccaagggugcuauaaacaccagccucccauuucagaauauacauccgaucacaauuggaaaauguccaaaauauguaaaaagcacaaaauugagacuggccacaggauugaggaaugucccgucuauucaaucuagaggccuauuuggggccauugccgguuucauugaagggggguggacagggaugguagauggaugguacgguuaucaccaucaaaaugagcaggggucaggauaugcagccgaccugaagagcacacagaaugccauugacgagauuacuaacaaaguaaauucuguuauugaaaagaugaauacacaguucacagcaguagguaaagaguucaaccaccuggaaaaaagaauagagaauuuaaauaaaaaaguugaugaugguuuccuggacauuuggacuuacaaugccgaacuguugguucuauuggaaaaugaaagaacuuuggacuaccacgauucaaaugugaagaacuuauaugaaaagguaagaagccaguuaaaaaacaaugccaaggaaauuggaaacggcugcuuugaauuuuaccacaaaugcgauaacacgugcauggaaagugucaaaaaugggacuuaugacuacccaaaauacucagaggaagcaaaauuaaacagagaagaaauagaugggguaaagcuggaaucaacaaggauuuaccagauuuuggcgaucuauucaacugucgccaguucauugguacugguagucucccugggggcaaucaguuucuggaugugcucuaaugggucucuacaguguagaauauguauuuaa

SEQ ID NO: 35352 - RNA, 1701 nt, Artificial Sequence
  derived and/or modified CDS sequence (wt) from hemagglutinin__InfluenzaA__ACV70264
augaaggcaauacuaguaguucugcuauauacauuugcaaccgcaaaugcagacacauuauguauagguuaucaugcgaacaauucaacagacacuguagacacaguacuagaaaagaauguaacaguaacacacucuguuaaccuucuagaagacaagcauaacgggaaacuaugcaaacuaagagggguagccccauugcauuuggguaaauguaacauugcuggcuggauccugggaaauccagagugugaaucacucuccacagcaagcucaugguccuacauuguggaaacaucuaguucagacaauggaacguguuacccaggagauuucaucgauuaugaggagcuaagagagcaauugagcucagugucaucauuugaaagguuugagauauuccccaagacaaguucauggcccaaucaugacucgaacaaagguguaacggcagcauguccucaugcuggagcaaaaagcuucuacaaaaauuuaauauggcuaguuaaaaaaggaaauucauacccaaagcucagcaaauccuacauuaaugauaaagggaaagaaguccucgugcuauggggcauucaccauccaucuacuagugcugaccaacaaagucucuaucagaaugcagaugcauauguuuuuguggggucaucaagauacagcaagaaguucaagccggaaauagcaauaagacccaaggugagggaucaagaagggagaaugaacuauuacuggacacuaguagagccgggagacaaaauaacauucgaagcaacuggaaaucuagugguaccgagauaugcauucgcaauggaaagaaaugcuggaucugguauuaucauuucagauacaccaguccacgauugcaauacaacuugucagacacccaagggugcuauaaacaccagccucccauuucagaauauacauccgaucacaauuggaaaauguccaaaauauguaaaaagcacaaaauugagacuggccacaggauugaggaaugucccgucuauucaaucuagaggccuauuuggggccauugccgguuucauugaagggggguggacaggaaugguagauggaugguacgguuaucaccaucaaaaugagcaggggucaggauaugcagccgaccugaagagcacacagaaugccauugacgagauuacuaacaaaguaaauucuguuauugaaaagaugaauacacaguucacagcaguagguaaagaguucaaccaccuggaaaaaagaauagagaauuuaaauaaaaaaguugaugaugguuuccuggacauuuggacuuacaaugccgaacuguugguucuauuggaaaaugaaagaacuuuggacuaccacgauucaaaugugaagaacuuauaugaaaagguaagaagccaguuaaaaaacaaugccaaggaaauuggaaacggcugcuuugaauuuuaccacaaaugcgauaacacgugcauggaaagugucaaaaaugggacuuaugacuacccaaaauacucagaggaagcaaaauuaaacagagaagaaauagaugggguaaagcuggaaucaacaaggauuuaccagauuuuggcgaucuauucaacugucgccaguucauugguacugguagucucccugggggcaaucaguuucuggaugugcucuaaugggucucuacaguguagaauauguauuuaa

SEQ ID NO: 35353 - RNA, 1701 nt, Artificial Sequence; identical to SEQ ID NO: 34705
  derived and/or modified CDS sequence (wt) from hemagglutinin__InfluenzaA__ACV70274

SEQ ID NO: 35354 - RNA, 1701 nt, Artificial Sequence; identical to SEQ ID NO: 34705
  derived and/or modified CDS sequence (wt) from hemagglutinin__InfluenzaA__ACV70284

SEQ ID NO: 35355 - RNA, 1701 nt, Artificial Sequence; identical to SEQ ID NO: 34705
  derived and/or modified CDS sequence (wt) from hemagglutinin__InfluenzaA__ACV70294

SEQ ID NO: 35356 - RNA, 1701 nt, Artificial Sequence; identical to SEQ ID NO: 34705
  derived and/or modified CDS sequence (wt) from hemagglutinin__InfluenzaA__ACV70304

SEQ ID NO: 35357 - RNA, 1701 nt, Artificial Sequence
  derived and/or modified CDS sequence (wt) from hemagglutinin__InfluenzaA__ACV70314
augaaggcaauacuaguaguucugcuauauacauuuacaaccgcaaaugcagacacauuauguauagguuaucaugcgaacaauucaacagacacuguagacacaguacuagaaaagaauguaacaguaacacacucuguuaaccuucuagaagacaagcauaacgggaaacuaugcaaacuaagagggguagccccauugcauuuggguaaauguaacauugcuggcuggauccugggaaauccagagugugaaucacucuccacagcaagcucaugguccuacauuguggaaacaucuaguucagacaauggaacguguuacccaggagauuucaucgauuaugaggagcuaagagagcaauugagcucagugucaucauuugaaagguuugagauauuccccaagacaaguucauggcccaaucaugacucgaacaaagguguaacggcagcauguccucaugcuggagcaaaaagcuucuacaaaaauuuaauauggcuaguuaaaaaaggaaauucauacccaaagcucagcaaauccuacauuaaugauaaagggaaagaaguccucgugcuauggggcauucaccauccaucuacuagugcugaccaacaaagucucuaucagaaugcagaugcauauguuuuuguggggucaucaagauacagcaagaaguucaagccggaaauagcaauaagacccaaagugagggaucaagaggggagaaugaacuauuacuggacacuaguagagccgggagacaaaauaacauucgaagcaacuggaaaucuagugguaccgagauaugcauucgcaauggaaagaaaugcuggaucugguauuaucauuucagauacaccaguccacgauugcaauacaacuugucagacacucaagggugcuauaaacaccagccucccauuucagaauauacauccgaucacaauuggaaaauguccaaaauauguaaaaagcacaaaauugagacuggccacaggauugaggaaugucccgucuauucaaucuagaggccuauuuggggccauugccgguuucauugaagggggguggacagggaugguagauggaugguacgguuaucaccaucaaaaugagcaggggucaggauaugcagccgaccugaagagcacacagaaugccauugacgagauuacuaacaaaguaaauucuguuauugaaaagaugaauacacaguucacagcaguagguaaagaguucaaccaccuggaaaaaagaauagagaauuuaaauaaaaaaguugaugaugguuuccuggacauuuggacuuacaaugccgaacuguugguucuauuggaaaaugaaagaacuuuggacuaccacgauucaaaugugaagaacuuauaugaaaagguaagaagccagcuaaaaaacaaugccaaggaaauuggaaacggcugcuuugaauuuuaccacaaaugcgauaacacgugcauggaaagugucaaaaaugggacuuaugacuacccaaaauacucagaggaagcaaaauuaaacagagaagaaauagaugggguaaagcuggaaucaacaaggauuuaccagauuuuggcgaucuauucaacugucgccaguucauugguacugguagucucccugggggcaaucaguuucuggaugugcucuaaugggucucuacaguguagaauauguauuuaa

SEQ ID NO: 35358 - RNA, 1701 nt, Artificial Sequence
  derived and/or modified CDS sequence (wt) from hemagglutinin__InfluenzaA__ACV70324
augaaggcaauacuaguaguucugcuauauacauuugcaaccgcaaaugcagacacauuauguauagguuaucaugcgaacaauucaacagacacuguagacacaguacuagaaaagaauguaacaguaacacacucuguuaaccuucuagaagacaagcauaacgggaaacuaugcaaacuaagagggguagccccauugcauuuggguaaauguaacauugcuggcuggauccugggaaauccagagugugaaucacucuucacagcaagcucaugguccuacauuguggaaacaucuaguucagacaauggaacguguuacccaggagauuucaucgauuaugaggagcuaagagagcaauugagcucagugucaucauuugaaagguuugagauauuccccaagacaaguucauggcccaaucaugacucgaacaaagguguaacggcagcauguccucaugcuggagcaaaaagcuucuacaaaaauuuaauauggcuaguuaaaaaaggaaauucauacccaaagcucagcaaauccuacauuaaugauaaagggaaagaaguccucgugcuauggggcauucaccauccaucuacuagugcugaccaacaaagucucuaucagaaugcagaugcauauguuuuuguggggucaucaagauacagcaagaaguucaagccggaaauagcaauaagacccaaagugagggaucaagaagggagaaugaacuauuacuggacacuaguagagccgggagacaaaauaacauucgaagcaacuggaaaucuagugguaccgagauaugcauucgcaauggaaagaaaugcuggaucugguauuaucauuucagauacaccaguccacgauugcaauacaacuugucagacacccaagggugcuauaaacaccagccucccauuucagaauauacauccgaucacaauuggaaaauguccaaaauauguaaaaagcacaaaauugagacuggccacaggauugaggaaugucccgucuauucaaucuagaggccuauuuggggccauugccgguuucauugaagggggguggacagggaugguagauggaugguacgguuaucaccaucaaaaugagcaggggucaggauaugcagccgaccugaagagcacacagaaugccauugacgagauuacuaacaaaguaaauucuguuauugaaaagaugaauacacaguucacagcaguagguaaagaguucaaccaccuggaaaaaagaauagagaauuuaaauaaaaaaguugaugaugguuuccuggacauuuggacuuacaaugccgaacuguugguucuauuggaaaaugaaagaacuuuggacuaccacgauucaaaugugaagaacuuauaugaaaagguaagaagccaguuaaaaaacaaugccaaggaaauuggaaacggcugcuuugaauuuuaccacaaaugcgauaacacgugcauggaaagugucaaaaaugggacuuaugacuacccaaaauacucagaggaagcaaaauuaaacagagaagaaauagaugggguaaagcuggaaucaacaaggauuuaccagauuuuggcgaucuauucaacugucgccaguucauugguacugguagucucccugggggcaaucaguuucuggaugugcucuaaugggucucuacaguguagaauauguauuuaa

SEQ ID NO: 35359 - RNA, 1701 nt, Artificial Sequence; identical to SEQ ID NO: 34705
  derived and/or modified CDS sequence (wt) from hemagglutinin__InfluenzaA__ACV70334

SEQ ID NO: 35360 - RNA, 1701 nt, Artificial Sequence
  derived and/or modified CDS sequence (wt) from hemagglutinin__InfluenzaA__ACV70344
augaaggcaauacuaguaguucugcuauauacauuugcaaccgcaaaugcagacacauuauguauagguuaucaugcgaacaauucaacagacacuguagacacaguacuagaaaagaauguaacaguaacacacucuguuaaccuucuagaagacaagcauaacgggaaacuaugcaaacuaagagggguagccccauugcauuuggguaaauguaacauugcuggcuggauccugggaaauccagagugugaaucacucuccacagcaagcucaugguccuacauuguggaaacaucuaguucagacaauggaacguguuacccaggagauuucaucgauuaugaggagcuaagagagcaauugagcucagugucaucauuugaaagguuugagauauuccccaagacaaguucauggcccaaucaugacucgaacaaagguguaacggcagcaugcccucaugcuggagcaaaaagcuucuacaaaaauuuaauauggcuaguuaaaaaaggaaauucauacccaaagcucagcaaauccuacauuaaugauaaagggaaagaaguccucgugcuauggggcauucaccauccaucuacuagugcugaccaacaaagucucuaucagaaugcagaugcauauguuuuuguggggucaucaagauacagcaagaaguucaagccggaaauagcaauaagacccaaagugagggaucaagaagggagaaugaacuauuacuggacacuaguagagccgggagacaaaauaacauucgaagcaacuggaaaucuagugguaccgagauaugcauucgcaauggaaagaaaugcuggaucugguauuaucauuucagauacaccaguccacgauugcaauacaacuugucagacacccaagggugcuauaaacaccagccucccauuucagaauauacauccgaucacaauuggaaaauguccaaaauauguaaaaagcacaaaauugagacuggccacaggauugaggaaugucccgucuauucaaucuagaggccuauuuggggccauugccgguuucauugaagggggguggacagggaugguagauggaugguacgguuaucaccaucaaaaugagcaggggucaggauaugcagccgaccugaagagcacacagaaugccauugacgagauuacuaacaaaguaaauucuguuauugaaaagaugaauacacaguucacagcaguagguaaagaguucaaccaccuggaaaaaagaauagagaauuuaaauaaaaaaguugaugaugguuuccuggacauuuggacuuacaaugccgaacuguugguucuauuggaaaaugaaagaacuuuggacuaccacgauucaaaugugaagaacuuauaugaaaagguaagaagccaguuaaaaaacaaugccaaggaaauuggaaacggcugcuuugaauuuuaccacaaaugcgauaacacgugcauggaaagugucaaaaaugggacuuaugacuacccaaaauacucagaggaagcaaaauuaaacagagaagaaauagaugggguaaagcuggaaucaacaaggauuuaccagauuuuggcgaucuauucaacugucgccaguucauugguacugguagucucccugggggcaaucaguuucuggaugugcucuaaugggucucuacaguguagaauauguauuuaa

SEQ ID NO: 35361 - RNA, 1701 nt, Artificial Sequence; identical to SEQ ID NO: 34705
  derived and/or modified CDS sequence (wt) from hemagglutinin__InfluenzaA__ACV70354

SEQ ID NO: 35362 - RNA, 1701 nt, Artificial Sequence; identical to SEQ ID NO: 34705
  derived and/or modified CDS sequence (wt) from hemagglutinin__InfluenzaA__ACV70364

SEQ ID NO: 35363 - RNA, 1701 nt, Artificial Sequence; identical to SEQ ID NO: 34705
  derived and/or modified CDS sequence (wt) from hemagglutinin__InfluenzaA__ACV70374

SEQ ID NO: 35364 - RNA, 1701 nt, Artificial Sequence; identical to SEQ ID NO: 34705
  derived and/or modified CDS sequence (wt) from hemagglutinin__InfluenzaA__ACV70384

SEQ ID NO: 35365 - RNA, 1701 nt, Artificial Sequence; identical to SEQ ID NO: 34705
  derived and/or modified CDS sequence (wt) from hemagglutinin__InfluenzaA__ACV70394

SEQ ID NO: 35366 - RNA, 1701 nt, Artificial Sequence; identical to SEQ ID NO: 34705
  derived and/or modified CDS sequence (wt) from hemagglutinin__InfluenzaA__ACV70404

SEQ ID NO: 35367 - RNA, 1701 nt, Artificial Sequence; identical to SEQ ID NO: 35357
  derived and/or modified CDS sequence (wt) from hemagglutinin__InfluenzaA__ACV70414

SEQ ID NO: 35368 - RNA, 1701 nt, Artificial Sequence; identical to SEQ ID NO: 34705
  derived and/or modified CDS sequence (wt) from hemagglutinin__InfluenzaA__ACV70424

SEQ ID NO: 35369 - RNA, 1701 nt, Artificial Sequence; identical to SEQ ID NO: 34705
  derived and/or modified CDS sequence (wt) from hemagglutinin__InfluenzaA__ACV70434

SEQ ID NO: 35370 - RNA, 1701 nt, Artificial Sequence; identical to SEQ ID NO: 34705
  derived and/or modified CDS sequence (wt) from hemagglutinin__InfluenzaA__ACV70444

SEQ ID NO: 35371 - RNA, 1701 nt, Artificial Sequence
  derived and/or modified CDS sequence (wt) from hemagglutinin__InfluenzaA__ACV70454
augaaggcaauacuaguaguucugcuauauacauuugcaaccgcaaaugcagacacauuauguauagguuaucaugcgaacaauucaacagacacuguagacacaguacuagaaaagaauguaacaguaacacacucuguuaaccuucuagaagacaagcauaacgggaaacuaugcaaacuaagagggguagccccauugcauuuggguaaauguaacauugcuggcuggauccugggaaauccagagugugaaucacucuccacagcaagcucaugguccuacauuguggaaacaucuaguucagacaauggaacguguuacccaggagauuucaucgauuaugaggagcuaagagagcaauugagcucagugucaucauuugaaagguuugagauauuccccaagacaaguucauggcccaaucaugacucgaacaaagguguaacggcagcauguccucaugcuggagcaaaaagcuucuacaaaaauuuaauauggcuaguuaaaaaagggaauucauacccaaagcucagcaaauccuacauuaaugauaaagggaaagaaguccucgugcuauggggcauucaccauccaucuacuagugcugaccaacaaagucucuaucagaaugcagaugcauauguuuuuguggggucaucaagauacagcaagaaguucaagccggaaauagcaauaagacccaaagugagggaucaagaagggagaaugaacuauuacuggacacuaguagagccgggagacaaaauaacauucgaagcaacuggaaaucuagugguaccgagauaugcauucgcaauggaaagaaaugcuggaucugguauuaucauuucagauacaccaguccacgauugcaauacaacuugucagacacccaagggugcuauaaacaccagccucccauuucagaauauacauccgaucacaauuggaaaauguccaaaauauguaaaaagcacaaaauugagacuggccacaggauugaggaaugucccgucuauucaaucuagaggccuauuuggggccauugccgguuucauugaagggggguggacagggaugguagauggaugguacgguuaucaccaucaaaaugagcaggggucaggauaugcagccgaccugaagagcacacagaaugccauugacgagauuacuaacaaaguaaauucuguuauugaaaagaugaauacacaguucacagcaguagguaaagaguucaaccaccuggaaaaaagaauagagaauuuaaauaaaaaaguugaugaugguuuccuggacauuuggacuuacaaugccgaacuguugguucuauuggaaaaugaaagaacuuuggacuaccacgauucaaaugugaagaacuuauaugaaaagguaagaagccaguuaaaaaacaaugccaaggaaauuggaaacggcugcuuugaauuuuaccacaaaugcgauaacacgugcauggaaagugucaaaaaugggacuuaugacuacccaaaauacucagaggaagcaaaauuaaacagagaagaaauagaugggguaaagcuggaaucaacaaggauuuaccagauuuuggcgaucuauucaacugucgccaguucauugguacugguagucucccugggggcaaucaguuucuggaugugcucuaaugggucucuacaguguagaauauguauuuaa

SEQ ID NO: 35372 - RNA, 1701 nt, Artificial Sequence; identical to SEQ ID NO: 35371
  derived and/or modified CDS sequence (wt) from hemagglutinin__InfluenzaA__ACV70464

SEQ ID NO: 35373 - RNA, 1701 nt, Artificial Sequence; identical to SEQ ID NO: 34705
  derived and/or modified CDS sequence (wt) from hemagglutinin__InfluenzaA__ACV70474

SEQ ID NO: 35374 - RNA, 1701 nt, Artificial Sequence; identical to SEQ ID NO: 34705
  derived and/or modified CDS sequence (wt) from hemagglutinin__InfluenzaA__ACV70484

SEQ ID NO: 35375 - RNA, 1701 nt, Artificial Sequence; identical to SEQ ID NO: 34705
  derived and/or modified CDS sequence (wt) from hemagglutinin__InfluenzaA__ACV70494

SEQ ID NO: 35376 - RNA, 1701 nt, Artificial Sequence; identical to SEQ ID NO: 34705
  derived and/or modified CDS sequence (wt) from hemagglutinin__InfluenzaA__ACV70504

SEQ ID NO: 35377 - RNA, 1701 nt, Artificial Sequence
  derived and/or modified CDS sequence (wt) from hemagglutinin__InfluenzaA__ACV70514
augaaggcaauacuaguaguucugcuauauacauuugcaaccgcaaaugcagacacauuauguauagguuaucaugcgaacaauucaacagacacuguagacacaguacuagaaaagaauguaacaguaacacacucuguuaaccuucuagaagacaagcauaacgggaaacuaugcaaacuaagagggguagccccauugcauuuggguaaauguaacauugcuggcuggauccugggaaauccagagugugaaucacucuccacagcaagcucaugguccuacauuguggaaacaucuaguucagacaauggaacguguuacccaggagauuucaucgauuaugaggagcuaagagagcaauugagcucagugucaucauuugaaagguuugagauauuccccaagacaaguucauggcccaaucaugacucgaacaaagguguaacggcagcauguccucaugcuggagcaaaaagcuucuacaaaaauuuaauauggcuaguuaaaaaaggaaauucauacccaaagcucagcaaauccuacauuaaugauaaagggaaagaaguccucgugcuauggggcauucaccauccaucuacuagugcugaccaacaaagucucuaucagaaugcagaugcauauguuuuuguggggucaucaagauacagcaagaaguucaagccggaaauagcaauaagacccaaagugagggaucaagaagggagaaugaacuauuacuggacacuaguagagccgggagacaaaauaacauucgaagcaacuggaaaucuagugguaccgagauaugcauucgcaauggaaagaaaugcuggaucugguauuaucauuucagauacaccaguccacgauugcaauacaacuugucagacacccaagggugcuauaaacaccagccucccauuucagaauauacauccgaucacaauuggaaaauguccaaaauauguaaaaagcacaaaauugagacuggccacaggauugaggaauguuccgucuauucaaucuagaggccuauuuggggccauugccgguuucauugaagggggguggacagggaugguagauggaugguacgguuaucaccaucaaaaugagcaggggucaggauaugcagccgaccugaagagcacacagaaugccauugacgagauuacuaacaaaguaaauucuguuauugaaaagaugaauacacaguucacagcaguagguaaagaguucaaccaccuggaaaaaagaauagagaauuuaaauaaaaaaguugaugaugguuuccuggacauuuggacuuacaaugccgaacuguugguucuauuggaaaaugaaagaacuuuggacuaccacgauucaaaugugaagaacuuauaugaaaagguaagaagccaguuaaaaaacaaugccaaggaaauuggaaacggcugcuuugaauuuuaccacaaaugcgauaacacgugcauggaaagugucaaaaaugggacuuaugacuacccaaaauacucagaggaagcaaaauuaaacagagaagaaauagaugggguaaagcuggaaucaacaaggauuuaccagauuuuggcgaucuauucaacugucgccaguucauugguacugguagucucccugggggcaaucaguuucuggaugugcucuaaugggucucuacaguguagaauauguauuuaa

SEQ ID NO: 35378 - RNA, 1701 nt, Artificial Sequence; identical to SEQ ID NO: 34705
  derived and/or modified CDS sequence (wt) from hemagglutinin__InfluenzaA__ACV70524

SEQ ID NO: 35379 - RNA, 1701 nt, Artificial Sequence; identical to SEQ ID NO: 34898
  derived and/or modified CDS sequence (wt) from hemagglutinin__InfluenzaA__ACV70534

SEQ ID NO: 35380 - RNA, 1701 nt, Artificial Sequence; identical to SEQ ID NO: 34705
  derived and/or modified CDS sequence (wt) from hemagglutinin__InfluenzaA__ACV70544

SEQ ID NO: 35381 - RNA, 1701 nt, Artificial Sequence
  derived and/or modified CDS sequence (wt) from hemagglutinin__InfluenzaA__ACV70564
augaaggcaauacuaguaguucugcuauauacauuugcaaccgcaaaugcagacacauuauguauagguuaucaugcgaacaauucaacagacacuguagacacaguacuagaaaagaauguaacaguaacacacucuguuaaccuucuagaagacaagcauaacgggaaacuaugcaaacuaagagggguagccccauugcauuuggguaaauguaacauugcuggcuggauccugggaaauccagagugugaaucacucuccacagcaagcucaugguccuacauuguggaaacaucuaguucagacaauggaacguguuacccaggagauuucaucgauuaugaggagcuaagagagcaauugagcucagugucaucauuugaaagguuugagauauuccccaagacaaguucauggcccaaucaugacucgaacaaagguguaacggcagcauguccucaugcuggagcaaaaagcuucuacaaaaauuuaauauggcuaguuaaaaaaggaaauucauacccaaagcucagcaaauccuacauuaaugauaaagggaaagaaguccucgugcuauggggcauucaccauccaucuacuagugcugaccaacaaagucucuaucagaaugcagaugcauauguuuuuguggggucaucaagauacaguaagaaguucaagccggaaauagcaauaagacccaaagugagggaucaagaagggagaaugaacuauuacuggacacuaguagagccgggagacaaaauaacauucgaagcaacuggaaaucuagugguaccgagauaugcauucgcaauggaaagaaaugcuggaucugguauuaucauuucagauacaccaguccacgauugcaauacaacuugucagacacccaagggugcuauaaacaccagccucccauuucagaauauacauccgaucacaauuggaaaauguccaaaauauguaaaaagcacaaaauugagacuggccacaggauugaggaaugucccgucuauucaaucuagaggccuauuuggggccauugccgguuucauugaagggggguggacagggaugguagauggaugguacgguuaucaccaucaaaaugagcaggggucaggauaugcagccgaccugaagagcacacagaaugccauugacgagauuacuaacaaaguaaauucuguuauugaaaagaugaauacacaguucacagcaguagguaaagaguucaaccaccuggaaaaaagaauagagaauuuaaauaaaaaaguugaugaugguuuccuggacauuuggacuuacaaugccgaacuguugguucuauuggaaaaugaaagaacuuuggacuaccacgauucaaaugugaagaacuuauaugaaaagguaagaagccaguuaaaaaacaaugccaaggaaauuggaaacggcugcuuugaauuuuaccacaaaugcgauaacacgugcauggaaagugucaaaaaugggacuuaugacuacccaaaauacucagaggaagcaaaauuaaacagagaagaaauagaugggguaaagcuggaaucaacaaggauuuaccagauuuuggcgaucuauucaacugucgccaguucauugguacugguagucucccugggggcaaucaguuucuggaugugcucuaaugggucucuacaguguagaauauguauuuaa

SEQ ID NO: 35382 - RNA, 1701 nt, Artificial Sequence; identical to SEQ ID NO: 34705
  derived and/or modified CDS sequence (wt) from hemagglutinin__InfluenzaA__ACV70584

SEQ ID NO: 35383 - RNA, 1701 nt, Artificial Sequence; identical to SEQ ID NO: 35357
  derived and/or modified CDS sequence (wt) from hemagglutinin__InfluenzaA__ACV70594

SEQ ID NO: 35384 - RNA, 1701 nt, Artificial Sequence; identical to SEQ ID NO: 34705
  derived and/or modified CDS sequence (wt) from hemagglutinin__InfluenzaA__ACV70604

SEQ ID NO: 35385 - RNA, 1701 nt, Artificial Sequence; identical to SEQ ID NO: 34705
  derived and/or modified CDS sequence (wt) from hemagglutinin__InfluenzaA__ACV70614

SEQ ID NO: 35386 - RNA, 1701 nt, Artificial Sequence; identical to SEQ ID NO: 35347
  derived and/or modified CDS sequence (wt) from hemagglutinin__InfluenzaA__ACV70624

SEQ ID NO: 35387 - RNA, 1701 nt, Artificial Sequence; identical to SEQ ID NO: 34705
  derived and/or modified CDS sequence (wt) from hemagglutinin__InfluenzaA__ACV70634

SEQ ID NO: 35388 - RNA, 1701 nt, Artificial Sequence; identical to SEQ ID NO: 34705
  derived and/or modified CDS sequence (wt) from hemagglutinin__InfluenzaA__ACV70644

SEQ ID NO: 35389 - RNA, 1701 nt, Artificial Sequence; identical to SEQ ID NO: 34705
  derived and/or modified CDS sequence (wt) from hemagglutinin__InfluenzaA__ACV70654

SEQ ID NO: 35390 - RNA, 1701 nt, Artificial Sequence; identical to SEQ ID NO: 35347
  derived and/or modified CDS sequence (wt) from hemagglutinin__InfluenzaA__ACV70664

SEQ ID NO: 35391 - RNA, 1701 nt, Artificial Sequence; identical to SEQ ID NO: 34705
  derived and/or modified CDS sequence (wt) from hemagglutinin__InfluenzaA__ACV70674

SEQ ID NO: 35392 - RNA, 1701 nt, Artificial Sequence; identical to SEQ ID NO: 34705
  derived and/or modified CDS sequence (wt) from hemagglutinin__InfluenzaA__ACV70684

SEQ ID NO: 35393 - RNA, 1701 nt, Artificial Sequence; identical to SEQ ID NO: 34705
  derived and/or modified CDS sequence (wt) from hemagglutinin__InfluenzaA__ACV70694

SEQ ID NO: 35394 - RNA, 1701 nt, Artificial Sequence
  derived and/or modified CDS sequence (wt) from hemagglutinin__InfluenzaA__ACV70704
augaaggcaauacuaguaguucugcuauauacauuugcaaccgcaaaugcagacacauuauguauagguuaucaugcgaacaauucaacagacacuguagacacaguacuagaaaagaauguaacaguaacacacucuguuaaccuucuagaagacaagcauaacgggaaacuaugcaaacuaagagggguagccccauugcauuuggguaaauguaacauugcuggcuggauccugggaaauccagagugugaaucacucuccacagcaagcucaugguccuacauuguggaaacaucuaguucagacaauggaacguguuacccaggagauuucaucgauuaugaggagcuaagagagcaauugagcucagugucaucauuugaaagguuugagauauuccccaagacaaguucauggcccaaucaugacucgaacaaagguguaacggcagcauguccucaugcuggagcaaaaagcuucuacaaaaauuuaauauggcuaguuaaaaaaggaaauucauacccaaagcucagcaaauccuacauuaaugauaaagggaaagaaguccucguacuauggggcauucaccauccaucuacuagugcugaccaacaaagucucuaucagaaugcagaugcauauguuuuuguggggucaucaagauacagcaagaaguucaagccggaaauagcaauaagacccaaagugagggaucaagaagggagaaugaacuauuacuggacacuaguagagccgggagacaaaauaacauucgaagcaacuggaaaucuagugguaccgagauaugcauucgcaauggaaagaaaugcuggaucugguauuaucauuucagauacaccaguccacgauugcaauacaacuugucagacacccaagggugcuauaaacaccagccucccauuucagaauauacauccgaucacaauuggaaaauguccaaaauauguaaaaagcacaaaauugagacuggccacaggauugaggaaugucccgucuauucaaucuagaggccuauuuggggccauugccgguuucauugaagggggguggacagggaugguagauggaugguacgguuaucaccaucaaaaugagcaggggucaggauaugcagccgaccugaagagcacacagaaugccauugacgagauuacuaacaaaguaaauucuguuauugaaaagaugaauacacaguucacagcaguagguaaagaguucaaccaccuggaaaaaagaauagagaauuuaaauaaaaaaguugaugaugguuuccuggacauuuggacuuacaaugccgaacuguugguucuauuggaaaaugaaagaacuuuggacuaccacgauucaaaugugaagaacuuauaugaaaagguaagaagccaguuaaaaaacaaugccaaggaaauuggaaacggcugcuuugaauuuuaccacaaaugcgauaacacgugcauggaaagugucaaaaaugggacuuaugacuacccaaaauacucagaggaagcaaaauuaaacagagaagaaauagaugggguaaagcuggaaucaacaaggauuuaccagauuuuggcgaucuauucaacugucgccaguucauugguacugguagucucccugggggcaaucaguuucuggaugugcucuaaugggucucuacaguguagaauauguauuuaa

SEQ ID NO: 35395 - RNA, 1701 nt, Artificial Sequence; identical to SEQ ID NO: 34705
  derived and/or modified CDS sequence (wt) from hemagglutinin__InfluenzaA__ACV70714

SEQ ID NO: 35396 - RNA, 1701 nt, Artificial Sequence; identical to SEQ ID NO: 34705
  derived and/or modified CDS sequence (wt) from hemagglutinin__InfluenzaA__ACV70724

SEQ ID NO: 35397 - RNA, 1701 nt, Artificial Sequence; identical to SEQ ID NO: 35305
  derived and/or modified CDS sequence (wt) from hemagglutinin__InfluenzaA__ACV70734

SEQ ID NO: 35398 - RNA, 1701 nt, Artificial Sequence; identical to SEQ ID NO: 34705
  derived and/or modified CDS sequence (wt) from hemagglutinin__InfluenzaA__ACV70744

SEQ ID NO: 35399 - RNA, 1701 nt, Artificial Sequence; identical to SEQ ID NO: 34705
  derived and/or modified CDS sequence (wt) from hemagglutinin__InfluenzaA__ACV70754

SEQ ID NO: 35400 - RNA, 1701 nt, Artificial Sequence; identical to SEQ ID NO: 34705
  derived and/or modified CDS sequence (wt) from hemagglutinin__InfluenzaA__ACV70764

SEQ ID NO: 35401 - RNA, 1701 nt, Artificial Sequence; identical to SEQ ID NO: 34705
  derived and/or modified CDS sequence (wt) from hemagglutinin__InfluenzaA__ACV70784

SEQ ID NO: 35402 - RNA, 1701 nt, Artificial Sequence
  derived and/or modified CDS sequence (wt) from hemagglutinin__InfluenzaA__ACV70794
augaaggcaauacuaguaguucugcuauauacauuugcaaccgcaaaugcagacacauuauguauagguuaucaugcgaacaauucaacagacacuguagacacaguacuagaaaagaauguaacaguaacacacucuguuaaccuucuagaagacaagcauaacgggaaacuaugcaaacuaagagggguagccccauugcauuuggguaaauguaacauugcuggcuggauccugggaaauccagagugugaaucacucuccacagcaagcucaugguccuacauuguggaaacaucuaguucagacaauggaacguguuacccaggagauuucaucgauuaugaggagcuaagagagcaauugagcucagugucaucauuugaaagguuugagauauuccccaagacaaguucauggcccaaucaugacucgaacaaaggugcaacggcagcauguccucaugcuggagcaaaaggcuucuacaaaaauuuaauauggcuaguuaaaaaaggaaauucauacccaaagcucagcaaauccuacauuaaugauaaagggaaagaaguccucgugcuauggggcauucaccauccaucuacuagugcugaccaacaaagucucuaucagaaugcagaugcauauguuuuuguggggucaucaagauacagcaagaaguucaagccggaaauagcaauaagacccaaagugagggaucaagaagggagaaugaacuauuacuggacacuaguagagccgggagacaaaauaacauucgaagcaacuggaaaucuagugguaccgagauaugcauucgcaauggaaagaaaugcuggaucugguauuaucauuucagauacaccaguccacgauugcaauacaacuugucagacacccaagggugcuauaaacaccagccucccauuucagaauauacauccgaucacaauuggaaaauguccaaaauauguaaaaagcacaaaauugagacuggccacaggauugaggaaugucccgucuauucaaucuagaggccuauuuggggccauugccgguuucauugaagggggguggacagggaugguagauggaugguacgguuaucaccaucaaaaugagcaggggucaggauaugcagccgaccugaagagcacacagaaugccauugacgagauuacuaacaaaguaaauucuguuauugaaaagaugaauacacaguucacagcaguagguaaagaguucaaccaccuggaaaaaagaauagagaauuuaaauaaaaaaguugaugaugguuuccuggacauuuggacuuacaaugccgaacuguugguucuauuggaaaaugaaagaacuuuggacuaccacgauucaaaugugaagaacuuauaugaaaagguaagaagccaguuaaaaaacaaugccaaggaaauuggaaacggcugcuuugaauuuuaccacaaaugcgauaacacgugcauggaaagugucaaaaaugggacuuaugacuacccaaaauacucagaggaagcaaaauuaaacagagaagaaauagaugggguaaagcuggaaucaacaaggauuuaccagauuuuggcgaucuauucaacugucgccaguucauugguacugguagucucccugggggcaaucaguuucuggaugugcucuaaugggucucuacaguguagaauauguauuuaa

SEQ ID NO: 35403 - RNA, 1701 nt, Artificial Sequence; identical to SEQ ID NO: 34705
  derived and/or modified CDS sequence (wt) from hemagglutinin__InfluenzaA__ACV70804

SEQ ID NO: 35404 - RNA, 1701 nt, Artificial Sequence; identical to SEQ ID NO: 35357
  derived and/or modified CDS sequence (wt) from hemagglutinin__InfluenzaA__ACV70824

SEQ ID NO: 35405 - RNA, 1701 nt, Artificial Sequence
  derived and/or modified CDS sequence (wt) from hemagglutinin__InfluenzaA__ACV70834
augaaggcaauacuaguaguucugcuauauacauuugcaaccgcaaaugcagacacauuauguauagguuaucaugcgaacaauucaacagacacuguagacacaguacuagaaaagaauguaacaguaacacacucuguuaaccuucuagaagacaagcauaacgggaaacuaugcaaacuaagagggguagccccauugcauuuggguaaauguaacauugcuggcuggauccugggaaauccagagugugaaucacucuccacagcaagcucaugguccuacauuguggaaacaucuaguucagacaauggaacguguuacccaggagauuucaucgauuaugaggagcuaagagagcaauugagcucagugucaucauuugaaagguuugagauauuccccaagacaaguucauggcccaaucaugacucgaacaaagguguaacggcagcauguccucaugcuggagcaaaaagcuucuacaaaaauuuaauauggcuaguuaaaaaaggaaauucauacccaaagcucagcaaauccuacauuaaugauaaagggaaagaaguccucgugcuauggggcauucaccauccaucuacuagugcugaccaacaaagucucuaucagaaugcagaugcauauguuuuuguggggucaucaagauacagcaagaaguucaagccggaaauagcaauaagacccaaagugagggaucaagaagggagaaugaacuauuacuggacacuaguagagccgggagacaaaauaacauucgaagcaacuggaaaucuagugguaccgagauaugcauucgcaauggaaagaaaugcuggaucugguauuaucauuucagauacaccaguccacgauugcaauacaacuugucagacacccaagggugcuauaaacaccagccucccauuucagaauauacauccgaucacaauuggaaaaugcccaaaauauguaaaaagcacaaaauugagacuggccacaggauugaggaaugucccgucuauucaaucuagaggccuauuuggggccauugccgguuucauugaagggggguggacagggaugguagauggaugguacgguuaucaccaucaaaaugagcaggggucaggauaugcagccgaccugaagagcacacagaaugccauugacgagauuacuaacaaaguaaauucuguuauugaaaagaugaauacacaguucacagcaguagguaaagaguucaaccaccuggaaaaaagaauagagaauuuaaauaaaaaaguugaugaugguuuccuggacauuuggacuuacaaugccgaacuguugguucuauuggaaaaugaaagaacuuuggacuaccacgauucaaaugugaagaacuuauaugaaaagguaagaagccaguuaaaaaacaaugccaaggaaauuggaaacggcugcuuugaauuuuaccacaaaugcgauaacacgugcauggaaagugucaaaaaugggacuuaugacuacccaaaauacucagaggaagcaaaauuaaacagagaagaaauagaugggguaaagcuggaaucaacaaggauuuaccagauuuuggcgaucuauucaacugucgccaguucauugguacugguagucucccugggggcaaucaguuucuggaugugcucuaaugggucucuacaguguagaauauguauuuaa

SEQ ID NO: 35406 - RNA, 1701 nt, Artificial Sequence
  derived and/or modified CDS sequence (wt) from hemagglutinin__InfluenzaA__ACV70844
augaaggcaauacuaguaguucugcuauauacauuugcaaccgcaaaugcagacacauuauguauagguuaucaugcgaacaauucaacagacacuguagacacaguacuagaaaagaauguaacaguaacacacucuguuaaccuucuagaagacaagcauaacgggaaacuaugcaaacuaagagggguagccccauugcauuuggguaaauguaacauugcuggcuggauccugggaaauccagagugugaaucacucuccacagcaagcucaugguccuacauuguggaaacaucuaguucagacaauggaacguguuacccaggagauuucaucgauuaugaggagcuaagagagcaauugagcucagugucaucauuugaaagguuugagauauuccccaagacaaguucauggcccaaucaugacucgaacaaagguguaacggcagcauguccucaugcuggagcaaaaggcuucuacaaaaauuuaauauggcuaguuaaaaaaggaaauucauacccaaagcucagcaaauccuacauuaaugauaaagggaaagaaguccucgugcuauggggcauucaccauccaucuacuagugcugaccaacaaagucucuaucagaaugcagaugcauauguuuuuguggggucaucaagauacagcaagaaguucaagccggaaauagcaauaagacccaaagugagggaucaagaagggagaaugaacuauuacuggacacuaguagagccgggagacaaaauaacauucgaagcaacuggaaaucuauugguaccgagauaugcauucgcaauggaaagaaaugcuggaucugguauuaucauuucagauacaccaguccacgauugcaauacaacuugucagacacccaagggugcuauaaacaccagccucccauuucagaauauacauccgaucacaauuggaaaauguccaaaauauguaaaaagcacaaaauugagacuggccacaggauugaggaaugucccgucuauucaaucuagaggccuauuuggggccauugccgguuucauugaagggggguggacagggaugguagauggaugguacgguuaucaccaucaaaaugagcaggggucaggauaugcagccgaccugaagagcacacagaaugccauugacgagauuacuaacaaaguaaauucuguuauugaaaagaugaauacacaguucacagcaguagguaaagaguucaaccaccuggaaaaaagaauagagaauuuaaauaaaaaaguugaugaugguuuccuggacauuuggacuuacaaugccgaacuguugguucuauuggaaaaugaaagaacuuuggacuaccacgauucaaaugugaagaacuuauaugaaaagguaagaagccaguuaaaaaacaaugccaaggaaauuggaaacggcugcuuugaauuuuaccacaaaugcgauaacacgugcauggaaagugucaaaaaugggacuuaugacuacccaaaauacucagaggaagcaaaauuaaacagagaagaaauagaugggguaaagcuggaaucaacaaggauuuaccagauuuuggcgaucuauucaacugucgccaguucauugguacugguagucucccugggggcaaucaguuucuggaugugcucuaaugggucucuacaguguagaauauguauuuaa

SEQ ID NO: 35407 - RNA, 1701 nt, Artificial Sequence; identical to SEQ ID NO: 34705
  derived and/or modified CDS sequence (wt) from hemagglutinin__InfluenzaA__ACV70854

SEQ ID NO: 35408 - RNA, 1701 nt, Artificial Sequence
  derived and/or modified CDS sequence (wt) from hemagglutinin__InfluenzaA__ACV70864
augaaggcaauacuaguaguucugcuauauacauuugcaaccgcaaaugcagacacauuauguauagguuaucaugcgaacaauucaacagacacuguagacacaguacuagaaaagaauguaacaguaacacacucuguuaaccuucuagaagacaagcauaacgggaaacuaugcaaacuaagagggguagccccauugcauuuggguaaauguaacauugcuggcuggauccugggaaauccagagugugaaucacucuccacagcaagcucaugguccuacauuguggaaacaucuaguucagacaauggaacguguuacccaggagauuucaucgauuaugaggagcuaagagagcaauugagcucagugucaucauuugaaagguuugagauauuccccaagacaaguucauggcccaaucaugacucgaacaaagguguaacggcagcauguccucaugcuggagcaaaaagcuucuacaaaaauuuaauauggcuaguuaaaaaaggaacuucauacccaaagcucagcaaauccuacauuaaugauaaagggaaagaaguccucgugcuauggggcauucaccauccaucuacuagugcugaccaacaaagucucuaucagaaugcagaugcauauguuuuuguggggucaucaagauacagcaagaaguucaagccggaaauagcaauaagacccaaagugagggaucaagaagggagaaugaacuauuacuggacacuaguagagccgggagacaaaauaacauucgaagcaacuggaaaucuagugguaccgagauaugcauucgcaauggaaagaaaugcuggaucugguauuaucauuucagauacaccaguccacgauugcaauacaacuugucagacacccaagggugcuauaaacaccagccucccauuucagaauauacauccgaucacaauuggaaaauguccaaaauauguaaaaagcacaaaauugagacuggccacaggauugaggaaugucccgucuauucaaucuagaggccuauuuggggccauugccgguuucauugaagggggguggacagggaugguagauggaugguacgguuaucaccaucaaaaugagcaggggucaggauaugcagccgaccugaagagcacacagaaugccauugacgagauuacuaacaaaguaaauucuguuauugaaaagaugaauacacaguucacagcaguagguaaagaguucaaccaccuggaaaaaagaauagagaauuuaaauaaaaaaguugaugaugguuuccuggacauuuggacuuacaaugccgaacuguugguucuauuggaaaaugaaagaacuuuggacuaccacgauucaaaugugaagaacuuauaugaaaagguaagaagccaguuaaaaaacaaugccaaggaaauuggaaacggcugcuuugaauuuuaccacaaaugcgauaacacgugcauggaaagugucaaaaaugggacuuaugacuacccaaaauacucagaggaagcaaaauuaaacagagaagaaauagaugggguaaagcuggaaucaacaaggauuuaccagauuuuggcgaucuauucaacugucgccaguucauugguacugguagucucccugggggcaaucaguuucuggaugugcucuaaugggucucuacaguguagaauauguauuuaa

SEQ ID NO: 35409 - RNA, 1701 nt, Artificial Sequence
  derived and/or modified CDS sequence (wt) from hemagglutinin__InfluenzaA__ACV70874
augaaggcaauacuaguaguucugcuauauacauuugcaaccgcaaaugcagacacauuauguauagguuaucaugcgaacaauucaacagacacuguagacacaguacuagaaaagaauguaacaguaacacacucuguuaaccuucuagaagacaagcauaacgggaaacuaugcaaacuaagagggguagccccauugcauuuggguaaauguaacauugcuggcuggauccugggaaauccagagugugaaucacucuccacagcaagcucaugguccuacauuguggaaacaucuaguucagacaauggaacguguuacccaggagauuucaucgauuaugaggagcuaagagagcaauugagcucagugucaucauuugaaagguuugagauauuccccaagacaaguucauggcccaaucaugacucgaacaaagguguaacggcagcauguccucaugcuggagcaaaaagcuucuacaaaaauuuaauauggcuaguuaaaaaaggaaauucauacccaaagcucagcaaauccuacauuaaugauaaagggaaagaaguccucgugcuauggggcauucaccauccaucuacuagugcugaccaacaaagucucuaucagaaugcagaugcauauguuuuuguggggucaucaagauacagcaagaaguucaagccggaaauagcaauaagacccaaagugagggaucaagaagggagaaugaacuauuacuggacacuaguagagccgggagacaaaauaacauucgaagcaacuggaaaucuagugguaccgagauaugcauucgcaauggaaagaaaugcuggaucugguauuaucauuucagauacaccaguccacgauugcaauacaacuugucagacacccaagggugcuauaaacaccagccucccauuucagaauauacauccgaucacaauuggaaaauguccaaaauauguaaaaagcacaaaauugagacuggccacaggauugaggaaugucccgucuauucaaucuagaggccuauuuggggccauugccgguuucauugaagggggguggacagggaugguagauggaugguacgguuaucaccaucaaaaugagcagggaucaggauaugcagccgaccugaagagcacacagaaugccauugacgagauuacuaacaaaguaaauucuguuauugaaaagaugaauacacaguucacagcaguagguaaagaguucaaccaccuggaaaaaagaauagagaauuuaaauaaaaaaguugaugaugguuuccuggacauuuggacuuacaaugccgaacuguugguucuauuggaaaaugaaagaacuuuggacuaccacgauucaaaugugaagaacuuauaugaaaagguaagaagccaguuaaaaaacaaugccaaggaaauuggaaacggcugcuuugaauuuuaccacaaaugcgauaacacgugcauggaaagugucaaaaaugggacuuaugacuacccaaaauacucagaggaagcaaaauuaaacagagaagaaauagaugggguaaagcuggaaucaacaaggauuuaccagauuuuggcgaucuauucaacugucgccaguucauugguacugguagucucccugggggcaaucaguuucuggaugugcucuaaugggucucuacaguguagaauauguauuuaa

SEQ ID NO: 35410 - RNA, 1701 nt, Artificial Sequence; identical to SEQ ID NO: 34898
  derived and/or modified CDS sequence (wt) from hemagglutinin__InfluenzaA__ACV70884

SEQ ID NO: 35411 - RNA, 1701 nt, Artificial Sequence
  derived and/or modified CDS sequence (wt) from hemagglutinin__InfluenzaA__ACV70904
augaaggcaauacuaguaguucugcuauauacauuugcaaccgcaaaugcagacacauuauguauagguuaucaugcgaacaauucaacagacacuguagacacaguacuagaaaagaauguaacaguaacacacucuguuaaccuucuagaagacaagcauaacgggaaacuaugcaaacuaagagggguagccccauugcauuuggguaaauguaacauugcuggcuggauccugggaaauccagagugugaaucacucuccacagcaagcucaugguccuacauuguggaaacaucuaguucagacaauggaacguguuacccaggagauuucaucgauuaugaggagcuaagagagcaauugagcucagugucaucauuugaaagguuugagauauuccccaagacaaguucauggcccaaucaugacucgaacaaagguguaacggcagcauguccucaugcuggagcaaaaagcuucuacaaaaauuuaauauggcuaguuaaaaaaggaaauucauacccaaagcucagcaaauccuacauuaaugauaaagggaaagaaguccucgugcuauggggcauucaccauccaucuacuagugcugaccaacaaagucucuaucagaaugcagaugcauauguuuuuguggggucaucaagauacagcaagaaguucaagccggaaauagcaauaagacccaaagugagggaucaagaagggagaaugaacuauuacuggacacuaguagagccgggagacaaaauaacauucgaagcaacuggaaaucuagugguaccgagauaugcauucgcaauggaaagaaaugcuggaucugguauuaucauuucagauacaccaguccacgauugcaauacaacuugucagacacccaagggugcuauaaacaccagccucccauuucagaauauacauccgaucacaauuggaaaauguccaaaauauguaaaaagcacaaaauugagacuggccacaggauugaggaauaucccgucuauucaaucuagaggccuauuuggggccauugccgguuucauugaagggggguggacagggaugguagauggaugguacgguuaucaccaucaaaaugagcaggggucaggauaugcagccgaccugaagagcacacagaaugccauugacgagauuacuaacaaaguaaauucuguuauugaaaagaugaauacacaguucacagcaguagguaaagaguucaaccaccuggaaaaaagaauagagaauuuaaauaaaaaaguugaugaugguuuccuggacauuuggacuuacaaugccgaacuguugguucuauuggaaaaugaaagaacuuuggacuaccacgauucaaaugugaagaacuuauaugaaaagguaagaagccaguuaaaaaacaaugccaaggaaauuggaaacggcugcuuugaauuuuaccacaaaugcgauaacacgugcauggaaagugucaaaaaugggacuuaugacuacccaaaauacucagaggaagcaaaauuaaacagagaagaaauagaugggguaaagcuggaaucaacaaggauuuaccagauuuuggcgaucuauucaacugucgccaguucauugguacugguagucucccugggggcaaucaguuucuggaugugcucuaaugggucucuacaguguagaauauguauuuaa

SEQ ID NO: 35412 - RNA, 1701 nt, Artificial Sequence
  derived and/or modified CDS sequence (wt) from hemagglutinin__InfluenzaA__ACV70914
augaaggcaauacuaguaguucugcuauauacauuugcaaccgcaaaugcagacacauuauguauagguuaucaugcgaacaauucaacagacacuguagacacaguacuagaaaagaauguaacaguaacacacucuguuaaccuucuagaagacaagcauaaugggaaacuaugcaaacuaagagggguagccccauugcauuuggguaaauguaacauugcuggcuggauccugggaaauccagagugugaaucacucuccacagcaagcucaugguccuacauuguggaaacaucuaguucagacaauggaacguguuacccaggagauuucaucgauuaugaggagcuaagagagcaauugagcucagugucaucauuugaaagguuugagauauuccccaagacaaguucauggcccaaucaugacucgaacaaagguguaacggcagcauguccucaugcuggagcaaaaagcuucuacaaaaauuuaauauggcuaguuaaaaaaggaaauucauacccaaagcucagcaaauccuacauuaaugauaaagggaaagaaguccucgugcuauggggcauucaccauccaucuacuagugcugaccaacaaagucucuaucagaaugcagaugcauauguuuuuguggggucaucaagauacagcaagaaguucaagccggaaauagcaauaagacccaaagugagggaucaagaagggagaaugaacuauuacuggacacuaguagagccgggagacaaaauaacauucgaagcaacuggaaaucuagugguaccgagauaugcauucgcaauggaaagaaaugcuggaucugguauuaucauuucagauacaccaguccacgauugcaauacaacuugucagacacccaagggugcuauaaacaccagccucccauuucagaauauacauccgaucacaauuggaaaauguccaaaauauguaaaaagcacaaaauugagacuggccacaggauugaggaaugucccgucuauucaaucuagaggccuauuuggggccauugccgguuucauugaagggggguggacagggaugguagauggaugguacgguuaucaccaucaaaaugagcaggggucaggauaugcagccgaccugaagagcacacagaaugccauugacgagauuacuaacaaaguaaauucuguuauugaaaagaugaauacacaguucacagcaguagguaaagaguucaaccaccuggaaaaaagaauagagaauuuaaauaaaaaaguugaugaugguuuccuggacauuuggacuuacaaugccgaacuguugguucuauuggaaaaugaaagaacuuuggacuaccacgauucaaaugugaagaacuuauaugaaaagguaagaagccaguuaaaaaacaaugccaaggaaauuggaaacggcugcuuugaauuuuaccacaaaugcgauaacacgugcauggaaagugucaaaaaugggacuuaugacuacccaaaauacucagaggaagcaaaauuaaacagagaagaaauagaugggguaaagcuggaaucaacaaggauuuaccagauuuuggcgaucuauucaacugucgccaguucauugguacugguagucucccugggggcaaucaguuucuggaugugcucuaaugggucucuacaguguagaauauguauuuaa

SEQ ID NO: 35413 - RNA, 1701 nt, Artificial Sequence
  derived and/or modified CDS sequence (wt) from hemagglutinin__InfluenzaA__ACV70924
augaaggcaauacuaguaguucugcuauauacauuugcaaccgcaaaugcagacacauuauguauagguuaucaugcgaacaauucaacagacacuguagacacaguacuagaaaagaauguaacaguaacacacucuguuaaccuucuagaagacaagcauaacgggaaacuaugcaaacuaagagggguagccccauugcauuuggguaaauguaacauugcuggcuggauccugggaaauccagagugugaaucacucuccacagcaagcucaugguccuacauuguggaaacaucuaguucagacaauggaacguguuacccaggagauuucaucgauuaugaggagcuaagagagcaauugagcucagugucaucauuugaaagguuugagauauuccccaagacaaguucauggcccaaucaugacucgaacaaagguguaacggcagcauguccucaugcuggagcaaaaagcuucuacaaaaauuuaauauggcuaguuaaaaaaggaaauucauacccaaagcucagcaaauccuacauuaaugauaaagggaaagaaguccucgugcuauggggcauucaccauccaucuacuagugcugaccaacaaagucucuaucagaaugcagaugcauauguuuuuguggggucaucaagauauagcaagaaguucaagccggaaauagcaauaagacccaaagugagggaucaagaagggagaaugaacuauuacuggacacuaguagagccgggagacaaaauaacauucgaagcaacuggaaaucuagugguaccgagauaugcauucgcaauggaaagaaaugcuggaucugguauuaucauuucagauacaccaguccacgauugcaauacaacuugucagacacccaagggugcuauaaacaccagccucccauuucagaauauacauccgaucacaauuggaaaauguccuaaauauguaaaaagcacaaaauugagacuggccacaggauugaggaaugucccgucuauucaaucuagaggccuauuuggggccauugccgguuucauugaagggggguggacagggaugguagauggaugguacgguuaucaccaucaaaaugagcaggggucaggauaugcagccgaccugaagagcacacagaaugccauugacgagauuacuaacaaaguaaauucuguuauugaaaagaugaauacacaguucacagcaguagguaaagaguucaaccaccuggaaaaaagaauagagaauuuaaauaaaaaaguugaugaugguuuccuggacauuuggacuuacaaugccgaacuguugguucuauuggaaaaugaaagaacuuuggacuaccacgauucgaaugugaagaacuuauaugaaaagguaagaagccagcuaaaaaacaaugccaaggaaauuggaaacggcugcuuugaauuuuaccacaaaugcgauaacacgugcauggaaagugucaaaaaugggacuuaugacuacccaaaauacucagaggaagcaaaauuaaacagagaagaaauagaugggguaaagcuggaaucaacaaggauuuaccagauuuuggcgaucuauucaacugucgccaguucauugguacugguagucucccugggggcaaucaguuucuggaugugcucuaaugggucucuacaguguagaauauguauuuaa

SEQ ID NO: 35414 - RNA, 1701 nt, Artificial Sequence; identical to SEQ ID NO: 34705
  derived and/or modified CDS sequence (wt) from hemagglutinin__InfluenzaA__ACV70934

SEQ ID NO: 35415 - RNA, 1701 nt, Artificial Sequence; identical to SEQ ID NO: 34705
  derived and/or modified CDS sequence (wt) from hemagglutinin__InfluenzaA__ACV70944

SEQ ID NO: 35416 - RNA, 1701 nt, Artificial Sequence
  derived and/or modified CDS sequence (wt) from hemagglutinin__InfluenzaA__ACV70954
augaaggcaauacuaguaguucugcuauauacauuugcaaccgcaaaugcagacacauuauguauagguuaucaugcgaacaauucaacagacacuguagacacaguacuagaaaagaauguaacaguaacacacucuguuaaccuucuagaagacaagcauaacgggaaacuaugcaaacuaagagggguagccccauugcauuuggguaaauguaacauugcuggcuggauccugggaaauccagagugugaaucacucuccacagcaagcucaugguccuacauuguggaaacaucuaguucagacaauggaacguguuacccaggagauuucaucgauuaugaggagcuaagagagcaauugagcucagugucaucauuugaaagguuugagauauuccccaagacaaguucauggcccaaucaugacucgaacaaagguguaacggcagcauguccucaugcuggagcaaaaagcuucuacaaaaauuuaauauggcuaguuaaaaaaggaaauucauacccaaagcucagcaaauccuacauuaaugauaaagggaaagaaguccucgugcuauggggcauucaccauccaucuacuagugcugaccaacaaagucucuaucagaaugcagaugcauauguuuuuguggggucaucaagauacagcaagaaguucaagccggaaauagcaauaagacccaaagugagggaucaagaagggagaaugaacuauuacuggacacuaguagagccgggagacaaaauaacauucgaagcaacuggaaaucuauugguaccgagauaugcauucgcaauggaaagaaaugcuggaucugguauuaucauuucagauacaccaguccacgauugcaauacaacuugucagacacccaagggugcuauaaacaccagccucccauuucagaauauacauccgaucacaauuggaaaauguccaaaauauguaaaaagcacaaaauugagacuggccacaggauugaggaaugucccgucuauucaaucuagaggccuauuuggggccauugccgguuucauugaagggggguggacagggaugguagauggaugguacgguuaucaccaucaaaaugagcaggggucaggauaugcagccgaccugaagagcacacagaaugccauugacgagauuacuaacaaaguaaauucuguuauugaaaagaugaauacacaguucacagcaguagguaaagaguucaaccaccuggaaaaaagaauagagaauuuaaauaaaaaaguugaugaugguuuccuggacauuuggacuuacaaugccgaacuguugguucuauuggaaaaugaaagaacuuuggacuaccacgauucaaaugugaagaacuuauaugaaaagguaagaagccaguuaaaaaacaaugccaaggaaauuggaaacggcugcuuugaauuuuaccacaaaugcgauaacacgugcauggaaagugucaaaaaugggacuuaugacuacccaaaauacucagaggaagcaaaauuaaacagagaagaaauagaugggguaaagcuggaaucaacaaggauuuaccagauuuuggcgaucuauucaacugucgccaguucauugguacugguagucucccugggggcaaucaguuucuggaugugcucuaaugggucucuacaguguagaauauguauuuaa

SEQ ID NO: 35417 - RNA, 1701 nt, Artificial Sequence; identical to SEQ ID NO: 34705
  derived and/or modified CDS sequence (wt) from hemagglutinin__InfluenzaA__ACV70964

SEQ ID NO: 35418 - RNA, 1701 nt, Artificial Sequence; identical to SEQ ID NO: 34705
  derived and/or modified CDS sequence (wt) from hemagglutinin__InfluenzaA__ACV70974

SEQ ID NO: 35419 - RNA, 1701 nt, Artificial Sequence; identical to SEQ ID NO: 35411
  derived and/or modified CDS sequence (wt) from hemagglutinin__InfluenzaA__ACV70984

SEQ ID NO: 35420 - RNA, 1701 nt, Artificial Sequence
  derived and/or modified CDS sequence (wt) from hemagglutinin__InfluenzaA__ACV70994
augaaggcaauacuaguaguucugcuauauacauuugcaaccgcaaaugcagacacauuauguauagguuaucaugcgaacaauucaacagacacuguagacacaguacuagagaagaauguaacaguaacacacucuguuaaccuucuagaagacaagcauaacgggaaacuaugcaaacuaagagggguagccccauugcauuuggguaaauguaacauugcuggcuggauccugggaaauccagagugugaaucacucuccacagcaagcucaugguccuacauuguggaaacaucuaguucagacaauggaacguguuacccaggagauuucaucgauuaugaggagcuaagagagcaauugagcucagugucaucauuugaaagguuugagauauuccccaagacaaguucauggcccaaucaugacucgaacaaagguguaacggcagcauguccucaugcuggagcaaaaagcuucuacaaaaauuuaauauggcuaguuaaaaaaggaaauucauacccaaagcucagcaaauccuacauuaaugauaaagggaaagaaguccucgugcuauggggcauucaccauccaucuacuagugcugaccaacaaagucucuaucagaaugcagaugcauauguuuuuguggggucaucaagauacagcaagaaguucaagccggaaauagcaauaagacccaaagugagggaucaagaagggagaaugaacuauuacuggacacuaguagagccgggagacaaaauaacauucgaagcaacuggaaaucuauugguaccgagauaugcauucgcaauggaaagaaaugcuggaucugguauuaucauuucagauacaccaguccacgauugcaauacaacuugucagacacccaagggugcuauaaacaccagccucccauuucagaauauacauccgaucacaauuggaaaauguccaaaauauguaaaaagcacaaaauugagacuggccacaggauugaggaaugucccgucuauucaaucuagaggccuauuuggggccauugccgguuucauugaagggggguggacagggaugguagauggaugguacgguuaucaccaucaaaaugagcaggggucaggauaugcagccgaccugaagagcacacagaaugccauugacgagauuacuaacaaaguaaauucuguuauugaaaagaugaauacacaguucacagcaguagguaaagaguucaaccaccuggaaaaaagaauagagaauuuaaauaaaaaaguugaugaugguuuccuggacauuuggacuuacaaugccgaacuguugguucuauuggaaaaugaaagaacuuuggacuaccacgauucaaaugugaagaacuuauaugaaaagguaagaagccaguuaaaaaacaaugccaaggaaauuggaaacggcugcuuugaauuuuaccacaaaugcgauaacacgugcauggaaagugucaaaaaugggacuuaugacuacccaaaauacucagaggaagcaaaauuaaacagagaagaaauagaugggguaaagcuggaaucaacaaggauuuaccagauuuuggcgaucuauucaacugucgccaguucauugguacugguagucucccugggggcaaucaguuucuggaugugcucuaaugggucucuacaguguagaauauguauuuaa

SEQ ID NO: 35421 - RNA, 1701 nt, Artificial Sequence; identical to SEQ ID NO: 34705
  derived and/or modified CDS sequence (wt) from hemagglutinin__InfluenzaA__ACV71004

SEQ ID NO: 35422 - RNA, 1701 nt, Artificial Sequence
  derived and/or modified CDS sequence (wt) from hemagglutinin__InfluenzaA__ACV82230
augaagacuaucauugcuuugagcuacauucuaugucugguuuucgcucaaaaacuuccuggaaaugacaacagcacggcaacgcugugccuugggcaccaugcaguaccaaacggaacgauagugaaaacaaucacgaaugaccaaauugaaguuacuaaugcuacugagcugguucagaguuccucaacaggugaaauaugcgacaguccucaucagauccuugauggaaaaaacugcacacuaauagaugcucuauugggagacccucagugugauggcuuccaaaauaagaaaugggaccuuuuuguugaacgcagccaagccuacagcaacuguuacccuuaugaugugccggauuaugccucccuuaggucacuaguugccucauccggcacacuggaguuuaacaaugaaagcuucaauuggacuggagucacucaaaacggaacaagcucugcuugcauaaggagaucuaaaaacaguuucuuuaguagauugaauugguugacccacuuaaacuucaaauaccaagcauugaacgugacuaugccgaacaaugaacaauuugacaaauuguacauuugggggguucaccacccggguacggacaaagaccaaaucuuccuguaugcucaagcaucaggaagaaucacagucucuaccaaaagaagccaacaaacuguaaucccgaauaucggaucuagaccccgaguaaggaauaucccuagcagaauaagcaucuauuggacaauaguaaaaccgggagacauacuuuugauuaacagcacagggaaucuaauugcuccuagggguuacuucaaaauacaaagugggaaaagcucaauaaugagaucagaugcacccauuggcaaaugcaauucugaaugcaucacuccaaauggaagcauucccaaugacaaaccauuccaaaauguaaacaggaucacauacggggccugucccagauauguuaagcaaaacacucugaaauuggcaacagggaugcgaaauguaccagagaaacaaacuagaggcauauuuggcgcaaucgcggguuucauagaaaaugguugggagggaaugguggaugguugguacgguuucaggcaucaaaauucugagggaagaggacaagcagcagaucucaaaagcacucaagcagcaaucgaucaaaucaaugggaagcugaauagauugaucgggaaaaccaacgagaaauuccaucagauugaaaaagaauucucagaagucgaagggagaauucaggaccuugagaaauauguugaggacacuaaaauagaucucuggucauacaacgcggagcuucuuguugcccuggagaaccaacauacaauugaucuaacugacucagaaaugaacaaacuguuugaaaaaacaaagaagcaacugagggaaaaugcugaggauaugggcaaugguuguuucaaaauauaccacaaaugugacaaugccugcauaggaucaaucagaaauggaacuuaugaccacgauguauacagagaugaagcauuaaacaaccgguuucagaucaagggaguugagcugaagucaggguacaaagauuggauccuauggauuuccuuugccauaucauguuuuuugcuuuguguugcuuuguugggguucaucaugugggccugccaaaaaggcaacauuagaugcaacauuugcauuuga

SEQ ID NO: 35423 - RNA, 1701 nt, Artificial Sequence
  derived and/or modified CDS sequence (wt) from hemagglutinin__InfluenzaA__ACV82232
augaagacuaucauugcuuugagcuacauucuaugucugguuuucgcucaaaaacuuccuggaaaugacaacagcacggcaacgcugugccuugggcaccaugcaguaccaaacggaacgauagugaaaacaaucacgaaugaccaaauugaaguuacuaaugcuacugagcugguucagaguuccucaacaggugaaauaugcgacaguccucaucagauccuugauggagaaaacugcacacuaauagaugcucuauugggagacccucagugugauggcuuccaaaauaagaaaugggaccuuuuuguugaacgaagcaaagccuacagcaacuguuacccuuaugaugugccggauuaugccucccuuaggucacuaguugccucauccggcacacuggaguuuaacaaugaaagcuucaauuggacuggagucacucaaaacggaacaagcucugcuugcauaaggagaucuaauaauaguuucuuuaguagauugaauugguugacccacuuaaacuucaaauacccagcauugaacgugacuaugccaaacaaugaacaauuugacaaauuguacauuugggggguucaccacccggguacggacaaggaccaaaucuuccuguaugcucaagcaucaggaagaaucacaguaucuaccaaaagaagccaacaagcuguaaucccgaauaucggaucuagacccagaguaaggaauaucccuaguagaauaagcaucuauuggacaauaguaaaaccgggagacauacuuuugauuaacagcacagggaaucuaauugcuccuagggguuacuucaaaauacgaagugggaaaagcucaauaaugagaucagaugcacccauuggcaaaugcaauucugaaugcaucacuccaaauggaagcauucccaaugacaaaccauuccaaaauguaaacaggaucacauacggggccugucccagauauguuaagcaaaacacucugaaauuggcaacaggaaugcgaaauguaccagagaaacaaacuagaggcauauuuggcgcaauagcggguuucauagaaaaugguugggagggaaugguggaugguugguacgguuucaggcaucaaaauucugagggaagaggacaagcagcagaucucaaaagcacucaagcagcaaucgaucaaaucaaugggaagcugaauagauugaucgggaaaaccaacgagaaauuccaucagauugaaaaagaauucucagaagucgaagggagaauucaggaccuugagaaauauguugaggacacuaaaauagaucucuggucauacaacgcggagcuucuuguugcccuggagaaccaacauacaauugaucuaacugacucagaaaugaacaaacuguuugaaaaaacaaagaagcaacugagggaaaaugcugaggauaugggcaaugguuguuucaaaauauaccacaaaugugacaaugccugcauaggaucaaucagaaauggaacuuaugaccacgauguauacagagaugaagcauuaaacaaccgguuccagaucaagggaguugagcugaagucaggguacaaagauuggauccuauggauuuccuuugccauaucauguuuuuugcuuuguguugcuuuguugggguucaucaugugggccugccaaaaaggcaacauuaggugcaacauuugcauuuga

SEQ ID NO: 35424 - RNA, 1698 nt, Artificial Sequence
  derived and/or modified CDS sequence (wt) from hemagglutinin__InfluenzaA__ACV82233
augaaaguaaaacuacugguccuguuaugcacauuuacagcuacauaugcagacacaauauguauaggcuaccaugcuaacaacucgaccgauacuguugacacaguacuugaaaagaaugugacagugacacacucugucaaccugcuugagaacaaucacaauggaaaacuaugucuauuaaaaggaauagccccacuacaauuggguaacugcagcguugccggguggaucuuaggaaacccagaaugcgaauuacugauuuccaaggagucaugguccuacauuguagaaaaaccaaauccugagaauggaacauguuacccagggcauuucgcugacuaugaggaacugagggagcaauugaguucaguaucuucauuugagagguucgaaauauuccccaaagaaagcucauggcccaaccacaccguaaccggagugucagcaucaugcucccauaauggggaaaacaguuuuuacagaaauuugcuauggcugacggggaagaaugguuuguacccaaaccugagcaaguccuaugcaaacaacaaagaaaaagaaguccuuguacuaugggguguucaucacccgccaaacauagcugaccaaaagacccucuaucauacagaaaaugcuuauguuucuguagugucuucacauuauagcagaaaauucaccccagaaauagccaaaagacccaaaauaagagaucaagaaggaagaaucaacuacuacuggacucugcuugaacccggggauacaauaauauuugaggcaaauggaaaucuaauagcgccaagauaugcuuucgcacugaguagaggcuuuggaucaggaaucaucaacucaaaugcaccaauggauaaaugugaugcgaagugccaaacaccucaaggagcuauaaacagcagucuuccuuuccagaacguacacccagucacaauaggagaguguccaaaguaugucaggagugcaaaauuaaggaugguuacaggacuaaggaacaucccauccauucaauccagagguuuguuuggagccauugccgguuucauugaagggggguggacuggaaugguagaugguugguaugguuaucaucaucagaaugagcaaggaucuggcuaugcugcagaucaaaaaagcacacaaaaugccauuaaugggauuacaaacaaggugaauucuguaauugagaaaaugaacacucaauucacagcagugggcaaagaauucaacaaauuggaaagaaggauggaaaacuugaauaaaaaaguugaugauggguuuauagacauuuggacauauaaugcagaacuguugguucuacuggaaaaugaacggacuuuggauuuccaugacuccaaugugaagaaucuguaugagaaaguaaaaagccaguuaaagaauaaugcuaaagaaauaggaaauggguguuuugaauucuaucacaaguguaacgaugaaugcauggagaguguaaagaauggaacuuaugacuauccaaaauauuccgaagaaucaaaguuaaacagggagaaaauugauggagugaaauuggaaucaaugggagucuaucagauucuggcgaucuacucaacagucgccaguucucugguucuuuuggucucccugggggcaaucagcuucuggauguguuccaaugggucuuugcaguguagaauaugcaucuaa

SEQ ID NO: 35425 - RNA, 1701 nt, Artificial Sequence
  derived and/or modified CDS sequence (wt) from hemagglutinin__InfluenzaA__ACV83662
augaaggcaauacuaguaguucugcuauauacauuugcaaccgcaaaugcagacacauuauguauagguuaucaugcgaacaauucaacagacacuguagacacaguacuagaaaagaauguaacaguaacacacucuguuaaccuucuagaagacaagcauaacgggaaacuaugcaaacuaagagggguagccccauugcauuuggguaaauguaacauugcuggcuggauccugggaaauccagagugugaaucacucuccacagcaagcucaugguccuacauuguggaaacaucuaguucagacaauggaacguguuacccaggagauuucaucgauuaugaggagcuaagagagcaauugagcucagugucaucauuugaaagguuugagauauuccccaagacaaguucauggcccaaucaugacucgaacaaagguguaacggcagcauguccucaugcuggagcaaaaagcuucuacaaaaauuuaauauggcuaguuaaaaaaggaaauucauacccaaagcucagcaaauccuacauuaaugauaaagggaaagaaguccucgugcuauggggcauucaccauccaucuacuagugcugaccaacaaagucucuaucagaaugcagaugcauauguuuuuguggggacaucaagauacagcaagaaguucaagccggaaauagcaauaagacccaaagugagggaucgagaagggagaaugaacuauuacuggacacuaguagagccgggagacaaaauaacauucgaagcaacuggaaaucuagugguaccgagauaugcauucgcaaugguaagaaaugcuggaucugguauuaucauuucagauacaccaguccacgauugcaauacaacuugucagacacccaagggugcuauaaacaccagccucccauuucagaauauacauccgaucacaauuggaaaauguccaaaauauguaaaaagcacaaaauugagacuggccacaggauugaggaaugucccgucuauucaaucuagaggccuauuuggggccauugccgguuucauugaagggggguggacagggaugguagauggaugguacgguuaucaccaucaaaaugagcaggggucaggauaugcagccgaccugaagagcacacagaaugccauugacgagauuacuaacaaaguaaauucuguuauugaaaagaugaauacacaguucacagcaguagguaaagaguucaaccaccuggaaaaaagaauagagaauuuaaauaaaaaaguugaugaugguuuccuggacauuuggacuuacaaugccgaacuguugguucuauuggaaaaugaaagaacuuuggacuaccacgauucaaaugugaagaacuuauaugaaaagguaagaagccaguuaaaaaacaaugccaaggaaauuggaaacggcugcuuugaauuuuaccacaaaugcgauaacacgugcauggaaagugucaaaaaugggacuuaugacuacccaaaauacucagaggaagcaaaauuaaacagagaagaaauagaugggguaaagcuggaaucaacaaggauuuaccagauuuuggcgaucuauucaacugucgccaguucauugguacugguagucucccugggggcaaucaguuucuggaugugcucuaaugggucucuacaguguagaauauguauuuaa

SEQ ID NO: 35426 - RNA, 1701 nt, Artificial Sequence
  derived and/or modified CDS sequence (wt) from hemagglutinin__InfluenzaA__ACV83663
augaaggcaauacuaguaguucugcuauauacauuugcaaccgcaaaugcagacacauuauguauagguuaucaugcgaacaauucaacagacacuguagacacaguacuagaaaagaauguaacaguaacacacucuguuaaccuucuagaagacaagcauaacgggaaacuaugcaaacuaagagggguagccccauugcauuuggguaaauguaacauugcuggcuggauccugggaaauccagagugugaaucacucuccacagcaagcucaugguccuacauuguggaaacaucuaguucagacaauggaacguguuacccaggagauuucaucgauuaugaggagcuaagagagcaauugagcucagugucaucauuugaaagguuugagauauuccccaagacaaguucauggcccaaucaugacucgaacaaagguguaacggcagcauguccucaugcuggagcaaaaagcuucuacaaaaauuuaauauggcuaguuaaaaaaggaaauucauacccaaagcucagcaaauccuacauuaaugauaaagggaaagaaguccucgugcuauggggcauucaccauccaucuacuagugcugaccaacaaagucucuaucagaaugcagaugcauauguuuuuguggggacaucaagauacagcaagaaguucaagccggaaauagcaauaagacccaaagugaggggucaagaagggagaaugaacuauuacuggacacuaguagagccgggagacaaaauaacauucgaagcaacuggaaaucuagugguaccgagauaugcauucgcaauggaaagaaaugcuggaucugguauuaucauuucagauacaccaguccacgauugcaauacaacuugucagacacccaagggugcuauaaacaccagccucccauuucagaauauacauccgaucacaauuggaaaauguccaaaauauguaaaaagcacaaaauugagacuggccacaggauugaggaaugucccgucuauucaaucuagaggccuauuuggggccauugccgguuucauugaagggggguggacagggaugguagauggaugguacgguuaucaccaucaaaaugagcaggggucaggauaugcagccgaccugaagagcacacagaaugccauugacgagauuacuaacaaaguaaauucuguuauugaaaagaugaauacacaguucacagcaguagguaaagaguucaaccaccuggaaaaaagaauagagaauuuaaauaaaaaaguugaugaugguuuccuggacauuuggacuuacaaugccgaacuguugguucuauuggaaaaugaaagaacuuuggacuaccacgauucaaaugugaagaacuuauaugaaaagguaagaagccaguuaaaaaacaaugccaaggaaauuggaaacggcugcuuugaauuuuaccacaaaugcgauaacacgugcauggaaagugucaaaaaugggacuuaugacuacccaaaauacucagaggaagcaaaauuaaacagagaagaaauagaugggguaaagcuggaaucaacaaggauuuaccagauuuuggcgaucuauucaacugucgccaguucauugguacugguagucucccugggggcaaucaguuucuggaugugcucuaaugggucucuacaguguagaauauguauuuaa

SEQ ID NO: 35427 - RNA, 1701 nt, Artificial Sequence
  derived and/or modified CDS sequence (wt) from hemagglutinin__InfluenzaA__ACV83664
augaaggcaauacuaguaguucugcuauauacauuugcaaccgcaaaugcagacacauuauguauagguuaucaugcgaacaauucaacagacacuguagacacaguacuagaaaagaauguaacaguaacacacucuguuaaccuucuagaagacaagcauaacgggaaacuaugcaaacuaagagggguagccccauugcauuuggguaaauguaacauugcuggcuggauccugggaaauccagagugugaaucacucuccacagcaagcucaugguccuacauuguggaaacaucuaguucagacaauggaacguguuacccaggagauuucaucgauuaugaggagcuaagagagcaauugagcucagugucaucauuugaaagguuugagauauuccccaagacaaguucauggcccaaucaugacucgaacaaagguguaacggcagcauguccucaugcuggagcaaaaagcuucuacaaaaauuuaauauggcuaguuaaaaaaggaaauucauacccaaagcucagcaaauccuacauuaaugauaaagggaaagaaguccucgugcuauggggcauucaccauccaucuacuagugcugaccaacaaagucucuaucagaaugcagaugcauauguuuuuguggggacaucaagauacagcaagaaguucaagccggaaauagcaauaagacccaaggugaggggucaagaagggagaaugaacuauuacuggacacuaguagagccgggagacaaaauaacauucgaagcaacuggaaaucuagugguaccgagauaugcauucgcaauggaaagaaaugcuggaucugguauuaucauuucagauacaccaguccacgauugcaauacaacuugucagacacccaagggugcuauaaacaccagccucccauuucagaauauacauccgaucacaauuggaaaauguccaaaauauguaaaaagcacaaaauugagacuggccacaggauugaggaaugucccgucuauucaaucuagaggccuauuuggggccauugccgguuucauugaagggggguggacagggaugguagauggaugguacgguuaucaccaucaaaaugagcaggggucaggauaugcagccgaccugaagagcacacagaaugccauugacgagauuacuaacaaaguaaauucuguuauugaaaagaugaauacacaguucacagcaguagguaaagaguucaaccaccuggaaaaaagaauagagaauuuaaauaaaaaaguugaugaugguuuccuggacauuuggacuuacaaugccgaacuguugguucuauuggaaaaugaaagaacuuuggacuaccacgauucaaaugugaagaacuuauaugaaaagguaagaagccaguuaaaaaacaaugccaaggaaauuggaaacggcugcuuugaauuuuaccacaaaugcgauaacacgugcauggaaagugucaaaaaugggacuuaugacuacccaaaauacucagaggaagcaaaauuaaacagagaagaaauagaugggguaaagcuggaaucaacaaggauuuaccagauuuuggcgaucuauucaacugucgccaguucauugguacugguagucucccugggggcaaucaguuucuggaugugcucuaaugggucucuacaguguagaauauguauuuaa

SEQ ID NO: 35428 - RNA, 1701 nt, Artificial Sequence
  derived and/or modified CDS sequence (wt) from hemagglutinin__InfluenzaA__ACV83665
auggaggcaauacuaguaguucugcuauauacauuugcaaccgcaaaugcagacacauuauguauagguuaucaugcgaacaauucaacagacacuguagacacaguacuagaaaagaauguaacaguaacacacucuguuaaccuucuagaagacaagcauaacgggaaacuaugcaaacuaagagggguagccccauugcauuuggguaaauguaacauugcuggcuggauccugggaaauccagagugugaaucacucuccacagcaagcucaugguccuacauuguggaaacaucuaguucagacaauggaacguguuacccaggagauuucaucgauuaugaggagcuaagagagcaauugagcucagugucaucauuugaaagguuugagauauuccccaagacaaguucauggcccaaucaugacucgaacaaagguguaacggcagcauguccucaugcuggagcaaaaagcuucuacaaaaauuuaauauggcuaguuaaaaaaggaaauucauacccaaagcucagcaaauccuacauuaaugauaaagggaaagaaguccucgugcuauggggcauucaccauccauccacuauugcugaccaacaaagucucuaucagaaugcagaugcauauguuuuuguggggucaucaagauacagcaagaaguucaagccggaaauagcaauaagacccaaagugagggaucaagaagggagaaugaacuauuacuggacacuaguagagccgggagacaaaauaacauucgaagcaacuggaaaucuagugguaccgagauaugcauucgcaauggaaagaaaugcuggaucugguauuaucauuucagauacaccaguccacgauugcaauacaacuugucagacacccaagggugcuauaaacaccagccucccauuucauaauauacauccgaucacaauuggaaaauguccaaaauauguaaaaagcacaaaauugagacuggccacaggauugaggaaugucccgucuauucaaucuagaggccuauuuggggccauugccgguuucauugaagggggguggacagggaugguggauggaugguacgguuaucaccaucaaaaugagcaggggucaggauaugcagccgaccugaagagcacacagaaugccauugacgagauuacuaacaaaguaaauucuguuauugaaaagaugaauacacaguucacagcaguagguaaagaguucaaccaccuggaaaaaagaauagagaauuuaaauaaaaaaguugaugaugguuuccuggacauuuggacuuacaaugccgaacuguugguucuauuggaaaaugaaagaacuuuggacuaccacgauucaaaugugaagaacuuauaugaaaagguaagaagccaguuaaaaaacaaugccaaggaaauuggaaacggcugcuuugaauuuuaccacaaaugcgauaacacgugcauggaaagugucaaaaaugggacuuaugacuacccaaaauacucagaggaagcaaaauuaaacagagaagaaauagaugggguaaagcuggaaucaacaaggauuuaccagauuuuggcgaucuauucaacugucgccaguucauugguacugguagucucccugggggcaaucaguuucuggaugugcucuaaugggucucuacaguguagaauauguauuuaa

SEQ ID NO: 35429 - RNA, 1701 nt, Artificial Sequence
  derived and/or modified CDS sequence (wt) from hemagglutinin__InfluenzaA__ACV83667
augaaggcaauacuaguaguucugcuauauacauuugcaaccgcaaaugcagacacauuauguauagguuaucaugcgaacaauucaacagacacuguagacacaguacuagaaaagaauguaacaguaacacacucuguuaaccuucuagaagacaagcauaacgggaaacuaugcaaacuaagagggguagccccauugcauuuggguaaauguaacauugcuggcuggauccugggaaauccagagugugaaucacucuccacagcaagcucaugguccuacauuguggaaacaucuaguucagacaauggaacguguuacccaggagauuucaucgauuaugaggagcuaagagagcaauugagcucagugucaucauuugaaagguuugagauauuccccaagacaaguucauggcccaaucaugacucgaacaaagguguaacggcagcauguccucaugcuggagcaaaaagcuucuacaaaaauuuaauauggcuaguuaaaaaaggaaauucauacccaaagcucagcaaauccuacauuaaugauaaagggaaagaaguccucgugcuauggggcauucaccauccaucuacuagugcugaccaacaaagucucuaucagaaugcagaugcauauguuuuuguggggacaucaagauacagcaagaaguucaagccggaaauagcaauaagacccaaagugaggaaucaagaagggagaaugaacuauuacuggacacuaguagagccgggagacaaaauaacauucgaagcaacuggaaaucuagugguaccgagauaugcauucgcaauggaaagaaaugcuggaucugguauuaucauuucagauacaccaguccacgauugcaauacaacuugucagacacccaagggugcuauaaacaccagccucccauuucagaauauacauccgaucacaauuggaaaauguccaaaauauguaaaaagcacaaaauugagacuggccacaggauugaggaaugucccgucuauucaaucuagaggccuauuuggggccauugccgguuucauugaagggggguggacagggaugguagauggaugguacgguuaucaccaucaaaaugagcaggggucaggauaugcagccgaccugaagagcacacagaaugccauugacgagauuacuaacaaaguaaauucuguuauugaaaagaugaauacacaguucacagcaguagguaaagaguucaaccaccuggaaaaaagaauagagaauuuaaauaaaaaaguugaugaugguuuccuggacauuuggacuuacaaugccgaacuguugguucuauuggaaaaugaaagaacuuuggacuaccacgauucaaaugugaagaacuuauaugaaaagguaagaagccaguuaaaaaacaaugccaaggaaauuggaaacggcugcuuugaauuuuaccacaaaugcgauaacacgugcauggaaagugucaaaaaugggacuuaugacuacccaaaauacucagaggaagcaaaauuaaacagagaagaaauagaugggguaaagcuggaaucaacaaggauuuaccagauuuuggcgaucuauucaacugucgccaguucauugguacugguagucucccugggggcaaucaguuucuggaugugcucuaaugggucucuacaguguagaauauguauuuaa

SEQ ID NO: 35430 - RNA, 1701 nt, Artificial Sequence
  derived and/or modified CDS sequence (wt) from hemagglutinin__InfluenzaA__ACV83668
augaaggcaauacuaguaguucugcuauauacauuugcaaccgcaaaugcagacacauuauguauagguuaucaugcgaacaauucaacagacacuguagacacaguacuagaaaagaauguaacaguaacacacucuguuaaccuucuagaagacaagcauaacgggaaacuaugcaaacuaagagggguagccccauugcauuuggguaaauguaacauugcuggcuggauccugggaaauccagagugugaaucacucuccacagcaagcucaugguccuacauuguggaaacaucuaguucagacaauggaacguguuacccaggagauuucaucgauuaugaggagcuaagagagcaauugagcucagugucaucauuugaaagguuugagauauuccccaagacaaguucauggcccaaucaugacucgaacaaagguguaacggcagcauguccucaugcuggagcaaaaagcuucuacaaaaauuuaauauggcuaguuaaaaaaggaaauucauacccaaagcucagcaaauccuacauuaaugauaaagggaaagaaguccucgugcuauggggcauucaccauccaucuacuagugcugaccaacaaagucucuaucagaaugcagaugcauauguuuuuguggggacaucaagauacagcaagaaguucaagccggaaauagcaauaagacccaaagugagggaucaagaagggagaaugaacuauuacuggacacuaguagagccgggagacaaaauaacauucgaagcaacuggaaaucuagugguaccgagauaugcauucgcaauggaaagaaaugcuggaucugguauuaucauuucagauacaccaguccacgauugcaauacaacuugucagacacccaagggugcuauaaacaccagccucccauuucagaauauacauccgaucacaauuggaaaauguccaaaauauguaaaaagcacaaaauugagacuggccacaggauugaggaaugucccgucuauucaaucuagaggccuauuuggggccauugccgguuucauugaagggggguggacagggaugguagauggaugguacgguuaucaccaucaaaaugagcaggggucaggauaugcagccgaccugaagagcacacagaaugccauugacgagauuacuaacaaaguaaauucuguuauugaaaagaugaauacacaguucacagcaguagguaaagaguucaaccaccuggaaaaaagaauagagaauuuaaauaaaaaaguugaugaugguuuccuggacauuuggacuuacaaugccgaacuguugguucuauuggaaaaugaaagaacuuuggacuaccacgauucaaaugugaagaacuuauaugaaaagguaagaagccaguuaaaaaacaaugccaaggaaauuggaaacggcugcuuugaauuuuaccacaaaugcgauaacacgugcauggaaagugucaaaaaugggacuuaugacuacccaaaauacucagaggaagcaaaauuaaacagagaagaaauagauggaguaaagcuggaaucaacaaggauuuaccagauuuuggcgaucuauucaacugucgccaguucauugguacugguagucucccugggggcaaucaguuucuggaugugcucuaaugggucucuacaguguagaauauguauuuaa

SEQ ID NO: 35431 - RNA, 1701 nt, Artificial Sequence
  derived and/or modified CDS sequence (wt) from hemagglutinin__InfluenzaA__ACV83670
augaaggcaauacuaguaguucugcuauauacauuugcaaccgcaaaugcagacacauuauguauagguuaucaugcgaacaauucaacagacacuguagacacaguacuagaaaagaauguaacaguaacacacucuguuaaccuucuagaagacaagcauaacgggaaacuaugcaaacuaagagggguagccccauugcauuuggguaaauguaacauugcuggcuggauccugggaaauccagagugugaaucacucuccacagcaagcucaugguccuacauuguggaaacaucuaguucagacaauggaacguguuacccaggagauuucaucgauuaugaggagcuaagagagcaauugagcucagugucaucauuugaaagguuugagauauuccccaagacaaguucauggccuaaucaugacucgaacaaagguguaacggcagcauguccucaugcuggagcaaaaagcuucuacaaaaauuuaauauggcuaguuaaaaaaggaaauucauacccaaagcucagcaaauccuacauuaaugauaaagggaaagaaguccucgugcuauggggcauucaccauccaucuacuagugcugaccaacaaagucucuaucagaaugcagaugcauauguuuuuguggggacaucaagauacagcaagaaguucaagccggaaauagcaauaagacccaaagugagggaucaagaagggagaaugaacuauuacuggacacuaguagagccgggagacaaaauaacauucgaagcaacuggaaaucuagugguaccgagauaugcauucgcaauggaaagaaaugcuggaucugguauuaucauuucagauacaccaguccacgauugcaauacaacuugucagacacccaagggugcuauaaacaccagccucccauuucagaauauacauccgaucacaauuggaaaauguccaaaauauguaaaaagcacaaaauugagacuggccacaggauugaggaaugucccgucuauucaaucuagaggccuauuuggggccauugccgguuucauugaagggggguggacagggaugguagauggaugguacgguuaucaccaucaaaaugagcaggggucaggauaugcagccgaccugaagagcacacagaaugccauugacgagauuacuaacaaaguaaauucuguuauugaaaagaugaauacacaguucacagcaguagguaaagaguucaaccaccuggaaaaaagaauagagaauuuaaauaaaaaaguugaugaugguuuccuggacauuuggacuuacaaugccgaacuguugguucuauuggaaaaugaaagaacuuuggacuaccacgauucaaaugugaagaacuuauaugaaaagguaagaagccaguuaaaaaacaaugccaaggaaauuggaaacggcugcuuugaauuuuaccacaaaugcgauaacacgugcauggaaagugucaaaaaugggacuuaugacuacccaaaauacucagaggaagcaaaauuaaacagagaagaaauagaugggguaaagcuggaaucaacaaggauuuaccagauuuuggcgaucuauucaacugucgccaguucauugguacugguagucucccugggggcaaucaguuucuggaugugcucuaaugggucucuacaguguagaauauguauuuaa

SEQ ID NO: 35432 - RNA, 1701 nt, Artificial Sequence; identical to SEQ ID NO: 34965
  derived and/or modified CDS sequence (wt) from hemagglutinin__InfluenzaA__ACV83671

SEQ ID NO: 35433 - RNA, 1701 nt, Artificial Sequence
  derived and/or modified CDS sequence (wt) from hemagglutinin__InfluenzaA__ACV88399
auggaggcaauacuaguaguucugcuauauacauuugcaaccgcaaaugcagacacauuauguauagguuaucaugcgaacaauucaacagacacuguagacacaguacuagaaaagaauguaacaguaacacacucuguuaaccuucuagaagacaagcauaacgggaaacuaugcaaacuaagagggguagccccauugcauuuggguaaauguaacauugcuggcuggauccugggaaauccagagugugaaucacucuccacagcaagcucaugguccuacauuguggaaacaucuaguucagacaauggaacguguuacccaggagauuucaucgauuaugaggagcuaagagagcaauugagcucagugucaucauuugaaagguuugagauauuccccaagacaaguucauggcccaaucaugacucgaacaaagguauaacggcagcauguccucaugcuggagcaaaaagcuucuacaaaaauuuaauauggcuaguuaaaaaaggaaauucauacccaaagcucagcaaauccuacauuaaugauaaagggaaagaaguccucgugcuauggggcauucaccauccaucuacuagugcugaccaacaaagucucuaucagaaugcagaugcauauguuuuuguggggucaucaagauacagcaagaaguucaagccggaaauagcaauaagacccaaagugagggaucaagaagggagaaugaacuauuacuggacacuaguagagccgggagacaaaauaacauucgaagcaacuggaaaucuagugguaccgagauaugcauucgcaauggaaagaaaugcuggaucugguauuaucauuucagauacaccaguccacgauugcaauacaacuugucagacacccaagggugcuauaaacaccagccucccauuucauaauauacauccgaucacaauuggaaaauguccaaaauauguaaaaagcacaaaauugagacuggccacaggauugagaaaugucccgucuauucaaucuagaggccuauuuggggccauugccgguuucauugaagggggguggacagggaugguagauggaugguacgguuaucaccaucaaaaugagcaggggucaggauaugcagccgaccugaagagcacacagaaugccauugacgagauuacuaacaaaguaaauucuguuauugaaaagaugaauacacaguucacagcaguagguaaagaguucaaccaccuggaaaaaagaauagagaauuuaaauaaaaaaguugaugaugguuuccuggacauuuggacuuacaaugccgaacuguugguucuauuggaaaaugaaagaacuuuggacuaccacgauucaaaugugaagaacuuauaugaaaagguaagaagccaguuaaaaaacaaugccaaggaaauuggaaacggcugcuuugaauuuuaccacaaaugcgauaacacgugcauggaaagugucaaaaaugggacuuaugacuacccaaaauacucagaggaagcaaaauuaaacagagaagaaauagaugggguaaagcuggaaucaacaaggauuuaccagauuuuggcgaucuauucaacugucgccaguucauugguacugguagucucccugggggcaaucaguuucuggaugugcucuaaugggucucuacaguguagaauauguauuuaa

SEQ ID NO: 35434 - RNA, 1701 nt, Artificial Sequence; identical to SEQ ID NO: 35243
  derived and/or modified CDS sequence (wt) from hemagglutinin__InfluenzaA__ACV88409

SEQ ID NO: 35435 - RNA, 1701 nt, Artificial Sequence; identical to SEQ ID NO: 35090
  derived and/or modified CDS sequence (wt) from hemagglutinin__InfluenzaA__ACV88419

SEQ ID NO: 35436 - RNA, 1698 nt, Artificial Sequence; identical to SEQ ID NO: 35290
  derived and/or modified CDS sequence (wt) from hemagglutinin__InfluenzaA__ACV89502

SEQ ID NO: 35437 - RNA, 1701 nt, Artificial Sequence
  derived and/or modified CDS sequence (wt) from hemagglutinin__InfluenzaA__ACV89516
augaaggcaagacuacugauccuguugugugcacuugcagcuacagaugcagacacaauauguauaggcuaccaugcgaacaauucaaccgacacuguugacacaguacucgagaagaaugugacagugacacacucuguuaaccugcucgaagacagccacaacgggaaacuauguagauuaaaaggaauagccccauuacaauuggggaaauguaacaucgccggauggaucuugggaaacccagaaugcgacucauugcuuccagcgaguucaugguccuacauuguagaaacaccaaacucuaagaauggaauauguuauccaggagauuucaucgacuaugaggaacugagggagcaauugagcucaguaucaucauucgaaagauucgaaauauuucccaaggaaagcucauggcccaaacacagcacaaccaaaggaguaacggcagcaugcucccaugcaggaaagagcaguuuuuacagaaauuugcuauggcugacgaagaagggggacucauacccaaagcugagcaauuccuaugugaacaagaaagggaaagaaguccuuguacuaugggguguucaucacccgucuagcaguaaagagcaacagacucucuaucagaaugaaaaugcuuaugucucuguagugucuucaaauuauaacaggagauucaucccggaaauagcagaaagacccgaaguaaaagaucaagcugggaggauaaacuauuacuggaccuugcuagaacccggagacacaauaauauuugaggcuaauggaaaucuaguagcaccaugguaugcuuucgcacugaguagaggcuuuggguccggcaucaucaccucaaacgcaucaaugcaugaguguaacacgaagugucaaacaccccagggagcuauaaacagcagucucccuuuccagaauauacacccagucacaauaggagagugcccaaaauacgucaagagugccaaauugaggaugguuacaggacuaagaaacaucccauccauucaauccaggggucuauuuggagccauugccgguuuuauugaaggaggauggacuggaaugauagauggaugguaugguuaucaucaucagaaugaacagggaucaggcuaugcagcggaucaaaaaagcacacaaaaugccauuaacgggauuacaaacaaggugaacucuguuaucgagaaaaugaacacucaauucacugcuguggguaaagaauucaacaacuuagaaaaaaggauggaaaauuuaaauaaaaaaguugaugauggauuccuggacauuuggacguauaaugcagaauuguuaguucuacuggaaaaugaaagaacucuggauuuccaugacucaaaugugaaaaaucuguaugagaaaguaaaaauccaauuaaagaauaaugccaaagaaaucggaaauggguguuuugaguucuaccacaagugugacaaugaaugcauggaaagugugagaaaugggacuuaugauuauccaaaauauucaaaagaaucaaaguugaacagggaaaagauagauggagugaaauuggaaucaaugggggucuaucagauucuggcgaucuacucaacugucgccaguucacuggugcuuuuggucucccugggggcaaucaguuucuggauguguucuaaugggucuuugcagugcagaauaugcaucuga

SEQ ID NO: 35438 - RNA, 1698 nt, Artificial Sequence
  derived and/or modified CDS sequence (wt) from hemagglutinin__InfluenzaA__ACV90512
augaacguaaaacuacugguccuguuaugcacauuuacagcuacauaugcagacacaauauguauaggcuaccaugcuaacaacucgaccgacacuguugacacaguacuugaaaagaaugugacagugacacacucugucaaccugcuugagaacagucacaauggaaaacuaugucuauuaaaaggaauagccccacuacaauuggguaacugcagcguugccggguggaucuuaggaaacccagaaugcgaauuacugauuuccaaggagucaugguccuacauuguagaaaaaccaaauccugagaauggaacauguuacccagggcauuucgcugacuaugaggaacugagggagcaauugaguucaguaucuucauuugagagguucgaaauauuccccaaagaaagcucauggcccaaccacaccguaaccggagugucagcaucaugcucccauaauggggaaaacaguuuuuacagaaauuugcuauggcugacggggaagaaugguuuguacccaaaccugagcaaguccuaugcaaacaacaaagaaaaagaaguccuuguacuaugggguguucaucacccgccaaacauagcugaccaaaagacccucuaucauacagaaaaugcuuauguuucuguagugucuucacauuauagcagaaaauucaccccagaaauagccaaaagacccaaaguaagagaucaagaaggaagaaucaacuacuacuggacucugcuugaacccggggauacaauaauauuugaggcaaauggaaaucuaauagcgccaagauaugcuuucgcacugaguagaggcuuuggaucaggaaucaucaacucaaaugcaccaauugauaaaugggaugcgaagugccaaacaccucagggagcuauaaacagcagucuuccuuuccagaacguacacccagucacaauaggagaguggccaaaguaugucaggagugcaaaauuaaggaugguuacaggacuaaggaacaucccauccauucaauccagagguuuguuuggagccauugccgguuucauugaagggggguggacuggaaugguagaugguugguaugguuaucaucaucagaaugagcaaggaucuggcuaugcugcagaucaaaaaagcacacaaaaugccauuaauggaauuacaaacaagaugaauucuguaauugagaaaaugaacacucaauucacagcagugggcaaagaauucaacaaauuggaaagaaggauggaaaacuugaauaaaaaaguugaugauggauuuauagacauuuggacauauaaugcagaacuguugguucuacuggaaaaugaaaggacuuuggauuuccaugacuccaaugugaagaaucuguaugagaaaguaaaaagccaguuaaagaauaaugcuaaagaaauaggaaauggguguuuugaauucuaucacaaguguaacgaugaaugcauggagaguguaaagaauggaacuuaugacuauccaaaauauuccgaagaaucaaaguuaaacagggagaaaauugauggagugacauuggaaucaaugggagucuaucagauuuuggcgaucuacucaacagucgccaguucucugguucucuuggucucccugggggcaaucagcuucuggauguguuccaaugggucuuugcaguguagaauaugcaucuga

SEQ ID NO: 35439 - RNA, 1701 nt, Artificial Sequence
  derived and/or modified CDS sequence (wt) from hemagglutinin__InfluenzaA__ACV91672
augaaggcaauacuaguaguucugcuauauacauuugcaaccgcaaaugcagacacauuauguauagguuaucaugcgaacaauucaacagacacuguagacacaguacuagaaaagaauguaacaguaacacacucuguuaaccuucuagaagacaagcauaacgggaaacuaugcaaacuaagagggguagccccauugcauuuggguaaauguaacauugcuggcuggauccugggaaauccagagugugaaucacucuccacagcaagcucaugguccuacauuguggaaacaucuaguucagacaauggaacguguuacccaggagauuucaucgauuaugaggagcuaagagagcaauugagcucagugucaucauuugaaagguuugagauauuccccaagacaaguucauggcccaaucaugacucgaacaaagguguaacggcagcauguccucaugcuggagcaaaaagcuucuacaaaaauuuaauauggcuaguuaaaaaaggaaauucauacccaaagcucagcaaauccuacauuaaugauaaagggaaagaaguucucgugcuauggggcauucaccauccaucuacuagugcugaccaacaaagucucuaucagaaugcagaugcauauguuuuuguggggacaucaagauacagcaagaaguucaagccggaaauagcaauaagacccaaagugagggaucaagaagggagaaugaacuauuacuggacacuaguagagccgggagacaaaauaacauucgaagcaacuggaaaucuagugguaccgagauaugcauucgcaauggaaagaaaugcuggaucugguauuaucauuucagauacaccaguccacgauugcaauacaacuugucagacacccaagggugcuauaaacaccagccucccauuucagaauauacauccgaucacaauuggaaaauguccaaaauauguaaaaagcacaaaauugagacuggccacaggauugaggaaugucccgucuauucaaucuagaggccuauuuggggccauugccgguuucauugaagggggguggacagggaugguagauggaugguacgguuaucaccaucaaaaugagcaggggucaggauaugcagccgaccugaagagcacacagaaugccauugacgagauuacuaacaaaguaaauucuguuauugaaaagaugaauacacaguucacagcaguagguaaagaguucaaccaccuggaaaaaagaauagagaauuuaaauaaaaaaguugaugaugguuuccuggacauuuggacuuacaaugccgaacuguugguucuauuggaaaaugaaagaacuuuggacuaccacgauucaaaugugaagaacuuauaugaaaagguaagaagccaguuaaaaaacaaugccaaggaaauuggaaacggcugcuuugaauuuuaccacaaaugcgauaacacgugcauggaaagugucaaaaaugggacuuaugacuacccaaaauacucagaggaagcaaaauuaaacagagaagaaauagaugggguaaagcuggaaucaacaaggauuuaccagauuuuggcgaucuauucaacugucgccaguucauugguacugguagucucccugggggcaaucaguuucuggaugugcucuaaugggucucuacaguguagaauauguauuuaa

SEQ ID NO: 35440 - RNA, 1701 nt, Artificial Sequence
  derived and/or modified CDS sequence (wt) from hemagglutinin__InfluenzaA__ACV91676
augaaggcaauacuaguaguucugcuauauacauuugcaaccgcaaaugcagacacauuauguauagguuaucaugcgaacaauucaacagacacuguagacacaguacuagaaaagaauguaacaguaacacacucuguuaaccuucuagaagacaagcauaacgggaaacuaugcaaacuaagagggguagccccauugcauuuggguaaauguaacauugcuggcuggauccugggaaauccagagugugaaucacucuccacagcaagcucaugguccuacauuguggaaacaucuaguucagacaauggaacguguuacccaggagauuucaucgauuaugaggagcuaagagagcaauugagcucagugucaucauuugaaagguuugagauauuccccaagacaaguucauggcccaaucaugacucgaacaaagguguaacggcagcauguccucaugcuggagcaaaaagcuucuacaaaaauuuaauauggcuaguuaaaaaagggaauucauacccaaagcucagcaaauccuacauuaaugauaaagggaaagaaguccucgugcuauggggcauucaccauccaucuacuagugcugaccaacaaagucucuaucagaaugcagaugcauauguuuuugugggaacaucaagauacagcaagaaguucaagccggaaauagcaauaagacccaaagugagggaucaagaagggagaaugaacuauuacuggacacuaguagagccgggagacaaaauaacauucgaagcaacuggaaaucuagugguaccgagauaugcauucgcaauggaaagaaaugcuggaucugguauuaucauuucagauacaccaguccacgauugcaauacaacuugucagacacccaagggugcuauaaacaccagccucccauuucagaauauacauccgaucacaauuggaaaauguccaaaauauguaaaaagcacaaaauugagacuggccacaggauugaggaaugucccgucuauucaaucuagaggccuauuuggggccauugccgguuucauugaagggggguggacagggaugguagauggaugguacgguuaucaccaucaaaaugagcaggggucaggauaugcagccgaccugaagagcacacagaaugccauugacgagauuacuaacaaaguaaauucuguuauugaaaagaugaauacacaguucacagcaguagguaaagaguucaaccaccuggaaaaaagaauagagaauuuaaauaaaaaaguugaugaugguuuccuggacauuuggacuuacaaugccgaacuguugguucuauuggaaaaugaaagaacuuuggacuaccacgauucaaaugugaagaacuuauaugaaaagguaagaagccaguuaaaaaacaaugccaaggaaauuggaaacggcugcuuugaauuuuaccacaaaugcgauaacacgugcauggaaagugucaaaaaugggacuuaugacuacccaaaauacucagaggaagcaaaauuaaacagagaagaaauagaugggguaaagcuggaaucaacaaggauuuaccagauuuuggcgaucuauucaacugucgccaguucauugguacugguagucucccugggggcaaucaguuucuggaugugcucuaaugggucucuacaguguagaauauguauuuaa

SEQ ID NO: 35441 - RNA, 1701 nt, Artificial Sequence
  derived and/or modified CDS sequence (wt) from hemagglutinin__InfluenzaA__ACV91680
augaaggcaauacuaguaguucugcuauauacauuugcaaccgcaaaugcagacacauuauguauagguuaucaugcgaacaauucaacagacacuguagacacaguacuagaaaagaauguaacaguaacacacucuguuaaccuucuagaagacaagcauaacgggaaacuaugcaaacuaagagggguagccccauugcauuuggguaaauguaacauugcuggcuggauccugggaaauccagagugugaaucacucuccacagcaagcucaugguccuacauuguggaaacaucuaguucagacaauggaacguguuacccaggagauuucaucgauuaugaggagcuaagagaacaauugagcucagugucaucauuugaaagguuugagauauuccccaagacaaguucauggcccaaucaugacucgaacaaagguguaacggcagcauguccucaugcuggagcaaaaagcuucuacaaaaauuuaauauggcuaguuaaaaaaggaaauucauacccaaagcucagcaaauccuacauuaaugauaaagggaaagaaguccucgugcuauggggcauucaccauccaucuacuagugcugaccaacaaagucucuaucagaaugcagaugcauauguuuuuguggggacaucaagauacagcaagaaguucaagccggaaauagcaauaagacccaaagugagggaucaagaagggagaaugaacuauuacuggacacuaguagagccgggagacaaaauaacauucgaagcaacuggaaaucuagugguaccgagauaugcauucgcaauggaaagaaaugcuggaucugguauuaucauuucagauacaccaguccacgauugcaauacaacuugucagacacccaagggugcuauaaacaccagccucccauuucagaauauacauccgaucacaauuggaaaauguccaaaauauguaaaaagcacaaaauugagacuggccacaggauugaggaaugucccgucuauucaaucuagaggccuauuuggggccauugccgguuucauugaagggggguggacagggaugguagauggaugguacgguuaucaccaucaaaaugagcaggggucaggauaugcagccgaccugaagagcacacagaaugccauugacgagauuacuaacaaaguaaauucuguuauugaaaagaugaauacacaguucacagcaguagguaaagaguucaaccaccuggaaaaaagaauagagaauuuaaauaaaaaaguugaugaugguuuccuggacauuuggacuuacaaugccgaacuguugguucuauuggaaaaugaaagaacuuuggacuaccacgauucaaaugugaagaacuuauaugaaaagguaagaagccaguuaaaaaacaaugccaaggaaauuggaaacggcugcuuugaauuuuaccacaaaugcgauaacacgugcauggaaagugucaaaaaugggacuuaugacuacccaaaauacucagaggaagcaaaauuaaacagagaagaaauagaugggguaaagcuggaaucaacaaggauuuaccagauuuuggcgaucuauucaacugucgccaguucauugguacugguagucucccugggggcaaucaguuucuggaugugcucuaaugggucucuacaguguagaauauguauuuaa

SEQ ID NO: 35442 - RNA, 1701 nt, Artificial Sequence
  derived and/or modified CDS sequence (wt) from hemagglutinin__InfluenzaA__ACX31591
augaagacuaucauugcuuugagcuacauucuaugucugguuuucgcucaaaaacuuccuggaaaugacaacagcacggcaacgcugugccuugggcaccaugcaguaccaaacggaacgauagugaaaacaaucacgaaugaccaaauugaaguuacuaaugcuacugagcugguucagaguuccucaacaggugaaauaugcgacaguccucaucagauccuugauggaaaaaacugcacacuaauagaugcucuauugggagacccucagugugauggcuuccaaaauaagaaaugggaccuuuuuguugaacgcagcaaagccuacagcaacuguuacccuuaugaugugccggauuaugccucccuuaggucacuaguugccucauccggcacacuggaguuuaacaaugaaagcuucaauuggacuggagucacucaaaacggaacaagcucugcuugcauaaggagaucuaaaaacaguuucuuuaguagauugaauugguugacccacuuaaacuucaaauaccaagcauugaacgugacuaugccgaacaaugaacaauuugacaaauuguacauuugggggguucaccacccggguacggacaaagaccaaaucuuccuguaugcucaagcaucaggaagaaucacagucucuaccaaaagaagccaacaaacuguaaucccgaauaucggaucuagaccccgaguaaggaauaucccuagcagaauaagcaucuauuggacaauaguaaaaccgggagacauacuuuugauuaacagcacagggaaucuaauugcuccuagggguuacuucaaaauacaaagugggaaaagcucaauaaugagaucagaugcacccauuggcaaaugcaauucugaaugcaucacuccaaauggaagcauucccaaugacaaaccauuccaaaauguaaacaggaucacauacggggccugucccagauauguuaagcaaaacacucugaaauuggcaacagggaugcgaaauguaccagagaaacaaacuagaggcauauuuggcgcaaucgcggguuucauagaaaaugguugggagggaaugguggaugguugguacgguuucaggcaucaaaauucugagggaagaggacaagcagcagaucucaaaagcacucaagcagcaaucgaucaaaucaaugggaagcugaauagauugaucgggaaaaccaacgagaaauuccaucagauugaaaaagaauucucagaagucgaagggagaauucaggaccuugagaaauauguugaggacacuaaaauagaucucuggucauacaacgcggagcuucuuguugcccuggagaaccaacauacaauugaucuaacugacucagaaaugaacaaacuguuugaaaaaacaaagaagcaacugagggaaaaugcugaggauaugggcaaugguuguuucaaaauauaccacaaaugugacaaugccugcauaggaucaaucagaaauggaacuuaugaccacgauguauacagagaugaagcauuaaacaaccgguuucagaucaagggaguugagcugaagucaggguacaaagauuggauccuauggauuuccuuugccauaucauguuuuuugcuuuguguugcuuuguugggguucaucaugugggccugccaaaaaggcaacauuaggugcaacauuugcauuuga

SEQ ID NO: 35443 - RNA, 1701 nt, Artificial Sequence
  derived and/or modified CDS sequence (wt) from hemagglutinin__InfluenzaA__ACX31933
augaaggcaauacuaguaguucugcuauauacauuugcaaccgcaaaugcagacacauuauguauagguuaucaugcgaacaauucaacagacacuguagacacaguacuagaaaagaauguaacaguaacacacucuguuaaccuucuagaagacaagcauaacgggaaacuaugcaaacuaagagggguagccccauugcauuuggguaaauguaacauugcuggcuggauccugggaaauccagagugugaaucacucuccacagcaagcucaugguccuacauuguggaaacaucuaguucaggcaauggaacguguuacccaggagauuucaucgauuaugaggagcuaagagagcaauugagcucagugucaucauuugaaagguuugagauauuccccaagacaaguucauggcccaaucaugacucgaacaaagguguaacggcagcauguccucaugcuggagcaaaaagcuucuacaaaaauuuaauauggcuaguuaaaaaaggaaacucauacccaaagcucagcaaauccuacauuaaugauaaagggaaagaaguccucgugcuauggggcauucaccauccaucuacuagugcugaccaacaaagucucuaucagaaugcagaugcauauguuuuuguggggacaucaagauacagcaagaaguucaagccggaaauagcaauaagacccaaagugagggaucaagaagggagaaugaacuauuacuggacacuaguagagccgggagacaaaauaacauucgaagcaacuggaaaucuagugguaccgagauaugcauucgcaauggaaagaaaugcuggaucugguauuaucauuucagauacaccaguccacgauugcaauacaacuugucagacacccaagggugcuauaaacaccagccucccauuucagaauauacauccgaucacaauuggaaaauguccaaaauauguaaaaagcacaaaauugagacuggccacaggauugaggaaugucccgucuauucaaucuagaggccuauuuggggccauugccgguuucauugaagggggguggacagggaugguagauggaugguacgguuaucaccaucaaaaugagcaggggucaggauaugcagccgaccugaagagcacacagaaugccauugacgagauuacuaacaaaguaaauucuguuauugaaaagaugaauacacaguucacagcaguagguaaagaguucaaccaccuggaaaaaagaauagagaauuuaaauaaaaaaguugaugaugguuuccuggacauuuggacuuacaaugccgaacuguugguucuauuggaaaaugaaagaacuuuggacuaccacgauucaaaugugaagaacuuauaugaaaagguaagaagccaguuaaaaaacaaugccaaggaaauuggaaacggcugcuuugaauuuuaccacaaaugcgauaacacgugcauggaaagugucaaaaaugggacuuaugacuacccaaaauacucagaggaagcaaaauuaaacagagaagaaauaaaugggguaaagcuggaaucaacaaggauuuaccagauuuuggcgaucuauucaacugucgccaguucauugguacugguagucucccugggggcaaucaguuucuggaugugcucuaaugggucucuacaguguagaauauguauuuaa

SEQ ID NO: 35444 - RNA, 1701 nt, Artificial Sequence
  derived and/or modified CDS sequence (wt) from hemagglutinin__InfluenzaA__ACX31934
augaaggcaauacuaguaguucugcuauauacauuugcaaccgcaaaugcagacacauuauguauagguuaucaugcgaacaauucaacagacacuguagacacaguacuagaaaagaauguaacaguaacacacucuguuaaccuucuagaagacaagcauaacgggaaacuaugcaaacuaagagggguagccccauugcauuuggguaaauguaacauugcuggcuggauccugggaaauccagagugugaaucacucuccacagcaagcucaugguccuacauuguggaaacaucuaguucagacaauggaacguguuacccaggagauuucaucgauuaugaggagcuaagagagcaauugagcucagugucaucauuugaaagguuugagauauuccccaagacaaguucauggcccaaucaugacucgaacaaagguguaacggcagcauguccucaugcuggagcaaaaagcuucuacaaaaauuuaauauggcuaguuaaaaaaggaaauucauacccaaagcucagcaaauccuacauuaaugauaaagggaaagaaguccucgugcuauggggcauucaccauccaucuacuagugcugaccaacaaagucucuaucagaaugcagaugcauauguuuuuguggggacaucaagauacagcaagaaguucaagccggaaauaacaauaagacccaaagugaggggucaagaagggagaaugaacuauuacuggacacuaguagagccgggagacaaaauaacauucgaagcaacuggaaaucuagugguaccgagauaugcauucgcaauggaaagaaaugcuggaucugguauuaucauuucagauacaccaguccacgauugcaauacaacuugucagacacccaagggugcuauaaacaccagccucccauuucagaauauacauccgaucacaauuggaaaauguccaaaauauguaaaaagcacaaaauugagacuggccacaggauugaggaaugucccgucuauucaaucuagaggccuauuuggggccauugccgguuucauugaagggggguggacagggaugguagauggaugguacgguuaucaccaucaaaaugagcaggggucaggauaugcagccgaccugaagagcacacagaaugccauugacgagauuacuaacaaaguaaauucuguuauugaaaagaugaauacacaguucacagcaguagguaaagaguucaaccaccuggaaaaaagaauagagaauuuaaauaaaaagguugaugaugguuuccuggacauuuggacuuacaaugccgaacuguugguucuauuggaaaaugaaagaacuuuggacuaccacgauucaaaugugaagaacuuauaugaaaagguaagaagccaguuaaaaaacaaugccaaggaaauuggaaacggcugcuuugaauuuuaccacaaaugcgauaacacgugcauggaaagugucaaaaaugggacuuaugacuacccaaaauacucagaggaagcaaaauuaaacagagaagaaauagaugggguaaagcuggaaucaacaaggauuuaccagauuuuggcgaucuauucaacugucgccaguucauugguacugguagucucccugggggcaaucaguuucuggaugugcucuaaugggucucuacaguguagaauauguauuuaa

SEQ ID NO: 35445 - RNA, 1701 nt, Artificial Sequence
  derived and/or modified CDS sequence (wt) from hemagglutinin__InfluenzaA__ACX31935
augaaggcaauacuaguaguucugcuauauacauuugcaaccgcaaaugcagacacauuauguauagguuaucaugcgaacaauucaacagacacuguagacacaguacuagaaaagaauguaacaguaacacacucuguuaaccuucuagaagacaagcauaacgggaaacuaugcaaacuaagagggguagccccauugcauuuggguaaauguaacauugcuggcuggauccugggaaauccagagugugaaucacucuccacagcaagcucaugguccuacauuguggaaacaucuaguucagacaauggaacguguuacccaggagauuucaucgauuaugaggagcuaagagagcaguugagcucagugucaucauuugaaagguuugagauauuccccaagacaaguucauggcccaaucaugacucgaacaaagguguaacggcagcauguccucaugcuggagcaaaaagcuucuacaaaaauuuaauauggcuaguuaaaaaaggaaauucauacccaaagcucagcaaauccuacauuaaugauaaagggaaagaaguccucgugcuauggggcauucaccauccaucuacuagugcugaccaacaaagucucuaucagaaugcagaugcauauguuuuuguggggacaucaagauacagcaagaaguucaagccggaaauagcaauaagacccaaagugagggaucaagaagggagaaugaacuauuacuggacacuaguagagccgggagacaaaauaacauucgaagcaacuggaaaucuagugguaccgagauaugcauucgcaauggaaagaaaugcuggaucugguauuaucauuucagauacaccaguccacgauugcaauacaacuugucagacacccaagggugcuauaaacaccagccucccauuucagaauauacauccgaucacaauuggaaaauguccaaaauauguaaaaagcacaaaauugagacuggccacaggguugaggaaugucccgucuauucaaucuagaggccuauuuggggccauugccgguuucauugaagggggguggacagggaugguagauggaugguacgguuaucaccaucaaaaugagcaggggucaggauaugcagccgaccugaagagcacacagaaugccauugacgagauuacuaacaaaguaaauucuguuauugaaaagaugaauacacaguucacagcaguagguaaagaguucaaccaccuggaaaaaagaauagagaauuuaaauaaaaaaguugaugaugguuuccuggacauuuggacuuacaaugccgaacuguugguucuauuggaaaaugaaagaacuuuggacuaccacgauucaaaugugaagaacuuauaugaaaagguaagaagccaguuaaaaaacaaugccaaggaaauuggaaacggcugcuuugaauuuuaccacaaaugcgauaacacgugcauggaaagugucaaaaaugggacuuaugacuacccaaaauacucagaggaagcaaaauuaaacagagaagaaauagaugggguaaagcuggaaucaacaaggauuuaccagauuuuggcgaucuauucaacugucgccaguucauugguacugguagucucccugggggcaaucaguuucuggaugugcucuaaugggucucuacaguguagaauauguauuuaa

SEQ ID NO: 35446 - RNA, 1701 nt, Artificial Sequence; identical to SEQ ID NO: 34681
  derived and/or modified CDS sequence (wt) from hemagglutinin__InfluenzaA__ACX31936

SEQ ID NO: 35447 - RNA, 1701 nt, Artificial Sequence
  derived and/or modified CDS sequence (wt) from hemagglutinin__InfluenzaA__ACX31939
augaaggcaauacuaguaguucugcuauauacauuugcaaccgcaaaugcagacacauuauguauagguuaucaugcgaacaauucaacagacacuguagacacaguacuagaaaagaauguaacaguaacacacucuguuaaccuucuagaagacaagcauaacgggaaacuaugcaaacuaagagggguagccccauugcauuuggguaaauguaacauugcuggcuggauccugggaaauccagagugugaaucacucuccacagcaagcucaugguccuacauuguggaaacaucuaguucagacaauggaacguguuacccaggagauuucaucgauuaugaggagcuaagagagcaauugagcucagugucaucauuugaaagguuugagauauuccccaagacaaguucauggcccaaucaugacucgaacaaagguguaacggcagcauguccucaugcuggagcaaaaagcuucuacaaaaauuuaauauggcuaguuaaaaaaggaaauucauacccaaagcucagcaaauccuacauuaaugauaaagggaaagaaguccucgugcuauggggcauucaccauccaucuacuagugcugaccaacaaagucucuaucagaaugcagaugcauauguuuuuguggggacaucaagauacagcaagaaguucaagccggaaauagcaauaagacccaaagugagggaucaagaagggagaaugaacuauuacuggacacuaguagagccgggagacaaaauaacauucgaagcaacuggaaaucuagugguaccgagauaugcauucgcaauggaaagaaaugcuggaucugguauuaucauuucagauacaccaguccacgauugcaauacaacuugucagacacccaagggugcuauaaacaccagccucccauuucagaauauacauccgaucacaauuggaaaauguccaaaauauguaaaaagcacaaaauugagacuggccacaggauugaggaaugucccgucuauucaaucuagaggccuauuuggggccauugccgguuucauugaagggggguggacagggaugguagauggaugguacgguuaucaccaucaaaaugagcaggggucaggauaugcagccgaccugaagagcacacagaaugccauugacgagauuacuaacaaaguaaauucuguuauugaaaagaugaauacacaguucacagcaguagguaaagaguucaaccaccuggaaaaaagaauagagaauuuaaauaaaaaaauugaugaugguuuccuggacauuuggacuuacaaugccgaacuguugguucuauuggaaaaugaaagaacuuuggacuaccacgauucaaaugugaagaacuuauaugaaaagguaagaagccaguuaaaaaacaaugccaaggaaauuggaaacggcugcuuugaauuuuaccacaaaugcgauaacacgugcauggaaagugucaaaaaugggacuuacgacuacccaaaauacucagaggaagcaaaauuaaacagagaagaaauagaugggguaaagcuggaaucaacaaggauuuaccagauuuuggcgaucuauucaacugucgccaguucauugguacugguagucucccugggggcaaucaguuucuggaugugcucuaaugggucucuacaguguagaauauguauuuaa

SEQ ID NO: 35448 - RNA, 1701 nt, Artificial Sequence; identical to SEQ ID NO: 35447
  derived and/or modified CDS sequence (wt) from hemagglutinin__InfluenzaA__ACX31940

SEQ ID NO: 35449 - RNA, 1701 nt, Artificial Sequence; identical to SEQ ID NO: 34681
  derived and/or modified CDS sequence (wt) from hemagglutinin__InfluenzaA__ACX31943

SEQ ID NO: 35450 - RNA, 1701 nt, Artificial Sequence; identical to SEQ ID NO: 34681
  derived and/or modified CDS sequence (wt) from hemagglutinin__InfluenzaA__ACX31946

SEQ ID NO: 35451 - RNA, 1701 nt, Artificial Sequence; identical to SEQ ID NO: 34681
  derived and/or modified CDS sequence (wt) from hemagglutinin__InfluenzaA__ACX31947

SEQ ID NO: 35452 - RNA, 1701 nt, Artificial Sequence
  derived and/or modified CDS sequence (wt) from hemagglutinin__InfluenzaA__ACX31948
augaaggcaauacuaguaguucugcuauauacauuugcaaccgcaaaugcagacacauuauguauagguuaucaugcgaacaauucaacagacacuguagacacaguacuagaaaagaauguaacaguaacacacucuguuaaccuucuagaagacaagcauaacgggaaacuaugcaaacuaagagggguagccccauugcauuuggguaaauguaacauugcuggcuggauccugggaaauccagagugugaaucacucuccacagcaagcucaugguccuacauuguggaaacaucuaguucagacaauggaacguguuacccaggagauuucaucgauuaugaggagcuaagagagcaauugagcucagugucaucauuugaaagguuugagauauuccccaagacaaguucauggcccaaucaugacucgaacaaagguguaacggcagcauguccucaugcuggagcaaaaagcuucuacaaaaauuuaauauggcuaguuaaaaaaggaaauucauacccaaagcucagcaaauccuacauuaaugauaaagggaaagaaguccucgugcuauggggcauucaccauccaucuacuagugcugaccaacaaagccucuaucagaaugcagaugcauauguuuuuguggggacaucaagauacagcaagaaguucaagccggaaauagcaauaagacccaaagugagggaucaagaagggagaaugaacuauuacuggacacuaguagagccgggagacaaaauaacauucgaagcaacuggaaaucuagugguaccgagauaugcauucgcaauggaaagaaaugcuggaucugguauuaucauuucagauacaccaguccacgauugcaauacaacuugucagacacccaagggugcuauaaacaccagccucccauuucagaauauacauccgaucacaauuggaaaauguccaaaauauguaaaaagcacaaaauugagacuggccacaggauugaggaaugucccgucuauucaaucuagaggccuauuuggggccauugccgguuucauugaagggggguggacagggaugguagauggaugguacgguuaucaccaucaaaaugagcaggggucaggauaugcagccgaccugaagagcacacagaaugccauugacgagauuacuaacaaaguaaauucuguuauugaaaagaugaauacacaguucacagcaguagguaaagaguucaaccaccuggaaaaaagaauagagaauuuaaauaaaaaaguugaugaugguuuccuggacauuuggacuuacaaugccgaacuguugguucuauuggaaaaugaaagaacuuuggacuaccacgauucaaaugugaagaacuuauaugaaaagguaagaagccaguuaaaaaacaaugccaaggaaauuggaaacggcugcuuugaauuuuaccacaaaugcgauaacacgugcauggaaagugucaaaaaugggacuuaugacuacccaaaauacucagaggaagcaaaauuaaacagagaagaaauagaugggguaaagcuggaaucaacaaggauuuaccagauuuuggcgaucuauucaacugucgccaguucauugguacugguagucucccugggggcaaucaguuucuggaugugcucuaaugggucucuacaguguagaauauguauuuaa

SEQ ID NO: 35453 - RNA, 1701 nt, Artificial Sequence
  derived and/or modified CDS sequence (wt) from hemagglutinin__InfluenzaA__ACX31949
augaaggcaauacuaguaguucugcuauauacauuugcaaccgcaaaugcagacacauuauguauagguuaucaugcgaacaauucaacagacacuguagacacaguacuagaaaagaauguaacaguaacacacucuguuaaccuucuagaagacaagcauaacgggaaacuaugcaaacuaagagggguagccccauugcauuuggguaaauguaacauugcuggcuggauccugggaaauccagagugugaaucacucuccacagcaagcucaugguccuacauuguggaaacaucuaguucagacaauggaacguguuacccaggagauuucaucgauuaugaggagcuaagagagcaauugagcucagugucaucauuugaaagguuugagauauuccccaagacaaguucauggcccaaucaugacucgaacaaagguguaacggcagcauguccucaugcuggagcaaaaagcuucuacaaaaauuuaauauggcuaguuaaaaaaggaaauucauacccaaagcucagcaaauccuacauuaaugauaaagggaaagaaguccucgugcuauggggcauucaccauccaucuacuagugcugaccaacaaagucucuaucagaaugcagaugcauauguuuuuguggggacaucaagauacagcaagaaguucaagccggaaauagcaauaagacccaaagugagggaucaagaagggagaaugaacuauuacuggacacuaguagagccgggagacaaaauaacauucgaagcaacuggaaaucuagugguaccgagauaugcauucgcaauggaaagaaaugcuggaucugguauuaucauuucagauacaccaguccacuauugcaauacaacuugucagacacccaagggugcuauaaacaccagccucccauuucagaauauacauccgaucacaauuggaaaauguccaaaauauguaaaaagcacaaaauugagacuggccacaggauugaggaaugucccgucuauucaaucuagaggccuauuuggggccauugccgguuucauugaagggggguggacagggaugguagauggaugguacgguuaucaccaucaaaaugagcaggggucaggauaugcagccgaccugaagagcacacagaaugccauugacgagauuacuaacaaaguaaauucuguuauugaaaagaugaauacacaguucacagcaguagguaaagaguucaaccaccuggaaaaaagaauagagaauuuaaauaaaaaaguugaugaugguuuccuggacauuuggacuuacaaugccgaacuguugguucuauuggaaaaugaaagaacuuuggacuaccacgauucaaaugugaagaacuuauaugaagagguaagaagccaguuaaaaaacaaugccaaggaaauuggaaacggcugcuuugaauuuuaccacaaaugcgauaacacgugcauggaaagugucaaaaaugggacuuaugacuacccaaaauacucagaggaagcaaaauuaaacagagaagaaauagaugggguaaagcuggaaucaacaaggauuuaccagauuuuggcgaucuauucaacugucgccaguucauugguacugguagucucccugggggcaaucaguuucuggaugugcucuaaugggucucuacaguguagaauauguauuuaa

SEQ ID NO: 35454 - RNA, 1701 nt, Artificial Sequence
  derived and/or modified CDS sequence (wt) from hemagglutinin__InfluenzaA__ACX31950
augaaggcaauacuaguaguucugcuauauacauuugcaaccgcaaaugcagacacauuauguauagguuaucaugcgaacaauucaacagacacuguagacacaguacuagaaaagaauguaacaguaacacacucuguuaaccuucuagaagacaagcauaacgggaaacuaugcaaacuaagagggguagccccauugcauuuggguaaauguaacauugcuggcuggauccugggaaauccagagugugaaucacucuccacagcaagcucaugguccuacauuguggaaacaucuaguucagacaauggaacguguuacccaggagauuucaucgauuaugaggagcuaagagagcaauugagcucagugucaucauuugaaagguuugagauauuccccaagacaaguucauggcccaaucaugacucgaacaaagguguaacggcagcauguccucaugcuggagcaaaaagcuucuacaaaaauuuaauauggcuaguuaaaaaaggaaauucauacccaaagcucagcaaauccuacauuaaugauaaagggaaagaaguccucgugcuauggggcauucaccauccaucuacuagugcugaccaacaaagucucuaucagaaugcagaugcauauguuuuuguggggacaucaagauacagcaagaaguucaagccggaaauagcaauaagacccaaagugagggaucaagaagggagaaugaacuauuacuggacacuaguagagccgggagacaaaauaacauucgaagcaacuggaaaucuagugguaccgagauaugcauucgcaauggaaagaaaugcuggaucugguauuaucauuucagauacaccaguccacgauugcaauacaacuugucagacacccaagggugcuauaaacaccagccucccauuucagaauauacauccgaucacaauuggaaaauguccaaaauauguaaaaagcacaaaauugagacuggccacaggauugaggaaugucccgucuauucaaucuagaggccuauuuggggccauugccgguuucauugaagggggguggacagggaugguagauggaugguacgguuaucaccaucaaaaugagcaggggucaggauaugcagccgaccugaagagcacacagaaugccauugacgagauuacuaacaaaguaaauucuguuauugaaaagaugaauacacaguucacagcaguagguaaagaguucaaccaccuggaaaaaagaauagagaauuuaaauaaaaaaguugaugaugguuuccuggacauuuggacuuacaaugccgaacuguugguucuauuggaaaaugaaagaacuuuggacuaccacgauucaaaugugaagaacuuauaugaaaagguaaggagccaguuaaaaaacaaugccaaggaaauuggaaacggcugcuuugaauuuuaccacaaaugcgauaacacgugcauggaaagugucaaaaaugggacuuaugacuacccaaaauacucagaggaagcaaaauuaaacagagaagaaauagaugggguaaagcuggaaucaacaaggauuuaccagauuuuggcgaucuauucaacugucgccaguucauugguacugguagucucccugggggcaaucaguuucuggaugugcucuaaugggucucuacaguguagaauauguauuuaa

SEQ ID NO: 35455 - RNA, 1701 nt, Artificial Sequence; identical to SEQ ID NO: 34681
  derived and/or modified CDS sequence (wt) from hemagglutinin__InfluenzaA__ACX31951

SEQ ID NO: 35456 - RNA, 1701 nt, Artificial Sequence; identical to SEQ ID NO: 35031
  derived and/or modified CDS sequence (wt) from hemagglutinin__InfluenzaA__ACX31954

SEQ ID NO: 35457 - RNA, 1701 nt, Artificial Sequence; identical to SEQ ID NO: 34681
  derived and/or modified CDS sequence (wt) from hemagglutinin__InfluenzaA__ACX31955

SEQ ID NO: 35458 - RNA, 1701 nt, Artificial Sequence; identical to SEQ ID NO: 34676
  derived and/or modified CDS sequence (wt) from hemagglutinin__InfluenzaA__ACX31956

SEQ ID NO: 35459 - RNA, 1701 nt, Artificial Sequence
  derived and/or modified CDS sequence (wt) from hemagglutinin__InfluenzaA__ACX31957
augaaggcaauacuaguaguucugcuauauacauuugcaaccgcaaaugcagacacauuauguauagguuaucaugcgaacaauucaacagacacuguagacacaguacuagaaaagaauguaacaguaacacacucuguuaaccuucuagaagacaagcauaacgggaaacuaugcaaacuaagagggguagccccauugcauuuggguaaauguaacauugcuggcuggauccugggaaauccagagugugaaucacucuccacagcaagcucaugguccuacauuguggaaacaucuaguucagacaauggaacguguuacccaggagauuucaucgauuaugaggagcuaagagagcaauugagcucagugucaucauuugaaagguuugagauauuccccaagacaaguucauggcccaaucaugacucgaacaaagguguaacggcagcauguccucaugcuggagcaaaaagcuucuacaaaaauuuaauauggcuaguuaaaaaaggaaauucauacccaaagcucagcaaauccuacauuaaugauaaagggaaagaaguccucgugcuauggggcauucaucauccaucuacuagugcugaccaacaaagucucuaucagaaugcagaugcauauguuuuuguggggacaucaagauacagcaagaaguucaagccggaaauagcaauaagacccaaagugagggaucaagaagggagaaugaacuauuacuggacacuaguagagccgggagacaaaauaacauucgaagcaacuggaaaucuagugguaccgagauaugcauucgcaauggaaagaaaugcuggaucugguauuaucauuucagauacaccaguccacgauugcaauacaacuugucagacacccaagggugcuauaaacaccagccucccauuucagaauauacauccgaucacaauuggaaaauguccaaaauauguaaaaagcacaaaauugagacuggccacaggauugaggaaugucccgucuauucaaucuagaggccuauuuggggccauugccgguuucauugaagggggguggacagggaugguagauggaugguacgguuaucaccaucaaaaugagcaggggucaggauaugcagccgaccugaagagcacacagaaugccauugacgagauuacuaacaaaguaaauucuguuauugaaaagaugaauacacaguucacagcaguagguaaagaguucaaccaccuggaaaaaagaauagagaauuuaaauaaaaaaguugaugaugguuuccuggacauuuggacuuacaaugccgaacuguugguucuauuggaaaaugaaagaacuuuggacuaccacgauucaaaugugaagaacuuauaugaaaagguaagaagccaguuaaaaaacaaugccaaggaaauuggaaacggcugcuuugaauuuuaccacaaaugcgauaacacgugcauggaaagugucaaaaaugggacuuaugacuacccaaaauacucagaggaagcaaaauuaaacagagaagaaauagaugggguaaagcuggaaucaacaaggauuuaccagauuuuggcgaucuauucaacugucgccaguucauugguacugguagucucccugggggcaaucaguuucuggaugugcucuaaugggucucuacaguguagaauauguauuuaa

SEQ ID NO: 35460 - RNA, 1701 nt, Artificial Sequence
  derived and/or modified CDS sequence (wt) from hemagglutinin__InfluenzaA__ACX31958
augaaggcaauacuaguaguucugcuauauacauuugcaaccgcaaaugcagacacauuauguauagguuaucaugcgaacaauucaacagacacuguagacacaguacuagaaaagaauguaacaguaacacacucuguuaaccuucuagaagacaagcauaacgggaaacuaugcaaacuaagagggguagccccauugcauuuggguaaauguaacauugcuggcuggauccugggaaauccagagugugaaucacucuccacagcaagcucaugguccuacauuguggaaacaucuaguucagacaauggaacguguuacccaggagauuucaucgauuaugaggagcuaagagagcaauugagcucagugucaucauuugaaagguuugagauauuccccaagacaaguucauggcccaaucaugacucgaacaaagguguaacggcagcauguccucaugcuggagcaaaaaguuucuacaaaaauuuaauauggcuaguuaaaaaaggaaauucauacccaaagcucagcaaauccuacauuaaugauaaagggaaagaaguccucgugcuauggggcauucaccauccaucuacuagugcugaccaacaaagucucuaucagaaugcagaugcauauguuuuuguggggucaucaagauacagcaagaaguucaagccggaaauagcaauaagacccaaagugagggaucaagaagggagaaugaacuauuacuggacacuaguagagccgggagacaaaauaacauucgaagcaacuggaaaucuagugguaccgagauaugcauucgcaauggaaagaaaugcuggaucugguauuaucauuucagauacaccaguccacgauugcaauacaacuugucagacacccaagggugcuauaaacaccagccucccauuucagaauauacauccgaucacaauuggaaaauguccaaaauauguaaaaagcacaaaauugagacuggccacaggauugaggaaugucccgucuauucaaucuagaggccuauuuggggccauugccgguuucauugaagggggguggacagggaugguagauggaugguacgguuaucaccaucaaaaugagcaggggucaggauaugcagccgaccugaagagcacacagaaugccauugacgagauuacuaacaaaguaaauucuguuauugaaaagaugaauacacaguucacagcaguagguaaagaguucaaccaccuggaaaaaagaauagagaauuuaaauaaaaaaguugaugaugguuuccuggacauuuggacuuacaaugccgaacuguugguucuauuggaaaaugaaagaacuuuggacuaccacgauucaaaugugaagaacuuauaugaaaagguaagaagccaguuaaaaaacaaugccaaggaaauuggaaacggcugcuuugaauuuuaccacaaaugcgauaacacgugcauggaaagugucaaaaaugggacuuaugacuacccaaaauacucagaggaagcaaaauuaaacagagaagaaauagaugggguaaagcuggaaucaacaaggauuuaccagauuuuggcgaucuauucaacugucgccaguucauugguacugguagucucccugggggcaaucaguuucuggaugugcucuaaugggucucuacaguguagaauauguauuuaa

SEQ ID NO: 35461 - RNA, 1701 nt, Artificial Sequence; identical to SEQ ID NO: 34965
  derived and/or modified CDS sequence (wt) from hemagglutinin__InfluenzaA__ACX31960

SEQ ID NO: 35462 - RNA, 1701 nt, Artificial Sequence
  derived and/or modified CDS sequence (wt) from hemagglutinin__InfluenzaA__ACX31961
augaaggcaauacuaguaguuaugcuauauacauuugcaaccgcaaaugcagacacauuauguauagguuaucaugcgaacaauucaacagacacuguagacacaguacuagaaaagaauguaacaguaacacacucuguuaaccuucuagaagacaagcauaacgggaaacuaugcaaacuaagagggguagccccauugcauuuggguaaauguaacauugcuggcuggauccugggaaauccagagugugaaucacucuccacagcaagcucaugguccuacauuguggaaacaucuaguucagacaauggaacguguuacccaggagauuucaucgauuaugaggagcuaagagagcaauugagcucagugucaucauuugaaagguuugagauauuccccaagacaaguucauggcccaaucaugacucgaacaaagguguaacggcagcauguccucaugcuggagcaaaaagcuucuacaaaaauuuaauauggcuaguuaaaaaaggaaauucauacccaaagcucagcaaauccuacauuaaugauaaagggaaagaaguccucgugcuauggggcauucaccauccaucuacuagugcugaccaacaaagucucuaucagaaugcagaugcauauguuuuuguggggucaucaagauacagcaagaaguucaagccggaaauagcaauaagacccaaagugagggaucaagaagggagaaugaacuauuacuggacacuaguagagccgggagacaaaauaacauucgaagcaacuggaaaucuagugguaccgagauaugcauucgcaauggaaagaaaugcuggaucugguauuaucauuucagauacaccaguccacgauugcaauacaacuugucagacacccaagggugcuauaaacaccagccucccauuucagaauauacauccgaucacaauuggaaaauguccaaaauauguaaaaagcacaaaauugagacuggccacaggauugaggaaugucccgucuauucaaucuagaggccuauuuggggccauugccgguuucauugaagggggguggacagggaugguagauggaugguacgguuaucaccaucaaaaugagcaggggucaggauaugcagccgaccugaagagcacacagaaugccauugacgagauuacuaacaaaguaaauucuguuauugaaaagaugaauacacaguucacagcaguagguaaagaguucaaccaccuggaaaaaagaauagagaauuuaaauaaaaaaguugaugaugguuucauggacauuuggacuuacaaugccgaacuguugguucuauuggaaaaugaaagaacuuuggacuaccacgauucaaaugugaagaacuuauaugaaaagguaagaagccagcuaaaaaacaaugccaaggaaauuggaaacggcugcuuugaauuuuaccacaaaugcgauaacacgugcauggaaagugucaaaaaugggacuuaugacuacccaaaauacucagaggaagcaaaauuaaacagagaagaaauagaugggguaaagcuggaaucaacaaggauuuaccagauuuuggcgaucuauucaacugucgccaguucauugguacugguagucucccugggggcaaucaguuucuggaugugcucuaaugggucucuacaguguagaauauguauuuaa

SEQ ID NO: 35463 - RNA, 1701 nt, Artificial Sequence
  derived and/or modified CDS sequence (wt) from hemagglutinin__InfluenzaA__ACX31962
augaaggcaauacuaguaguucugcuauauacauuugcaaccgcaaaugcagacacauuauguauagguuaucaugcgaacaauucaacagacacuguagacacaguacuagaaaagaauguaacaguaacacacucuguuaaccuucuagaagacaagcauaacgggaaacuaugcaaacuaagagggguagccccauugcauuuggguaaauguaacauugcuggcuggauccugggaaauccagagugugaaucacucuccacagcaagcucaugguccuacauuguggaaacaucuaguucagacaauggaacguguuacccaggagauuucaucgauuaugaggagcuaagagagcaauugagcucagugucaucauuugaaagguuugagauauuccccaagacaaguucauggcccaaucaugacucgaacaaagguguaacggcagcauguccucaugcuggagcaaaaagcuucuacaaaaauuuaauauggcuaguuaaaaaaggaaauucauacccaaagcucagcaaauccuacauuaaugauaaagggaaagaaguccucgugcuauggggcauucaccauccaucuacuagugcugaccaacaaagucucuaucagaaugcagaugcauauguuuuuguggggacaucaagauacagcaagaaguucaagccggaaauagcaauaagacccaaagugagggaucaagaagggagaaugaacuauuacuggacacuaguagagccgggagacaaaauaacauucgaagcaacuggaaaucuagugguaccgagauaugcauucgcaauggaaagaaaugcuggaucugguauuaucauuucagauacaccaguccacgauugcaacacaacuugucagacacccaagggugcuauaaacaccagccucccauuucagaauauacauccgaucacaauuggaaaauguccaaaauauguaaaaagcacaaaauugagacuggccacaggauugaggaaugucccgucuauucaaucuagaggccuauuuggggccauugccgguuucauugaagggggguggacagggaugguagauggaugguacgguuaucaccaucaaaaugagcaggggucaggauaugcagccgaccugaagagcacacagaaugccauugacgagauuacuaacaaaguaaauucuguuauugaaaagaugaauacacaguucacagcaguagguaaagaguucaaccaccuggaaaaaagaauagagaauuuaaauaaaaaaguugaugaugguuuccuggacauuuggacuuacaaugccgaacuguugguucuauuggaaaaugaaagaacuuuggacuaccacgauucaaaugugaagaacuuauaugaaaagguaagaagccaguuaaaaaacaaugccaaggaaauuggaaacggcugcuuugaauuuuaccacaaaugcgauaacacgugcauggaaagugucaaaaaugggacuuaugacuacccaaaauacucagaggaagcaaaauuaaacagagaagaaauagaugggguaaagcuggaaucaacaaggauuuaccagauuuuggcgaucuauucaacugucgccaguucauugguacugguagucucccugggggcaaucaguuucuggaugugcucuaaugggucucuacaguguagaauauguauuuaa

SEQ ID NO: 35464 - RNA, 1701 nt, Artificial Sequence
  derived and/or modified CDS sequence (wt) from hemagglutinin__InfluenzaA__ACX31964
augaaggcaauacuaguaguucugcuauauacauuugcaaccgcaaaugcagacacauuauguauagguuaucaugcgaacaauucaacagacacuguagacacaguacuagaaaagaauguaacaguaacacacucuguuaaccuucuagaagacaagcauaacgggaaacuaugcaaacuaagagggguagccccauugcauuuggguaaauguaacauugcuggcuggauccugggaaauccagagugugaaucacucuccacagcaagcucaugguccuacauuguggaaacaucuaguucagacaauggaacguguuacccaggagauuucaucgauuaugaggagcuaagagagcaauugagcucagugucaucauuugaaagguuugagauauuccccaagacaaguucauggcccaaucaugacucgaacaaagguguaacggcagcauguccucaugcuggagcaaaaagcuucuacaaaaauuuaauauggcuaguuaaaaaaggaaauucauacccaaagcucagcaaauccuacauuaaugauaaagggaaagaaguccucgugcuauggggcauucaccauccaucuacuagugcugaccaacaaagccucuaucagaaugcagaugcauauguuuuuguggggacaucaagauacagcaagaaguucaagccggaaauagcaauaagacccaaagugagggaucaagaagggagaaugaacuauuacuggacacuaguagagccgggagacaaaauaacauucgaagcaacuggaaaucuagugguaccgagauaugcauucgcaauggaaagaaaugcuggaucugguauuaucauuucagauacaccaguccacgauugcaauacaacuugucagacacccaagggugcuauaaacaccagccucccauuucagaauauacauccgaucacaauuggaaaauguccaaaauauguaaaaagcacaaaauugagacuggccacaggauugaggaaugucccgucuauucaaucuagaggccuauuuggggccauugccgguuucauugaagggggguggacagggaugguagauggaugguacgguuaucaccaucaaaaugagcaggggucaggauaugcagccgaccugaagagcacacagaaugccauugacgagauuacuaacaaaguaaauucuguuauugaaaagaugaauacacaguucacagcaguagguaaagaguucaaccaccuggaaaaaagaauagagaauuuaaauaaaaaaguugaugaugguuuccuggacauuuggacuuacaaugccgaacuguugguucuauuggaaaaugaaagaacuuuggacuaccacgauucaaaugugaagaacuuauaugaaaagguaagaagccaguuaaaaaacaaugccaaggaaauuggaaacggcugcuuugaauuuuaucacaaaugcgauaacacgugcauggaaagugucaaaaaugggacuuaugacuacccaaaauacucagaggaagcaaaauuaaacagagaagaaauagaugggguaaagcuggaaucaacaaggauuuaccagauuuuggcgaucuauucaacugucgccaguucauugguacugguagucucccugggggcaaucaguuucuggaugugcucuaaugggucucuacaguguagaauauguauuuaa

SEQ ID NO: 35465 - RNA, 1701 nt, Artificial Sequence; identical to SEQ ID NO: 34676
  derived and/or modified CDS sequence (wt) from hemagglutinin__InfluenzaA__ACX35237

SEQ ID NO: 35466 - RNA, 1701 nt, Artificial Sequence; identical to SEQ ID NO: 34681
  derived and/or modified CDS sequence (wt) from hemagglutinin__InfluenzaA__ACX35247

SEQ ID NO: 35467 - RNA, 1701 nt, Artificial Sequence; identical to SEQ ID NO: 34681
  derived and/or modified CDS sequence (wt) from hemagglutinin__InfluenzaA__ACX35257

SEQ ID NO: 35468 - RNA, 1701 nt, Artificial Sequence; identical to SEQ ID NO: 34681
  derived and/or modified CDS sequence (wt) from hemagglutinin__InfluenzaA__ACX35267

SEQ ID NO: 35469 - RNA, 1701 nt, Artificial Sequence; identical to SEQ ID NO: 34681
  derived and/or modified CDS sequence (wt) from hemagglutinin__InfluenzaA__ACX35277

SEQ ID NO: 35470 - RNA, 1701 nt, Artificial Sequence; identical to SEQ ID NO: 34681
  derived and/or modified CDS sequence (wt) from hemagglutinin__InfluenzaA__ACX35287

SEQ ID NO: 35471 - RNA, 1701 nt, Artificial Sequence; identical to SEQ ID NO: 34895
  derived and/or modified CDS sequence (wt) from hemagglutinin__InfluenzaA__ACX35297

SEQ ID NO: 35472 - RNA, 1701 nt, Artificial Sequence
  derived and/or modified CDS sequence (wt) from hemagglutinin__InfluenzaA__ACX35307
augaaggcaauacuaguaguucugcuauauacauuugcaaccgcaaaugcagacacauuauguauagguuaucaugcgaacaauucaacagacacuguagacacaguacuagaaaagaauguaacaguaacacacucuguuaaccuucuagaagacaagcauaacgggaaacuaugcaaacuaagagggguagccccauugcauuuggguaaauguaacauugcuggcuggauccugggaaauccagagugugaaucacucuccacagcaagcucaugguccuacauuguggaaacaucuaguucagacaauggaacguguuacccaggagauuucaucgauuaugaggagcuaagagagcaauugagcucagugucaucauuugaaagguuugagauauuccccaagacaaguucauggcccaaucaugacucgaacaaagguguaacggcagcauguccucaugcuggagcaaaaagcuucuacaaaaauuuaauauggcuaguuaaaaaaggaaauucauacccaaagcucagcaaauccuacauuaaugauaaagggaaagaaguccucgugcuauggggcauucaccauccaucuacuagugcugaccaacaaagucucuaucagaaugcagaugcauauguuuuuguggggacaucaagauacagcaagaaguucaagccggaaauagcaauaagacccaaagugagggaucaagaagggagaaugaacuauuacuggacacuaguagggccgggagacaaaauaacauucgaagcaacuggaaaucuagugguaccgagauaugcauucgcaauggaaagaaaugcuggaucugguauuaucauuucagauacaccaguccacgauugcaauacaacuugucagacacccaagggugcuauaaacaccagccucccauuucagaauauacauccgaucacaauuggaaaauguccaaaauauguaaaaagcacaaaauugagacuggccacaggauugaggaaugucccgucuauucaaucuagaggccuauuuggggccauugccgguuucauugaagggggguggacagggaugguagauggaugguacgguuaucaccaucaaaaugagcaggggucaggauaugcagccgaccugaagagcacacagaaugccauugacgagauuacuaacaaaguaaauucuguuauugaaaagaugaauacacaguucacagcaguagguaaagaguucaaccaccuggaaaaaagaauagagaauuuaaauaaaaaaguugaugaugguuuccuggacauuuggacuuacaaugccgaacuguugguucuauuggaaaaugaaagaacuuuggacuaccacgauucaaaugugaagaacuuauaugaaaagguaagaagccaguuaaaaaacaaugccaaggaaauuggaaacggcugcuuugaauuuuaccacaaaugcgauaacacgugcauggaaagugucaaaaaugggacuuaugacuacccaaaauacucagaggaagcaaaauuaaacagagaagaaauagaugggguaaagcuggaaucaacaaggauuuaccagauuuuggcgaucuauucaacugucgccaguucauugguacugguagucucccugggggcaaucaguuucuggaugugcucuaaugggucucuacaguguagaauauguauuuaa

SEQ ID NO: 35473 - RNA, 1701 nt, Artificial Sequence; identical to SEQ ID NO: 34965
  derived and/or modified CDS sequence (wt) from hemagglutinin__InfluenzaA__ACX35317

SEQ ID NO: 35474 - RNA, 1701 nt, Artificial Sequence
  derived and/or modified CDS sequence (wt) from hemagglutinin__InfluenzaA__ACX35327
augaaggcaauacuaguaguucugcuauauacauuugcaaccgcaaaugcagacacauuauguauagguuaucaugcgaacaauucaacagacacuguagacacaguacuagaaaagaauguaacaguaacacacucuguuaaccuucuagaagacaagcauaacgggaaacuaugcaaacuaagagggguagccccauugcauuuggguaaauguaacauugcuggcuggauccugggaaauccagagugugaaucacucuccacagcaagcucaugguccuacauuguggaaacaucuaguucagacaauggaacguguuacccaggagauuucaucgauuaugaggagcuaagagagcaauugagcucagugucaucauuugaaagguuugagauauuccccaagacaaguucauggcccaaucaugacucgaacaaagguguaacggcagcauguccucaugcuggagcaaaaagcuucuacaaaaauuuaauauggcuaguuaaaaaaggaaauucauacccaaagcucagcaaauccuacauuaaugauaaagggaaagaaguccucgugcuauggggcauucaccauccaucuacuagugcugaccaacaaagucucuaucagaaugcagauucauauguuuuuguggggacaucaagauacagcaagaaguucaagccggaaauagcaauaagacccaaagugagggaucaagaagggagaaugaacuauuacuggacacuaguagagccgggagacaaaauaacauucgaagcaacuggaaaucuagugguaccgagauaugcauucgcaauggaaagaaaugcuggaucugguauuaucauuucagauacaccaguccacgauugcaauacaacuugucagacacccaagggugcuauaaacaccagccucccauuucagaauauacauccgaucacaauuggaaaauguccaaaauauguaaaaagcacaaaauugagacuggccacaggauugaggaaugucccgucuauucaaucuagaggccuauuuggggccauugccgguuucauugaagggggguggacagggaugguagauggaugguacgguuaucaccaucaaaaugagcaggggucaggauaugcagccgaccugaagagcacacagaaugccauugacgagauuacuaacaaaguaaauucuguuauugaaaagaugaauacacaguucacagcaguagguaaagaguucaaccaccuggaaaaaagaauagagaauuuaaauaaaaaaguugaugaugguuuccuggacauuuggacuuacaaugccgaacuguugguucuauuggaaaaugaaagaacuuuggacuaccacgauucaaaugugaagaacuuauaugaaaagguaagaagccaguuaaaaaacaaugccaaggaaauuggaaacggcugcuuugaauuuuaccacaaaugcgauaacacgugcauggaaagugucaaaaaugggacuuaugacuacccaaaauacucagaggaagcaaaauuaaacagagaagaaauagaugggguaaagcuggaaucaacaaggauuuaccagauuuuggcgaucuauucaacugucgccaguucauugguacugguagucucccugggggcaaucaguuucuggaugugcucuaaugggucucuacaguguagaauauguauuuaa

SEQ ID NO: 35475 - RNA, 1701 nt, Artificial Sequence
  derived and/or modified CDS sequence (wt) from hemagglutinin__InfluenzaA__ACX36501
augaaggcaauacuaguaguucugcuauauacauuugcaaccgcaaaugcagacacauuauguauagguuaucaugcgaacaauucaacagacacuguagacacaguacuagaaaagaauguaacaguaacacacucuguuaaccuucuagaagacaagcauaacgggaaacuaugcaaacuaagagggguagccccauugcauuuggguaaauguaacauugcuggcuggauccugggaaauccagagugugaaucacucuccacagcaagcucaugguccuacauuguggaaacaucuaguucagacaauggaacguguuacccaggagauuucaucgauuaugaggagcuaagagagcaauugagcucagugucaucauuugaaagguuugagauauuccccaagacaaguucauggcccaaucaugacucgaacaaagguguaacggcagcauguccucaugcuggagcaaaaagcuucuacaaaaauuuaauauggcuaguuaaaaaaggaaauucauacccaaagcucagcaaauccuacauuaaugauaaagggaaagaaguccucgugcuauggggcauucaccauccaucuacuagugcugaccaacaaaguaucuaucagaaugcagaugcauauguuuuuguggggacaucaagauacagcaagaaguucaagccggaaauagcaauaagacccaaagugagggaucaagaagggagaaugaacuauuacuggacacuaguagagccgggagacaaaauaacauucgaagcaacuggaaaucuagugguaccgagauaugcauucgcaauggaaagaaaugcuggaucugguauuaucauuucagauacaccaguccacgauugcaauacaacuugucagacacccaagggugcuauaaacaccagccucccauuucagaauauacauccgaucacaauuggaaaauguccaaaauauguaaaaagcacaaaauugagacuggccacaggauugaggaaugucccgucuauucaaucuagaggccuauuuggggccauugccgguuucauugaagggggguggacagggaugguagauggaugguacgguuaucaccaucaaaaugagcaggggucaggauaugcagccgaccugaagagcacacagaaugccauugacgagauuacuaacaaaguaaauucuguuauugaaaagaugaauacacaguucacagcaguagguaaagaguucaaccaccuggaaaaaagaauagagaauuuaaauaaaaaaguugaugaugguuuccuggacauuuggacuuacaaugccgaacuguugguucuauuggaaaaugaaagaacuuuggacuaccacgauucaaaugugaagaacuuauaugaaaagguaagaagccaguuaaaaaacaaugccaaggaaauuggaaacggcugcuuugaauuuuaccacaaaugcgauaacacgugcauggaaagugucaaaaaugggacuuaugacuacccaaaauacucagaggaagcaaaauuaaacagagaagaaauagaugggguaaagcuggaaucaacaaggauuuaccagauuuuggcgaucuauucaacugucgccaguucauugguacugguagucucccugggggcaaucaguuucuggaugugcucuaaugggucucuacaguguagaauauguauuuaa

SEQ ID NO: 35476 - RNA, 1701 nt, Artificial Sequence
  derived and/or modified CDS sequence (wt) from hemagglutinin__InfluenzaA__ACX36502
augaaggcaauacuaguaguucugcuauauacauuugcaaccgcaaaugcagacacauuauguauagguuaucaugcgaacaauucaacagacacuguagacacaauacuagaaaagaauguaacaguaacacacucuguuaaccuucuagaagacaagcauaacgggaaacuaugcaaacuaagagggguagccccauugcauuuggguaaauguaacauugcuggcuggauccugggaaauccagagugugaaucacucuccacagcaagcucaugguccuacauuguggaaacaucuaguucagacaauggaacguguuacccaggagauuucaucgauuaugaggagcuaagagagcaauugagcucagugucaucauuugaaagguuugagauauuccccaagacaaguucauggcccaaucaugacucgaacaaagguguaacggcagcauguccucaugcuggagcaaaaagcuucuacaaaaauuuaauauggcuaguuaaaaaaggaaauucauacccaaagcucagcaaauccuacauuaaugauaaagggaaagaaguccucgugcuauggggcauucaccauccaucuacuagugcugaccaacaaaguaucuaucagaaugcagaugcauauguuuuuguggggacaucaagauacagcaagaaguucaagccggaaauagcaauaagacccaaagugagggaucaagaagggagaaugaacuauuacuggacacuaguagagccgggagacaaaauaacauucgaagcaacuggaaaucuagugguaccgagauacgcauucgcaauggaaagaaaugcuggaucugguauuaucauuucagauacaccaguccacgauugcaauacaacuugucagacacccaagggugcuauaaacaccagccucccauuucagaauauacauccgaucacaauuggaaaauguccaaaauauguaaaaagcacaaaauugagacuggccacaggauugaggaaugucccgucuauucaaucuagaggccuauuuggggccauugccgguuucauugaagggggguggacagggaugguagauggaugguacgguuaucaccaucaaaaugagcaggggucaggauaugcagccgaccugaagagcacacagaaugccauugacgagauuacuaacaaaguaaauucuguuauugaaaagaugaauacacaguucacagcaguagguaaagaguucaaccaccuggaaaaaagaauagagaauuuaaauaaaaaaguugaugaugguuuccuggacauuuggacuuacaaugccgaacuguugguucuauuggaaaaugaaagaacuuuggacuaccacgauucaaaugugaagaacuuauaugaaaagguaagaagccaguuaaaaaacaaugccaaggaaauuggaaacggcugcuuugaauuuuaccacaaaugcgauaacacgugcauggaaagugucaaaaaugggacuuaugacuacccaaaauacucagaggaagcaaaauuaaacagagaagaaauagaugggguaaagcuggaaucaacaaggauuuaccagauuuuggcgaucuauucaacugucgccaguucauugguacugguagucucccugggggcaaucaguuucuggaugugcucuaaugggucucuacaguguagaauauguauuuaa

SEQ ID NO: 35477 - RNA, 1701 nt, Artificial Sequence
  derived and/or modified CDS sequence (wt) from hemagglutinin__InfluenzaA__ACX36503
augaaggcaauacuaguaguucugcuauauacauuugcaaccgcaaaugcagacacauuauguauagguuaucaugcgaacaauucaacagacacuguagacacaauacuagaaaagaauguaacaguaacacacucuguuaaccuucuagaagacaagcauaacgggaaacuaugcaaacuaagagggguagccccauugcauuuggguaaauguaacauugcuggcuggauccugggaaauccagagugugaaucacucuccacagcaagcucaugguccuacauuguggaaacaucuaguucagacaauggaacguguuacccaggagauuucaucgauuaugaggagcuaagagagcaauugagcucagugucaucauuugaaagguuugagauauuccccaagacaaguucauggcccaaucaugacucgaacaaagguguaacggcagcauguccucaugcuggagcaaaaagcuucuacaaaaauuuaauauggcuaguuaaaaaaggaaauucauacccaaagcucagcaaauccuacauuaaugauaaagggaaagaaguccucgugcuauggggcauucaccauccaucuacuagugcugaccaacaaaguaucuaucagaaugcagaugcauauguuuuuguggggacaucaagauacagcaagaaguucaagccggaaauagcaauaagacccaaagugagggaucaagaagggagaaugaacuauuacuggacacuaguagagccgggagacaaaauaacauucgaagcaacuggaaaucuagugguaccgagauacgcauucgcaauggaaagaaaugcuggaucugguauuaucauuucagauacaccaguccacgauugcaauacaacuugucagacacccaagggugcuauaaacaccagccucccauuucagaauauacauccgaucacaauuggaaaauguccaaaauauguaaaaagcacaaaauugagacuggccacaggauugaggaaugucccgucuauucaaucuagaggccuauuuggggccauugccgguuucauugaagggggguggacagggaugguagauggaugguacgguuaucaccaucaaaaugagcaggggucaggauaugcagccgaccugaagagcacacagaaugccauugacgagauuacuaacaaaguaaauucuguuauugaaaagaugaauacacaguucacagcaguagguaaagaguucaaccacuuggaaaaaagaauagagaauuuaaauaaaaaaguugaugaugguuuccuggacauuuggacuuacaaugccgaacuguugguucuauuggaaaaugaaagaacuuuggacuaccacgauucaaaugugaagaacuuauaugaaaagguaagaagccaguuaaaaaacaauaccaaggaaauuggaaacggcugcuuugaauuuuaccacaaaugcgauaacacgugcauggaaagugucaaaaaugggacuuaugacuacccaaaauacucagaggaagcaaaauuaaacagagaagaaauagaugggguaaagcuggaaucaacaaggauuuaccagauuuuggcgaucuauucaacugucgccaguucauugguacugguagucucccugggggcaaucaguuucuggaugugcucuaaugggucucuacaguguagaauauguauuuaa

SEQ ID NO: 35478 - RNA, 1701 nt, Artificial Sequence
  derived and/or modified CDS sequence (wt) from hemagglutinin__InfluenzaA__ACX47367
augaaggcaauacuaguaguucugcuauauacauuugcaaccgcaaaugcagacacauuauguauagguuaucaugcgaacaauucaacagacacuguagacacaguacuagaaaagaauguaacaguaacacacucuguuaaccuucuagaagacaagcauaacgggaaacuaugcaaacuaagagggguagccccauugcauuuggguaaauguaacauugcuggcuggauccugggaaauccagagugugaaucacucuccacagcaagcucaugguccuacauuguggaaacaucuaguucagacaauggaacguguuacccaggagauuucaucgauuaugaggagcuaagagagcaauugagcucagugucaucauuugaaagguuugagauauuccccaagacaaguucauggcccaaucaugacccgaacaaagguguaacggcagcauguccucaugcuggagcaaaaagcuucuacaaaaauuuaauauggcuaguuaaaaaaggaaauucauacccaaagcucagcaaauccuacauuaaugauaaagggaaagaaguccucgugcuauggggcauucaccauccaucuacuagugcugaccaacaaagucucuaucagaaugcagaugcauauguuuuuguggggacaucaagauacagcaagaaguucaagccggaaauagcaauaagacccaaagugagggaucaagaagggagaaugaacuauuacuggacacuaguaaagccgggagacaaaauaacauucgaagcaacuggaaaucuagugguaccgagauaugcauucgcaauggaaagaaaugcuggaucugguauuaucauuucagauacaccaguccacgauugcaauacaacuugucagacacccaagggugcuauaaacaccagccucccauuucagaauauacauccgaucacaauuggaaaauguccaaaauauguaaaaagcacaaaauugagacuggccacaggauugaggaaugucccgucuauucaaucuagaggccuauuuggggccauugccgguuucauugaagggggguggacagggaugguagauggaugguacgguuaucaccaucaaaaugagcaggggucaggauaugcagccgaccugaagagcacacagaaugccauugacgagauuacuaacaaaguaaauucuguuauugaaaagaugaauacacaguucacagcaguagguaaagaguucaaccaccuggaaaaaagaauagagaauuuaaauaaaaaaguugaugaugguuuccuggacauuuggacuuacaaugccgaacuguugguucuauuggaaaaugaaagaacuuuggacuaccacgauucaaaugugaagaacuuauaugaaaagguaagaagccaguuaaaaaacaaugccaaggaaauuggaaacggcugcuuugaauuuuaccacaaaugcgauaacacgugcauggaaagugucaaaaaugggacuuaugacuacccaaaauacucagaggaagcaaaauuaaacagagaagaaauagaugggguaaagcuggaaucaacaaggauuuaccagauuuuggcgaucuauucaacugucgccaguucauugguacugguagucucccugggggcaaucaguuucuggaugugcucuaaugggucucuacaguguagaauauguauuuaa

SEQ ID NO: 35479 - RNA, 1701 nt, Artificial Sequence
  derived and/or modified CDS sequence (wt) from hemagglutinin__InfluenzaA__ACX47368
augaaggcaauacuaguaguucugcuauauacauuugcaaccgcaaaugcagacacauuauguauagguuaucaugcgaacaauucaacagacacuguagacacaguacuagaaaagaauguaacaguaacacacucuguuaaccuucuagaagacaagcauaacgggaaacuaugcaaacuaagagggguagccccauugcauuuggguaaauguaacauugcuggcuggauccugggaaauccagagugugaaucacucuccacagcaagcucaugguccuacauuguggaaacaucuaguucagacaauggaacguguuacccaggagauuucaucgauuaugaggagcuaagagagcaauugagcucagugucaucauuugaaagguuugagauauuccccaagacaaguucauggcccaaucaugacccgaacaaagguguaacggcagcauguccucaugcuggagcaaaaagcuucuacaaaaauuuaauauggcuaguuaaaaaaggaaauucauacccaaagcucagcaaauccuacauuaaugauaaagggaaagaaguccucgugcuauggggcauucaccauccaucuacuagugcugaccaacaaagucucuaucagaaugcagaugcauauguuuuuguggggacaucaagauacagcaagaaguucaagccggaaauagcaauaagacccaaagugagggaucaagaagggagaaugaacuauuacuggacacuaguagagccgggagacaaaauaacauucgaagcaacuggaaaucuagugguaccgagauaugcauucgcaauggaaagaaaugcuggaucugguauuaucauuucagauacaccaguccacgauugcaauacaacuugucagacacccaagggugcuauaaacaccagccucccauuucagaauauacauccgaucacaauuggaaaauguccaaaauauguaaaaagcacaaaauugagacuggccacaggauugaggaaugucccgucuauucaaucuagaggccuauuuggggccauugccgguuucauugaagggggguggacagggaugguagauggaugguacgguuaucaccaucaaaaugagcaggggucaggauaugcagccgaccugaagagcacacagaaugccauugacgagauuacuaacaaaguaaauucuguuauugaaaagaugaauacacaguucacagcaguagguaaagaguucaaccaccuggaaaaaagaauagagaauuuaaauaaaaaaguugaugaugguuuccuggacauuuggacuuacaaugccgaacuguugguucuauuggaaaaugaaagaacuuuggacuaccacgauucaaaugugaagaacuuauaugaaaagguaagaagccaguuaaaaaacaaugccaaggaaauuggaaacggcugcuuugaauuuuaccacaaaugcgauaacacgugcauggaaagugucaaaaaugggacuuaugacuacccaaaauacucagaggaagcaaaauuaaacagagaagaaauagaugggguaaagcuggaaucaacaaggauuuaccagauuuuggcgaucuauucaacugucgccaguucauugguacugguagucucccugggggcaaucaguuucuggaugugcucuaaugggucucuacaguguagaauauguauuuaa

SEQ ID NO: 35480 - RNA, 1701 nt, Artificial Sequence; identical to SEQ ID NO: 35479
  derived and/or modified CDS sequence (wt) from hemagglutinin__InfluenzaA__ACX47369

SEQ ID NO: 35481 - RNA, 1701 nt, Artificial Sequence
  derived and/or modified CDS sequence (wt) from hemagglutinin__InfluenzaA__ACX47370
augaaggcaauacuaguaguucugcuauauacauuugcaaccgcaaaugcagacacauuauguauagguuaucaugcgaacaauucaacagacacuguagacacaguacuagaaaagaauguaacaguaacacacucuguuaaccuucuagaagacaagcauaacgggaaacuaugcaaacuaagagggguagccccauugcauuuggguaaauguaacauugcuggcuggauccugggaaauccagagugugaaucacucuccacagcaagcucaugguccuacauuguggaaacaucuaguucagacaauggaacguguuacccaggagauuucaucgauuaugaggagcuaagagagcaauugagcucagugucaucauuugaaagguuugagauauuccccaagacaaguucauggcccaaucaugacccgaacaaagguguaacggcagcauguccucaugcuggagcaaaaagcuucuacaaaaauuuaauauggcuaguuaaaaaaggaaauucauacccaaagcucagcaaauccuacauuaaugauaaagggaaagaaguccucgugcuauggggcauucaccauccaucuacuagugcugaccgacaaagucucuaucagaaugcagaugcauauguuuuuguggggacaucaagauacagcaagaaguucaagccggaaauagcaauaagacccaaagugagggaucaagaagggagaaugaacuauuacuggacacuaguagagccgggagacaaaauaacauucgaagcaacuggaaaucuagugguaccgagauaugcauucgcaauggaaagaaaugcuggaucugguauuaucauuucagauacaccaguccacgauugcaauacaacuugucagacacccaagggugcuauaaacaccagccucccauuucagaauauacauccgaucacaauuggaaaauguccaaaauauguaaaaagcacaaaauugagacuggccacaggauugaggaaugucccgucuauucaaucuagaggccuauuuggggccauugccgguuucauugaagggggguggacagggaugguagauggaugguacgguuaucaccaucaaaaugagcaggggucaggauaugcagccgaccugaagagcacacagaaugccauugacgagauuacuaacaaaguaaauucuguuauugaaaagaugaauacacaguucacagcaguagguaaagaguucaaccaccuggaaaaaagaauagagaauuuaaauaaaaaaguugaugaugguuuccuggacauuuggacuuacaaugccgaacuguugguucuauuggaaaaugaaagaacuuuggacuaccacgauucaaaugugaagaacuuauaugaaaagguaagaagccaguuaaaaaacaaugccaaggaaauuggaaacggcugcuuugaauuuuaccacaaaugcgauaacacgugcauggaaagugucaaaaaugggacuuaugacuacccaaaauacucagaggaagcaaaauuaaacagagaagaaauagaugggguaaagcuggaaucaacaaggauuuaccagauuuuggcgaucuauucaacugucgccaguucauugguacugguagucucccugggggcaaucaguuucuggaugugcucuaaugggucucuacaguguagaauauguauuuaa

SEQ ID NO: 35482 - RNA, 1701 nt, Artificial Sequence; identical to SEQ ID NO: 35479
  derived and/or modified CDS sequence (wt) from hemagglutinin__InfluenzaA__ACX47371

SEQ ID NO: 35483 - RNA, 1701 nt, Artificial Sequence; identical to SEQ ID NO: 35479
  derived and/or modified CDS sequence (wt) from hemagglutinin__InfluenzaA__ACX47372

SEQ ID NO: 35484 - RNA, 1701 nt, Artificial Sequence; identical to SEQ ID NO: 35479
  derived and/or modified CDS sequence (wt) from hemagglutinin__InfluenzaA__ACX47373

SEQ ID NO: 35485 - RNA, 1701 nt, Artificial Sequence; identical to SEQ ID NO: 35479
  derived and/or modified CDS sequence (wt) from hemagglutinin__InfluenzaA__ACX47374

SEQ ID NO: 35486 - RNA, 1701 nt, Artificial Sequence
  derived and/or modified CDS sequence (wt) from hemagglutinin__InfluenzaA__ACX47375
augaaggcaauacuaguaguucugcuauauacauuugcaaccgcaaaugcagacacauuauguauagguuaucaugcgaacaauucaacagacacuguagacacaguacuagaaaagaauguaacaguaacacacucuguuaaccuucuagaagacaagcauaacgggaaacuaugcaaacuaagagggguagccccauugcauuuggguaaauguaacauugcuggcuggauccugggaaauccagagugugaaucacucuccacagcaagcucaugguccuacauuguggaaacaucuaguucagacaauggaacguguuacccaggagauuucaucgauuaugaggagcuaagagagcaauugagcucagugucaucauuugaaagguuugagauauuccccaagacaaguucauggcccaaucaugacccgaacaaagguguaacggcagcauguccucaugcuggagcaaaaagcuucuacaaaaauuuaauauggcuaguuaaaaaaggaaauucauacccaaagcucagcaaauccuacauuaaugauaaagggaaagaaguccucgugcuauggggcauucaccauccaucuacuagugcugaccaacaaagucucuaucagaaugcagaugcauauguuuuuguggggacaucaagauacagcaagaaguucaagccggaaauagcaauaagacccaaagugagggaucaagaagggagaaugaacuauuacuggacacuaguagagccgggagacaaaauaacauucgaagcaacuggaaaucuagugguaccgagauaugcauucgcaauggaaagaaaugcuggaucugguauuaucauuucagauacaccaguccacgauugcaauacaacuugucagacacccaacggugcuauaaacaccagccucccauuucagaauauacauccgaucacaauuggaaaauguccaaaauauguaaaaagcacaaaauugagacuggccacaggauugaggaaugucccgucuauucaaucuagaggccuauuuggggccauugccgguuucauugaagggggguggacagggaugguagauggaugguacgguuaucaccaucaaaaugagcaggggucaggauaugcagccgaccugaagagcacacagaaugccauugacgagauuacuaacaaaguaaauucuguuauugaaaagaugaauacacaguucacagcaguagguaaagaguucaaccaccuggaaaaaagaauagagaauuuaaauaaaaaaguugaugaugguuuccuggacauuuggacuuacaaugccgaacuguugguucuauuggaaaaugaaagaacuuuggacuaccacgauucaaaugugaagaacuuauaugaaaagguaagaagccaguuaaaaaacaaugccaaggaaauuggaaacggcugcuuugaauuuuaccacaaaugcgauaacacgugcauggaaagugucaaaaaugggacuuaugacuacccaaaauacucagaggaagcaaaauuaaacagagaagaaauagaugggguaaagcuggaaucaacaaggauuuaccagauuuuggcgaucuauucaacugucgccaguucauugguacugguagucucccugggggcaaucaguuucuggaugugcucuaaugggucucuacaguguagaauauguauuuaa

SEQ ID NO: 35487 - RNA, 1701 nt, Artificial Sequence; identical to SEQ ID NO: 35479
  derived and/or modified CDS sequence (wt) from hemagglutinin__InfluenzaA__ACX47376

SEQ ID NO: 35488 - RNA, 1701 nt, Artificial Sequence; identical to SEQ ID NO: 35479
  derived and/or modified CDS sequence (wt) from hemagglutinin__InfluenzaA__ACX47377

SEQ ID NO: 35489 - RNA, 1701 nt, Artificial Sequence
  derived and/or modified CDS sequence (wt) from hemagglutinin__InfluenzaA__ACX47380
augaaggcaauacuaguaguucugcuauauacauuugcaaccgcaaaugcagacacauuauguauagguuaucaugcgaacaauucaacagacacuguagacacaguacuagaaaagaauguaacaguaacacacucuguuaaccuucuagaagacaagcauaacgggaaacuaugcaaacuaagagggguagccccauugcauuuggguaaauguaacauugcuggcuggauccugggaaauccagagugugaaucacucuccacaacaagcucaugguccuacauuguggaaacaucuaguucagacaauggaacguguuacccaggagauuucaucgauuaugaggagcuaagagagcaauugagcucagugucaucauuugaaagguuugagauauuccccaaaacaaguucauggcccaaucaugacucgaacaaagguguaacggcagcauguccucaugcuggagcaaaaagcuucuacaaaaauuuaauauggcuaguuaaaaaaggaaauucauacccaaagcucagcaaauccuacauuaaugauaaagggaaagagguccucgugcuauggggcauucaccauccaucuacuagugcugaccaacaaagucucuaucagaaugcagaugcauauguuuuuguggggacaucaagauacagcaagaaguucaagccggaaauagcaauaagacccaaagugagggaucaagaagggagaaugaacuauuacuggacacuaguagagccgggagacaaaauaacauucgaagcaacuggaaaucuagugguaccgagauaugcauucguaauggaaagaaaugcuggaucugguauuaucauuucagauacaccaguccacgauugcaauacaacuugucagacacccaagggugcuauaaacaccagccucccauuucagaauauacauccgaucacaauuggaaaauguccaaaauauguaaaaagcacaaaauugagacuggccacaggauugaggaaugucccgucuauucaaucuagaggccuauuuggggccauugccgguuucauugaagggggguggacagggaugguagauggaugguacgguuaucaccaucaaaaugagcaggggucaggauaugcagccgaccugaagagcacacagaaugccauugacgagauuacuaacaaaguaaauucuguuauugaaaagaugaauacacaguucacagcaguagguaaagaguucaaccaccuggaaaaaagaauagagaauuuaaauaaaaaaguugaugaugguuuccuggacauuuggacuuacaaugccgaacuguugguucuauuggaaaaugaaagaacuuuggacuaccacgauucaaaugugaagaacuuauaugaaaagguaagaagccaguuaaaaaacaaugccaaggaaauuggaaacggcugcuuugaauuuuaccacaaaugcgauaacacgugcauggaaagugucaaaaaugggacuuaugacuacccaaaauacucagaggaagcaaaauuaaacagagaagaaauagaugggguaaagcuggaaucaacaaggauuuaccagauuuuggcgaucuauucaacugucgccaguucauugguacugguagucucccugggggcaaucaguuucuggaugugcucuaaugggucucuacaguguagaauauguauuuaa

SEQ ID NO: 35490 - RNA, 1701 nt, Artificial Sequence; identical to SEQ ID NO: 35489
  derived and/or modified CDS sequence (wt) from hemagglutinin__InfluenzaA__ACX47381

SEQ ID NO: 35491 - RNA, 1701 nt, Artificial Sequence; identical to SEQ ID NO: 35489
  derived and/or modified CDS sequence (wt) from hemagglutinin__InfluenzaA__ACX47382

SEQ ID NO: 35492 - RNA, 1701 nt, Artificial Sequence
  derived and/or modified CDS sequence (wt) from hemagglutinin__InfluenzaA__ACX47383
augaaggcaauacuaguaguucugcuauauacauuugcaaccgcaaaugcagacacauuauguauagguuaucaugcgaacaauucaacagacacuguagacacaguacuagaaaagaauguaacaguaacacacucuguuaaccuucuagaagacaagcauaacgggaaacuaugcaaacuaagagggguagccccauugcauuuggguaaauguaacauugcuggcuggauccugggaaauccagagugugaaucacucuccacaacaagcucaugguccuacauuguggaaacaucuaguucagacaauggaacguguuacccaggagauuucaucgauuaugaggagcuaagagagcaauugagcucagugucaucauuugaaagguuugagauauuccccaaaacaaguucauggcccaaucaugacucgaacaaagguguaacggcagcauguccucaugcuggagcaaaaagcuucuacaaaaauuuaauauggcuaguuaaaaaaggaaauucauacccaaagcucagcaaauccuacauuaaugauaaagggaaagagguccucgugcuauggggcauucaccauccaucuacuagugcugaccaacaaagucucuaucagaaugcagaugcauauguuuuuguggggacaucaagauacagcaagaaguucaagccggaaauagcaauaagacccaaagugagggaucaagaagggagaaugaacuauuacuggacacuaguagagccgggagacaaaauaacauucgaagcaacuggaaaucuagugguaccgagauaugcauucgcaauggaaagaaaugcuggaucugguauuaucauuucagauacaccaguccacgauugcaauacaacuugucagacacccaagggugcuauaaacaccagccucccauuucagaauauacauccgaucacaauuggaaaauguccaaaauauguaaaaagcacaaaauugagacuggccacaggauugaggaaugucccgucuauucaaucuagaggccuauuuggggccauugccgguuucauugaagggggguggacagggaugguagauggaugguacgguuaucaccaucaaaaugagcaggggucaggauaugcagccgaccugaagagcacacagaaugccauugacgagauuacuaacaaaguaaauucuguuauugaaaagaugaauacacaguucacagcaguagguaaagaguucaaccaccuggaaaaaagaauagagaauuuaaauaaaaaaguugaugaugguuuccuggacauuuggacuuacaaugccgaacuguugguucuauuggaaaaugaaagaacuuuggacuaccacgauucaaaugugaagaacuuauaugaaaagguaagaagccaguuaaaaaacaaugccaaggaaauuggaaacggcugcuuugaauuuuaccacaaaugcgauaacacgugcauggaaagugucaaaaaugggacuuaugacuacccaaaauacucagaggaagcaaaauuaaacagagaaaaaauagaugggguaaagcuggaaucaacaaggauuuaccagauuuuggcgaucuauucaacugucgccaguucauugguacugguagucucccugggggcaaucaguuucuggaugugcucuaaugggucucuacaguguagaauauguauuuaa

SEQ ID NO: 35493 - RNA, 1701 nt, Artificial Sequence
  derived and/or modified CDS sequence (wt) from hemagglutinin__InfluenzaA__ACX47384
augaaggcaauacuaguaguucugcuauauacauuugcaaccgcaaaugcagacacauuauguauagguuaucaugcgaacaauucaacagacacuguagacacaguacuagaaaagaauguaacaguaacacauucuguuaaccuucuagaagacaagcauaacgggaaacuaugcaaacuaagagggguagccccauugcauuuggguaaauguaacauugcuggcuggauccugggaaauccagagugugaaucacucuccacaacaagcucaugguccuacauuguggaaacaucuaguucagacaauggaacguguuacccaggagauuucaucgauuaugaggagcuaagagagcaauugagcucagugucaucauuugaaagguuugagauauuccccaaaacaaguucauggcccaaucaugacucgaacaaagguguaacggcagcauguccucaugcuggagcaaaaagcuucuacaaaaauuuaauauggcuaguuaaaaaaggaaauucauacccaaagcucagcaaauccuacauuaaugauaaagggaaagagguccucgugcuauggggcauucaccauccaucuacuagugcugaccaacaaagucucuaucagaaugcagaugcauauguuuuuguggggacaucaagauacagcaagaaguucaagccggaaauagcaauaagacccaaagugagggaucaagaagggagaaugaacuauuacuggacacuaguagagccgggagacaaaauaacauucgaagcaacuggaaaucuagugguaccgagauaugcauucgcaauggaaagaaaugcuggaucugguauuaucauuucagauacaccaguccacgauugcaauacaacuugucagacacccaagggugcuauaaacaccagccucccauuucagaauauacauccgaucacaauuggaaaauguccaaaauauguaaaaagcacaaaauugagacuggccacaggauugaggaaugucccgucuauucaaucuagaggccuauuuggggccauugccgguuucauugaagggggguggacagggaugguagauggaugguacgguuaucaccaucaaaaugagcaggggucaggauaugcagccgaccugaagagcacacagaaugccauugacgagauuacuaacaaaguaaauucuguuauugaaaagaugaauacacaguucacagcaguagguaaagaguucaaccaccuggaaaaaagaauagagaauuuaaauaaaaaaguugaugaugguuuccuggacauuuggacuuacaaugccgaacuguugguucuauuggaaaaugaaagaacuuuggacuaccacgauucaaaugugaagaacuuauaugaaaagguaagaagccaguuaaaaaacaaugccaaggaaauuggaaacggcugcuuugaauuuuaccacaaaugcgauaacacgugcauggaaagugucaaaaaugggacuuaugacuacccaaaauacucagaggaagcaaaauuaaacagagaagaaauagaugggguaaagcuggaaucaacaaggauuuaccagauuuuggcgaucuauucaacugucgccaguucauugguacugguagucucccugggggcaaucaguuucuggaugugcucuaaugggucucuacaguguagaauauguauuuaa

SEQ ID NO: 35494 - RNA, 1701 nt, Artificial Sequence; identical to SEQ ID NO: 35493
  derived and/or modified CDS sequence (wt) from hemagglutinin__InfluenzaA__ACX47385

SEQ ID NO: 35495 - RNA, 1701 nt, Artificial Sequence; identical to SEQ ID NO: 35493
  derived and/or modified CDS sequence (wt) from hemagglutinin__InfluenzaA__ACX47387

SEQ ID NO: 35496 - RNA, 1701 nt, Artificial Sequence
  derived and/or modified CDS sequence (wt) from hemagglutinin__InfluenzaA__ACX55834
augaaggcaauacuaguaguucugcuauauacauuugcaaccgcaaaugcagacacauuauguauagguuaucaugcgaacaauucaacagacacuguagacacaguacuagaaaagaauguaacaguaacacacucuguuaaccuucuagaagacaagcauaacgggaaacuaugcaaacuaagagggguagccccauugcauuuggguaaauguaacauugcuggcuggauccugggaaauccagagugugaaucacucuccacagcaagcucaugguccuacauuguggaaacaucuaguucagacaauggaacguguuacccaggagauuucaucgauuaugaggagcuaagagagcaauugagcucagugucaucauuugaaagguuugagauauuccccaagacaaguucauggcccaaucaugacucgaacaaagguguaacggcagcauguccucaugcuggagcaaaaagcuucuacaaaaauuuaauauggcuaguuaaaaaaggaaauucauacccaaagcucagcaaauccuacauuaaugauaaagggaaagaaguccucgugcuauggggcauucaccauccaucuacuagugcugaccaacaaagucucuaucagaaugcagaugcauauguuuuuguggggacaucaagauacagcaagaaguucaagccggaaauagcaauaagacccaaagugagggaucaagaagggagaaugaacuauuacuggacacuaguagagccgggagacaaaaucacauucgaagcaacuggaaaucuagugguaccgagauaugcauucgcaauggaaagaaaugcuggaucugguauuaucauuucagauacaccaguccacgauugcaauacaacuugucagacacccaagggugcuauaaacaccagccucccauuucagaauauacauccgaucacaauuggaaaauguccaaaauauguaaaaagcacaaaauugagacuggccacaggauugaggaaugucccgucuauucaaucuagaggccuauuuggggccauugccgguuucauugaagggggguggacagggaugguagauggaugguacgguuaucaccaucaaaaugagcaggggucaggauaugcagccgaccugaagagcacacagaaugccauugacgagauuacuaacaaaguaaauucuguuauugaaaagaugaauacacaguucacagcaguagguaaagaguucaaccaccuggaaaaaagaauagagaauuuaaauaaaaaaguugaugaugguuuccuggacauuuggacuuacaaugccgaacuguugguucuauuggaaaaugaaagaacuuuggacuaccacgauucaaaugugaagaacuuauaugaaaagguaagaagccaguuaaaaaacaaugccaaggaaauuggaaacggcugcuuugaauuuuaccacaaaugcgauaacacgugcauggaaagugucaaaaaugggacuuaugacuacccaaaauacucagaggaagcaaaauuaaacagagaagaaauagaugggguaaagcuggaaucaacaaggauuuaccagauuuuggcgaucuauucaacugucgccaguucauugguacugguagucucccugggggcaaucaguuucuggaugugcucuaaugggucucuacaguguagaauauguauuuaa

SEQ ID NO: 35497 - RNA, 1701 nt, Artificial Sequence
  derived and/or modified CDS sequence (wt) from hemagglutinin__InfluenzaA__ACX61574
augaaggcaauacuaguaguucugcuauauacauuugcaaccgcaaaugcagacacauuauguauagguuaucaugcgaacaauucaacagacacuguagacacaguacuagaaaagaauguaacaguaacacacucuguuaaccuucuagaagacaagcauaacgggaaacuaugcaaacuaagagggguagccccauugcauuuggguaaauguaacauugcuggcuggauccugggaaauccagagugugaaucacucuccacagcaagcucaugguccuacauuguggaaacaucuaguucagacaauggaacguguuacccaggagauuucaucgauuaugaggagcuaagagagcaauugagcucagugucaucauuugaaagguuugagauauuccccaagacaaguucauggcccaaucaugacccgaacaaagguguaacggcagcauguccucaugcuggagcaaaaagcuucuacaaaaauuuaauauggcuaguuaaaaaaggaaauucauacccaaagcucagcaaauccuacauuaaugauaaagggaaagaaguccucgugcuauggggcauucaccauccaucuacuagugcugaccaacaaagucucuaucagaaugcagaugcauauguuuuuguggggacaucaagauacagcaagaaguucaagccggaaauagcaauaagacccaaagugagggaucaagaagggagaaugaacuauuacuggacacuaguagagccgggagacaaaauaacauucgaagcaacuggaaaucuagugguaccgagauaugcauucgcaauggaaagaaaugcuggaucugguauuaucauuucagauacaccaguccacgauugcaauacaacuugucagacacccaagggugcuauaaacaccagccucccauuucagaauauacauccgaucacaauuggaaaauguccaaaauauguaaaaagcacaaaauugagacuggccacaggauugaggaaugucccgucuauucaaucuagaggccuauuuggggccauugccgguuucauugaagggggguggacagggaugguagauggaugguacgguuaucaccaucaaaaugagcaggggucaggauaugcagccgaccugaagagcacacagaaugccauugacgagauuaccaacaaaguaaauucuguuauugaaaagaugaauacacaguucacagcaguagguaaagaguucaaccaccuggaaaaaagaauagagaauuuaaauaaaaaaguugaugaugguuuccuggacauuuggacuuacaaugccgaacuguugguucuauuggaaaaugaaagaacuuuggacuaccacgauucaaaugugaagaacuuauaugaaaagguaagaagccaguuaaaaaacaaugccaaggaaauuggaaacggcugcuuugaauuuuaccacaaaugcgauaacacgugcauggaaagugucaaaaaugggacuuaugacuacccaaaauacucagaggaagcaaaauuaaacagagaagaaauagaugggguaaagcuggaaucaacaaggauuuaccagauuuuggcgaucuauucaacugucgccaguucauugguacugguagucucccugggggcaaucaguuucuggaugugcucuaaugggucucuacaguguagaauauguauuuaa

SEQ ID NO: 35498 - RNA, 1701 nt, Artificial Sequence
  derived and/or modified CDS sequence (wt) from hemagglutinin__InfluenzaA__ACX61575
augaaggcaauacuaguaguucugcuauauacauuugcaaccgcaaaugcagacacauuauguauagguuaucaugcgaacaauucaacagacacuguagacacaguacuagaaaagaauguaacaguaacacacucuguuaaccuucuagaagacaagcauaacgggaaacuaugcaaacuaagagggguagccccauugcauuuggguaaauguaacauugcuggcuggauccugggaaauccagagugugaaucacucuccacagcaagcucaugguccuacauuguggaaacaucuaguucagacaauggaacguguuacccaggagauuucaucgauuaugaggagcuaagagagcaauugagcucagugucaucauuugaaagguuugagauauuccccaagacaaguucauggcccaaucaugacucgaacaaagguguaacggcagcauguccucaugcuggagcaaaaagcuucuacaaaaauuuaauauggcuaguuaaaaaaggaaauucauacccaaagcucagcaaauccuacauuaaugauaaagggaaagagguccucgugcuauggggcauucaccauccaucuacuagugcugaccaacaaagucucuaucagaaugcagaugcauauguuuuuguggggacaucaagauacagcaagaaguucaagccggaaauagcaauaagacccaaagugagggaucaagaagggagaaugaacuauuacuggacacuaguagagccgggagacaaaauaacauucgaagcaacuggaaaucuagugguaccgagauaugcauucgcaauggaaagaaaugcuggaucugguauuaucauuucagauacaccaguccacgauugcaauacaacuugucagacacccaagggugcuauaaacaccagccucccauuucagaauauacauccgaucacaauuggaaaauguccaaaauauguaaaaagcacaaaauugagacuggccacaggauugaggaaugucccgucuauucaaucuagaggccuauuuggggccauugccgguuucauugaagggggguggacagggaugguagauggaugguacgguuaucaccaucaaaaugagcaggggucaggauaugcagccgaccugaagagcacacagaaugccauugacgagauuacuaacaaaguaaauucuguuauugaaaagaugaauacacaguucacagcaguagguaaagaguucaaccaccuggaaaaaagaauagagaauuuaaauaaaaaaguugaugaugguuuccuggacauuuggacuuacaaugccgaacuguugguucuauuggaaaaugaaagaacuuuggacuaccacgauucaaaugugaagaacuuauaugaaaagguaagaagccaguuaaaaaacaaugccaaggaaauuggaaacggcugcuuugaauuuuaccacaaaugcgauaacacgugcauggaaagugucaaaaaugggacuuaugacuacccaaaauacucagaggaagcaaaauuaaacagagaagaaauagaugggguaaagcuggaaucaacaaggauuuaccagauuuuggcgaucuauucaacugucgccaguucauugguacugguagucucccugggggcaaucaguuucuggauguguucuaaugggucucuacaguguagaauauguauuuaa

SEQ ID NO: 35499 - RNA, 1701 nt, Artificial Sequence
  derived and/or modified CDS sequence (wt) from hemagglutinin__InfluenzaA__ACX83577
augaaggcaauacuaguaguucugcuauauacauuugcaaccgcaaaugcagacacauuauguauagguuaucaugcgaacaauucaacagacacuguagacacaguacuagaaaagaauguaacaguaacacacucuguuaaccuucuagaagacaagcauaacgggaaacuaugcaaacuaagagggguagccccauugcauuuggguaaauguaacauugcuggcuggauccugggaaauccagagugugaaucauucuccacaucaagcucaugguccuacauuguggaaacaucuaguucagacaauggaacguguuacccaggagauuucaucgauuaugaggagcuaagagagcaauugagcucagugucaucauuugaaagguuugagauauuccccaagacaaguucauggcccaaucaugacucgaacaaagguguaacggcagcauguccucaugcuggagcaaaaagcuucuacaaaaauuuaauauggcuaguuaaaaaaggaaauucauacccaaagcucagcaaauccuacauuaaugauaaagggaaagaaguccucgugcuauggggcauucaccauccaucuacuagugcugaccaacaaagucucuaucagaaugcagaugcauauguuuuuguggggacaucaagauacagcaagaaguucaagccggaaauagcaauaagacccaaagugaggggucaagaagggagaaugaacuauuacuggacacuaguagagccgggagacaaaauaacauucgaagcaacuggaaaucuagugguaccgagauaugcauucgcaauggaaagaaaugcuggaucugguauuaucauuucagauacaccaguccacgauugcaauacaacuugucagacacccaagggugcuauaaacaccagccucccauuucagaacauacauccgaucacaauuggaaaauguccaaaauauguaaaaagcacaaaauugagacuggccacaggauugaggaaugucccgucuauucaaucuagaggccuauuuggggccauugccgguuucauugaagggggguggacagggaugguagauggaugguacgguuaucaccaucaaaaugagcaggggucaggauaugcagccgaccugaagagcacacagaaugccauugacgagauuacuaacaaaguaaauucuguuauugaaaagaugaauacacaguucacagcaguagguaaagaguucaaccaccuggaaaaaagaauagagaauuuaaauaaaaaaguugaugaugguuuccuggacauuuggacuuacaaugccgaacuguugguucuauuggaaaaugaaagaacuuuggacuaccacgauucaaaugugaagaacuuauaugaaaagguaagaagccaguuaaaaaacaaugccaaggaaauuggaaacggcugcuuugaauuuuaccacaaaugcgauaacacgugcauggaaagugucaaaaaugggacuuaugacuacccaaaauacucagaggaagcaaaauuaaacagagaagaaauagaugggguaaagcuggaaucaacaaggauuuaccagauuuuggcgaucuauucaacugucgccaguucauugguacugguagucucccugggggcaaucaguuucuggaugugcucuaaugggucucuacaguguagaauauguauuuaa

SEQ ID NO: 35500 - RNA, 1701 nt, Artificial Sequence
  derived and/or modified CDS sequence (wt) from hemagglutinin__InfluenzaA__ACX94091
augaaggcaauacuaguaguucugcuauauacauuugcaaccgcaaaugcagacacauuauguauagguuaucaugcgaacaauucaacagacacuguagacacaguacuagaaaagaauguaacaguaacacacucuguuaaccuucuagaagacaagcauaacgggaaacuaugcaaacuaagagggguagccccauugcauuuggguaaauguaacauugcuggcuggauccugggaaauccagagugugaaucacucuccacagcaagcucaugguccuacauuguggaaacaucuaguucagacaauggaacguguuacccaggagauuucaucgauuaugaggagcuaagagagcaauugagcucagugucaucauuugaaagguuugagauauuccccaagacaauuucauggcccaaucaugacucgaacaaagguguaacggcagcauguccucaugcuggagcaaaaagcuucuacaaaaauuuaauauggcuaguuaaaaaaggaaauucauacccaaagcucagcaaauccuacauuaaugauaaagggaaagaaguccucgugcuauggggcauucaccauccaucuacuagugcugaccaacaaagucucuaucagaaugcagaugcauauguuuuuguggggacaucaagauacagcaagaaguucaagccggaaauagcaauaagacccaaagugagggaucaagaagggagaaugaacuauuacuggacacuaguagagccgggagacaaaauaacauucgaagcaacuggaaaucuagugguaccgagauaugcauucgcaauggaaagaaaugcuggaucugguauuaucauuucagauacaccaguccacgauugcaauacaacuugucagacacccaagggugcuauaaacaccagccucccauuucagaauauacauccgaucacaauuggaaaauguucaaaauauguaaaaagcacaaaauugagacuggccacaggauugaggaaugucccgucuauucaaucuagaggccuauuuggggccauugccgguuucauugaagggggguggacagggaugguagauggaugguacgguuaucaccaucaaaaugagcaggggucaggauaugcagccgaccugaagagcacacagaaugccauugacgagauuacuaacaaaguaaauucuguuauugaaaagaugaauacacaguucacagcaguagguaaagaguucaaccaccuggaaaaaagaauagagaauuuaaauaaaaagguugaugaugguuuccuggacauuuggacuuacaaugccgaacuguugguucuauuggaaaaugaaagaacuuuggacuaccacgauucaaaugugaagaacuuauaugaaaagguaagaagccaguuaaaaaacaaugccaaggaaauuggaaacggcugcuuugaauuuuaccacaaaugcgauaacacgugcauggaaagugucaaaaaugggacuuaugacuacccaaaauacucagaggaagcaaaauuaaacagagaagaaauagaugggguaaagcuggaaucaacaaggauuuaccagauuuuggcgaucuauucaacugucgccaguucauugguacugguagucucccugggggcaaucaguuucuggaugugcucuaaugggucucuacaguguagaauauguauuuaa

SEQ ID NO: 35501 - RNA, 1701 nt, Artificial Sequence
  derived and/or modified CDS sequence (wt) from hemagglutinin__InfluenzaA__ACY26192
augaaggcaauacuaguaguucugcuauauacauuugcaaccgcaaaugcagacacauuauguauagguuaucaugcgaacaauucaacagacacuguagacacaguacuagaaaagaauguaacaguaacacacucuguuaaccuucuagaagacaagcauaacgggaaacuaugcaaacuaagagggguagccccauugcauuuggguaaauguaacauugcuggcuggauccugggaaauccagagugugaaucacucuccacagcaagcucaugguccuacauuguggaaacaucuaguucagacaauggaacguguuacccaggagauuucaucgauuaugaggagcuaagagagcaauugagcucagugucaucauuugaaagguuugagauauuccccaagacaaguucauggcccaaucaugacucgaacaaagguguaacggcagcauguccucaugcuggagcaaaaagcuucuacaaaaauuuaauauggcuaguuaaaaaaggaaauucauacccaaagcucagcaaauccuacauuaaugauaaagggaaagaaguccucgugcuauggggcauucaccauccaucuacuagugcugaccaacaaagucucuaucagaaugcagaugcauauguuuuuguggggacaucaagauacagcaagaaguucaagccggaaauagcaauaagacccaaagugagggaucaagaagggagaaugaacuauuacuggacacuaguagagccgggagacaaaauaacauucgaagcaacuggaaaucuagugguaccgagauaugcauucgcaauggaaagaaaugcuggaucugguauuaucauuucagauacaccaguccacaauugcaauacaacuugucagacacccaagggugcuauaaacaccagccucccauuucagaauauacauccgaucacaauuggaaaauguccaaaauauguaaaaagcacaaaauugagacuggccacaggauugaggaaugucccgucuauucaaucuagaggccuauuuggggccauugccgguuucauugaagggggguggacagggaugguagauggaugguacgguuaucaccaucaaaaugagcaggggucaggauaugcagccgaccugaagagcacacaggaugccauugacgagauuacuaacaaaguaaauucuguuauugaaaagaugaauacacaguucacagcaguagguaaagaguucaaccaccuggaaaaaagaauagagaauuuaaauaaaaaaguugaugaugguuuccuggacauuuggacuuacaaugccgaacuguugguucuauuggaaaaugaaagaacuuuggacuaccacgauucaaaugugaagaacuuauaugaaaagguaagaagccaguuaaaaaacaaugccaaggaaauuggaaacggcugcuuugaauuuuaccacaaaugcgauaacacgugcauggaaagugucaaaaaugggacuuaugacuacccaaaauacucagaggaagcaaaauuaaacagagaagaaauagaugggguaaagcuggaaucaacaaggauuuaccagauuuuggcgaucuauucaacugucgccaguucauugguacugguagucucccugggggcaaucaguuucuggaugugcucuaaugggucucuacaguguagaauauguauuuaa

SEQ ID NO: 35502 - RNA, 1701 nt, Artificial Sequence
  derived and/or modified CDS sequence (wt) from hemagglutinin__InfluenzaA__ACY26202
augaaggcaauacuaguaguucugcuauauacauuugcaaccgcaaaugcagacacauuauguauagguuaucaugcgaacaauucaacagacacuguagacacaguacuagaaaagaauguaacaguaacacacucuguuaaccuucuagaagacaagcauaacgggaaacuaugcaaacuaagagggguagccccauugcauuuggguaaauguaacauugcuggcuggauccugggaaauccagagugugaaucacucuccacagcaagcucaugguccuacauuguggaaacaucuaguucagacaauggaacguguuacccaggagauuucaucgauuaugaggagcuaagagagcaauugagcucagugucaucauuugaaagguuugagauauuccccaagacaaguucauggcccaaucaugacucgaacaaagguguaacggcagcauguccucaugcuggagcaaaaagcuucuacaaaaauuuaauauggcuaguuaaaaaaggaaauucauacccaaagcucagcaaauccuacauuaaugauaaagggaaagaaguccucgugcuauggggcauucaccauccaucuacuagugcugaccaacaaagucucuaucagaaugcagaugcauauguuuuuguggggacaucaagauacagcaagaaguucaagccggaaauagcaauaagacccaaagugagggaucaagaagggagaaugaacuauuacuggacacuaguagagccgggagacaaaauaacauucgaagcaacuggaaaucuagugguaccgagauaugcauucgcaauggaaagaaaugcuggaucugguauuaucauuucagauacaccaguccacaauugcaauacaacuugucagacacccaagggugcuauaaacaccagccucccauuucagaauauacauccgaucacaauuggaaaauguccaaaauauguaaaaagcacaaaauugagacuggccacaggauugaggaaugucccgucuauucaaucuagaggccuauuuggggccauugccgguuucauugaagggggguggacagggaugguagauggaugguacgguuaucaccaucaaaaugagcaggggucaggauaugcagccgaccugaagagcacacagaaugccauugacgagauuacuaacaaaguaaauucuguuauugaaaagaugaauacacaguucacagcaguagguaaagaguucaaccaccuggaaaaaagaauagagaauuuaaauaaaaaaguugaugaugguuuccuggacauuuggacuuacaaugccgaacuguugguucuauuggaaaaugaaagaacuuuggacuaccacgauucaaaugugaagaacuuauacgaaaagguaagaagccaguuaaaaaacaaugccaaggaaauuggaaacggcugcuuugaauuuuaccacaaaugcgauaacacgugcauggaaagugucaaaaaugggacuuaugacuacccaaaauacucagaggaagcaaaauuaaacagagaagaaauagaugggguaaagcuggaaucaacaaggauuuaccagauuuuggcgaucuauucaacugucgccaguucauugguacugguagucucccugggggcaaucaguuucuggaugugcucuaaugggucucuacaguguagaauauguauuuaa

SEQ ID NO: 35503 - RNA, 1701 nt, Artificial Sequence; identical to SEQ ID NO: 34681
  derived and/or modified CDS sequence (wt) from hemagglutinin__InfluenzaA__ACY46103

SEQ ID NO: 35504 - RNA, 1701 nt, Artificial Sequence; identical to SEQ ID NO: 34714
  derived and/or modified CDS sequence (wt) from hemagglutinin__InfluenzaA__ACY46113

SEQ ID NO: 35505 - RNA, 1701 nt, Artificial Sequence
  derived and/or modified CDS sequence (wt) from hemagglutinin__InfluenzaA__ACY46123
augaaggcaauacuaguaguucugcuauauacauuugcaaccgcaaaugcagacacauuauguauagguuaucaugcgaacaauucaacagacacuguagacacaguacuagaaaagaauguaacaguaacacacucuguuaaccuucuagaagacaagcauaacgggaaacuaugcaaacuaagagggguagccccauugcauuuggguaaauguaacauugcuggcuggauccugggaaauccagagugugaaucacucuccacagcaagcucaugguccuacauuguggaaacaucuaguucagacaauggaacguguuacccaggagauuucaucgauuaugaggagcuaagagagcaauugagcucagugucaucauuugaaagguuugagauauuccccaagacaaguucauggcccaaucaugacucgaacaaagguguaacggcagcauguccucaugcuggagcaaaaagcuucuacaaaaauuuaauauggcuaguuaaaaaagggaauucauacccaaagcucagcaaauccuacauuaaugauaaagggaaagaaguccucgugcuauggggcauucaccauccaucuacuagugcugaccaacaaagucucuaucagaaugcagaugcauauguuuuuguggggacaucaagauacagcaagaaguucaagccggaaauagcaauaagacccaaagugggggaucaagaagggagaaugaacuauuacuggacacuaguagagccgggagacaaaauaacauucgaagcaacuggaaaucuagugguaccgagauaugcauucgcaauggaaagaaaugcuggaucugguauuaucauuucagauacaccaguucacgauugcaauacaacuugucagacacccaagggugcuauaaacaccagccucccauuucagaauauacauccgaucacaauuggaaaauguccaaaauauguaaaaagcacaaaauugagacuggccacaggauugaggaaugucccgucuauucaaucuagaggccuauuuggggccauugccgguuucauugaagggggguggacagggaugguagauggaugguacgguuaucaccaucaaaaugagcaggggucaggauaugcagccgaccugaagagcacacagaaugccauugacgagauuacuaacaaaguaaauucuguuauugaaaagaugaauacacaguucacagcaguagguaaagaguucaaccaccuggaaaaaagaauagagaauuuaaauaaaaaaguugaugaugguuuccuggacauuuggacuuacaaugccgaacuguugguucuauuggaaaaugaaagaacuuuggacuaccacgauucaaaugugaagaacuuauaugaaaagguaagaagccaguuaaaaaacaaugccaaggaaauuggaaacggcugcuuugaauuuuaccacaaaugcgauaacacgugcauggaaagugucaaaaaugggacuuaugacuacccaaaauacucagaggaagcaaaauuaaacagagaagaaauagaugggguaaagcuggaaucaacaaggauuuaccagauuuuggcgaucuauucaacugucgccaguucauugguacugguagucucccugggggcaaucaguuucuggaugugcucuaaugggucucuacaguguagaauauguauuuaa

SEQ ID NO: 35506 - RNA, 1701 nt, Artificial Sequence; identical to SEQ ID NO: 34681
  derived and/or modified CDS sequence (wt) from hemagglutinin__InfluenzaA__ACY46133

SEQ ID NO: 35507 - RNA, 1701 nt, Artificial Sequence; identical to SEQ ID NO: 34681
  derived and/or modified CDS sequence (wt) from hemagglutinin__InfluenzaA__ACY46163

SEQ ID NO: 35508 - RNA, 1701 nt, Artificial Sequence
  derived and/or modified CDS sequence (wt) from hemagglutinin__InfluenzaA__ACY46173
augaaggcaauacuaguaguucugcuauauacauuugcaaccgcaaaugcagacacauuauguauagguuaucaugcgaacaauucaacagacacuguagacacaguacuagaaaagaauguaacaguaacacacucuguuaaccuucuagaagacaagcauaacgggaaacuaugcaaacuaagagggguagccccauugcauuuggguaaauguaacauugcuggcuggauccugggaaauccagagugugaaucacucuccacagcaagcucaugguccuacauuguggaaacaucuaguucagacaauggaacguguuacccaggagauuucaucgauuaugaggagcuaagagagcaacugagcucagugucaucauuugaaagguuugagauauuccccaagacaaguucauggcccaaucaugacucgaacaaagguguaacggcagcauguccucaugcuggagcaaaaagcuucuacaaaaauuuaauauggcuaguuaaaaaaggaaauucauacccaaagcucagcaaauccuacauuaaugauaaagggaaagaaguccucgugcuauggggcauucaccauccaucuacuagugcugaccaacaaagucucuaucagaaugcagaugcauauguuuuuguggggucaucaaaauacagcaagaaguucaagccggaaauagcaauaagacccaaagugagggaucaagaagggagaaugaacuauuacuggacacuaguagagccgggagacaaaauaacauucgaagcaacuggaaaucuagugguaccgagauaugcauucgcaauggaaagaaaugcuggaucugguauuaucauuucagauacaccaguccacgauugcaauacaacuugucagacacccaagggugcuauaaacaccagccucccauuucagaauauacauccgaucacaauuggaaaauguccaaaauauguaaaaagcacaaaauugagacuggccacaggauugaggaaugucccgucuauucaaucuagaggccuauuuggggccauugccgguuucauugaagggggguggacagggaugguagauggaugguacgguuaucaccaucaaaaugagcaggggucaggauaugcagccgaccugaagagcacacagaaugccauugacgagauuacuaacaaaguaaauucuguuauugaaaagaugaauacacaguucacagcaguagguaaagaguucaaccaccuggaaaaaagaauagagaauuuaaauaaaaaaguugaugaugguuuccuggacauuuggacuuacaaugccgaacuguugguucuauuggaaaaugaaagaacuuuggacuaccacgauucaaaugugaagaacuuauaugaaaagguaagaagccaguuaaaaaacaaugccaaggaaauuggaaacggcugcuuugaauuuuaccacaaaugcgauaacacgugcauggaaagugucaaaaaugggacuuaugacuacccaaaauacucagaggaagcaaaauuaaacagagaagaaauagaugggguaaagcuggaaucaacaaggauuuaccagauuuuggcgaucuauucaacugucgccaguucauugguacugguagucucccugggggcaaucaguuucuggaugugcucuaaugggucucuacaguguagaauauguauuuaa

SEQ ID NO: 35509 - RNA, 1701 nt, Artificial Sequence
  derived and/or modified CDS sequence (wt) from hemagglutinin__InfluenzaA__ACY46213
augaaggcaauacuaguaguucugcuauauacauuugcaaccgcaaaugcagacacauuauguauagguuaucaugcgaacaauucaacagacacuguagacacaguacuagaaaagaauguaacaguaacacacucuguuaaccuucuagaagacaagcauaacgggaaacuaugcaaacuaagagggguagccccauugcauuuggguaaauguaacauugcuggcuggauccugggaaauccagagugugaaucacucuccacagcaagcucaugguccuacauuguggaaacaucuaguucagacaauggaacguguuacccaggagauuucaucgauuaugaggagcuaagagagcaauugagcucagugucaucauuugaaagguuugagauauuccccaagacaaguucauggcccaaucaugacucgaacaaagguguaacggcagcauguccucaugcuggagcaaaaagcuucuacaaaaauuuaauauggcuaguuaaaaaaggaaauucauacccaaagcucagcaaauccuacauuaaugauaaagggaaagaaguccucgugcuauggggcauucaccauccaucuacuagugcugaccaacaaagucucuaucagaaugcagaugcauauguuuuuguggggacaucaagauacagcaagaaguucaagccggaaauagcaauaagacccaaagugagggaucaagaagggagaaugaacuauuacuggacacuaguagagccgggagacaaaauaacauucgaagcaacuggaaaucuagugguaccgagauaugcauucgcaauggaaagaaaugcuggaucugguauuaucauuucagacacaccaguccacgauugcaauacaacuugucagacacccaagggugcuauaaacaccagccucccauuucagaauauacauccgaucacaauuggaaaauguccaaaauauguaaaaagcacaaaauugagacuggccacaggauugaggaaugucccgucuauucaaucuagaggccuauuuggggccauugccgguuucauugaagggggguggacagggaugguagauggaugguacgguuaucaccaucaaaaugagcaggggucaggauaugcagccgaccugaagagcacacagaaugccauugacgagauuacuaacaaaguaaauucuguuauugaaaagaugaauacacaguucacagcaguagguaaagaguucaaccaccuggaaaaaagaauagagaauuuaaauaaaaaaguugaugaugguuuccuggacauuuggacuuacaaugccgaacuguugguucuauuggaaaaugaaagaacuuuggacuaccacgauucaaaugugaagaacuuauaugaaaagguaagaagccaguuaaaaaacaaugccaaggaaauuggaaacggcugcuuugaauuuuaccacaaaugcgauaacacgugcauggaaagugucaaaaaugggacuuaugacuacccaaaauacucagaggaagcaaaauuaaacagagaagaaauagaugggguaaagcuggaaucaacaaggauuuaccagauuuuggcgaucuauucaacugucgccaguucauugguacugguagucucccugggggcaaucaguuucuggaugugcucuaaugggucucuacaguguagaauauguauuuaa

SEQ ID NO: 35510 - RNA, 1701 nt, Artificial Sequence; identical to SEQ ID NO: 35509
  derived and/or modified CDS sequence (wt) from hemagglutinin__InfluenzaA__ACY46223

SEQ ID NO: 35511 - RNA, 1701 nt, Artificial Sequence; identical to SEQ ID NO: 34681
  derived and/or modified CDS sequence (wt) from hemagglutinin__InfluenzaA__ACY46233

SEQ ID NO: 35512 - RNA, 1701 nt, Artificial Sequence; identical to SEQ ID NO: 34681
  derived and/or modified CDS sequence (wt) from hemagglutinin__InfluenzaA__ACY46243

SEQ ID NO: 35513 - RNA, 1701 nt, Artificial Sequence; identical to SEQ ID NO: 34681
  derived and/or modified CDS sequence (wt) from hemagglutinin__InfluenzaA__ACY46253

SEQ ID NO: 35514 - RNA, 1701 nt, Artificial Sequence; identical to SEQ ID NO: 34681
  derived and/or modified CDS sequence (wt) from hemagglutinin__InfluenzaA__ACY46263

SEQ ID NO: 35515 - RNA, 1701 nt, Artificial Sequence; identical to SEQ ID NO: 34681
  derived and/or modified CDS sequence (wt) from hemagglutinin__InfluenzaA__ACY46273

SEQ ID NO: 35516 - RNA, 1701 nt, Artificial Sequence; identical to SEQ ID NO: 34681
  derived and/or modified CDS sequence (wt) from hemagglutinin__InfluenzaA__ACY46283

SEQ ID NO: 35517 - RNA, 1701 nt, Artificial Sequence
  derived and/or modified CDS sequence (wt) from hemagglutinin__InfluenzaA__ACY46293
augaaggcaauacuaguaguucugcuauauacauuugcaaccgcaaaugcagacacauuauguauagguuaucaugcgaacaauucaacagacacuguagacacaguacuagaaaagaauguaacaguaacacacucuguuaaccuucuagaagacaagcauaacgggaaacuaugcaaacuaagagggguagccccauugcauuuggguaaauguaacauugcuggcuggauccugggaaauccagagugugaaucacucuccacagcaagcucaugguccuacauuguggaaacaucuaguucagacaauggaacguguuacccaggagauuucaucgauuaugaggagcuaagagagcaauugagcucagugucaucauuugaaagguuugagauauuccccaagacaaguucauggcccaaucaugacucgaacaaagguguaacggcagcauguccucaugcuggagcaaaaagcuucuacaaaaauuuaauauggcuaguuaaaaaaggaaauucauacccaaagcucagcaaauccuacauuaaugauaaagggaaagaaguccucgugcuauggggcauucaccauccaucuacuagugcugaccaacaaagucucuaucagaaugcagaugcauauguuuuuguggggacaucaagauacagcaagaaguucaagccggaaauagcaauaagacccaaagugagggaucaagaagggagaaugaacuauuacuggacacuaguagagccgggagacaaaauaacauucgaagcaacuggaaaucuagugguaccgagauaugcauucgcaauggaaagaaaugcuggaucugguauuaucauuucagauacaccaguccacgauugcaauacaacuugucagacacccaagggugcuauaaacaccagccucccauuucagaauauacauccgaucacaauuggaaaauguccaaaauauguaaaaagcacaaaauugagacuggccgcaggauugaggaaugucccgucuauucaaucuagaggccuauuuggggccauugccgguuucauugaagggggguggacagggaugguagauggaugguacgguuaucaccaucaaaaugagcaggggucaggauaugcagccgaccugaagagcacacagaaugccauugacgagauuacuaacaaaguaaauucuguuauugaaaagaugaauacacaguucacagcaguagguaaagaguucaaccaccuggaaaaaagaauagagaauuuaaauaaaaaaguugaugaugguuuccuggacauuuggacuuacaaugccgaacuguugguucuauuggaaaaugaaagaacuuuggacuaccacgauucaaaugugaagaacuuauaugaaaagguaagaagccaguuaaaaaacaaugccaaggaaauuggaaacggcugcuuugaauuuuaccacaaaugcgauaacacgugcauggaaagugucaaaaaugggacuuaugacuacccaaaauacucagaggaagcaaaauuaaacagagaagaaauagaugggguaaagcuggaaucaacaaggauuuaccagauuuuggcgaucuauucaacugucgccaguucauugguacugguagucucccugggggcaaucaguuucuggaugugcucuaaugggucucuacaguguagaauauguauuuaa

SEQ ID NO: 35518 - RNA, 1701 nt, Artificial Sequence; identical to SEQ ID NO: 34681
  derived and/or modified CDS sequence (wt) from hemagglutinin__InfluenzaA__ACY46303

SEQ ID NO: 35519 - RNA, 1701 nt, Artificial Sequence; identical to SEQ ID NO: 34681
  derived and/or modified CDS sequence (wt) from hemagglutinin__InfluenzaA__ACY46313

SEQ ID NO: 35520 - RNA, 1701 nt, Artificial Sequence; identical to SEQ ID NO: 34681
  derived and/or modified CDS sequence (wt) from hemagglutinin__InfluenzaA__ACY46323

SEQ ID NO: 35521 - RNA, 1701 nt, Artificial Sequence
  derived and/or modified CDS sequence (wt) from hemagglutinin__InfluenzaA__ACY46343
augaaggcaauacuaguaguucugcuauauacauuugcaaccgcaaaugcagacacauuauguauagguuaucaugcgaacaauucaacagacacuguagacacaguacuagaaaagaauguaacaguaacacacucuguuaaccuucuagaagacaagcauaacgggaaacuaugcaaacuaagagggguagccccauugcauuuggguaaauguaacauugcuggcuggauccugggaaauccagagugugaaucacucuccacagcaagcucaugguccuacauuguggaaacaucuaguucagacaauggaacguguuacccaggagauuucaucgauuaugaggagcuaagagagcaauugagcucagugucaucauuugaaagguuugagauauuccccaagacaaguucauggcccaaucaugacucgaacaaagguguaacggcagcauguccucaugcuggagcaaaaagcuucuacaaaaauuuaauauggcuaguuaaaaaaggaaauucauacccaaagcucagcaaauccuacauuaaugauaaagggaaagaaguccucgugcuauggggcauucaccauccaucuacuagugcugaccaacaaagucuuuaucagaaugcagaugcauauguuuuuguggggacaucaagauacagcaagaaguucaagccggaaauagcaauaagacccaaagugagggaucaagaagggagaaugaacuauuacuggacacuaguagagccgggagacaaaauaacauucgaagcaacuggaaaucuagugguaccgagauaugcauucgcaauggaaagaaaugcuggaucugguauuaucauuucagauacaccaguccacgauugcaauacaacuugucagacacccaagggugcuauaaacaccagccucccauuucagaauauacauccgaucacaauuggaaaauguccaaaauauguaaaaagcacaaaauugagacuggccacaggauugaggaaugucccgucuauucaaucuagaggccuauuuggggccauugccgguuucauugaagggggguggacagggaugguagauggaugguacgguuaucaccaucaaaaugagcaggggucaggauaugcagccgaccugaagagcacacagaaugccauugacgagauuacuaacaaaguaaauucuguuauugaaaagaugaauacacaguucacagcaguagguaaagaguucaaccaccuggaaaaaagaauagagaauuuaaauaaaaaaguugaugaugguuuccuggacauuuggacuuacaaugccgaacuguugguucuauuggaaaaugaaagaacuuuggacuaccacgauucaaaugugaagaacuuauaugaaaagguaagaagccaguuaaaaaacaaugccaaggaaauuggaaacggcugcuuugaauuuuaccacaaaugcgauaacacgugcauggaaagugucaaaaaugggacuuaugacuacccaaaauacucagaggaagcaaaauuaaacagagaagaaauagaugggguaaagcuggaaucaacaaggauuuaccagauuuuggcgaucuauucaacugucgccaguucauugguacugguagucucccugggggcaaucaguuucuggaugugcucuaaugggucucuacaguguagaauauguauuuaa

SEQ ID NO: 35522 - RNA, 1701 nt, Artificial Sequence; identical to SEQ ID NO: 34681
  derived and/or modified CDS sequence (wt) from hemagglutinin__InfluenzaA__ACY46353

SEQ ID NO: 35523 - RNA, 1701 nt, Artificial Sequence
  derived and/or modified CDS sequence (wt) from hemagglutinin__InfluenzaA__ACY46373
augaaggcaauacuaauaguucugcuauauacauuugcaaccgcaaaugcagacacauuauguauagguuaucaugcgaacaauucaacagacacuguagacacaguacuagaaaagaauguaacaguaacacacucuguuaaccuucuagaagacaagcauaacgggaaacuaugcaaacuaagagggguagccccauugcauuuggguaaauguaacauugcuggcuggauccugggaaauccagagugugaaucacucuccacagcaagcucaugguccuacauuguggaaacaucuaguucagacaauggaacguguuacccaggagauuucaucgauuaugaggagcuaagagagcaauugagcucagugucaucauuugaaagguuugagauauuccccaagacaaguucauggcccaaucaugacucgaacaaagguguaacggcagcauguccucaugcuggagcaaaaagcuucuacaaaaauuuaauauggcuaguuaaaaaaggaaauucauacccaaagcucagcaaauccuacauuaaugauaaagggaaagaaguccucgugcuauggggcauucaccauccaucuacuagugcugaccaacaaagucucuaucagaaugcagaugcauauguuuuuguggggacaucaagauacagcaagaaguucaagccggaaauagcaauaagacccaaagugagggaucaagaagggagaaugaacuauuacuggacacuaguagagccgggagacaaaauaacauucgaagcaacuggaaaucuagugguaccgagauaugcauucgcaauggaaagaaaugcuggaucugguauuaucauuucagauacaccaguccacgauugcaauacaacuugucagacacccaagggugcuauaaacaccagccucccauuucagaauauacauccgaucacaauuggaaaauguccaaaauauguaaaaagcacaaaauugagacuggccacaggauugaggaaugucccgucuauucaaucuagaggccuauuuggggccauugccgguuuuauugaagggggguggacagggaugguagauggaugguacgguuaucaccaucaaaaugagcaggggucaggauaugcagccgaccugaagagcacacagaaugccauugacgagauuacuaacaaaguaaauucuguuauugaaaagaugaauacacaguucacagcaguagguaaagaguucaaccaccuggaaaaaagaauagagaauuuaaauaaaaaaguugaugaugguuuccuggacauuuggacuuacaaugccgaacuguugguucuauuggaaaaugaaagaacuuuggacuaccacgauucaaaugugaagaacuuauaugaaaagguaagaagccaguuaaaaaacaaugccaaggaaauuggaaacggcugcuuugaauuuuaccacaaaugcgauaacacgugcauggaaagugucaaaaaugggacuuaugacuacccaaaauacucagaggaagcaaaauuaaacagagaagaaauagaugggguaaagcuggaaucaacaaggauuuaccagauuuuggcgaucuauucaacugucgccaguucauugguacugguagucucccugggggcaaucaguuucuggaugugcucuaaugggucucuacaguguagaauauguauuuaa

SEQ ID NO: 35524 - RNA, 1701 nt, Artificial Sequence
  derived and/or modified CDS sequence (wt) from hemagglutinin__InfluenzaA__ACY46383
augaaggcaauacuaguaguucugcuauauacauuugcaaccgcaaaugcagacacauuauguauagguuaucaugcgaacaauucaacagacacuguagacacaguacuagaaaagaauguaacaguaacacacucuguuaaccuucuagaagacaagcauaacgggaaacuaugcaaacuaagagggguagccccauugcauuuggguaaauguaacauugcuggcuggauccugggaaauccagagugugaaucacucuccacagcaagcucaugguccuacauuguggaaacaucuaguucagacaauggaacguguuacccaggagauuucaucgauuaugaggagcuaagagagcaauugagcucagugucaucauuugaaagguuugagauauuccccaagacaaguucuuggcccaaucaugacucgaacaaagguguaacggcagcauguccucaugcuggagcaaaaagcuucuacaaaaauuuaauauggcuaguuaaaaaaggaaauucauacccaaagcucagcaaauccuacauuaaugauaaagggaaagaaguccucgugcuauggggcauucaccauccaucuacuagugcugaccaacaaagucucuaucagaaugcagaugcauauguuuuuguggggucaucaagauacagcaagaaguucaagccggaaauagcaauaagacccaaagugagggaucaagaagggagaaugaacuauuacuggacacuaguagagccgggagacaaaauaacauucgaagcaacuggaaaucuagugguaccgagauaugcauucgcaauggaaagaaaugcuggaucugguauuaucauuucagauacaccaguccacgauugcaauacaacuugucagacacccaagggugcuauaaacaccagccucccauuucauaauauacauccgaucacaauuggaaaauguccaaaauauguaaaaagcacaaaauugagacuggccacaggauugaggaaugucccgucuauucaaucuagaggccuauuuggggccauugccgguuucauugaagggggguggacagggaugguagauggaugguacgguuaucaccaucaaaaugagcaggggucaggauaugcagccgaccugaagagcacacagaaugccauugacgagauuacuaacaaaguaaauucuguuauugaaaagaugaauacacaguucacagcaguagguaaagaguucaaccaccuggaaaaaagaauagagaauuuaaauaaaaaaguugaugaugguuuccuggacauuuggacuuacaaugccgaacuguugguucuauuggaaaaugaaagaacuuuggacuaccacgauucaaaugugaagaacuuauaugaaaagguaagaagccaguuaaaaaacaaugccaaggaaauuggaaacggcugcuuugaauuuuaccacaaaugcgauaacacgugcauggaaagugucaaaaaugggacuuaugacuacccaaaauacucagaggaagcaaaauuaaacagagaagaaauagaugggguaaagcuggaaucaacaaggauuuaccagauuuuggcgaucuauucaacugucgccaguucauugguacugguagucucccugggggcaaucaguuucuggaugugcucuaaugggucucuacaguguagaauauguauuuaa

SEQ ID NO: 35525 - RNA, 1701 nt, Artificial Sequence; identical to SEQ ID NO: 34681
  derived and/or modified CDS sequence (wt) from hemagglutinin__InfluenzaA__ACY46393

SEQ ID NO: 35526 - RNA, 1701 nt, Artificial Sequence; identical to SEQ ID NO: 34681
  derived and/or modified CDS sequence (wt) from hemagglutinin__InfluenzaA__ACY46403

SEQ ID NO: 35527 - RNA, 1701 nt, Artificial Sequence; identical to SEQ ID NO: 34681
  derived and/or modified CDS sequence (wt) from hemagglutinin__InfluenzaA__ACY46413

SEQ ID NO: 35528 - RNA, 1701 nt, Artificial Sequence; identical to SEQ ID NO: 35509
  derived and/or modified CDS sequence (wt) from hemagglutinin__InfluenzaA__ACY46433

SEQ ID NO: 35529 - RNA, 1701 nt, Artificial Sequence; identical to SEQ ID NO: 35509
  derived and/or modified CDS sequence (wt) from hemagglutinin__InfluenzaA__ACY46443

SEQ ID NO: 35530 - RNA, 1701 nt, Artificial Sequence; identical to SEQ ID NO: 34681
  derived and/or modified CDS sequence (wt) from hemagglutinin__InfluenzaA__ACY46453

SEQ ID NO: 35531 - RNA, 1701 nt, Artificial Sequence
  derived and/or modified CDS sequence (wt) from hemagglutinin__InfluenzaA__ACY46463
augaaggcaauacuaguaguuaugcuauauacauuugcaaccgcaaaugcagacacauuauguauagguuaucaugcgaacaauucaacagacacuguagacacaguacuagaaaagaauguaacaguaacacacucuguuaaccuucuagaagacaagcauaacgggaaacuaugcaaacuaagagggguagccccauugcauuuggguaaauguaacauugcuggcuggauccugggaaauccagagugugaaucacucuccacagcaagcucaugguccuacauuguggaaacaucuaguucagacaauggaacguguuacccaggagauuucaucgauuaugaggagcuaagagagcaauugagcucagugucaucauuugaaagguuugagauauuccccaagacaaguucauggcccaaucaugacucgaacaaagguguaacggcagcauguccucaugcuggagcaaaaagcuucuacaaaaauuuaauauggcuaguuaaaaaaggaaauucauacccaaagcucagcaaauccuacauuaaugauaaagggaaagaaguccucgugcuauggggcauucaccauccaucuacuagugcugaccaacaaagucucuaucagaaugcagaugcauauguuuuuguggggacaucaagauacagcaagaaguucaagccggaaauagcaauaagacccaaagugagggaucaagaagggagaaugaacuauuacuggacacuaguagagccgggagacaaaauaacauucgaagcaacuggaaaucuagugguaccgagauaugcauucgcaaugguaagaaaugcuggaucugguauuaucauuucagauacaccaguccacgauugcaauacaacuugucagacacccaagggugcuauaaacaccagccucccauuucagaauauacauccgaucacaauuggaaaauguccaaaauauguaaaaagcacaaaauugagacuggccacaggauugaggaaugucccgucuauucaaucuagaggccuauuuggggccauugccgguuucauugaagggggguggacagggaugguagauggaugguacgguuaucaccaucaaaaugagcaggggucaggauaugcagccgaccugaagagcacacagaaugccauugacgagauuacuaacaaaguaaauucuguuauugaaaagaugaauacacaguucacagcaguagguaaagaguucaaccaccuggaaaaaagaauagagaauuuaaauaaaaaaguugaugaugguuuccuggacauuuggacuuacaaugccgaacuguugguucuauuggaaaaugaaagaacuuuggacuaccacgauucaaaugugaagaacuuauaugaaaagguaagaagccaguuaaaaaacaaugccaaggaaauuggaaacggcugcuuugaauuuuaccacaaaugcgauaacacgugcauggaaagugucaaaaaugggacuuaugacuacccaaaauacucagaggaagcaaaauuaaacagagaagaaauagaugggguaaagcuggaaucaacaaggauuuaccagauuuuggcgaucuauucaacugucgccaguucauugguacugguagucucccugggggcaaucaguuucuggaugugcucuaaugggucucuacaguguagaauauguauuuaa

SEQ ID NO: 35532 - RNA, 1701 nt, Artificial Sequence; identical to SEQ ID NO: 34681
  derived and/or modified CDS sequence (wt) from hemagglutinin__InfluenzaA__ACY46473

SEQ ID NO: 35533 - RNA, 1701 nt, Artificial Sequence; identical to SEQ ID NO: 34705
  derived and/or modified CDS sequence (wt) from hemagglutinin__InfluenzaA__ACY46493

SEQ ID NO: 35534 - RNA, 1701 nt, Artificial Sequence
  derived and/or modified CDS sequence (wt) from hemagglutinin__InfluenzaA__ACY46513
augaaggcaauacuaguaguucugcuauauacauuugcaaccgcaaaugcagacacauuauguauagguuaucaugcgaacaauucaacagacacuguagacacaguacuagaaaagaauguaacaguaacacacucuguuaaccuucuagaagacaagcauaacgggaaacuaugcaaacuaagagggguagccccauugcauuuggguaaauguaacauugcuggcuggauccugggaaauccagagugugaaucacucuccacagcaagcucaugguccuacauuguggaaacaucuaguucagacaauggaacguguuacccaggugauuucaucgauuaugaggagcuaagagagcaauugagcucagugucaucauuugaaagguuugagauauuccccaagacaaguucauggcccaaucaugacucgaacaaagguguaacggcagcauguccucaugcuggagcaaaaagcuucuacaaaaauuuaauauggcuaguuaaaaaaggaaauucauacccaaagcucagcaaauccuacauuaaugauaaagggaaagaaguccucgugcuauggggcauucaccauccaucuacuagugcugaccaacaaagucucuaucagaaugcagaugcauauguuuuuguggggucaucaaaauacagcaagaaguucaagccggaaauagcaauaagacccaaagugagggaucaagaagggagaaugaacuauuacuggacacuaguagagccgggagacaaaauaacauucgaagcaacuggaaaucuagugguaccgagauaugcauucgcaauggaaagaaaugcuggaucugguauuaucauuucagauacaccaguccacgauugcaauacaacuugucagacacccaagggugcuauaaacaccagccucccauuucagaauauacauccgaucacaauuggaaaauguccaaaauauguaaaaagcacaaaauugagacuggccacaggauugaggaaugucccgucuauucaaucuagaggccuauuuggggccauugccgguuucauugaagggggguggacagggaugguagauggaugguacgguuaucaccaucaaaaugagcaggggucaggauaugcagccgaccugaagagcacacagaaugccauugacgagauuacuaacaaaguaaauucuguuauugaaaagaugaauacacaguucacagcaguagguaaagaguucaaccaccuggaaaaaagaauagagaauuuaaauaaaaaaguugaugaugguuuccuggacauuuggacuuacaaugccgaacuguugguucuauuggauaaugaaagaacuuuggacuaccacgauucaaaugugaagaacuuauaugaaaagguaagaagccaguuaaaaaacaaugccaaggaaauuggaaacggcugcuuugaauuuuaccacaaaugcgauaacacgugcauggaaagugucaaaaaugggacuuaugacuacccaaaauacucagaggaagcaaaauuaaacagagaagaaauagaugggguaaagcuggaaucaacaaggauuuaccagauuuuggcgaucuauucaacugucgccaguucauugguacugguagucucccugggggcaaucaguuucuggaugugcucuaaugggucucuacaguguagaauauguauuuaa

SEQ ID NO: 35535 - RNA, 1701 nt, Artificial Sequence; identical to SEQ ID NO: 34681
  derived and/or modified CDS sequence (wt) from hemagglutinin__InfluenzaA__ACY46523

SEQ ID NO: 35536 - RNA, 1701 nt, Artificial Sequence; identical to SEQ ID NO: 34681
  derived and/or modified CDS sequence (wt) from hemagglutinin__InfluenzaA__ACY46533

SEQ ID NO: 35537 - RNA, 1701 nt, Artificial Sequence; identical to SEQ ID NO: 34681
  derived and/or modified CDS sequence (wt) from hemagglutinin__InfluenzaA__ACY46562

SEQ ID NO: 35538 - RNA, 1701 nt, Artificial Sequence; identical to SEQ ID NO: 34681
  derived and/or modified CDS sequence (wt) from hemagglutinin__InfluenzaA__ACY46572

SEQ ID NO: 35539 - RNA, 1701 nt, Artificial Sequence; identical to SEQ ID NO: 34681
  derived and/or modified CDS sequence (wt) from hemagglutinin__InfluenzaA__ACY46582

SEQ ID NO: 35540 - RNA, 1701 nt, Artificial Sequence; identical to SEQ ID NO: 34681
  derived and/or modified CDS sequence (wt) from hemagglutinin__InfluenzaA__ACY46592

SEQ ID NO: 35541 - RNA, 1701 nt, Artificial Sequence; identical to SEQ ID NO: 35509
  derived and/or modified CDS sequence (wt) from hemagglutinin__InfluenzaA__ACY46622

SEQ ID NO: 35542 - RNA, 1701 nt, Artificial Sequence
  derived and/or modified CDS sequence (wt) from hemagglutinin__InfluenzaA__ACY46672
augaaggcaauacuaguaguucugcuauauacauuugcaaccgcaaaugcagacacauuauguauagguuaucaugcgaacaauucaacagacacuguagacacaguacuagaaaagaauguaacaguaacacacucuguuaaccuucuagaagacaagcauaacgggaaacuaugcaaacuaagagggguagccccauugcauuuggguaaauguaacauugcuggcuggauccugggaaauccagagugugaaucacucuccacagcaagcucaugguccuacauuguggaaacaucuaguucagacaauggaacguguuacccaggagauuucaucgauuaugaggagcuaagagagcaauugagcucagugucaucauuugaaagguuugagauauuccccaagacaaguucauggcccaaucaugacucgaacaaagguguaacggcagcauguccucaugcuggagcaaaaagcuucuacaaaaauuuaauauggcuaguuaaaaaaggaaauucauacccaaagcucagcaaauccuacauuaaugauaaagggaaagaaguccucgugcuauggggcauucaccauccaucuacuagugcugaccaacaaagucucuaucagaaugcagaugcauauguuuuuguggggacaucaagauacagcaagaaguucaagccggaaauagcaauaagacccaaagugagggaucaagaagggagaaugaacuauuacuggacacuaguagagccgggagacaaaauaacauucgaagcaacuggaaaucuagugguaccgagauaugcauucgcaaugguaagaaaugcuggaucugguauuaucauuucagauacaccaguccacgauugcaauacaacuugucagacacccaagggugcuauaaacaccagccucccauuucagaauauacauccgaucacaauuggaaaauguccaaaauauguaaaaagcacaaaauugagacuggccacaggauugaggaaugucccgucuauucaaucuagaggccuauuuggggccauugccgguuucauugaagggggguggacagggaugguagauggaugguacgguuaucaccaucaaaaugagcaggggucaggauaugcagccgaccugaagagcacacagaaugccauugacgagauuacuaacaaaguaaauucuguuauugaaaagaugaauacacaguucacagcaguagguaaagaguucaaccaccuggaaaaaagaauagagaauuuaaauaaaaaaguugaugaugguuuccuggacauuuggacuuacaaugccgaacuguugguucuauuggaaaaugaaagaacuuuggacuaccacgauucaaaugugaagaacuuauaugaaaagguaagaagccaguuaaaaaacaaugccaaggaaauuggaaacggcugcuuugaauuuuaccacaaaugcgauaacacgugcauggaaagugucaaaaaugggacuuaugacuacccaaaauacucagaggaagcaaaauuaaacagagaagaaauagaugggguaaagcuggaaucaacaaggauuuaccagauuuuggcgaucuauucaacugucgccaguucauugguacugguagucucccugggggcaaucaguuucuggaugugcucuaaugggucucuacaguguagaauauguauuuaa

SEQ ID NO: 35543 - RNA, 1701 nt, Artificial Sequence; identical to SEQ ID NO: 34681
  derived and/or modified CDS sequence (wt) from hemagglutinin__InfluenzaA__ACY46682

SEQ ID NO: 35544 - RNA, 1701 nt, Artificial Sequence; identical to SEQ ID NO: 34681
  derived and/or modified CDS sequence (wt) from hemagglutinin__InfluenzaA__ACY46692

SEQ ID NO: 35545 - RNA, 1701 nt, Artificial Sequence; identical to SEQ ID NO: 34681
  derived and/or modified CDS sequence (wt) from hemagglutinin__InfluenzaA__ACY46712

SEQ ID NO: 35546 - RNA, 1701 nt, Artificial Sequence
  derived and/or modified CDS sequence (wt) from hemagglutinin__InfluenzaA__ACY46722
augaaggcaauacuaguaguucugcuauauacauuugcaaccgcaaaugcagacacauuauguauagguuaucaugcgaacaauucaacagacacuguagacacaguacuagaaaagaauguaacaguaacacacucuguuaaccuucuagaagacaagcauaacgggaaacuaugcaaacuaagagggguagccccauugcauuuggguaaauguaacauugcuggcuggauccugggaaauccagagugugaaucacucuccacagcaagcucaugguccuacauuguggaaacaucuaguucagacaauggaacguguuacccaggagauuucaucgauuaugaggagcuaagagagcaauugagcucagugucaucauuugaaagguuugagauauuccccaagacaaguucauggcccaaucaugacucgaacaaagguguaacggcagcauguccucaugcuggagcaaaaagcuucuacaaaaauuuaauauggcuaguuaaaaaaggaaauucauacccaaagcucagcaaauccuacauuaaugauaaagggaaagaaguccucgugcuaugggguauucaccauccaucuacuagugcuggccaacaaagucucuaucagaaugcagaugcauauguuuuuguggggacaucaagauacagcaagaaguucaagccggaaauagcaauaagacccaaagugagggaucaagaagggagaaugaacuauuacuggacacuaguagagccgggagacaaaauaacauucgaagcaacuggaaaucuagugguaccgagauaugcauucgcaauggaaagaaaugcuggaucugguauuaucauuucagauacaccaguccacgauugcaauacaacuugucagacacccaagggugcuauaaacaccagccucccauuucagaauauacauccgaucacaauuggaaaauguccaaaauauguaaaaagcacaaaauugagacuggccacaggauugaggaaugucccgucuauucaaucuagaggccuauuuggggccauugccgguuucauugaagggggguggacagggaugguagauggaugguacgguuaucaccaucaaaaugagcaggggucaggauaugcagccgaccugaagagcacacagaaugccauugacgagauuacuaacaaaguaaauucuguuauugaaaagaugaauacacaguucacagcaguagguaaagaguucaaccaccuggaaaaaagaauagagaauuuaaauaaaaaaguugaugaugguuuccuggacauuuggacuuacaaugccgaacuguugguucuauuggaaaaugaaagaacuuuggacuaccacgauucaaaugugaagaacuuauaugaaaagguaagaagccaguuaaaaaacaaugccaaggaaauuggaaacggcugcuuugaauuuuaccacaaaugcgauaacacgugcauggaaagugucaaaaaugggacuuaugacuacccaaaauacucagaggaagcaaaauuaaacagagaagaaauagaugggguaaagcuggaaucaacaaggauuuaccagauuuuggcgaucuauucaacugucgccaguucauugguacugguagucucccugggggcaaucaguuucuggaugugcucuaaugggucucuacaguguagaauauguauuuaa

SEQ ID NO: 35547 - RNA, 1701 nt, Artificial Sequence
  derived and/or modified CDS sequence (wt) from hemagglutinin__InfluenzaA__ACY46742
augaaggcaauacuaguaguucugcuauauacauuugcaaccgcaaaugcagacacauuauguauagguuaucaugcgaacaauucaacagacacuguagacacaguacuagaaaagaauguaacaguaacacacucuguuaaccuucuagaagacaagcauaacgggaaacuaugcaaacuaagagggguagccccauugcauuuggguaaauguaacauugcuggcuggauccugggaaauccagagugugaaucacucuccacagcaagcucaugguccuacauuguggaaacaucuaguucagacaauggaacguguuacccaggaaauuucaucgauuaugaggagcuaagagagcaauugagcucagugucaucauuugaaagguuugagauauuccccaagacaaguucauggcccaaucaugacucgaacaaagguguaacggcagcauguccucaugcuggagcaaaaagcuucuacaaaaauuuaauauggcuaguuaaaaaaggaaauucauacccaaagcucagcaaauccuacauuaaugauaaagggaaagaaguccucgugcuauggggcauucaccauccaucuacuagugcugaccaacaaagucucuaucagaaugcagaugcauauguuuuuguggggacaucaagauacagcaagaaguucaagccggaaauagcaauaagacccaaagugagggaucaagaagggagaaugaacuauuacuggacacuaguagagccgggagacaaaauaacauucgaagcaacuggaaaucuagugguaccgagauaugcauucgcaauggaaagaaaugcuggaucugguauuaucauuucagauacaccaguccacgauugcaauacaacuugucagacacccaagggugcuauaaacaccagccucccauuucagaauauacauccgaucacaauuggaaaauguccaaaauauguaaaaagcacaaaauugagacuggccacaggauugaggaaugucccgucuauucaaucuagaggccuauuuggggccauugccgguuucauugaagggggguggacagggaugguagauggaugguacgguuaucaccaucaaaaugagcaggggucaggauaugcagccgaccugaagagcacacagaaugccauugacgagauuacuaacaaaguaaauucuguuauugaaaagaugaauacacaguucacagcaguagguaaagaguucaaccaccuggaaaaaagaauagagaauuuaaauaaaaagguugaugaugguuuccuggacauuuggacuuacaaugccgaacuguugguucuauuggaaaaugaaagaacuuuggacuaccacgauucaaaugugaagaacuuauaugaaaagguaagaagccaguuaaaaaacaaugccaaggaaauuggaaacggcugcuuugaauuuuaccacaaaugcgauaacacgugcauggaaagugucaaaaaugggacuuaugacuacccaaaauacucagaggaagcaaaauuaaacagagaagaaauagaugggguaaagcuggaaucaacaaggauuuaccagauuuuggcgaucuauucaacugucgccaguucauugguacugguagucucccugggggcaaucaguuucuggaugugcucuaaugggucucuacaguguagaauauguauuuaa

SEQ ID NO: 35548 - RNA, 1701 nt, Artificial Sequence; identical to SEQ ID NO: 34681
  derived and/or modified CDS sequence (wt) from hemagglutinin__InfluenzaA__ACY46762

SEQ ID NO: 35549 - RNA, 1701 nt, Artificial Sequence
  derived and/or modified CDS sequence (wt) from hemagglutinin__InfluenzaA__ACY46772
augaaggcaauacuaguaguucugcuauauacauuugcaaccgcaaaugcagacacauuauguauagguuaucaugcgaacaauucaacagacacuguagacacaguacuagaaaagaauguaacaguaacacacucuguuaaccuucuagaagacaagcauaacgggaaacuaugcaaacuaagagggguagccccauugcauuuggguaaauguaacauugcuggcuggauccugggaaauccagagugugaaucacucuccacagcaagcucaugguccuacauuguggaaacaucuaguucagacaauggaacgugcuacccaggagauuucaucgauuaugaggagcuaagagagcaauugagcucagugucaucauuugaaagguuugagauauuccccaagacaaguucauggcccaaucaugacucgaacaaagguguaacggcagcauguccucaugcuggagcaaaaagcuucuacaaaaauuuaauauggcuaguuaaaaaaggaaauucauacccaaagcucagcaaauccuacauuaaugauaaagggaaagaaguccucgugcuaugggguauucaccauccaucuacuagugcugaccaacaaagucucuaucagaaugcagaugcauauguuuuuguggggacaucaagauacagcaagaaguucaagccggaaauagcaauaagacccaaagugagggaucaagaagggagaaugaacuauuacuggacacuaguagagccgggagacaaaauaacauucgaagcaacuggaaaucuagugguaccgagauaugcauucgcaauggaaagaaaugcuggaucugguauuaucauuucagauacaccaguccacgauugcaauacaacuugucagacacccaagggugcuauaaacaccagccucccauuucagaauauacauccgaucacaauuggaaaauguccaaaauauguaaaaagcacaaaauugagacuggccacaggauugaggaaugucccgucuauucaaucuagaggccuauuuggggccauugccgguuucauugaagggggguggacagggaugguagauggaugguacgguuaucaccaucaaaaugagcaggggucaggauaugcagccgaccugaagagcacacagaaugccauugacgagauuacuaacaaaguaaauucuguuauugaaaagaugaauacacaguucacagcaguagguaaagaguucaaccaccuggaaaaaagaauagagaauuuaaauaaaaaaguugaugaugguuuccuggacauuuggacuuacaaugccgaacuguugguucuauuggaaaaugaaagaacuuuggacuaccacgauucaaaugugaagaacuuauaugaaaagguaagaagccaguuaaaaaacaaugccaaggaaauuggaaacggcugcuuugaauuuuaccacaaaugcgauaacacgugcauggaaagugucaaaaaugggacuuaugacuacccaaaauacucagaggaagcaaaauuaaacagagaagaaauagaugggguaaagcuggaaucaacaaggauuuaccagauuuuggcgaucuauucaacugucgccaguucauugguacugguagucucccugggggcaaucaguuucuggaugugcucuaaugggucucuacaguguagaauauguauuuaa

SEQ ID NO: 35550 - RNA, 1701 nt, Artificial Sequence
  derived and/or modified CDS sequence (wt) from hemagglutinin__InfluenzaA__ACY46903
augaaggcaauacuaguaguucugcuauauacauuugcaaccgcaaaugcagacacauuauguauagguuaucaugcgaacaauucaacagacacuguagacacaguacuagaaaagaauguaacaguaacacacucuguuaaccuucuagaagacaagcauaacgggaaacuaugcaaacuaagagggguagccccauugcauuuggguaaauguaacauugcuggcuggauccugggaaauccagagugugaaucacucuccacagcaagcucaugguccuacauuguggaaacaucuaguucggacaauggaacguguuacccaggagauuucaucgauuaugaggagcuaagagagcaauugagcucagugucaucauuugaaagguuugagauauuccccaagacaaguucauggcccaaucaugacucgaacaaagguguaacggcagcauguccucaugcuggagcaaaaagcuucuacaaaaauuuaauauggcuaguuaaaaaaggaaauucauacccaaagcucagcaaauccuacauuaaugauaaagggaaagaaguccucgugcuauggggcauucaccauccaucuacuagugcugaccaacaaagucucuaucagaaugcagaugcauauguuuuuguggggacaucaagauacagcaagaaguucaagccggaaauagcaauaagacccaaagugagggaucaagaagggagaaugaacuauuacuggacacuaguagagccgggagacaaaauaacauucgaagcaacuggaaaucuagugguaccgagauaugcauucgcaauggaaagaaaugcuggaucugguauuaucauuucagauacaccaguccacgauugcaauacaacuugucagacacccaagggugcuauaaacaccagccucccauuucagaauauacauccgaucacaauuggaaaauguccaaaauauguaaaaagcacaaaauugagacuggccacaggauugaggaaugucccgucuauucaaucuagaggccuauuuggggccauugccgguuucauugaagggggguggacagggaugguagauggaugguacgguuaucaccaucaaaaugagcaggggucaggauaugcagccgaccugaagagcacacagaaugccauugacgagauuacuaacaaaguaaauucuguuauugaaaagaugaauacacaguucacagcaguagguaaagaguucaaccaccuggaaaaaagaauagagaauuuaaauaaaaaaguugaugaugguuuccuggacauuuggacuuacaaugccgaacuguugguucuauuggaaaaugaaagaacuuuggacuaccacgauucaaaugugaagaacuuauaugaaaagguaagaagccaguuaaaaaacaaugccaaggaaauuggaaacggcugcuuugaauuuuaccacaaaugcgauaacacgugcauggaaagugucaaaaaugggacuuaugacuacccaaaauacucagaggaagcaaaauuaaacagagaagaaauagaugggguaaagcuggaaucaacaaggauuuaccagauuuuggcgaucuauucaacugucgccaguucauugguacugguagucucccugggggcaaucaguuucuggaugugcucuaaugggucucuacaguguagaauauguauuuaa

SEQ ID NO: 35551 - RNA, 1701 nt, Artificial Sequence
  derived and/or modified CDS sequence (wt) from hemagglutinin__InfluenzaA__ACY77534
augaaggcaauacuaguaguuaugcuauauacauuugcaaccgcaaaugcagacacauuauguauagguuaucaugcgaacaauucaacagacacuguagacacaguacuagaaaagaauguaacaguaacacacucuguuaaccuucuagaagacaagcauaacgggaaacuaugcaaacuaagagggguagccccauugcauuuggguaaauguaacauugcuggcuggauccugggaaauccagagugugaaucacucuccacagcaagcucaugguccuacauuguggaaacaucuaguucagacaauggaacguguuacccaggagauuucaucgauuaugaggagcuaagagagcaauugagcucagugucaucauuugaaagguuugagauauuccccaagacaaguucauggcccaaucaugacucgaacaaagguguaacggcagcauguccucaugcuggagcaaaaagcuucuacaaaaauuuaauauggcuaguuaaaaaaggaaauucauacccaaagcucagcaaauccuacauuaaugauaaagggaaagaaguccucgugcuauggggcauucaccauccaucuacuagugcugaccaacaaagucucuaucagaaugcagaugcauauguuuuuguggggucaucaagauacagcaagaaguucaagccggaaauagcaauaagacccaaagugagggaucaagaagggagaaugaacuauuacuggacacuaguagagccgggagacaaaauaacauucgaagcaacuggaaaucuagugguaccgagauaugcauucgcaauggaaagaaaugcuggaucugguauuaucauuucagauacaccaguccacgauugcaauacaacuugucagacacccaagggugcuauaaacaccagccucccauuucagaauauacauccgaucacaauuggaaaauguccaaaauauguaaaaagcacaaaauugagacuggccacaggauugaggaaugucccgucuauucaaucuagaggccuauuuggggccauugccgguuucauugaagggggguggacagggaugguagauggaugguacgguuaucaccaucaaaaugagcaggggucaggauaugcagccgaccugaagagcacacagaaugccauugacgagauuacuaacaaaguaaauucuguuauugaaaagaugaauacacaguucacagcaguagguaaagaguucaaccaccuggaaaaaagaauagagaauuuaaauaaaaaaguugaugaugguuuccuggacauuuggacuuacaaugccgaacuguugguucuauuggaaaaugaaagaacuuuggacuaccacgauucaaaugugaagaacuuauaugaaaagguaagaagccagcuaaaaaacaaugccaaggaaauuggaaacggcugcuuugaauuuuaccacaaaugcgauaacacgugcauggaaagugucaaaaaugggacuuaugacuacccaaaauacucagaggaagcaaaauuaaacagagaagaaauagaugggguaaagcuggaaucaacaaggauuuaccagauuuuggcgaucuauucaacugucgccaguucauugguacugguagucucccugggggcaaucaguuucuggaugugcucuaaugggucauuacaguguagaauauguauuuaa

SEQ ID NO: 35552 - RNA, 1698 nt, Artificial Sequence
  derived and/or modified CDS sequence (wt) from hemagglutinin__InfluenzaA__ACY77544
augaaggcaauacuaguaguuaugcuauauacauuugcaaccgcaaaugcagacacauuauguauagguuaucaugcgaacaauucaacagacacuguagacacaguacuagaaaagaauguaacaguaacacacucuguuaaccuucuagaagacaagcauaacgggaaacuaugcaaacuaagagggguagccccauugcauuuggguaaauguaacauugcuggcuggauccugggaaauccagagugugaaucacucuccacagcaagcucaugguccuacauuguggaaacaucuaguucagacaauggaacguguuacccaggagauuucaucgauuaugaggagcuaagagagcaauugagcucagugucaucauuugaaagguuugagauauuccccaagacaaguucauggcccaaucaugacucgaacaaagguguaacggcagcauguccucaugcuggagcaaaaagcuucuacaaaaauuuaauauggcuaguuaaaaaaggaaauucauacccaaagcucagcaaauccuacauuaaugauaaagggaaagaaguccucgugcuauggggcauucaccauccaucuacuagugcugaccaacaaagucucuaucagaaugcagaugcauauguuuuuguggggucaucaagauacagcaagaaguucaagccggaaauagcaauaagacccaaagugagggaucaagaagggagaaugaacuauuacuggacacuaguagagccgggagacaaaauaacauucgaagcaacuggaaaucuagugguaccgagauaugcauucgcaauggaaagaaaugcuggaucugguauuaucauuucagauacaacaguccacgauugcaauacaacuugucagacacccaagggugcuauaaacaccagccucccauuucagaauauacauccgaucacaauuggaaaauguccaaaauauguaaaaagcacaaaauugagacuggccacaggauugaggaaugucccgucuauucaaucuagaggccuauuuggggccauugccgguuucauugaagggggguggacagggaugguagauggaugguacgguuaucaccaucaaaaugagcaggggucaggauaugcagccgaccugaagagcacacagaaugccauugacgagauuacuaacaaaguaaauucuguuauugaaaagaugaauacacaguucacagcaguagguaaagaguucaaccaccuggaaaaaagaauagagaauuuaaauaaaaaaguugaugaugguuuccuggacauuuggacuuacaaugccgaacuguugguucuauuggaaaaugaaagaacuuuggacuaccacgauucaaaugugaagaacuuauaugaaaagguaagaagccagcuaaaaaacaaugccaaggaaauuggaaacggcugcuuugaauuuuaccacaaaugcgauaacacgugcauggaaagugucaaaaaugggacuuaugacuacccaaaauacucagaggaagcaaaauuaaacagagaagaaauagaugggguaaagcuggaaucaacaaggauuuaccagauuuuggcgaucuauucaacugucgccaguucauugguacugguagucucccugggggcaaucaguuucuggaugugcucuuggucucuacaguguagaauauguauuuaa

SEQ ID NO: 35553 - RNA, 1698 nt, Artificial Sequence
  derived and/or modified CDS sequence (wt) from hemagglutinin__InfluenzaA__ACY77554
augaaggcaauacuaguaguucugcuauauacauuugcaaccgcaaaugcagacacauuauguauagguuaucaugcgaacaauucaacagacacuguagacacaguacuagaaaagaauguaacaguaacacacucuguuaaccuucuagaagacaagcauaacgggaaacuaugcaaacuaagagggguagccccauugcauuuggguaaauguaacauugcuggcuggauccugggaaauccagagugugaaucacucuccacagcaagcucaugguccuacauuguggaaacaucuaguucagacaauggaacguguuacccaggagauuucaucgauuaugaggagcuaagagagcaauugagcucagugucaucauuugaaagauuugagauauuccccaagacaaguucauggcccaaucaugacucgaacaaagguguaacggcagcauguccucaugcuggagcaaaaagcuucuacaaaaauuuaauauggcuaguuaaaaaaggaaauucauacccaaagcucagcaaauccuacauuaaugauaaagggaaagaaguccucgugcuauggggcauucaccauccaucuacuagugcugaccaacaaagucucuaucagaaugcagaugcauauguuuuuguggggacaucaagauacaguaagaaguucaagccggaaauagcaauaagacccaaagugagggaucaagaagggagaaugaacuauuacuggacacuaguagagccgggagacaaaauaacauucgaagcaacuggaaaucuagugguaccgagauaugcauucgcaauggaaagaaaugcuggaucugguauuaucauuucagauacaccaguccacaauugcaauacaacuugucagacacccaagggugcuauaaacaccagccucccauuucagaauauacauccgaucacaauuggaaaauguccaaaauauguaaaaagcacaaaauugagacuggccacaggauugaggaaugucccgucuauucaaucuagaggccuauuuggggccauugccgguuucauugaagggggguggacagggaugguagauggaugguacgguuaucaccaucaaaaugagcaggggucaggauaugcagccgaucugaagagcacacagaaugccauugacgagauuacuaacaaaguaaauucuguuauugaaaagaugaauacacaguucacagcaguagguaaagaguucaaccaccuggaaaaaagaauagagaauuuaaauaaaaaaguugaugaugguuuccuggacauuuggacuuacaaugccgaacuguugguucuauuggaaaaugaaagaacuuuggacuaccacgauucaaaugugaagaacuuauaugaaaagguaagaagccaguuaaaaaacaaugccaaggaaauuggaaacggcugcuuugaauuuuaccacaaaugcgauaacacgugcauggaaagugucaaaaaugggacuuaugacuacccaaaauacucagaggaagcaaaauuaaacagagaagaaauagaugggguaaagcuggaaucaacaaggauuuaccagauuuuggcgaucuauucaacugucgccaguucauugguacugguagucucccugggggcaaucaguuucuggaugugcucuggucaucuacaguguagaauauguauuuaa

SEQ ID NO: 35554 - RNA, 1695 nt, Artificial Sequence
  derived and/or modified CDS sequence (wt) from hemagglutinin__InfluenzaA__ACY77573
augaaggcaauacuaguaguucugcuauauacauuugcaaccgcaaaugcagacacauuauguauagguuaucaugcgaacaauucaacagacacuguagacacaguacuagaaaagaauguaacaguaacacacucuguuaaccuucuagaagacaagcauaacgggaaacuaugcaaacuaagagggguagccccauugcauuuggguaaauguaacauugcuggcuggauccugggaaauccagagugugaaucacucuccacagcaagcucaugguccuacauuguggaaacaucuaguucagacaauggaacguguuacccaggagauuucaucgauuaugaggagcuaagagagcaauugagcucagugucaucauuugaaagguuugagauauuccccaagacaaguucauggcccaaucaugacucgaacaaagguguaacggcagcauguccucaugcuggagcaaaaagcuucuacaaaaauuuaauauggcuaguuaaaaaaggaaauucauacccaaagcucagcaaauccuacauuaaugauaaagggaaagaaguccucgugcuauggggcauucaccauccaucuacuagugcugaccaacaaagucucuaucagaaugcagaugcauauguuuuuguggggucaucaagauacagcaagaaguucaagccggaaauagcaauaagacccaaagugagggaucaagaagggagaaugaacuauuacuggacacuaguagagccgggagacaaaauaacauucgaagcaacuggaaaucuagugguaccgagauaugcauucgcaauggaaagaaaugcuggaucugguauuaucauuucagauacaccaguccacgauugcaauacaacuugucagacacccaagggugcuauaaacaccagccucccauuucagaauauacauccgaucacaauuggaaaauguccaaaauauguaaaaagcacaaaauugagacuggccacaggauugaggaaugucccgucuauucaaucuagaggccuauuuggggccauugccgguuucauugaagggggguggacagggaugguagauggaugguacgguuaucaccaucaaaaugagcaggggucaggauaugcagccgaccugaagagcacacagagugccauugacgagauuacuaacaaaguaaauucuguuauugaaaagaugaauacacaguugacaggccaguguaaagaguucaaccaccuggaaaaaagaauagagaauuuaaauaaaaaaguugaugaugguuuccuggacauuuggacuuacaaugccgaacuguugguucuauuggaaaaugaaagaacuuuggacuaccacgauucaaaugugaagaacuuauaugaaaagguaagaagccaguuaaaaaacaaugccaaugaaauuggaaacggcugcuuugaauuuuaccacaaaugcgauaacacgugcauggaaagugucaaaaaugggacuuaugacuacccaaaauacucagaggaagcaaaauuaaacagagaagaaauagaugggguaaagcuggaaucaacaaggauuuaccagauuuuggcgaucuauucaacugucgccaguucauugguacugguagucucccugggggcaaucaguuucuggaugugcucuggucauagcuguagaauauguauuuaa

SEQ ID NO: 35555 - RNA, 1701 nt, Artificial Sequence
  derived and/or modified CDS sequence (wt) from hemagglutinin__InfluenzaA__ACY77593
augaaggcaauacuaguaguuaugcuauauacauuugcaaccgcaaaugcagacacauuauguauagguuaucaugcgaacaauucaacagacacuguagacacaguacuagaaaagaauguaacaguaacacacucuguuaaccuucuagaagacaagcauaacgggaaacuaugcaaacuaagagggguagccccauugcauuuggguaaauguaacauugcuggcuggauccugggaaauccagagugugaaucacucuccacagcaagcucaugguccuacauuguggaaacaucuaguucagacaauggaacguguuacccaggagauuucaucgauuaugaggagcuaagagagcaauugagcucagugucaucauuugaaagguuugagauauuccccaagacaaguucauggcccaaucaugacucgaacaaagguguaacggcagcauguccucaugcuggagcaaaaagcuucuacaaaaauuuaauauggcuaguuaaaaaaggaaauucauacccaaagcucagcaaauccuacauuaaugauaaagggaaagaaguccucgugcuauggggcauucaccauccaucuacuagugcugaccaacaaagucucuaucagaaugcagaugcauauguuuuuguggggucaucaagauacagcaagaaguucaagccggaaauagcaauaagacccaaagugagggaucaagaagggagaaugaacuauuacuggacacuaguagagccgggagacaaaauaacauucgaagcaacuggaaaucuagugguaccgagauaugcauucgcaauggaaagaaaugcuggaucugguauuaucauuucagauacaacaguccacgauugcaauacaacuugucagacacccaagggugcuauaaacaccagccucccauuucagaauauacauccgaucacaauuggaaaauguccaaaauauguaaaaagcacaaaauugagacuggccacaggauugaggaaugucccgucuauucaaucuagaggccuauuuggggccauugccgguuucauugaagggggguggacagggaugguagauggaugguacgguuaucaccaucaaaaugagcaggggucaggauaugcagccgaccugaagagcacacagaaugccauugacgagauuacuaacaaaguaaauucuguuauugaaaagaugaauacacaguucacagcaguagguaaagaguucaaccaccuggaaaaaagaauagagaauuuaaauaaaaaaguugaugaugguuuccuggacauuuggacuuacaaugccgaacuguugguucuauuggaaaaugaaagaacuuuggacuaccacgauucaaaugugaagaacuuauaugaaaagguaagaagccagcuaaaaaacaaugccaaggaaauuggaaacggcugcuuugaauuuuaccacaaaugcgauaacacgugcauggaaagugucaaaaaugggacuuaugacuacccaaaauacucagaggaagcaaaauuaaacagagaagaaauagaugggguaaagcuggaaucaacaaggauuuaccagauuuuggcgaucuauucaacugucgccaguucauugguacugguagucucccugggggcaaucaguuucuggaugugcucuaaugggucucuacaguguagaauauguauuuaa

SEQ ID NO: 35556 - RNA, 1698 nt, Artificial Sequence
  derived and/or modified CDS sequence (wt) from hemagglutinin__InfluenzaA__ACY77603
augaaggcaauacuaguaguuaugcuauauacauuugcaaccgcaaaugcagacacauuauguauagguuaucaugcgaacaauucaacagacacuguagacacaguacuagaaaagaauguaacaguaacacacucuguuaaccuucuagaagacaagcauaacgggaaacuaugcaaacuaagagggguagccccauugcauuuggguaaauguaacauugcuggcuggauccugggaaauccagagugugaaucacucuccacagcaagcucaugguccuacauuguggaaacaucuaguucagacaauggaacguguuacccaggagauuucaucgauuaugaggagcuaagagagcaauugagcucagugucaucauuugaaagguuugagauauuccccaagacaaguucauggcccaaucaugacucgaacaaagguguaacggcagcauguccucaugcuggagcaaaaagcuucuacaaaaauuuaauauggcuaguuaaaaaaggaaauucauacccaaagcucagcaaauccuacauuaaugauaaagggaaagaaguccucgugcuauggggcauucaccauccaucuacuagugcugaccaacaaagucucuaucagaaugcagaugcauauguuuuuguggggucaucaagauacagcaagaaguucaagccggaaauagcaauaagacccaaagugagggaucaagaagggagaaugaacuauuacuggacacuaguagagccgggagacaaaauaacauucgaagcaacuggaaaucuagugguaccgagauaugcauucgcaauggaaagaaaugcuggaucugguauuaucauuucagauacaccaguccacgauugcaauacaacuugucagacacccaagggugcuauaaacaccagccucccauuucagaauauacauccgaucacaauuggaaaauguccaaaauauguaaaaagcacaaaauugagacuggccacaggauugaggaaugucccgucuauucaaucuagaggccuauuuggggccauugccgguuucauugaagggggguggacagggaugguagauggaugguacgguuaucaccaucaaaaugagcaggggucaggauaugcagccgaccugaagagcacacagaaugccauugacgagauuacuaacaaaguaaauucuguuauugaaaagaugaauacacaguucacagcaguagguaaagaguucaaccaccuggaaaaaagaauagagaauuuaaauaaaaaaguugaugaugguuuccuggacauuuggacuuacaaugccgaacuguugguucuauuggaaaaugaaagaacuuuggacuaccacgauucaaaugugaagaacuuauaugaaaagguaagaagccagcuaaaaaacaaugccaaggaaauuggaaacggcugcuuugaauuuuaccacaaaugcgauaacacgugcauggaaagugucaaaaaugggacuuaugacuacccaaaauacucagaggaagcaaaauuaaacagagaagaaauagaugggguaaagcuggaaucaacaaggauuuaccagauuuuggcgaucuauucaacugucgccaguucauugguacugguagucucccugggggcaaucaguuucuggaugugcucuuggucucuacaguguagaauauguauuuaa

SEQ ID NO: 35557 - RNA, 1695 nt, Artificial Sequence
  derived and/or modified CDS sequence (wt) from hemagglutinin__InfluenzaA__ACY77613
augaaggcaauacuaguaguucugcuauauacauuugcaaccgcaaaugcagacacauuauguauagguuaucaugcgaacaauucaacagacacuguagacacaguacuagaaaagaauguaacaguaacacacucuguuaaccuucuagaagacaagcauaacgggaaacuaugcaaacuaagagggguagccccauugcauuuggguaaauguaacauugcuggcuggauccugggaaauccagagugugaaucacucuccacagcaagcucaugguccuacauuguggaaacaucuaguucagacaauggaacguguuacccaggagauuucaucgauuaugaggagcuaagagagcaguugagcucagugucaucauuugaaagguuugagauauuccccaagacaaguucauggcccaaucaugacucgaacaaagguguaacggcagcauguccucaugcuggagcaaaaagcuucuacaaaaauuuaauauggcuaguuaaaaaaggaaauucauacccaaagcucagcaaauccuacauuaaugauaaagggaaagaaguccucgugcuauggggcauucaccauccaucuacuagugcugaccaacaaagucucuaucagaaugcagaugcauauguuuuuguggggacaucaagauacagcaagaaguucaagccggaaauagcaauaagacccaaagugagggaucaagaagggagaaugaacuauuacuggacacuaguagagccgggagacaaaauaacauucgaagcaacuggaaaucuagugguaccgagauaugcauucgcaauggaaagaaaugcuggaucugguauuaucauuucagauacaccaguccacgauugcaauacaacuugucagacacccaagggugcuauaaacaccagccucccauuucagaauauacauccgaucacaauuggaaaauguccaaaauauguaaaaagcacaaaauugagacuggccacaggauugaggaaugucccgucuauucaaucuagaggccuauuuggggccauugccgguuucauugaagggggguggacagggaugguagauggaugguacgguuaucaccaucaaaaugagcaggggucaggauaugcagccgaccugaagagcacacagaaugccauugacgagauuacuaacaaaguaaauucuguuauugaaaagaugaauacacaguucacaggccaguguaaagaguucaaccaccuggaaaaaagaauagagaauuuaaauaaaaaaguugaugaugguuuccuggacauuuggacuuacaaugccgaacuguugguucuauuggaaaaugaaagaacuuuggacuaccacgauucaaaugugaagaacuuauaugaaaagguaagaagccaguuaaaaaacaaugccaaggaaauuggaaacggcugcuuugaauuuuaccacaaaugcgauaacacgugcauggaaagugucaaaaaugggacuuaugacuacccaaaauacucagaggaagcaaaauuaaacagagaagaaauagaugggguaaagcuggaaucaacaaggauuuaccagauuuuggcgaucuauucaacugucgccaguucauugguacugguagucucccugggggcaaucaguuucuggaugugcucuggucauagcuguagaauauguauuuaa

SEQ ID NO: 35558 - RNA, 1701 nt, Artificial Sequence
  derived and/or modified CDS sequence (wt) from hemagglutinin__InfluenzaA__ACY77623
augaaggcaauacuaguaguucugcuauauacauuugcaaccgcaaaugcagacacauuauguauagguuaucaugcgaacaauucaacagacacuguagacacaguacuagaaaagaauguaacaguaacacacucuguuaaccuucuagaagacaagcauaacgggaaacuaugcaaacuaagagggguagccccauugcauuuggguaaauguaacauugcuggcuggauccugggaaauccagagugugaaucacucuccacagcaagcucaugguccuacauuguggaaacaucuaguucagacaauggaacguguuacccaggagauuucaucgauuaugaggagcuaagagagcaguugagcucagugucaucauuugaaagguuugagauauuccccaagacaaguucauggcccaaucaugacucgaacaaagguguaacggcagcauguccucaugcuggagcaaaaagcuucuacaaaaauuuaauauggcuaguuaaaaaaggaaauucauacccaaagcucagcaaauccuacauuaaugauaaagggaaagaaguccucgugcuauggggcauucaccauccaucuacuagugcugaccaacaaagucucuaucagaaugcagaugcauauguuuuuguggggacaucaagauacagcaagaaguucaagccggaaauagcaauaagacccaaagugagggaucaagaagggagaaugaacuauuacuggacacuaguagagccgggagacaaaauaacauucgaagcaacuggaaaucuagugguaccgagauaugcauucgcaauggaaagaaaugcuggaucugguauuaucauuucagauacaccaguccacgauugcaauacaacuugucagacacccaagggugcuauaaacaccagccucccauuucagaauauacauccgaucacaauuggaaaauguccaaaauauguaaaaagcacaaaauugagacuggccacaggauugaggaaugucccgucuauucaaucuagaggccuauuuggggccauugccgguuucauugaagggggguggacagggaugguagauggaugguacgguuaucaccaucaaaaugagcaggggucaggauaugcagccgaccugaagagcacacagaaugccauugacgagauuacuaacaaaguaaauucuguuauugaaaagaugaauacacaguucacagcaguagguaaagaguucaaccaccuggaaaaaagaauagagaauuuaaauaaaaaaguugaugaugguuuccuggacauuuggacuuacaaugccgaacuguugguucuauuggaaaaugaaagaacuuuggacuaccacgauucaaaugugaagaacuuauaugaaaagguaagaagccaguuaaaaaacaaugccaaggaaauuggaaacggcugcuuugaauuuuaccacaaaugcgauaacacgugcauggaaagugucaaaaaugggacuuaugacuacccaaaauacucagaggaagcaaaauuaaacagagaagaaauagaugggguaaagcuggaaucaacaaggauuuaccagauuuuggcgaucuauucaacugucgccaguucauugguacugguagucucccugggggcaaucaguuucuggaugugcucuaaugggucucuacaguguagaauauguauuuaa

SEQ ID NO: 35559 - RNA, 1707 nt, Artificial Sequence
  derived and/or modified CDS sequence (wt) from hemagglutinin__InfluenzaA__ACY77653
augaaggcaauacuaguaguucugcuauauacauuugcaaccgcaaaugcagacacauuauguauagguuaucaugcgaacaauucaacagacacuguagacacaguacuagaaaagaauguaacaguaacacacucuguuaacauucuagaagacaagcauaacgggaaacuaugcaaacuaagagggguagccccauugcauuuggguaaauguaacauugcuggcuggauccugggaaauccagagugugaaucacucuccacagcaagcucaugguccuacauuguggaaacaucuaguucagacaauggaacguguuacccaggagauuucaucgauuaugaggagcuaagagagcaauugagcucagugucaucauuugaaagguuugagauauuccccaagacaaguucauggcccaaucaugacucgaacaaagguguaacggcagcauguccucaugcuggagcaaaaagcuucuacaaaaauuuaauauggcuaguuaaaaaaggaaauucauacccaaagcucagcaaauccuacauuaaugauaaagggaaagaaguccucgugcuauggggcauucaccauccaucuacuagugcugaccaacaaagucucuaucagaaugcagaugcauauguuuuugugggaucaucaagauacagcaagaaguucaagccggaaauagcaauaagacccaaagugagggaucaagaagggagaaugaacuauuacuggacacuaguagagccgggagacaaaauaacauucgaagcaacuggaaaucuagugguaccgagauaugcauucgcaauggaaagaaaugcuggaucugguauuaucauuucagauacaccaguccaugauugcaauacaacuugucagacacccaagggugcuauaaacaccagccucccauuucagaauauacauccgaucacaauuggaaaauguccaaaauauguaaaaagcacaaaauugagacuggccacaggauugaggaaugucccgucuauucaaucuagaggccuauuuggggccauugccgguuucauugaagggggguggacagggaugguagauggaugguacgguuaucaccaucaaaaugagcaggggucaggauaugcagccgaccugaagagcacacagaaugccauugacgagauuacuaacaaaguaaauucuguuauugaaaagaugaauacacaguucacagcaguagguaaagaguucaaccaccuggaaaaaagaauagagaauuuaaauaaaaaaguugaugaugguuuccuggacauuuggacuuacaaugccgaacuguugguucuauuggaaaaugaaagaacuuuggacuaccacgauucaaaugugaagaacuuauaugaaaagguaagaagccagcuaaaaaacaaugccaaggaaguuggaaacggcugcuuugaauuuuaccacaaaugcgauaacacgugcauggaaagugucaaaaaugggacuuaugacuacccaaaauacucagaggaagcaaaauuaaacagagaagaaauagaugggguaaagcuggaaucaacaaggauuuaccagauuuuggcgaucuauucaacugucgccaguucauugguacugguagucucccugggggcaaucaguuucuggaugugcucuggucauagugggucucuacaguguagaauauguauuuaa

SEQ ID NO: 35560 - RNA, 1698 nt, Artificial Sequence
  derived and/or modified CDS sequence (wt) from hemagglutinin__InfluenzaA__ACY77663
augaaggcaauacuaguaguucugcuauauacauuugcaaccgcaaaugcagacacauuauguauagguuaucaugcgaacaauucaacagacacuguagacacaguacuagaaaagaauguaacaguaacacacucuguuaaccuucuagaagacaagcauaacgggaaacuaugcaaacuaagagggguagccccauugcauuuggguaaauguaacauugcuggcuggauccugggaaauccagagugugaaucacucuccacagcaagcucaugguccuacauuguggaaacaucuaguucagacaauggaacguguuacccaggagauuucaucgauuaugaggagcuaagagagcaauugagcucagugucaucauuugaaagguuugagauauuccccaagacaaguucauggcccaaucaugacucgaacaaagguguaacggcagcauguccucaugcuggagcaaaaagcuucuacaaaaauuuaauauggcuaguuaaaaaaggaaauucauacccaaagcucagcaaauccuacauuaaugauaaagggaaagaaguccucgugcuauggggcauucaccauccaucuacuagugcugaccaacaaagucucuaucagaaugcagaugcauauguuuuuguggggacaucaagauacagcaagaaguucaagccggaaauagcaauaagacccaaagugagggaucaagaagggagaaugaacuauuacuggacacuaguagagccgggagacaaaauaacauucgaagcaacuggaaaucuagugguaccgagauaugcauucgcaauggaaagaaaugcuggaucugguauuaucauuucagauacaccaguccacgauugcaauacaacuugucagacacccaagggugcuauaaacaccagccucccauuucagaauauacauccgaucacaauuggaaaauguccaaaauauguaaaaagcacaaaauugagacuggccacaggauugaggaaugucccgucuauucaaucuagaggccuauuuggggccauugccgguuucauugaagggggguggacagggaugguagauggaugguacgguuaucaccaucaaaaugagcaggggucaggauaugcagccgaccugaagagcacacagaaugccauugacgagauuacuaacaaaguaaauucuguuauugaaaagaugaauacacaguucacagcaguagguaaagaguucaaccaccuggaaaaaagaauagagaauuuaaauaaaaaaguugaugaugguuuccuggacauuuggacuuacaaugccgaacuguugguucuauuggaaaaugaaagaacuuuggacuaccacgauucaaaugugaagaacuuauaugaaaagguaagaagccaguuaaaaaacaaugccaaggaaauuggaaacggcugcuuugaauuuuaccacaaaugcgauaacacgugcauggaaagugucaaaaaugggacuuaugacuacccaaaauacucagaggaagcaaaauuaaacagagaagaaauagaugggguaaagcuggaaucaacaaggauuuaccagauuuuggcgaucuauucaacugucgccaguucauugguacugguagucucccugggggcaaucaguuucuggaugugcucuuggucucuacuguguagaauauguauuuaa

SEQ ID NO: 35561 - RNA, 1698 nt, Artificial Sequence
  derived and/or modified CDS sequence (wt) from hemagglutinin__InfluenzaA__ACY77683
augaaggcaauacuaguaguucugcuauauacauuugcaaccgcaaaugcagacacauuauguauagguuaucaugcgaacaauucaacagacacuguagacacaguacuagaaaagaauguaacaguaacacacucuguuaacauucuagaagacaagcauaacgggaaacuaugcaaacuaagagggguagccccauugcauuuggguaaauguaacauugcuggcuggauccugggaaauccagagugugaaucacucuccacagcaagcucaugguccuacauuguggaaacaucuaguucagacaauggaacguguuacccaggagauuucaucgauuaugaggagcuaagagagcaauugagcucagugucaucauuugaaagguuugagauauuccccaagacaaguucauggcccaaucaugacucgaacaaagguguaacggcagcauguccucaugcuggagcaaaaagcuucuacaaaaauuuaauauggcuaguuaaaaaaggaaauucauacccaaagcucagcaaauccuacauuaaugauaaagggaaagaaguccucgugcuauggggcauucaccauccaucuacuagugcugaccaacaaagucucuaucagaaugcagaugcauauguuuuuguggggucaucaagauacagcaagaaguucaagccggaaauagcaauaagacccaaagugagggaucaagaagggagaaugaacuauuacuggacacuaguagagccgggagacaaaauaacauucgaagcaacuggaaaucuagugguaccgagauaugcauucgcaauggaaagaaaugcuggaucugguauuaucauuucagauacaccaguccaugauugcaauacaacuugucagacacccaagggugcuauaaacaccagccucccauuucagaauauacauccgaucacaauuggaaaauguccaaaauauguaaaaagcacaaaauugagacuggccacaggauugaggaaugucccgucuauucaaucuagaggccuauuuggggccauugccgguuucauugaagggggguggacagggaugguagauggaugguacgguuaucaccaucaaaaugagcaggggucaggauaugcagccgaccugaagagcacacagaaugccauugacgagauuacuaacaaaguaaauucuguuauugaaaagaugaauacacaguucacagcaguagguaaagaguucaaccaccuggaaaaaagaauagagaauuuaaauaaaaaaguugaugaugguuuccuggacauuuggacuuacaaugccgaacuguugguucuauuggaaaaugaaagaacuuuggacuaccacgauucaaaugugaagaacuuauaugaaaagguaagaagccagcuaaaaaacaaugccaaggaaguuggaaacggcugcuuugaauuuuaccacaaaugcgauaacacgugcauggaaagugucaaaaaugggacuuaugacuacccaaaauacucagaggaagcaaaauuaaacagagaagaaauagaugggguaaagcuggaaucaacaaggauuuaccagauuuuggcgaucuauucaacugucgccaguucauugguacugguagucucccugggggcaaucaguuucuggaugugcucuuggucucuacaguguagaauauguauuuaa

SEQ ID NO: 35562 - RNA, 1698 nt, Artificial Sequence
  derived and/or modified CDS sequence (wt) from hemagglutinin__InfluenzaA__ACY77693
augaaggcaauacuaguaguucugcuauauacauuugcaaccgcaaaugcagacacauuauguauagguuaucaugcgaacaauucaacagacacuguagacacaguacuagaaaagaauguaacaguaacacacucuguuaacauucuagaagacaagcauaacgggaaacuaugcaaacuaagagggguagccccauugcauuuggguaaauguaacauugcuggcuggauccugggaaauccagagugugaaucacucuccacagcaagcucaugguccuacauuguggaaacaucuaguucagacaauggaacguguuacccaggagauuucaucgauuaugaggagcuaagagagcaauugagcucagugucaucauuugaaagguuugagauauuccccaagacaaguucauggcccaaucaugacucgaacaaagguguaacggcagcauguccucaugcuggagcaaaaagcuucuacaaaaauuuaauuuggcuaguuaaaaaaggaaauucauacccaaagcucagcaaauccuacauuaaugauaaagggaaagaaguccucgugcuauggggcauucaccauccaucuacuagugcugaccaacaaagucucuaucagaaugcagaugcauauguuuuuguggggucaucaagauacagcaagaaguucaagccggaaauaacaauaagacccaaagugagggaucaagaagggagaaugaacuauuacuggacacuaguagagccgggagacaaaauaacauucgaagcaacuggaaaucuagugguaccgagauaugcauucgcaauggaaagaaaugcuggaucugguauuaucauuucagauacaccaguccaugauugcaauacaacuugucagacacccaagggugcuauaaacaccagccucccauuucagaauauacauccgaucacaauuggaaaauguccaaaauauguaaaaagcacaaaauugagacuggccacaggauugaggaaugucccgucuauucaaucuagaggccuauuuggggccauugccgguuucauugaagggggguggacagggaugguagauggaugguacgguuaucaccaucaaaaugagcaggggucaggauaugcagccgaccugaagagcacacagaaugccauugacgagauuacuaacaaaguaaauucuguuauugaaaagaugaauacacaguucacaggccaguguaaagaguucaaccaccuggaaaaaagaauagagaauuuaaauaaaaagguugaugaugguuuccuggacauuuggacuuacaaugccgaacuguugguucuauuggaaaaugaaagaacuuuggacuaccacgauucaaaugugaagaacuuauaugaaaagguaagaagccagcuaaaaaacaaugccaaggaaguuggaaacggcugcuuugaauuuuaccacaaaugcgauaacacgugcauggaaagugucaaaaaugggacuuaugacuacccaaaauacucagaggaagcaaaauuaaacagagaagaaauagaugggguaaagcuggaaucaacaaggauuuaccagauuuuggcgaucuauucaacugucgccaguucauugguacugguagucucccugggggcaaucaguuucuggaugugcucuuggucucuacaguguagaauauguauuuaa

SEQ ID NO: 35563 - RNA, 1698 nt, Artificial Sequence
  derived and/or modified CDS sequence (wt) from hemagglutinin__InfluenzaA__ACY77703
augaaggcaauacuaguaguucugcuauauacauuugcaaccgcaaaugcagacacauuauguauagguuaucaugcgaacaauucaacagacacuguagacacaguacuagaaaagaauguaacaguaacacacucuguuaacauucuagaagacaagcauaacgggaaacuaugcaaacuaagagggguagccccauugcauuuggguaaauguaacauugcuggcuggauccugggaaauccagagugugaaucacucuccacagcaagcucaugguccuacauuguggaaacaucuaguucagacaauggaacguguuacccaggagauuucaucgauuaugaggagcuaagagagcaauugagcucagugucaucauuugaaagguuugagauauuccccaagacaaguucauggcccaaucaugacucgaacaaagguguaacggcagcauguccucaugcuggagcaaaaagcuucuacaaaaauuuaauuuggcuaguuaaaaaaggaaauucauacccaaagcucagcaaauccuacauuaaugauaaagggaaagaaguccucgugcuauggggcauucaccauccaucuacuagugcugaccaacaaagucucuaucagaaugcagaugcauauguuuuuguggggucaucaagauacagcaagaaguucaagccggaaauagcaauaagacccaaagugagggaucaagaagggagaaugaacuauuacuggacacuaguagagccgggagacaaaauaacauucgaagcaacuggaaaucuagugguaccgagauaugcauucgcaauggaaagaaaugcuggaucugguauuaucauuucagauacaccaguccaugauugcaauacaacuugucagacacccaagggugcuauaaacaccagccucccauuucagaauauacauccgaucacaauuggaaaauguccaaaauauguaaaaagcacaaaauugagacuggccacaggauugaggaaugucccgucuauucaaucuagaggccuauuuggggccauugccgguuucauugaagggggguggacagggaugguagauggaugguacgguuaucaccaucaaaaugagcaggggucaggauaugcagccgaccugaagagcacacagaaugccauugacgagauuacuaacaaaguaaauucuguuauugaaaagaugaauacacaguucacaggccaguguaaagaguucaaccaccuggaaaaaagaauagagaauuuaaauaaaaagguugaugaugguuuccuggacauuuggacuuacaaugccgaacuguugguucuauuggaaaaugaaagaacuuuggacuaccacgauucaaaugugaagaacuuauaugaaaagguaagaagccagcuaaaaaacaaugccaaggaaguuggaaacggcugcuuugaauuuuaccacaaaugcgauaacacgugcauggaaagugucaaaaaugggacuuaugacuacccaaaauacucagaggaagcaaaauuaaacagagaagaaauagaugggguaaagcuggaaucaacaaggauuuaccagauuuuggcgaucuauucaacugucgccaguucauugguacugguagucucccugggggcaaucaguuucuggaugugcucuuggucucuacaguguagaauauguauuuaa

SEQ ID NO: 35564 - RNA, 1698 nt, Artificial Sequence
  derived and/or modified CDS sequence (wt) from hemagglutinin__InfluenzaA__ACY77713
augaaggcaauacuaguaguucugcuauauacauuugcaaccgcaaaugcagacacauuauguauagguuaucaugcgaacaauucaacagacacuguagacacaguacuagaaaagaauguaacaguaacacacucuguuaacauucuagaagacaagcauaacgggaaacuaugcaaacuaagagggguagccccauugcauuuggguaaauguaacauugcuggcuggauccugggaaauccagagugugaaucacucuccacagcaagcucaugguccuacauuguggaaacaucuaguucagacaauggaacguguuacccaggagauuucaucgauuaugaggagcuaagagagcaauugagcucagugucaucauuugaaagguuugagauauuccccaagacaaguucauggcccaaucaugacucgaacaaagguguaacggcagcauguccucaugcuggagcaaaaagcuucuacaaaaauuuaauuuggcuaguuaaaaaaggaaauucauacccaaagcucagcaaauccuacauuaaugauaaagggaaagaaguccucgugcuauggggcauucaccauccaucuacuagugcugaccaacaaagucucuaucagaaugcagaugcauauguuuuuguggggucaucaagauacagcaagaaguucaagccggaaauagcaauaagacccaaagugagggaucaagaagggagaaugaacuauuacuggacacuaguagagccgggagacaaaauaacauucgaagcaacuggaaaucuagugguaccgagauaugcauucgcaauggaaagaaaugcuggaucugguauuaucauuucagauacaccaguccaugauugcaauacaacuugucagacacccaagggugcuauaaacaccagccucccauuucagaauauacauccgaucacaauuggaaaauguccaaaauauguaaaaagcacaaaauugagacuggccacaggauugaggaaugucccgucuauucaaucuagaggccuauuuggggccauugccgguuucauugaagggggguggacagggaugguagauggaugguacgguuaucaccaucaaaaugagcaggggucaggauaugcagccgaccugaagagcacacagaaugccauugacgagauuacuaacaaaguaaauucuguuauugaaaagaugaauacacaguucacaggccaguguaaagaguucaaccaccuggaaaaaagaauagagaauuuaaauaaaaagguugaugaugguuuccuggacauuuggacuuacaaugccgaacuguugguucuauuggaaaaugaaagaacuuuggacuaccacgauucaaaugugaagaacuuauaugaaaagguaagaagccagcuaaaaaacaaugccaaggaaguuggaaacggcugcuuugaauuuuaccacaaaugcgauaacacgugcauggaaagugucaaaaaugggacuuaugacuacccaaaauacucagaggaagcaaaauuaaacagagaagaaauagaugggguaaagcuggaaucaacaaggauuuaccagauuuuggcgaucuauucaacugucgccaguucauugguacugguagucucccugggggcaaucaguuucuggaugugcucuggucaucuacaguguagaauauguauuuaa

SEQ ID NO: 35565 - RNA, 1701 nt, Artificial Sequence; identical to SEQ ID NO: 34994
  derived and/or modified CDS sequence (wt) from hemagglutinin__InfluenzaA__ACY77723

SEQ ID NO: 35566 - RNA, 1695 nt, Artificial Sequence
  derived and/or modified CDS sequence (wt) from hemagglutinin__InfluenzaA__ACY77733
augaaggcaauacuaguaguucugcuauauacauuugcaaccgcaaaugcagacacauuauguauagguuaucaugcgaacaauucaacagacacuguagacacaguacuagaaaagaauguaacaguaacacacucuguuaacauucuagaagacaagcauaacgggaaacuaugcaaacuaagagggguagccccauugcauuuggguaaauguaacauugcuggcuggauccugggaaauccagagugugaaucacucuccacagcaagcucaugguccuacauuguggaaacaucuaguucagacaauggaacguguuacccaggagauuucaucgauuaugaggagcuaagagagcaauugagcucagugucaucauuugaaagguuugagauauuccccaagacaaguucauggcccaaucaugacucgaacaaagguguaacggcagcauguccucaugcuggagcaaaaagcuucuacaaaaauuuaauauggcuaguuaaaacaggaaauucauacccaaagcucagcaaauccuacauuaaugauaaagggaaagaaguccucgugcuauggggcauucaccauccaucuacuagugcugaccaacaaagucucuaucagaaugcagaugcauauguuuuugugggaucaucaagauacagcaagaaguucaagccggaaauagcaauaagacccaaagugagggaucaagaagggagaaugaacuauuacuggacacuaguagagccgggagacaaaauaacauucgaagcaacuggaaaucuagugguaccgagauaugcauucgcaauggaaagaaaugcuggaucugguauuaucauuucagauacaccaguccaugauugcaauacaacuugucagacacccaagggugcuauaaacaccagccucccauuucagaauauacauccgaucacaauuggaaaauguccaaaauauguaaaaagcacaaaauugagacuggccacaggauugaggaaugucccgucuauucaaucuagaggccuauuuggggccauugccgguuucauugaagggggguggacagggaugguagauggaugguacgguuaucaccaucaaaaugagcaggggucaggauaugcagccgaccugaagagcacacagaaugccauugacgagauuacuaacaaaguaaauucuguuauugaaaagaugaauacacaguucacagcaguagguaaagaguucaaccaccuggaaaaaagaauagagaauuuaaauaaaaaaguugaugaugguuuccuggacauuuggacuuacaaugccgaacuguugguucuauuggaaaaugaaagaacuuuggacuaccacgauucaaaugugaagaacuuauaugaaaagguaagaagccagcuaaaaaacaaugccaaggaaauuggaaacggcugcuuugaauuuuaccacaaaugcgauaacacgugcauggaaagugucaaaaaugggacuuaugacuacccaaaauacucagaggaagcaaaauuaaacagagaagaaauagaugggguaaagcuggaaucaacaaggauuuaccagauuuuggcgaucuauucaacugucgccaguucauugguacugguagucucccugggggcaaucaguuucuggaugugcucuggucuacaguguagaauauguauuuaa

SEQ ID NO: 35567 - RNA, 1698 nt, Artificial Sequence
  derived and/or modified CDS sequence (wt) from hemagglutinin__InfluenzaA__ACY77743
augaaggcuauacuaguaguucugcuauauacauuugcaaccgcaaaugcagacacauuauguauagguuaucaugcgaacaauucaacagacacuguagacacaguacuagaaaagaauguaacaguaacacauucuguuaaccuucuagaagacaagcauaacgggaaacuaugcaaacuaagagggguagccccauugcauuuggguaaauguaacauugcuggcuggauccugggaaauccagagugugaaucacucuccacagcaagcucaugguccuacauuguggaaacaucuaguucagacaauggaacguguuacccaggagauuucaucgauuaugaggagcuaagagagcaauugagcucagugucaucauuugaaagguuugagauauuccccaagacaagcucauggcccaaucaugacucgaacaaagguguaacggcagcauguccucaugcuggagcaaaaagcuucuacaaaaauuuaauauggcuaguuaaaaaaggaaauucauacccaaagcucagcaaauccuacauuaaugauaaagggaaagaaguccucgugcuauggggcauucaccauccaucuacuagugcugaccaacaaagucucuaucagaaugcagaugcauauguuuuuguagggucaucaagauacagcaagaaguucaagccggaaauagcaauaagacccaaagugagggaucaagaagggagaaugaacuauuacuggacacuaguagagccgggagacaaaauaacauucgaagcaacuggaaaucuagugguaccgagauaugcauucgcaauggaaagaaaugcuggaucugguauuaucauuucagauacaccaguccacgauugcaauacaacuugucagacacccaagggugcuauaaacaccagccucccauuucagaauauacauccgaucacaauuggaaaauguccaaaauauguaaaaagcacaaaauugagacuggccacaggauugaggaaugucccgucuauucaaucuagaggccuauuuggggccauugccgguuucauugaagggggguggacagggaugguagauggaugguacgguuaucaccaucaaaaugagcaggggucaggauaugcagccgaccugaagagcacacagaaugccauugacgagauuacuaacaaaguaaauucuguuauugaaaagaugaauacacaguucacagcaguagguaaagaguucaaccaccuggaaaaaagaauagagaauuuaaauaaaaaaguugaugaugguuuccuggacauuuggacuuacaaugccgaacuguugguucuauuggaaaaugaaagaacuuuggacuaccacgauucaaaugugaagaacuuauaugaaaagguaagaagccagcuaaaaaacaaugccaaggaaguuggaaacggcugcuuugaauuuuaccacaaaugcgauaacacgugcauggaaagugucaaaaaugggacuuaugacuacccaaaauacucagaggaagcaaaauuaaacagagaagaaauagaugggguaaagcuggaaucaacaaggauuuaccagauuuuggcgaucuauucaacugucgccaguucauugguacugguagucucccugggggcaaucaguuucuggaugugcucuuggucucuacaguguagaauauguauuuaa

SEQ ID NO: 35568 - RNA, 1701 nt, Artificial Sequence; identical to SEQ ID NO: 34681
  derived and/or modified CDS sequence (wt) from hemagglutinin__InfluenzaA__ACY77753

SEQ ID NO: 35569 - RNA, 1695 nt, Artificial Sequence
  derived and/or modified CDS sequence (wt) from hemagglutinin__InfluenzaA__ACY77783
augaaggcaauacuaguaguucugcuauauacauuugcaaccgcaaaugcagacacauuauguauagguuaucaugcgaacaauucaacagacacuguagacacaguacuagaaaagaauguaacaguaacacacucuguuaaccuucuaggagacaagcauaacgggaaacuaugcaaacuaagagggguagccccauugcauuuggguaaauguaacauugcuggcuggauccugggaaauccagagugugaaucacucuccacagcaagcucaugguccuacauuguggaaacaucuaguucagacaauggaacguguuacccaggagauuucaucgauuaugaggagcuaagagagcaauugagcucagugucaucauuugaaagguuugagauauuccccaagacaaguucauggcccaaucaugacucggacaaagguguaacggcagcauguccucaugcuggagcaaaaagcuucuacaaaaauuuaauauggcuaguuaaaaaaggaaauucauacccaaagcucagcaaauccuacauuaaugauaaagggaaagaaguccucgugcuauggggcauucaccauccaucuacuagugcugaccaacaaagucucuaucagaaugcagauacauauguuuuuguggggacaucaagauacagcaagaaguucaagccggaaauagcaauaagacccaaagugagggaucaagaagggagaaugaacuauuacuggacacuaguagagccgggagacaaaauaacauucgaagcaacuggaaaucuagugguaccgagauaugcauucgcaauggaaagaaaugcuggaucugguauuaucauuucagauacaccaguccacgauugcaauacaacuugucagacacccaagggugcuauaaacaccagccucccauuucagaauauacauccgaucacaauuggaaaauguccaaaauauguaaaaagcacaaaauugagacuggccacaggauugaggaaugucccuucuauucaaucuagaggccuauuuggggccauugccgguuucauugaagggggguggacagggaugguagauggaugguacgguuaucaccaucaaaaugagcaggggucaggauaugcagccgaccugaagagcacacagaaugccauugacgagauuacuaacaaaguaaauucuguuauugaaaagaugaauacacaguucacagcaguagguaaagaguucaaccaccuggaaaaaagaauagagaauuuaaauaaaaaaguugaugaugguuuccuggacauuuggacuuacaaugccgaacuguugguucuauuggaaaaugaaagaacuuuggacuaccacgauucaaaugugaagagcuuauaugaaaagguaagaagccaguuaaaaaacaaugccaaggaaauuggaaacggcugcuuugaauuuuaccacaaaugcgauaacacgugcauggaaagugucaaaaaugggacuuaugacuacccaaaauacucagaggaagcaaaauuaaacagagaagaaauagaugggguaaagcuggaaucaacaaggauuuaccagauuuuggcgaucuauucaacugucgccaguucauugguacugguagucucccugggggcaaucaguuucuggaugugcucuggucauagcuguagaauauguauuuaa

SEQ ID NO: 35570 - RNA, 1698 nt, Artificial Sequence
  derived and/or modified CDS sequence (wt) from hemagglutinin__InfluenzaA__ACY77813
augaaggcaauacuaguaguucugcuauauacauuugcaaccgcaaaugcagacacauuauguauagguuaucaugcgaacaauucaacagacacuguagacacaguacuagaaaagaauguaacaguaacacacucuguuaaccuucuagaagacaagcauaacgggaaacuaugcaaacuaagagggguagccccauugcauuuggguaaauguaacauugcuggcuggauccugggaaauccagagugugaaucacucuccacagcaagcucaugguccuacauuguggaaacaucuaguucagacaauggaacguguuacccaggagauuucaucgauuaugaggagcuaagagagcaauugagcucagugucaucauuugaaagguuugagauauuccccaagacaaguucauggcccaaucaugacucgaacaaagguguaacggcagcauguccucaugcuggagcaaaaagcuucuacaaaaauuuaauauggcuaguuaaaaaaggaaauucauacccaaagcucagcaaauccuacauuaaugauaaagggaaagaaguccucgugcuauggggcauucaccauccaucuacuagugcugaccaacaaagucucuaucagaaugcagaugcauauguuuuuguggggacaucaagauacagcaagaaguucaagccggaaauagcaauaagacccaaagugagggaucaagaagggagaaugaacuauuacuggacacuaguagagccgggagacaaaauaacauucgaagcaacuggaaaucuagugguaccgagauaugcauucgcaauggaaagaaaugcuggaucugguauuaucauuucagauacaccaguccacgauugcaauacaacuugucagacacccaagggugcuauaaacaccagccucccauuucagaauauacauccgaucacaauuggaaaauguccaaaauauguaaaaagcacaaaauugagacuggccacaggauugaggaaugucccgucuauucaaucuagaggccuauuuggggccauugccgguuucauugaagggggguggacagggaugguagauggaugguacgguuaucaccaucaaaaugagcaggggucaggauaugcagccgaccugaagagcacacagaaugccauugacgagauuacuaacaaaguaaauucuguuauugaaaagaugaauacacaguucacaggccaguguaaagaguucaaccaccuggaaaaaagaauagagaauuuaaauaaaaaaguugaugaugguuuccuggacauuuggacuuacaaugccgaacuguugguucuauuggaaaaugaaagaacuuuggacuaccacgauucaaaugugaagaacuuauaugaaaagguaagaagccaguuaaaaaacaaugccaaggaaauuggaaacggcugcuuugaauuuuaccacaaaugcgauaacacgugcauggaaagugucaaaaaugggacuuaugacuacccaaaauacucagaggaagcaaaauuaaacagagaagaaauagaugggguaaagcuggaaucaacaaggauuuaccagauuuuggcgaucuauucaacugucgccaguucauugguacugguagucucccugggggcaaucaguuucuggaugugcucuggucaucuacaguguagaauauguauuuaa

SEQ ID NO: 35571 - RNA, 1698 nt, Artificial Sequence
  derived and/or modified CDS sequence (wt) from hemagglutinin__InfluenzaA__ACY77823
augaaggcaauacuaguaguucugcuauauacauuugcaaccgcaaaugcagacacauuauguauagguuaucaugcgaacaauucaacagacacuguagacacaguacuagaaaagaauguaacaguaacacacucuguuaaccuucuagaagacaagcauaacgggaaacuaugcaaacuaagagggguagccccauugcauuuggguaaauguaacauugcuggcuggauccugggaaauccagagugugaaucacucuccacagcaagcucaugguccuacauuguggaaacaucuaguucagacaauggaacguguuacccaggagauuucaucgauuaugaggagcuaagagagcaauugagcucagugucaucauuugaaagguuugagauauuccccaagacaaguucauggcccaaucaugacucgaacaaagguguaacggcagcauguccucaugcuggagcaaaaagcuucuacaaaaauuuaauauggcuaguuaaaaaaggaaauucauacccaaagcucagcaaauccuacauuaaugauaaagggaaagaaguccucgugcuauggggcauucaccauccaucuacuagugcugaccaacaaagucucuaucagaaugcagaugcauauguuuuuguggggacaucaagauacagcaagaaguucaagccggaaauagcaauaagacccaaagugagggaucaagaagggagaaugaacuauuacuggacacuaguagagccgggagacaaaauaacauucgaagcaacuggaaaucuagugguaccgagauaugcauucgcaauggaaagaaaugcuggaucugguauuaucauuucagauacaccaguccacgauugcaauacaacuugucagacacccaagggugcuauaaacaccagccucccauuucagaauauacauccgaucacaauuggaaaauguccaaaauauguaaaaagcacaaaauugagacuggccacaggauugaggaaugucccgucuauucaaucuagaggccuauuuggggccauugccgguuucauugaagggggguggacagggaugguagauggaugguacgguuaucaccaucaaaaugagcaggggucaggauaugcagccgaccugaagagcacacagaaugccauugacgagauuacuaacaaaguaaauucuguuauugaaaagaugaauacacaguucacaggccaguguaaagaguucaaccaccuggaaaaaagaauagagaauuuaaauaaaaaaguugaugaugguuuccuggacauuuggacuuacaaugccgaacuguugguucuauuggaaaaugaaagaacuuuggacuaccacgauucaaaugugaagaacuuauaugaaaagguaagaagccaguuaaaaaacaaugccaaggaaauuggaaacggcugcuuugaauuuuaccacaaaugcgauaacacgugcauggaaagugucaaaaaugggacuuaugacuacccaaaauacucagaggaagcaaaauuaaacagagaagaaauagaugggguaaagcuggaaucaacaaggauuuaccagauuuuggcgaucuauucaacugucgccaguucauugguacugguagucucccugggggcaaucaguuucuggaugugcucuuggucucuacaguguagaauauguauuuaa

SEQ ID NO: 35572 - RNA, 1698 nt, Artificial Sequence
  derived and/or modified CDS sequence (wt) from hemagglutinin__InfluenzaA__ACY77833
augaaggcaauacuaguaguucugcuauauacauuugcaaccgcaaaugcagacacauuauguauagguuaucaugcgaacaauucaacagacacuguagacacaguacuagaaaagaauguaacaguaacacacucuguuaaccuucuagaagacaagcauaacgggaaacuaugcaaacuaagagggguagccccauugcauuuggguaaauguaacauugcuggcuggauccugggaaauccagagugugaaucacucuccacagcaagcucaugguccuacauuguggaaacaucuaguucagacaauggaacguguuacccaggagauuucaucgauuaugaggagcuaagagagcaauugagcucagugucaucauuugaaagguuugagauauuccccaagacaaguucauggcccaaucaugacucgaacaaagguguaacggcagcauguccucaugcuggagcaaaaagcuucuacaaaaauuuaauauggcuaguuaaaaaaggaaauucauacccaaagcucagcaaauccuacauuaaugauaaagggaaagaaguccucgugcuauggggcauucaccauccaucuacuagugcugaccaacaaagucucuaucagaaugcagaugcauauguuuuuguggggacaucaagauacagcaagaaguucaagccggaaauagcaauaagacccaaagugagggaucaagaagggagaaugaacuauuacuggacacuaguagagccgggagacaaaauaacauucgaagcaacuggaaaucuagugguaccgagauaugcauucgcaauggaaagaaaugcuggaucugguauuaucauuucagauacaccaguccacgauugcaauacaacuugucagacacccaagggugcuauaaacaccagccucccauuucagaauauacauccgaucacaauuggaaaauguccaaaauauguaaaaagcacaaaauugagacuggccacaggauugaggaaugucccgucuauucaaucuagaggccuauuuggggccauugccgguuucauugaagggggguggacagggaugguagauggaugguacgguuaucaccaucaaaaugagcaggggucaggauaugcagccgaccugaagagcacacagaaugccauugacgagauuacuaacaaaguaaauucuguuauugaaaagaugaauacacaguucacagcaguagguaaagaguucaaccaccuggaaaaaagaauagagaauuuaaauaaaaaaguugaugaugguuuccuggacauuuggacuuacaaugccgaacuguugguucuauuggaaaaugaaagaacuuuggacuaccacgauucaaaugugaagaacuuauaugaaaagguaagaagccaguuaaaaaacaaugccaaggaaauuggaaacggcugcuuugaauuuuaccacaaaugcgauaacacgugcauggaaagugucaaaaaugggacuuaugacuacccaaaauacucagaggaagcaaaauuaaacagagaagaaauagaugggguaaagcuggaaucaacaaggauuuaccagauuuuggcgaucuauucaacugucgccaguucauugguacugguagucucccugggggcaaucaguuucuggaugugcucuuggucucuacaguguagaauauguauuuaa

SEQ ID NO: 35573 - RNA, 1698 nt, Artificial Sequence
  derived and/or modified CDS sequence (wt) from hemagglutinin__InfluenzaA__ACY77843
augaaggcaauacuaguaguuaugcuauauacauuugcaaccgcaaaugcagacacauuauguauagguuaucaugcgaacaauucaacagacacuguagacacaguacuagaaaagaauguaacaguaacacacucuguuaaccuucuagaagacaagcauaacgggaaacuaugcaaacuaagagggguagccccauugcauuuggguaaauguaacauugcuggcuggauccugggaaauccagagugugaaucacucuccacagcaagcucaugguccuacauuguggaaacaucuaguucagacaauggaacguguuacccaggagauuucaucgauuaugaggagcuaagagagcaauugagcucagugucaucauuugaaagguuugagauauuccccaagacaaguucauggcccaaucaugacucgaacaaagguguaacggcagcauguccucaugcuggagcaaaaagcuucuacaaaaauuuaauauggcuaguuaaaaaaggaaauucauacccaaagcucagcaaauccuacauuaaugauaaagggaaagaaguccucgugcuauggggcauucaccauccaucuacuagugcugaccaacaaagucucuaucagaaugcagaugcauauguuuuuguggggucaucaagauacagcaagaaguucaagccggaaauagcaauaagacccaaagugagggaucaagaagggagaaugaacuauuacuggacacuaguagagccgggagacaaaauaacauucgaagcaacuggaaaucuagugguaccgagauaugcauucgcaauggaaagaaaugcuggaucugguauuaucauuucagauacaacaguccacgauugcaauacaacuugucagacacccaagggugcuauaaacaccagccucccauuucagaauauacauccgaucacaauuggaaaauguccaaaauauguaaaaagcacaaaauugagacuggccacaggauugaggaaugucccgucuauucaaucuagaggccuauuuggggccauugccgguuucauugaagggggguggacagggaugguagauggaugguacgguuaucaccaucaaaaugagcaggggucaggauaugcagccgaccugaagagcacacagaaugccauugacgagauuacuaacaaaguaaauucuguuauugaaaagaugaauacacaguucacagcaguagguaaagaguucaaccaccuggaaaaaagaauagagaauuuaaauaaaaaaguugaugaugguuuccuggacauuuggacuuacaaugccgaacuguugguucuauuggaaaaugaaagaacuuuggacuaccacgauucaaaugugaagaacuuauaugaaaagguaagaagccagcuaaaaaacaaugccaaggaaauuggaaacggcugcuuugaauuuuaccacaaaugcgauaacacgugcauggaaagugucaaaaaugggacuuaugacuacccaaaauacucagaggaagcaaaauuaaacagagaagaaauagaugggguaaagcuggaaucaacaaggauuuaccagauuuuggcgaucuauucaacugucgccaguucauugguacugguagucucccugggggcaaucaguuucuggaugugcucuggucaucuacaguguagaauauguauuuaa

SEQ ID NO: 35574 - RNA, 1701 nt, Artificial Sequence
  derived and/or modified CDS sequence (wt) from hemagglutinin__InfluenzaA__ACY77863
augaaggcaauacuaguaguucugcuauauacauuugcaaccgcaaaugcagacacauuauguauagguuaucaugcgaacaauucaacagacacuguagacacaguacuagaaaagaauguaacaguaacacacucuguuaaccuucuagaagacaagcauaacgggaaacuaugcaaacuaagagggguagccccauugcauuuggguaaauguaacauugcuggcuggauccugggaaauccagagugugaaucacucuccacagcaagcucaugguccuacauuguggaaacaucuaguucagacaauggaacguguuacccaggagauuucaucgauuaugaggagcuaagagagcaauugagcucagugucaucauuugaaagguuugagauauuccccaagacaaguucauggcccaaucaugacucgaacaaagguguaacggcagcauguccucaugcuggagcaaaaagcuucuacaaaaauuuaauauggcuaguuaaaaaaggaaauucauacccaaagcucagcaaauccuacauuaaugauaaagggaaagaaguccucgugcuauggggcauucaccauccaucuacuagugcugaccaacaaagucucuaucagaaugcagaugcauauguuuuuguggggacaucaagauacagcaagaaguucaagccggaaauagcaauaagacccaaagugagggaucaagaagggagaaugaacuauuacuggacacuaguagagccgggagacaaaauaacauucgaagcaacuggaaaucuagugguaccgagauaugcauucgcaauggaaagaaaugcuggaucugguauuaucauuucagauacaccaguccacgauugcaauacaacuugucagacacccaagggugcuauaaacaccagccucccauuucagaauauacauccgaucacaauuggaaaauguccaaaauauguaaaaagcacaaaauugagacuggccacaggauugaggaaugucccgucuauucaaucuagaggccuauuuggggccauugccggcuucauugaagggggguggacagggaugguagauggaugguacgguuaucaccaucaaaaugagcaggggucaggauaugcagccgaccugaagagcacacagaaugccauugacgagauuacuaacaaaguaaauucuguuauugaaaagaugaauacacaguucacagcaguagguaaagaguucaaccaccuggaaaaaagaauagagaauuuaaauaaaaaaguugaugaugguuuccuggacauuuggacuuacaaugccgaacuguugguucuauuggaaaaugaaagaacuuuggacuaccacgauucaaaugugaagaacuuauaugaaaagguaagaagccaguuaaaaaacaaugccaaggaaauuggaaacggcugcuuugaauuuuaccacaaaugcgauaacacgugcauggaaagugucaaaaaugggacuuaugacuacccaaaauacucagaggaagcaaaauuaaacagagaagaaauagaugggguaaagcuggaaucaacaaggauuuaccagauuuuggcgaucuauucaacugucgccaguucauugguacugguagucucccugggggcaaucaguuucuggaugugcucuggaaugucucuacaguguagaauauguauuuaa

SEQ ID NO: 35575 - RNA, 1701 nt, Artificial Sequence; identical to SEQ ID NO: 34705
  derived and/or modified CDS sequence (wt) from hemagglutinin__InfluenzaA__ACY77874

SEQ ID NO: 35576 - RNA, 1701 nt, Artificial Sequence
  derived and/or modified CDS sequence (wt) from hemagglutinin__InfluenzaA__ACY77884
augaaggcaauacuaguaguucugcuauauacauuugcaaccgcaaaugcagacacauuauguauagguuaucaugcgaacaauucaacagacacuguagacacaguacuagaaaagaauguaacaguaacacacucuguuaaccuucuagaagacaagcauaacgggaaacuaugcaaacuaagagggguagccccauugcauuuggguaaauguaacauugcuggcuggauccugggaaauccagagugugaaucacucuccacagcaagcucaugguccuacauuguggaaacaucuaguucagacaauggaacguguuacccaggagauuucaucgauuaugaggagcuaagagagcaauugagcucagugucaucauuugaaagguuugagauauuccccaagacaaguucauggcccaaucaugacucgaacaaagguguaacggcagcauguccucaugcuggagcaaaaagcuucuacaaaaauuuaauauggcuaguuaaaaaaggaaauucauacccaaagcucagcaaauccuacauuaaugauaaagggaaagaaguccucgugcuguggggcauucaccauccaucuacuagugcugaccaacaaagucucuaucagaaugcagaugcauauguuuuuguggggucaucaagauacagcaagaaguucaagccggaaauagcaauaagacccaaagugagggaucaagaagggagaaugaacuauuacuggacacuaguagagccgggagacaaaauaacauucgaagcaacuggaaaucuagugguaccgagauaugcauucgcaauggaaagaaaugcuggaucugguauuaucauuucagauacaccaguccacgauugcaauacaacuugucagacacccaagggugcuauaaacaccagccucccauuucagaauauacauccgaucacaauuggaaaauguccaaaauauguaaaaagcacaaaauugagacuggccacaggauugaggaaugucccgucuauucaaucuagaggccuauuuggggccauugccgguuucauugaagggggguggacagggaugguagauggaugguacgguuaucaccaucaaaaugagcaggggucaggauaugcagccgaccugaagagcacacagaaugccauugacgagauuacuaacaaaguaaauucuguuauugaaaagaugaauacacaguucacagcaguagguaaagaguucaaccaccuggaaaaaagaauagagaauuuaaauaaaaaaguugaugaugguuuccuggacauuuggacuuacaaugccgaacuguugguucuauuggaaaaugaaagaacuuuggacuaccacgauucaaaugugaagaacuuauaugaaaagguaagaagccaguuaaaaaacaaugccaaggaaauuggaaacggcugcuuugaauuuuaccacaaaugcgauaacacgugcauggaaagugucaaaaaugggacuuaugacuacccaaaauacucagaggaagcaaaauuaaacagagaagaaauagaugggguaaagcuggaaucaacaaggauuuaccagauuuuggcgaucuauucaacugucgccaguucauugguacugguagucucccugggggcaaucaguuucuggaugugcucuaaugggucucuacaguguagaauauguauuuaa

SEQ ID NO: 35577 - RNA, 1701 nt, Artificial Sequence
  derived and/or modified CDS sequence (wt) from hemagglutinin__InfluenzaA__ACY77904
augaaggcaauacuaguaguucugcuauauacauuugcaaccgcaaaugcagacacauuauguauagguuaucaugcgaacaauucaacagacacuguagacacaguacuagaaaagaauguaacaguaacacacucuguuaaccuucuagaagacaagcauaacgggaaacuaugcaaacuaagagggguagccccauugcauuuggguaaauguaacauugcuggcuggauccugggaaauccagagugugaaucacucuccacagcaagcucaugguccuacauuguggaaacaucuaguucagacaauggaacguguuacccaggagauuucaucgauuaugaggagcuaagagagcaauugagcucagugucaucauuugaaagguuugagauauuccccaagacaaguucauggcccaaucaugacucgaacaaagguguaacggcagcauguccucaugcuggagcaaaaagcuucuacaaaaauuuaauauggcuaguuaaaaaaggaaauucauacccaaagcucagcaaauccuacauuaaugauaaagggaaagaaguccucgugcuauggggcauucaccauccaucuacuagugcugaccaacaaagucucuaucagaaugcagaugcauauguuuuuguggggucaucaaaauacagcaagaaguucaagccggaaauagcaauaagacccaaagugagggaucaagaagggagaaugaacuauuacuggacacuaguagagccgggagacaaaauaacauucgaagcaacuggaaaucuagugguaccgagauaugcauucgcaauggaaagaaaugcuggaucugguauuaucauuucagauacaccaguccacgauugcaauacaacuugucagacacccaagggugcuauaaacaccagccucccauuucagaauauacauccgaucacaauuggaaaauguccaaaacauguaaaaagcacaaaauugagacuggccacaggauugaggaaugucccgucuauucaaucuagaggccuauuuggggccauugccgguuucauugaagggggguggacagggaugguagauggaugguacgguuaucaccaucaaaaugagcaggggucaggauaugcagccgaccugaagagcacacagaaugccauugacgagauuacuaacaaaguaaauucuguuauugaaaagaugaauacacaguucacagcaguagguaaagaguucaaccaccuggaaaaaagaauagagaauuuaaauaaaaaaguugaugaugguuuccuggacauuuggacuuacaaugccgaacuguugguucuauuggaaaaugaaagaacuuuggacuaccacgauucaaaugugaagaacuuauaugaaaagguaagaagccaguuaaaaaacaaugccaaggaaauuggaaacggcugcuuugaauuuuaccacaaaugcgauaacacgugcauggaaagugucaaaaaugggacuuaugacuacccaaaauacucagaggaagcaaaauuaaacagagaagaaauagaugggguaaagcuggaaucaacaaggauuuaccagauuuuggcgaucuauucaacugucgccaguucauugguacugguagucucccugggggcaaucaguuucuggaugugcucuaaugggucucuacaguguagaauauguauuuaa

SEQ ID NO: 35578 - RNA, 1701 nt, Artificial Sequence; identical to SEQ ID NO: 34898
  derived and/or modified CDS sequence (wt) from hemagglutinin__InfluenzaA__ACY77914

SEQ ID NO: 35579 - RNA, 1701 nt, Artificial Sequence
  derived and/or modified CDS sequence (wt) from hemagglutinin__InfluenzaA__ACY77924
augaaggcaauacuaguaguucugcuauauacauuugcaaccgcaaaugcagacacauuauguauagguuaucaugcgaacaauucaacagacacuguagacacaguacuagaaaagaauguaacaguaacacacucuguuaaccuucuagaagacaagcaugacgggaaacuaugcaaacuaagagggguagccccauugcauuuggguaaauguaacauugcuggcuggauccugggaaauccagagugugaaucacucuccacagcaagcucaugguccuacauuguggaaacaucuaguucagacaauggaacguguuacccaggagauuucaucgauuaugaggagcuaagagagcaauugagcucagugucaucauuugaaagguuugagauauuccccaagacaaguucauggcccaaucaugacucgaacaaagguguaacggcagcauguccucaugcuggagcaaaaagcuucuacaaaaauuuaauauggcuaguuaaaaaaggaaauucauacccaaagcucagcaaauccuacauuaaugauaaagggaaagaaguccucgugcuauggggcauucaccauccaucuacuagugcugaccaacaaagucucuaucagaaugcagaugcauauguuuuuguggggacaucaagauacagcaagaaguucaagccggaaauagcaauaagacccaaagugagggaucaagaagggagaaugaacuauuacuggacacuaguagagccgggagacaaaauaacauucgaagcaacuggaaaucuagugguaccgagauaugcauucgcaauggaaagaaaugcuggaucugguauuaucauuucagauacaccaguccacgauugcaauacaacuugucagacacccaagggugcuauaaacaccagccucccauuucagaauauacauccgaucacaauuggaaaauguccaaaauauguaaaaagcacaaaauugagacuggccacaggauugaggaaugucccgucuauucaaucuagaggccuauuuggggccauugccgguuucauugaagggggguggacagggaugguagauggaugguacgguuaucaccaucaaaaugagcaggggucaggauaugcagccgaccugaagagcacacagaaugccauugacgagauuacuaacaaaguaaauucuguuauugaaaagaugaauacacaguucacagcaguagguaaagaguucaaccaccuggaaaaaagaauagagaauuuaaauaaaaaaguugaugaugguuuccuggacauuuggacuuacaaugccgaacuguugguucuauuggaaaaugaaagaacuuuggacuaccacgauucaaaugugaagaacuuauaugaaaagguaagaagccaguuaaaaaacaaugccaaggaaauuggaaacggcugcuuugaauuuuaccacaaaugcgauaacacgugcauggaaagugucaaaaaugggacuuaugacuacccaaaauacucagaggaagcaaaauuaaacagagaagaaauagaugggguaaagcuggaaucaacaaggauuuaccagauuuuggcgaucuauucaacugucgccaguucauugguacugguagucucccugggggcaaucaguuucuggaugugcucuaaugggucucuacaguguagaauauguauuuaa

SEQ ID NO: 35580 - RNA, 1701 nt, Artificial Sequence
  derived and/or modified CDS sequence (wt) from hemagglutinin__InfluenzaA__ACY77934
augaaggcaauacuaguaguucugcuauauacauuugcaaccgcaaaugcagacacauuauguauagguuaucaugcgaacaauucaacagacacuguagacacaguacuagaaaagaauguaacaguaacacacucuguuaaccuucuagaagacaagcauaacgggaaacuaugcaaacuaagagggguagccccauugcauuuggguaaauguaacauugcuggcuggauccuaggaaauccagagugugaaucacucuccacagcaagcucaugguccuacauuguggaaacaucuaguucagacaauggaacguguuacccaggagauuucaucgauuaugaggagcuaagagagcaauugagcucagugucaucauuugaaagguuugagauauuccccaagacaaguucauggcccaaucaugacucgaacaaagguguaacggcagcauguccucaugcuggagcaaaaagcuucuacaaaaauuuaauauggcuaguuaaaaaaggaaauucauacccaaagcucagcaaauccuacauuaaugauaaagggaaagaaguccucgugcuauggggcauucaccauccaucuacuagugcugaccaacaaagucucuaucagaaugcagaugcauauguuuuuguggggacaucaagauacagcaagaaguucaagccggaaauagcaauaagacccaaagugaggaaucaagaagggagaaugaacuauuacuggacacuaguagagccgggagacaaaauaacauucgaagcaacuggaaaucuagugguaccgagauaugcauucgcaauggaaagaaaugcuggaucugguauuaucauuucagauacaccaguccacgauugcaauacaacuugucagacacccaagggugcuauaaacaccagccucccauuucagaauauacauccgaucacaauuggaaaauguccaaaauauguaaaaagcacaaaauugagacuggccacaggauugaggaaugucccgucuauucaaucuagaggccuauuuggggccauugccgguuucauugaagggggguggacagggaugguagauggaugguacgguuaucaccaucaaaaugagcaggggucaggauaugcagccgaccugaagagcacacagaaugccauugacgagauuacuaacaaaguaaauucuguuauugaaaagaugaauacacaguucacagcaguagguaaagaguucaaccaccuggaaaaaagaauagagaauuuaaauaaaaaaguugaugaugguuuccuggacauuuggacuuacaaugccgaacuguugguucuauuggaaaaugaaagaacuuuggacuaccacgauucaaaugugaagaacuuauaugaaaagguaagaagccaguuaaaaaacaaugccaaggaaauuggaaacggcugcuuugaauuuuaccacaaaugcgauaacacgugcauggaaagugucaaaaaugggacuuaugacuacccaaaauacucagaggaagcaaaauuaaacagagaagaaauagaugggguaaagcuggaaucaacaaggauuuaccagauuuuggcgaucuauucaacugucgccaguucauugguacugguagucucccugggggcaaucaguuucuggaugugcucuaaugggucucuacaguguagaauauguauuuaa

SEQ ID NO: 35581 - RNA, 1701 nt, Artificial Sequence
  derived and/or modified CDS sequence (wt) from hemagglutinin__InfluenzaA__ACY77944
augaaggcaauacuaguaguucugcuauauacauuugcaaccgcaaaugcagacacauuauguauagguuaucaugcgaacaauucaacagacacuguagacacaguacuagaaaagaauguaacaguaacacacucuguuaaccuucuagaagacaagcauaacgggaaacuaugcaaacuaagagggguagccccauugcauuuggguaaauguaacauugcuggcuggauccugggaaauccagagugugaaucacucuccacagcaagcucaugguccuacauuguggaaacaucuaguucagacaauggaacguguuacccaggagauuucaucgauuaugaggagcuaagagagcaauugagcucagugucaucauuugaaagguuugagauauuccccaagacaaguucauggcccaaucaugacucgaacaaagguguaacggcagcauguccucaugcuggagcaaaaagcuucuacaaaaauuuaauauggcuaguuaaaaaaggaaauucauacccaaagcucagcaaauccuacauuaaugauaaagggaaagaaguccucgugcuauggggcauucaccauccaucuacuagugcugaccaacaaagucucuaucagaaugcagaugcauauguuuuuguggggucaucaagauacagcaagaaguucaagccggaaauagcaauaagacccaaagugagggaucaagaagggagaaugaacuauuacuggacacuaguagagccgggagacaaaauaacauucgaagcaacuggaaaucuagugguaccgagauaugcauucgcaauggaaagaaaugcugaaucugguauuaucauuucagauacaccaguccacgauugcaauacaacuugucagacacccaagggugcuauaaacaccagccucccauuucagaauauacauccgaucacaauuggaaaauguccaaaauauguaaaaagcacaaaauugagacuggccacaggauugaggaaugucccgucuauucaaucuagaggccuauuuggggccauugccgguuucauugaagggggguggacagggaugguagauggaugguacgguuaucaccaucaaaaugagcaggggucaggauaugcagccgaccugaagagcacacagaaugccauugacgagauuacuaacaaaguaaauucuguuauugaaaagaugaauacacaguucacagcaguaggcaaagaguucaaccaccuggaaaaaagaauagagaauuuaaauaaaaaaguugaugaugguuuccuggacauuuggacuuacaaugccgaacuguugguucuauuggaaaaugaaagaacuuuggacuaccacgauucaaaugugaagaacuuauaugaaaagguaagaagccaguuaaaaaacaaugccaaggaaauuggaaacggcugcuuugaauuuuaccacaaaugcgauaacacgugcauggaaagugucaaaaaugggacuuaugacuacccaaaauacucagaggaagcaaaauuaaacagagaagaaauagaugggguaaagcuggaaucaacaaggauuuaccagauuuuggcgaucuauucaacugucgccaguucauugguacugguagucucccugggggcaaucaguuucuggaugugcucuaaugggucucuacaguguagaauauguauuuaa

SEQ ID NO: 35582 - RNA, 1701 nt, Artificial Sequence; identical to SEQ ID NO: 34705
  derived and/or modified CDS sequence (wt) from hemagglutinin__InfluenzaA__ACY77954

SEQ ID NO: 35583 - RNA, 1701 nt, Artificial Sequence
  derived and/or modified CDS sequence (wt) from hemagglutinin__InfluenzaA__ACY77964
augaaggcaauacuaguaguucugcuauauacauuugcaaccgcaaaugcagacacauuauguauagguuaucaugcgaacaauucaacagacacuguagacacaguacuagaaaaaaauguaacaguaacacacucuguuaaccuucuagaagacaagcauaacgggaaacuaugcaaacuaagagggguagccccauugcauuuggguaaauguaacauugcuggcuggauccugggaaauccagagugugaaucacucuccacagcaagcucaugguccuacauuguggaaacaucuaguucagacaauggaacguguuacccaggagauuucaucgauuaugaggagcuaagagagcaauugagcucagugucaucauuugaaagguuugagauauuccccaagacaaguucauggcccaaucaugacucgaacaaagguguaacggcagcauguccucaugcuggagcaaaaagcuucuacaaaaauuuaauauggcuaguuaaaaaaggaaauucauacccaaagcucagcaaauccuacauuaaugauaaagggaaagaaguccucgugcuauggggcauucaccauccaucuacuagugcugaccaacaaagucucuaucagaaugcagaugcauauguuuuuguggggucaucaagauacagcaagaaguucaagccggaaauagcaauaagacccaaagugagggaucaagaagggagaaugaacuauuacuggacacuaguagagccgggagacaaaauaacauucgaagcaacuggaaaucuagugguaccgagauaugcauucgcaauggaaagaaaugcuggaucugguauuaucauuucagauacaccaguccacgauugcaauacaacuugucagacacccaagggugcuauaaacaccagccucccauuucagaauauacauccgaucacaauuggaaaauguccaaaauauguaaaaagcacaaaauugagacuggccacaggauugaggaaugucccgucuauucaaucuagaggccuauuuggggccauugccgguuucauugaagggggguggacagggaugguagauggaugguacgguuaucaccaucaaaaugagcaggggucaggauaugcagccgaccugaagagcacacagaaugccauugacgagauuacuaacaaaguaaauucuguuauugaaaagaugaauacacaguucacagcaguagguaaagaguucaaccaccuggaaaaaagaauagagaauuuaaauaaaaaaguugaugaugguuuccuggacauuuggacuuacaaugccgaacuguugguucuauuggaaaaugaaagaacuuuggacuaccacgauucaaaugugaagaacuuauaugaaaagguaagaagccaguuaaaaaacaaugccaaggaaauuggaaacggcugcuuugaauuuuaccacaaaugcgauaacacgugcauggaaagugucaaaaaugggacuuaugacuacccaaaauacucagaggaagcaaaauuaaacagagaagaaauagaugggguaaagcuggaaucaacaaggauuuaccagauuuuggcgaucuauucaacugucgccaguucauugguacugguagucucccugggggcaaucaguuucuggaugugcucuaaugggucucuacaguguagaauauguauuuaa

SEQ ID NO: 35584 - RNA, 1701 nt, Artificial Sequence; identical to SEQ ID NO: 34676
  derived and/or modified CDS sequence (wt) from hemagglutinin__InfluenzaA__ACY77974

SEQ ID NO: 35585 - RNA, 1701 nt, Artificial Sequence
  derived and/or modified CDS sequence (wt) from hemagglutinin__InfluenzaA__ACY77984
augaaggcaauacuaguaguucugcuauauacauuugcaaccgcaaaugcagacacauuauguauagguuaucaugcgaacaauucaacagacacuguagacacaguacuagaaaagaauguaacaguaacacacucuguuaaccuucuagaagacaagcauaacgggaaacuaugcaaacuaagagggguagccccauugcauuuggguaaauguaacauugcuggcuggauccugggaaauccagagugugaaucacucuccacagcaagcucaugguccuacauuguggaaacaucuaguucagacaauggaacguguuacccaggagauuucaucgauuaugaggagcuaagagagcaauugagcucagugucaucauuugaaagguuugagauauuccccaagacaaguucauggcccaaucaugacucgaacaaagguguaacggcagcauguccucaugcuggagcaaaaagcuucuacaaaaauuuaauauggcuaguuaaaaaaggaaauucauacccaaagcucagcaaauccuacauuaaugauaaagggaaagaaguccucgugcuauggggcauucaccauccaucuacuagugcugaccaacaaagucucuaucagaaugcagaugcauauguuuuuguggggucaucaagauacagcaagaaguucaagccggaaauagcaauaagacccaaagugagggaucaagaagggagaaugaacuauuacuggacacuaguagagccgggagacaaaauaacauucgaagcaacuggaaaucuagugguaccgagauaugcauucgcaauggaaagaaaugcuggaucugguauuaucauuucagauacaccaguccacgauugcaauacaacuugucagacacccaagggugcuauaaacaccagccucccauuucagaauauacauccgaucacaauuggaaaauguccaaaauauguaaaaagcacaaaauugagacuggccacaggauugaggaaugucccgucuauucaaucuagaggccuauuuggggccauugccgguuucauugaagggggguggacagggaugguagauggaugguacgguuaucaccaucaaaaugagcaggggucaggauaugcagccgaccugaagagcacacagaaugccauugacgagauuaccaacaaaguaaauucuguuauugaaaagaugaauacacaguucacagcaguagguaaagaguucaaccaccuggaaaaaagaauagagaauuuaaauaaaaaaguugaugaugguuuccuggacauuuggacuuacaaugccgaacuguugguucuauuggaaaaugaaagaacuuuggacuaccacgauucaaaugugaagaacuuauaugaaaagguaagaagccaguuaaaaaacaaugccaaggaaauuggaaacggcugcuuugaauuuuaccacaaaugcgauaacacgugcauggaaagugucaaaaaugggacuuaugacuacccaaaauacucagaggaagcaaaauuaaacagagaagaaauagaugggguaaagcuggaaucaacaaggauuuaccagauuuuggcgaucuauucaacugucgccaguucauugguacugguagucucccugggggcaaucaguuucuggaugugcucuaaugggucucuacaguguagaauauguauuuaa

SEQ ID NO: 35586 - RNA, 1701 nt, Artificial Sequence; identical to SEQ ID NO: 34705
  derived and/or modified CDS sequence (wt) from hemagglutinin__InfluenzaA__ACY77994

SEQ ID NO: 35587 - RNA, 1701 nt, Artificial Sequence
  derived and/or modified CDS sequence (wt) from hemagglutinin__InfluenzaA__ACY79633
augaaggaaauacuaguaguucugcuauauacauuugcaaccgcaaaugcagacacauuauguauagguuaucaugcgaacaauucaacagacacuguagacacaguacuagaaaagaauguaacaguaacacacucuguuaaccuucuagaagacaagcauaacgggaaacuaugcaaacuaagagggguagccccauugcauuuggguaaauguaacauugcuggcuggauccugggaaauccagagugugaaucacucuccacagcaagcucaugguccuacauuguggaaacaucuaguucagacaauggaacguguuacccaggagauuucaucgauuaugaggagcuaagagagcaauugagcucagugucaucauuugaaagguuugagauauuccccaagacaaguucauggcccaaucaugacucgaacaaagguguaacggcagcauguccucaugcuggagcaaaaagcuucuacaaaaauuuaauauggcuaguuaaaaagggaaauucauacccaaagcucagcaaauccuacauuaaugauaaagggaaagaaguccucgugcuauggggcauucaccauccaucuacuagugcugaccaacaaagucucuaucagaaugcagaugcauauguuuuuguggggacaucaagauacagcaagaaguucaagccggaaauagcaauaagacccaaagugagggaucaagaagggagaaugaacuauuacuggacacuaguagagccgggagacaaaauaacauucgaagcaacuggaaaucuagugguaccgagauaugcuuucgcaauggaaagaaaugcucgaucugguauuaucauuucagauacaccaguccacgauugcaauacaacuugucagacacccaagggugcuauaaacaccagccucccauuucagaauauacauccgaucacaauuggaaaauguccaaaauauguaaaaagcacaaaauugagacuggccacaggauugaggaaugucccgucuauucaaucuagaggccuauuuggggccauugccgguuucauugaagggggguggacagggaugguagauggaugguacgguuaucaccaucaaaaugagcaggggucaggauaugcagccgaccugaagagcacacagaaugccauugacgagauuacuaacaaaguaaauucuguuauugaaaagaugaauacacaguucacagcaguagguaaagaguucaaccaccuggaaaaaagaauagagaauuuaaauaaaaaaguugaugaugguuuccuggacauuuggacuuacaaugccgaacuguugguucuauuggaaaaugaaagaacuuuggacuaccacgauucaaaugugaagaacuuauaugaaaagguaagaagccaguuaaaaaacaaugccaaggaaauuggaaacggcugcuuugaauuuuaccacaaaugcgauaacacgugcauggaaagugucaaaaaugggacuuaugacuacccaaaauacucagaggaagcaaaauuaaacagagaagaaauagaugggguaaagcuggaaucaacaaggauuuaccagauuuuggcgaucuauucaacugucgccaguucauugguacugguagucucccugggggcaaucaguuucuggaugugcucuaaugggucucuacaguguagaauauguauuuaa

SEQ ID NO: 35588 - RNA, 1701 nt, Artificial Sequence
  derived and/or modified CDS sequence (wt) from hemagglutinin__InfluenzaA__ACZ01953
augaaggcaauacuaguaguucugcuauauacauuugcaaccgcaaaugcagacacauuauguauagguuaucaugcgaacaauucaacagacacuguagacacaguacuagaaaagaauguaacaguaacacacucuguuaaccuucuagaagacaagcauaacgggaaacuaugcaaacuaagagggguagccccauugcauuuggguaaauguaacauugcuggcuggauccugggaaauccagagugugaaucacucuccacagcaagcucaugguccuacauuguggaaacaucuaguucagacaauggaacguguuacccaggagauuucaucgauuaugaggagcuaagagagcaauugagcucagugucaucauuugaaagguuugagauauuccccaagacaaguucauggcccaaucaugacccgaacaaagguguaacggcagcauguccucaugcuggagcaaaaagcuucuacaaaaauuuaauauggcuaguuaaaaaaggaaauucauacccaaagcucagcaaauccuacauuaaugauaaagggaaagaaguccucgugcuauggggcauucaccauccaucuacuagugcugaccaacaaagucucuaucagaaugcagaugcauauguuuuuguggggacaucaagauacagcaagaaguucaagccggaaauagcaauaagacccaaagugagggaucaagaagggagaaugaacuauuacuggacacuaguagagccgggagacaaaauaacauucgaagcaacuggaaaucuagugguaccgagauaugcauucgcaauggaaagaaaugcuggaucugguauuaucauuucagauacaccaguccacgauugcaauacaacuugucagacacccaagggugcuauaaacaccagccucccauuucagaauauacauccgaucacaauuggaaaauguccaaaauauguaaaaagcacaaaauugagacuggccacaggauugaggaaugucccgucuauucaaucuagaggccuauuuggggccauugccgguuucauugaagggggguggacagggaugguagauggaugguacgguuaucaccaucaaaaugagcaggggucaggauaugcagccgaccugaagagcacacagaaugccauugacgagauuacuaacaaaguaaauucuguuauugaaaagaugaauacacaguucacagcaguagguaaagaguucaaccaccuggaaaaaagaauagagaauuuaaauaaaaaaguugaugaugguuuccuggacauuuggacuuacaaugccgaacuguugguucuauuggaaaaugaaagaacuuuggacuaccacgauucaaaugugaagaacuuauaugaaaagguaagaagccaguuaaaaaacaaugccaaggaaauuggaaacggcugcuuugaauuuuaccacaaaugcgauaacacgugcauggaaagugucaaaaaugggacuuaugacuacccaaaauacucagaggaagcaaaauuaaacagagaagaaauagaugggguaaagcuggaaucaacaaggauuuaccaaauuuuggcgaucuauucaacugucgccaguucauugguacugguagucucccugggggcaaucaguuucuggaugugcucuaaugggucucuacaguguagaauauguauuuaa

SEQ ID NO: 35589 - RNA, 1701 nt, Artificial Sequence
  derived and/or modified CDS sequence (wt) from hemagglutinin__InfluenzaA__ACZ05050
augaaggcaauacuaguaguucugcuauauacauuugcaaccgcaaaugcagacacauuauguauagguuaucaugcgaacaauucaacagacacuguagacacaguacuagaaaagaauguaacaguaacacacucuguuaaccuucuagaagacaagcauaacgggaaacuaugcaaacuaagagggguagccccauugcauuuggguaaauguaacauugcuggcuggauccugggaaauccagagugugaaucacucuccacagcaagcucaugguccuacauuguggaaacaucuaguucagacaauggaacguguuacccaggagauuucaucgauuaugaggagcuaagagagcaauugagcucagugucaucauuugaaagguuugagauauuccccaagacaaguucauggcccaaucaugacucgaacaaagguguaacggcagcauguucucaugcuggagcaaaaagcuucuacaaaaauuuaauauggcuaguuaaaaaaggaaauucauacccaaagcucagcaaauccuacauuaaugauaaagggaaagaaguccucgugcuauggggcauucaccauccaucuacuagugcugaccaacaaagucucuaucagaaugcagaugcauauguuuuuguggggucaucaagauacagcaagaaguucaagccggaaauagcaauaagacccaaagugagggaucaagaagggagaaugaacuauuacuggacacuaguagagccgggagacaaaauaacauucgaagcaacuggaaaucuagugguaccgagauaugcauucgcaauggaaagaaaugcuggaucugguauuaucauuucagauacaccaguccacgauugcaauacaacuugucagacacccaagggugcuauaaacaccagccucccauuucagaauauacauccgaucacaauuggaaaauguccaaaauauguaaaaagcacaaaauugagacuggccacaggauugaggaaugucccgucuauucaaucuagaggccuauuuggggccauugccgguuucauugaagggggguggacagggaugguagauggaugguacgguuaucaccaucaaaaugagcaggggucaggauaugcagccgaccugaagagcacacagaaugccauugacgagauuacuaacaaaguaaauucuguuauugaaaagaugaauacacaguucacagcaguagguaaagaguucaaccaccuggaaaaaagaauagagaauuuaaauaaaaaaguugaugaugguuuccuggacauuuggacuuacaaugccgaacuguugguucuauuggaaaaugaaagaacuuuggacuaccacgauucaaaugugaagaacuuauaugaaaagguaagaagccaguuaaaaaacaaugccaaggaaauuggaaacggcugcuuugaauuuuaccacaaaugcgauaacacgugcauggaaagugucaaaaaugggacuuaugacuacccaaaauacucagaggaagcaaaauuaaacagagaagaaauagaugggguaaagcuggaaucaacaaggauuuaccagauuuuggcgaucuauucaacugucgccaguucauugguacugguagucucccugggggcaaucaguuucuggaugugcucuaaugggucucuacaguguagaauauguauuuaa

SEQ ID NO: 35590 - RNA, 1701 nt, Artificial Sequence
  derived and/or modified CDS sequence (wt) from hemagglutinin__InfluenzaA__ACZ05061
auggaggcaauacuaguaguucugcuauauacauuuacaaccgcaaaugcagacacauuauguauagguuaucaugcgaacaauucaacagacacuguagacacaguacuagaaaagaauguaacaguaacacacucuguuaaccuucuagaagacaagcauaacgggaaacuaugcaaacuaagagggguagccccauugcauuuggguaaauguaacauugcuggcuggauccugggaaauccagagugugaaucacucuccacagcaagcucaugguccuacauuguggaaacaucuaguucagacaauggaacguguuacccaggagauuucaucgauuaugaggagcuaagagagcaauugagcucagugucaucauuugaaagguuugagauauuccccaagacaaguucauggcccaaucaugacucgaacaaagguguaacggcagcauguccucaugcuggagcaaaaagcuucuacaaaaauuuaauauggcuaguuaaaaaaggaaauucauacccaaagcucagcaaauccuacauuaaugauaaagggaaagaaguccucgugcuauggggcauucaccauccaucuacuagugcugaccaacaaagucucuaucagaaugcagaugcauauguuuuuguggggucaucaagauacagcaagaaguucaagccggaaauagcaauaagacccaaagugagggaucaagaggggagaaugaacuauuacuggacacuaguagagccgggagacaaaauaacauucgaagcaacuggaaaucuagugguaccgagauaugcauucgcaauggaaagaaaugcuggaucugguauuaucauuucagauacaccaguccacgauugcaauacaacuugucagacacucaagggugcuauaaacaccagccucccauuucagaauauacauccgaucacaauuggaaaauguccaaaauauguaaaaagcacaaaauugagacuggccacaggauugaggaaugucccgucuauucaaucuagaggccuauuuggggccauugccgguuucauugaagggggguggacagggaugguagauggaugguacgguuaucaccaucaaaaugagcaggggucaggauaugcagccgaccugaagagcacacagaaugccauugacgagauuacuaacaaaguaaauucuguuauugaaaagaugaauacacaguucacagcaguagguaaagaguucaaccaccuggaaaaaagaauagagaauuuaaauaaaaaaguugaugaugguuuccuggacauuuggacuuacaaugccgaacuguugguucuauuggaaaaugaaagaacuuuggacuaccacgauucaaaugugaagaacuuauaugaaaagguaagaagccagcuaaaaaacaaugccaaggaaauuggaaacggcugcuuugaauuuuaccacaaaugcgauaacacgugcauggaaagugucaaaaaugggacuuaugacuacccaaaauacucagaggaagcaaaauuaaacagagaagaaauagaugggguaaagcuggaaucaacaaggauuuaccagauuuuggcgaucuauucaacugucgccaguucauugguacugguagucucccugggggcaaucaguuucuggaugugcucuaaugggucucuacaguguagaauauguauuuaa

SEQ ID NO: 35591 - RNA, 1701 nt, Artificial Sequence; identical to SEQ ID NO: 34705
  derived and/or modified CDS sequence (wt) from hemagglutinin__InfluenzaA__ACZ05071

SEQ ID NO: 35592 - RNA, 1701 nt, Artificial Sequence; identical to SEQ ID NO: 34705
  derived and/or modified CDS sequence (wt) from hemagglutinin__InfluenzaA__ACZ05081

SEQ ID NO: 35593 - RNA, 1701 nt, Artificial Sequence; identical to SEQ ID NO: 34705
  derived and/or modified CDS sequence (wt) from hemagglutinin__InfluenzaA__ACZ05091

SEQ ID NO: 35594 - RNA, 1701 nt, Artificial Sequence; identical to SEQ ID NO: 34705
  derived and/or modified CDS sequence (wt) from hemagglutinin__InfluenzaA__ACZ05101

SEQ ID NO: 35595 - RNA, 1701 nt, Artificial Sequence; identical to SEQ ID NO: 34705
  derived and/or modified CDS sequence (wt) from hemagglutinin__InfluenzaA__ACZ05111

SEQ ID NO: 35596 - RNA, 1701 nt, Artificial Sequence
  derived and/or modified CDS sequence (wt) from hemagglutinin__InfluenzaA__ACZ05121
augaaggcaauacuaguaguucugcuauauacauuugcaaccgcaaaugcagacacauuauguauagguuaucaugcgaacaauucaacagacacuguagacacaguacuagaaaagaauguaacaguaacacacucuguuaaccuucuagaagacaagcauaacgggaaacuaugcaaacuaagagggguagccccauugcauuuggguaaauguaacauugcuggcuggauccugggaaauccagagugugaaucacucuccacagcaagcucaugguccuacauuguggaaacaucuaguucagacaauggaacguguuacccaggagauuucaucgauuaugaggagcuaagagagcaauugagcucagugucaucauuugaaagguuugagauauuccccaagacaaguucauggcccaaucaugacucgaacaaagguguaacggcagcauguccucaugcuggagcaaaaagcuucuacaacaauuuaauauggcuaguuaaaaaaggaaauucauacccaaagcucagcaaauccuacauuaaugauaaagggaaagaaguccucgugcuauggggcauucaccauccaucuacuagugcugaccaacaaagucucuaucagaaugcagaugcauauguuuuuguggggucaucaagauacagcaagaaguucaagccggaaauagcaauaagacccaaagugagggaucaagaagggagaaugaacuauuacuggacacuaguagagccgggagacaaaauaacauucgaagcaacuggaaaucuagugguaccgagauaugcauucgcaauggaaagaaaugcuggaucugguauuaucauuucagauacaccaguccacgauugcaauacaacuugucagacacccaagggugcuauaaacaccagccucccauuucagaauauacauccgaucacaauuggaaaauguccaaaauauguaaaaagcacaaaauugagacuggccacaggauugaggaaugucccgucuauucaaucuagaggccuauuuggggccauugccgguuucauugaagggggguggacagggaugguagauggaugguacgguuaucaccaucaaaaugagcaggggucaggauaugcagccgaccugaagagcacacagaaugccauugacgagauuacuaacaaaguaaauucuguuauugaaaagaugaauacacaguucacagcaguagguaaagaguucaaccaccuggaaaaaagaauagagaauuuaaauaaaaaaguugaugaugguuuccuggacauuuggacuuacaaugccgaacuguugguucuauuggaaaaugaaagaacuuuggacuaccacgauucaaaugugaagaacuuauaugaaaagguaagaagccaguuaaaaaacaaugccaaggaaauuggaaacggcugcuuugaauuuuaccacaaaugcgauaacacgugcaugggaagugucaaaaaugggacuuaugacuacccaaaauacucagaggaagcaaaauuaaacagagaagaaauagaugggguaaagcuggaaucaacaaggauuuaccagauuuuggcgaucuauucaacugucgccaguucauugguacugguagucucccugggggcaaucaguuucuggaugugcucuaaugggucucuacaguguagaauauguauuuaa

SEQ ID NO: 35597 - RNA, 1701 nt, Artificial Sequence; identical to SEQ ID NO: 34705
  derived and/or modified CDS sequence (wt) from hemagglutinin__InfluenzaA__ACZ05131

SEQ ID NO: 35598 - RNA, 1701 nt, Artificial Sequence; identical to SEQ ID NO: 34705
  derived and/or modified CDS sequence (wt) from hemagglutinin__InfluenzaA__ACZ05141

SEQ ID NO: 35599 - RNA, 1701 nt, Artificial Sequence; identical to SEQ ID NO: 34705
  derived and/or modified CDS sequence (wt) from hemagglutinin__InfluenzaA__ACZ05151

SEQ ID NO: 35600 - RNA, 1701 nt, Artificial Sequence
  derived and/or modified CDS sequence (wt) from hemagglutinin__InfluenzaA__ACZ05172
augaagacuaucauugcuuugagcuacauucuaugucugguuuucgcucaaaaacuuccuggaaaugacaacagcacggcaacgcugugccuugggcaccaugcaguaccaaacggaacgauagugaaaacaaucacgaaugaccaaauugaaguuacuaaugcuacugagcugguucagaguuccucaacaggugaaauaugcgacaguccucaucagauccuugauggaaaaaacugcacacuaauagaugcucuauugggagacccucagugugauggcuuccaaaauaagaaaugggaccuuuuuguugaacgcagcaaagccuacagcaacuguuacccuuaugaugugccggauuaugccucccuuaggucacuaguugccucauccggcacacuggaguuuaacaaugaaagcuucaauuggacuggagucacucaagacggaacaagcucugcuugcauaaggagaucuaaaaacaguuucuuuaguagauugaauugguugacccacuuaaacuucaaauacccagcauugaacgugacuaugccaaacaaugaacaauuugacaaauuguacauuugggggguucaccacccggguacggacaaagaccaaaucuuccuguaugcucaagcaucaggaagaaucacagucucuaccaaaagaagccaacaaacugcaaucccgaauaucggaucuagacccagaguaaggaauaucccuagcagaauaagcaucuauuggacaauaguaaaaccgggagacauacuuuugauuaacagcacagggaaucuaauugcuccuagggguuacuucaaaauacgaagugggaaaagcucaauaaugagaucagaugcacccauuggcaaaugcaauucugaaugcaucacuccaaauggaagcauucccaaugacaaaccauuccaaaauguaaacaggaucacauacggggccugucccagauauguuaagcaaaacacucugaaauuggcaacagggaugcgaaauguaccagagaaacaaacuagaggcauauuuggcgcaaucgcggguuucauagaaaaugguugggagggaaugguggaugguugguacgguuucaggcaucaaaauucugagggaagaggacaagcagcagaucucaaaagcacucaagcagcaaucgaucaaaucaauggaaagcugaauagauugaucgggaaaaccaacgagaaauuccaucagauugaaaaagaauucucagaagucgaagggagaauucaggaccuugagaaauauguugaggacacuaaaauagaucucuggucauacaacgcggagcuucuuguugcccuggagaaccaacauacaauugaucuaacugacucagaaaugaacaaacuguuugaaaaaacaaagaagcaacugagggaaaaugcugaggauaugggcaaugguuguuucaaaauauaccacaaaugugacaaugccugcauaggaucaaucagaaauggaacuuaugaccacgauguauacagagaugaagcauuaaacaaccgguuucagaucaagggaguugagcugaagucaggguacaaagauuggauccuauggauuuccuuugccauaucauguuuuuugcuuuguguugcuuuguugggguucaucaugugggccugccaaaaaggcaacauuaggugcaacauuugcauuuga

SEQ ID NO: 35601 - RNA, 1698 nt, Artificial Sequence
  derived and/or modified CDS sequence (wt) from hemagglutinin__InfluenzaA__ACZ05194
augaaaguaaaacuacugguccuguuaugcacauuuacagcuacauaugcagacacaauauguauaggcuaccaugcuaacaacucgaccgacacuguugacacaguacuugaaaagaaugugacagugacacacucugucaaccugcuugagaacagucacaauggaaaacuaugucuauuaaaaggaauagccccacuacaauuggguaacugcagcguugccggguggaucuuaggaaacccagaaugcgaauuacugauuuccaaggagucaugguccuacauuguagaaaaaccaaauccugagaauggaacauguuacccagggcauuucgcugacuaugaggaacugagggagcaauugaguucaguaucuucauuugagagguucgaaauauuccccaaagaaagcucauggcccaaccacaccguaaccggagugucagcaucaugcucccauaauggggaaagcaguuuuuacagaaauuugcuauggcugacggggaagaaugguuuguacccaaaccugagcaaguccuaugcaaacaacaaagaaaaagaaguccuuguacuaugggguguucaucacccgccaaacauaguugaccaaaagacccucuaucguacagaaaaugcuuauguuucuguagugucuucacauuauagcagaaaauucaccccagaaauagccaaaagacccaaagugagagaucaagaaggaagaaucaacuacuacuggacucugcuugaacccggggauacaauaauauuugaggcaaauggaaaucuaauagcgccaagauaugcuuucgcacugaguagaggcuuuggaucaggaaucaucaacucaaaugcaccaauggauaaaugugaugcgaaaugccaaacaccucagggagcuauaaacagcagucuuccuuuccagaacguacacccagucacaauaggagaguguccaaaguaugucaggagugcaaaauuaaggaugguuacaggacuaaggaacaucccauccauucaauccagagguuuguuuggagccauugccgguuucauugaagggggguggacuggaaugguagaugguugguaugguuaucaucaucagaaugagcaaggaucuggcuaugcugcagaucaaaaaagcacacaaaaugccauuaaugggauuacaaacaaggugaauucuguaauugagaaaaugaacacucaauucacagcagugggcaaagaauucaacaaauuggaaagaaggauggaaaacuugaauaaaaaaguugaugauggguuuauagacauuuggacauauaaugcagaacuguugguucuacuggaaaaugaaaggacuuuggauuuccaugacuccaaugugaagaaucuguaugagaaaguaaaaagccaguuaaagaauaaugcuaaagaaauaggaaauggguguuuugaauucuaucacaaguguaacgaugaaugcauggagaguguaaagaauggaacuuaugacuauccaaaauauuccgaagaaucaaaguuaaacagggagaaaauugauggagugaaauuggaaucaaugggagucuaucagauucuggcgaucuacucaacagucgccaguucucugguucuuuuggucucccugggggcaaucagcuucuggauguguuccaaugggucuuugcaguguagaauaugcaucuaa

SEQ ID NO: 35602 - RNA, 1701 nt, Artificial Sequence
  derived and/or modified CDS sequence (wt) from hemagglutinin__InfluenzaA__ACZ05205
augaagacuaucauugcuuugagcuacauucuaugucugguuuucgcucaaaaacuuccuggaaaugacaacagcacggcaacgcugugccuugggcaccaugcaguaccaaacggaacgauagugaaaacaaucacgaaugaccaaauugaaguuacuaaugcuacugagcugguucagaguuccucaacaggugaaauaugcgacaguccucaucagauccuugauggaaaaaacugcacacuaauagaugcucuauugggagacccucagugugauggcuuccaaaauaagaaaugggaccuuuuuguugaacgcagcaaagccuacagcaacuguuacccuuaugaugugccggauuaugccucccuuaggucacuaguugccucauccggcacacuggaguuuaacaaugaaagcuucaauuggacuggagucacucaagacggaacaagcucugcuugcauaaggagaucuaaaaacaguuucuuuaguagauugaauugguugacccacuuaaacuucaaauacccagcauugaacgugacuaugccaaacaaugaacaauuugacaaauuguacauuugggggguucaccacccggguacggacaaagaccaaaucuuccuguaugcucaagcaucaggaagaaucacagucucuaccaaaagaagccaacaaacugcaaucccgaauaucggaucuagacccagaguaaggaauaucccuagcagaauaagcaucuauuggacaauaguaaaaccgggagacauacuuuugauuaacagcacagggaaucuaauugcuccuagggguuacuucaaaauacgaagugggaaaagcucaauaaugagaucagaugcacccauuggcaaaugcaauucugaaugcaucacuccaaauggaagcauucccaaugacaaaccauuccaaaauguaaacaggaucacauacggggccugucccagauauguuaagcaaaacacucugaaauuggcaacagggaugcgaaauguaccagagaaacaaacuagaggcauauuuggcgcaaucgcggguuucauagaaaaugguugggagggaaugguggaugguugguacgguuucaggcaucaaaauucugagggaagaggacaagcagcagaucucaaaagcacucaagcagcaaucgaucaaaucaaugggaagcugaauagauugaucgggaaaaccaacgagaaauuccaucagauugaaaaagaauucucagaagucgaagggagaauucaggaccuugagaaauauguugaggacacuaaaauagaucucuggucauacaacgcggagcuucuuguugcccuggagaaccaacauacaauugaucuaacugacucagaaaugaacaaacuguuugaaaaaacaaagaagcaacugagggaaaaugcugaggauaugggcaaugguuguuucaaaauauaccacaaaugugacaaugccugcauaggaucaaucagaaauggaacuuaugaccacgauguauacagagaugaagcauuaaacaaccgguuucagaucaagggaguugagcugaagucaggguacaaagauuggauccuauggauuuccuuugccauaucauguuuuuugcuuuguguugcuuuguugggguucaucaugugggccugccaaaaaggcaacauuaggugcaacauuugcauuuga

SEQ ID NO: 35603 - RNA, 1701 nt, Artificial Sequence
  derived and/or modified CDS sequence (wt) from hemagglutinin__InfluenzaA__ACZ05216
augaagacuaucauugcuuugagcuacauucuaugucugguuuucgcucaaaaaauuccuggaaaugacaacaacacggcaacgcugugccuugggcaccaugcaguaccaaacggaacgauagugaaaacaaucacgaaugaccaaauugaaguuacuaaugcuacugagcugguucagaguuccucaacaggugaaauaugcgacaguccucaucagauccuugauggagaaaacugcacacuaauagaugcucuauugggagacccucagugugauggcuuccaaaauaagaaaugggaccuuuuuguugaacgaagcaaagccuacagcaacuguuacccuuaugaugugccggauuaugccucccuuaggucacuaguugccucauccggcacacuggaguuuaacaaugaaagcuucaauuggacuggagucacucaaaacggaacaagcucugcuugcauaaggagaucuaauaacaguuucuuuaguagauugaauugguugacccauuuaaaauucaaauacccagcauugaacgugacuaugccaaacaaugaacaauuugacaaauuguacauuugggggguucaccacccggguacggacaaugaccaaaucuuccuguaugcucaagcaucaggaagaaucacagucucuaccaaaagaagccaacaaacuguaaucccgaauaucggaucuagacccagaguaaggaauaucccuagcagaauaagcaucuauuggacaauaguaaaaccgggagacauacuuuugauuaacagcacagggaaucuaauugcuccuagggguuacuucaaaauacgaagugggaaaagcucaauaaugagaucagaugcacccauuggcaaaugcaauucugaaugcaucacuccaaauggaagcauucccaaugacaaaccauuccaaaauguaaacaggaucacauacggggccugucccagauauguuaagcaaaacacucugaaauuggcaacagggaugcgaaauguaccagagaaacaaacuagaggcauauuuggcgcaaucgcggguuucauagaaaaugguugggagggaaugguggaugguugguacgguuucaggcaucaaaauucugagggaagaggacaagcagcagaucucaaaagcacucaagcagcaaucgaucaaaucaaugggaagcugaauagauugaucgggaaaaccaacgagaaauuccaucaaauugaaaaagaauucucagaagucgaagggagaauucaggaccuugagaaauauguugaggacacuaaaauagaucucuggucauacaacgcggagcuucuuguugcccuggagaaccaacauacaauugaucuaacugacucagaaaugaacaaacuguuugaaaaaacaaagaagcaacugagggaaaaugcugaggauaugggcaaugguuguuucaaaauauaccacaaaugugacaaugccugcauaggaucaaucagaaauggaacuuaugaccacgauguauacagagaugaagcauuaaacaaccgguuccagaucaaaggaguugagcuuaagucaggauacaaagauuggauccuauggauuuccuuugccauaucauguuuuuugcuuuguguugcuuuguugggguucaucaugugggccugccaaaaaggcaacauuaggugcaacauuugcauuuga

SEQ ID NO: 35604 - RNA, 1701 nt, Artificial Sequence; identical to SEQ ID NO: 35600
  derived and/or modified CDS sequence (wt) from hemagglutinin__InfluenzaA__ACZ05227

SEQ ID NO: 35605 - RNA, 1701 nt, Artificial Sequence
  derived and/or modified CDS sequence (wt) from hemagglutinin__InfluenzaA__ACZ05238
augaagacuaucauugcuuugagcuacauucuaugucugguuuucgcucaaaaacuuccuggaaaugacaacagcacggcaacgcugugccuugggcaccaugcaguaccaaacggaacgauagugaaaacaaucacgaaugaccaaauugaaguuacuaaugcuacugagcugguucagaguuccucaacaggugaaauaugcgacaguccucaucagauccuugauggaaaaaacugcacacuaauagaugcucuauugggagacccucagugugauggcuuccaaaauaagaaaugggaccuuuuuguugaacgcagcaaagccuacagcaacuguuacccuuaugaugugccggauuaugccucccuuaggucacuaguugccucauccggcacacuggaguuuaacaaugaaagcuucaauugggcuggagucacucaaaacggaacaagcucugcuugcauaaggagaucuaaaaacaguuucuuuaguagauugaauugguugacccacuuaaacuucaaauacccagcauugaacgugacuaugccaaacaaugaacaauuugacaaauuguacauuugggggguucaccacccggguacggacaaagaccaaaucuuccuguaugcucaagcaucaggaagaaucacagucucuaccaaaagaagccaacaaacugcaaucccgaauaucggaucuagacccagaguaaggaauaucccuagcagaauaagcaucuauuggacaauaguaaaaccgggagacauacuuuugauuaacagcacagggaaucuaauugcuccuagggguuacuucaaaauacgaagugggaaaagcucaauaaugagaucagaugcacccauuggcaaaugcaauucugaaugcaucacuccaaauggaagcauucccaaugacaaaccauuccaaaauguaaacaggaucacauacggggccugucccagauauguuaagcaaaacacucugaaauuggcaacagggaugcgaaauguaccagagaaacaaacuagaggcauauuuggcgcaaucgcggguuucauagaaaaugguugggagggaaugguggaugguugguacgguuucaggcaucaaaauucugagggaagaggacaagcagcagaucucaaaagcacucaagcagcaaucgaucaaaucaaugggaagcugaauagauugaucgggaaaaccaacgagaaauuccaucagauugaaaaagaauucucagaagucgaagggagaauucaggaccuugagaaauauguugaggacacuaaaauagaucucuggucauacaacgcggagcuucuuguugcccuggagaaccaacauacaauugaucuaacugacucagaaaugaacaaacuguuugaaaaaacaaagaagcaacugagggaaaaugcugaggauaugggcaaugguuguuucaaaauauaccacaaaugugacaaugccugcauaggaucaaucagaaauggaacuuaugaccacgauguauacagagaugaagcauuaaacaaccgguuucagaucaagggaguugagcugaagucaggguacaaagauuggauccuauggauuuccuuugccauaucauguuuuuugcuuuguguugcuuuguugggguucaucaugugggccugccaaaaaggcaacauuaggugcaacauuugcauuuga

SEQ ID NO: 35606 - RNA, 1701 nt, Artificial Sequence; identical to SEQ ID NO: 35602
  derived and/or modified CDS sequence (wt) from hemagglutinin__InfluenzaA__ACZ05249

SEQ ID NO: 35607 - RNA, 1701 nt, Artificial Sequence; identical to SEQ ID NO: 35602
  derived and/or modified CDS sequence (wt) from hemagglutinin__InfluenzaA__ACZ05260

SEQ ID NO: 35608 - RNA, 1701 nt, Artificial Sequence
  derived and/or modified CDS sequence (wt) from hemagglutinin__InfluenzaA__ACZ05271
augaagacuaucauugcuuugagcuacauucuaugucugguuuucgcucaaaaacuuccuggaaaugacaacagcacggcaacgcugugccuugggcaccaugcaguaccaaacggaacaauagugaaaacaaucacgaaugaccaaauugaaguuacuaaugcuacugagcugguucagaguuccucaacaggugaaauaugcgacaguccucaucagauccuugauggagaaaacugcacacuaauagaugcucuauugggagacccucagugugauggcuuccaaaauaagaaaugggaccuuuuuguugaacgcagcaaagccuacagcaacuguuacccuuaugaugugccggauuaugccucccuuaggucacuaguugccucauccggcacacuggaguuuaacaaugaaagcuucaauuggacuggagucacucaaaacggaacaagcucugcuugcauaaggagaucuaauaacaguuucuuuaguagauugaauugguugacccacuuaaaauucaaauacccagcauuaaacgugacuaugccaaacaaugaacaauuugacaaauuguacauuugggggguucaccacccggguacggacaaugaccaaaucuuccuguaugcucaagcaucaggaagaaucacaguuucuaccaaaagaagccaacaaacuguaaucccgaauaucggaucuagacccagaguaaggaauaucccuagcagaauaagcaucuauuggacaauaguaaaaccgggagacauacuuuugauuaacagcacagggaaucuaauugcuccuagggguuacuucaaaauacgaagugggaaaagcucaauaaugagaucagaugcacccauuggcaaaugcaauucugaaugcaucacuccaaauggaagcauucccaaugacaaaccauuccaaaauguaaacaggaucacauacggggccugucccagauauguuaagcaaaacacucugaaauuggcaacagggaugcgaaauguaccagagagacaaacuagaggcauauuuggcgcaaucgcggguuucauagaaaaugguugggagggaaugguggaugguugguacgguuucaggcaucaaaauucugagggaagaggacaagcagcagaucucaaaagcacucaagcagcaaucgaucaaaucaaugggaagcugaauagauugaucgggaaaaccaacgagaaauuccaucagauugaaaaagaauucucagaagucgaagggagaauucaggaccuugagaaauauguugaggacaccaaaauagaucucuggucauacaacgcggagcuucuuguugcccuggagaaccaacauacaauugaucuaacugacucagaaaugaacaaacuguuugaaaaaacaaagaagcaacugagggaaaaugcugaggauaugggcaaugguuguuucaaaauauaccacaaaugugacaaugccugcauaggaucaaucagaaauggaacuuaugaccacgauguauacagagaugaagcauuaaacaaccgguuccagaucaagggaguugagcugaagucaggguacaaagauuggauccuauggauuuccuuugccauaucauguuuuuugcuuuguguugcuuuguugggguucaucaugugggccugccaaaaaggcaacauuaggugcaacauuugcauuuga

SEQ ID NO: 35609 - RNA, 1701 nt, Artificial Sequence
  derived and/or modified CDS sequence (wt) from hemagglutinin__InfluenzaA__ACZ05282
augaagacuaccauugcuuugagcuacauucuaugucugguuuucgcucaaaaacuuccuggaaaugacaacagcacggcaacgcugugccuugggcaccaugcaguaccaaacggaacgauagugaaaacaaucacgaaugaccaaauugaaguuacuaaugcuacugagcugguucagaguuccucaacaggugaaauaugcgacaguccucaucagauccuugauggagaaaacugcacacuaauagaugcucuauuaggagacccucagugugauggcuuccaaaauaagaaaugggaccuuuuuguugaacgcagcaaagccuacagcaacuguuacccuuaugaugugccggauuaugccucccuuaggucacuaguugccucauccggcacacuggaguuuaacaaugaaagcuucaauuggacuggagucacucaaaacggaacaagcucugcuugcauaaggagaucuaauaacaguuucuuuaguagauugaauugguugacccacuuaaaauucaaauacccagcauuaaacgugacuaugccaaacaaugaacaauuugacaaauuguacauuugggggguucaccacccggguacggacaaugaccaaaucuuccuguaugcucaagcaucaggaagaaucacagucucuaccaaaagaagccaacaaacuguaaucccgaauaucggaucuagacccagaguaaggaauaucccuagcagaauaagcaucuauuggacaauaguaaaaccgggagacauacuuuugauuaacagcacagggaaucuaauugcuccuagggguuacuucaaaauacaaagugggaaaagcucaauaaugagaucagaugcacccauuggcaaaugcaauucugaaugcaucaccccaaauggaagcauucccaaugacaaaccauuccaaaauguaaacaggaucacauacggggccugucccagauauguuaagcaaaacacucugaaauuggcaacagggaugcgaaauguaccagagaaacaaacuagaggcauauuuggcgcaaucgcggguuucauagaaaaugguugggagggaaugguggaugguugguacgguuucaggcaucaaaauucugagggaagaggacaagcagcagaucucaaaagcacucaagcagcaaucgaucaaaucaaugggaagcugaauagauugaucgggaaaaccaacgagaaauuccaucagauugaaaaagaauucucggaagucgaagggagaauucaggaccuugagaaauauguugaggacaccaaaauagaucucuggucauacaacgcggagcuucuuguugcccuggagaaccaacauacaauugaucuaacugacucagaaaugaacaaacuguuugaaaaaacaaagaagcaacugagggaaaaugcugaggauaugggcaaugguuguuucaaaauauaccacaaaugugacaaugccugcauaggaucaaucagaaauggaacuuaugaccacgauguauacagagaugaagcauuaaacaaccgguuccagaucaagggaguugagcugaagucaggguacaaagauuggauccuauggauuuccuuugccauaucauguuuuuugcuuuguguugcuuuguugggguucaucaugugggccugccaaaaaggcaacauuaggugcaacauuugcauuuga

SEQ ID NO: 35610 - RNA, 1701 nt, Artificial Sequence; identical to SEQ ID NO: 35602
  derived and/or modified CDS sequence (wt) from hemagglutinin__InfluenzaA__ACZ05304

SEQ ID NO: 35611 - RNA, 1701 nt, Artificial Sequence
  derived and/or modified CDS sequence (wt) from hemagglutinin__InfluenzaA__ACZ05315
augaagacuaucauugcuuugagcuacauucuaugucugguuuucgcucaaaaacuuccuggaaaugacaacagcacggcaacgcugugccuugggcaccaugcaguaccaaacggaacgauagugaaaacaaucacgaaugaccaaauugaaguuacuaaugcuacugagcugguucagaguuccucaacaggugaaauaugcgacaguccucaucagauccuugauggagaaaacugcacacuaauagaugcucuauugggagacccucagugugauggcuuccaaaauaagaaaugggaccuuuuuguugaacgaagcaaagccuacagcaacuguuacccuuaugaugugccggauuaugccucccuuaggucacuaguugccucauccggcacacuggaguuuaacaaugaaagcuucaauuggacuggagucacucaaaacggaacaagcucugcuugcauaaggagaucuaauaauaguuucuuuaguagauugaauugguugacccacuuaaacuucaaauacccagcauugaacgugacuaugccaaacaaugaacaauuugacaaauuguacauuugggggguucaccacccggguacggacaaggaccaaaucuuccuguaugcucaagcaucaggaagaaucacaguaucuaccaaaagaagccaacaagcuguaaucccgaauaucggaucuagacccagaguaaggaauaucccuagcagaauaagcaucuauuggacaauaguaaaaccgggagacauacuuuugauuaacagcacagggaaucuaauugcuccuagggguuacuucaaaauacgaagugggaaaagcucaauaaugagaucagaugcacccauuggcaaaugcaauucugaaugcaucacuccaaauggaagcauucccaaugacaaaccauuccaaaauguaaacaggaucacauacggggccugucccagauauguuaagcaaaacacucugaaauuggcaacaggaaugcgaaauguaccagagaaacaaacuagaggcauauuuggcgcaauagcggguuucauagaaaaugguugggagggaaugguggaugguugguacgguuucaggcaucaaaauucugagggaagaggacaagcagcagaucucaaaagcacucaagcagcaaucgaucaaaucaaugggaagcugaauagauugaucgggaaaaccaacgagaaauuccaucagauugaaaaagaauucucagaagucgaagggagaauucaggaccuugagaaauauguugaggacacuaaaauagaucucuggucauacaacgcggagcuucuuguugcccuggagaaccaacauacaauugaucuaacugacucagaaaugaacaaacuguuugaaaaaacaaagaagcaacugagggaaaaugcugaggauaugggcaaugguuguuucaaaauauaccacaaaugugacaaugccugcauaggaucaaucagaaauggaacuuaugaccacgauguauacagagaugaagcauuaaacaaccgguuccagaucaagggaguugagcugaagucaggguacaaagauuggauccuauggauuuccuuugccauaucauguuuuuugcuuuguguugcuuuguugggguucaucaugugggccugccaaaaaggcaacauuaggugcaacauuugcauuuga

SEQ ID NO: 35612 - RNA, 1701 nt, Artificial Sequence; identical to SEQ ID NO: 35600
  derived and/or modified CDS sequence (wt) from hemagglutinin__InfluenzaA__ACZ05326

SEQ ID NO: 35613 - RNA, 1701 nt, Artificial Sequence
  derived and/or modified CDS sequence (wt) from hemagglutinin__InfluenzaA__ACZ05337
augaagacuaucauugcuuugagcuacauucuaugucugguuuucacucaaaaacuuccuggaaaugacaacagcacggcaacgcugugccuugggcaccaugcaguaccaaacggaacgauagugaaaacaaucacgaaugaccaaauugaaguuacuaaugcuacugagcugguucagaguuccucaacaggugaaauaugcgacaguccucaucagauccuugauggaaaaaacugcacacuaauagaugcucuauugggagacccucagugugauggcuuccaaaauaagaaaugggaccuuuuuguugaacgcagcaaagccuacagcaacuguuacccuuaugaugugccggauuaugccucccuuaggucacuaguugccucauccggcacacuggaguuuaacaaugaaagauucaauuggacuggagucacucaaaacggaacaagcucugcuugcauaaggagaucuaaaaacaguuucuuuaguagauugaauugguugacccacuuaaacuucaaauacccagcauugaacgugacuaugccaaacaaugaacaauuugacaaauuguacauuugggggguucaccacccggguacggacaaagaccaaaucuuccuguaugcucaagcaucaggaagaaucacagucucuaccaaaagaagccaacaaacuguaaucccgaauaucggaucuagacccagaguaaggaauaucccuagcagaauaagcaucuauuggacaauaguaaaaccgggagacauacuuuugauuagcagcacagggaaucuaauugcuccuagggguuacuucaaaauacgaagugggaaaagcucaauaaugagaucagaugcacccauuggcaaaugcaauucugaaugcaucacuccaaauggaagcauucccaaugacaaaccauuccaaaauguaaacaggaucacauacggggccugucccagauauguuaagcaaaacacucugaaauuggcaacagggaugcgaaauguaccagagaaacaaacuagaggcauauuuggcgcaaucgcggguuucauagaaaaugguugggagggaaugguggaugguugguacgguuucaggcaucaaaauucugaaggaagaggacaagcagcagaucucaaaagcacucaagcagcaaucgaucaaaucaacgggaagcugaauagauugaucgggaaaaccaacgagaaauuccaucagauugaaaaagaauucucagaagucgaagggagaauucaggaccuugagaaauauguugaggacacuaaaauagaucucuggucauacaacgcggagcuucuuguugcccuggagaaccaacauacaauugaucuaacugacucagaaaugaacaaacuguuugaaaaaacaaagaagcaacugagggaaaaugcugaggauaugggcaaugguuguuucaaaauauaccacaaaugugacaaugccugcauaggaucaaucagaaauggaacuuaugaucacgauguauacagagaugaagcauuaaacaaccgguuucagaucaagggaguugagcugaagucaggguucaaagauuggauccuauggauuuccuuugccauaucauguuuuuugcuuuguguugcuuuguugggguucaucaugugggccugccaaaaaggcaacauuaggugcaacauuugcauuuga

SEQ ID NO: 35614 - RNA, 1701 nt, Artificial Sequence; identical to SEQ ID NO: 35602
  derived and/or modified CDS sequence (wt) from hemagglutinin__InfluenzaA__ACZ05348

SEQ ID NO: 35615 - RNA, 1701 nt, Artificial Sequence; identical to SEQ ID NO: 35605
  derived and/or modified CDS sequence (wt) from hemagglutinin__InfluenzaA__ACZ05359

SEQ ID NO: 35616 - RNA, 1701 nt, Artificial Sequence; identical to SEQ ID NO: 35600
  derived and/or modified CDS sequence (wt) from hemagglutinin__InfluenzaA__ACZ05370

SEQ ID NO: 35617 - RNA, 1701 nt, Artificial Sequence
  derived and/or modified CDS sequence (wt) from hemagglutinin__InfluenzaA__ACZ05392
augaagacuaucauugcuuugagcuacauucuaugucugguuuucgcucaaaaacuuccuggaaaugacaacagcacggcaacgcugugccuugggcaccaugcaguaccaaacggaacgauagugaaaacaaucacgaaugaccaaauugaaguuacuaaugcuacugagcugguucagaguuccucaacaggugaaauaugcgacaguccucaucagauccuugauggaaaaaacugcacacuaauagaugcucuauugggagacccucagugugauggcuuccaaaauaagaaaugggaccuuuuuguugaacgcagcaaagccuacagcaacuguuacccuuaugaugugccggauuaugccucccuuaggucacuaguugccucauccggcacacuggaguuuaacaaugaaagcuucaauuggacuggagucacucaaaacggagcaagcucugcuugcauaaggagaucuaaaaacaguuucuuuaguagauugaauugguugacccacuuaaacuucaaauacccagcauugaacgugacuaugccaaacaaugaacaauuugacaaauuguacauuugggggguucaccacccggguacggacaaagaccaaaucuuccuguaugcucaagcaucaggaagaaucacagucucuaccaaaagaagccaacaaacugcaaucccgaauaucggaucuagacccagaguaaggaauaucccuagcagaauaagcaucuauuggacaauaguaaaaccgggagacauacuuuugauuaacagcacagggaaucuaauugcuccuagggguuacuucaaaauacgaagugggaaaagcucaauaaugagaucagaugcacccauuggcaaaugcaauucugaaugcaucacuccaaauggaagcauucccaaugacaaaccauuccaaaauguaaacaggaucacauacggggccugucccagauauguuaagcaaaacacucugaaauuggcaacagggaugcgaaauguaccagagaaacaaacuagaggcauauuuggcgcaaucgcggguuucauagaaaaugguugggagggaaugguggaugguugguacgguuucaggcaucaaaauucugagggaagaggacaagcagcagaucucaaaagcacucaagcagcaaucgaucaaaucaaugggaagcugaauagauugaucgggaaaaccaacgagaaauuccaucagauugaaaaagaauucucagaagucgaagggagaauucaggaccuugagaaauauguugaggacacuaaaauagaucucuggucauacaacgcggagcuucuuguugcccuggagaaccaacauacaauugaucuaacugacucagaaaugaacaaacuguuugaaaaaacaaagaagcaacugagggaaaaugcugaggauaugggcaaugguuguuucaaaauauaccacaaaugugacaaugccugcauaggaucaaucagaaauggaacuuaugaccacgauguauacagagaugaagcauuaaacaaccgguuucagaucaagggaguugagcugaagucaggguacaaagauuggauccuauggauuuccuuugccauaucauguuuuuugcuuuguguugcuuuguugggguucaucaugugggccugccaaaaaggcaacauuaggugcaacauuugcauuuga

SEQ ID NO: 35618 - RNA, 1701 nt, Artificial Sequence; identical to SEQ ID NO: 35600
  derived and/or modified CDS sequence (wt) from hemagglutinin__InfluenzaA__ACZ05403

SEQ ID NO: 35619 - RNA, 1701 nt, Artificial Sequence
  derived and/or modified CDS sequence (wt) from hemagglutinin__InfluenzaA__ACZ05436
augaagacuaucauugcuuugagcuacauucuaugucugguuuucgcucaaaaacuuccuggaaaugacaacagcacggcaacgcugugccuugggcaccaugcaguaccaaacggaacgauagugaaaacaaucacgaaugaccaaauugaaguuacuaaugcuacugagcugguucagaguuccucaacaggugaaauaugcgacaguccucaucagauccuugauggaaaaagcugcacacuaauagaugcucuauugggagacccucagugugauggcuuccaaaauaagaaaugggaccuuuuuguugaacgcagcaaagccuacagcaacuguuacccuuaugaugugccggauuaugccucccuuaggucacuaguugccucauccggcacacuggaguuuaacaaugaaagcuucaauuggacuggagucacucaaaacggaacaagcucugcuugcauaaggagaucuaaaaacaguuucuuuaguagauugaauugguugacccacuuaaacuucaaauacccagcauugaacgugacuaugccaaacaaugaacaauuugacaaauuguacauuugggggguucaccacccggguacggacaaagaccaaaucuuccuguaugcucaagcaucaggaagaaucacagucucuaccaaaagaagccaacaaacugcaaucccgaauaucggaucuagacccagaguaaggaauaucccuagcagaauaagcaucuauuggacaauaguaaaaccgggagacauacuuuugauuaacagcacagggaaucuaauugcuccuagggguuacuucaaaauacgaagugggaaaagcucaauaaugagaucagaugcacccauuggcaaaugcaauucugaaugcaucacuccaaauggaagcauucccaaugacaaaccauuccaaaauguaaacaggaucacauacggggccugucccagauauguuaagcaaaacacucugaaauuggcaacagggaugcgaaauguaccagagaaacaaacuagaggcauauuuggcgcaaucgcggguuucauagaaaaugguugggagggaaugguggaugguugguacgguuucaggcaucaaaauucugagggaagaggacaagcagcagaucucaaaagcacucaagcagcaaucgaucaaaucaaugggaagcugaauagauugaucgggaaaaccaacgagaaauuccaucagauugaaaaagaauucucagaagucgaagggagaauucaggaccuugagaaauauguugaggacacuaaaauagaucucuggucauacaacgcggagcuucuuguugcccuggagaaccaacauacaauugaucuaacugacucagaaaugaacaaacuguuugaaaaaacaaagaagcaacugagggaaaaugcugaggauaugggcaaugguuguuucaaaauauaccacaaaugugacaaugccugcauaggaucaaucagaaauggaacuuacgaccacgauguauacagagaugaagcauuaaacaaccgguuucagaucaagggaguugagcugaagucaggguacaaagauuggauccuauggauuuccuuugccauaucauguuuuuugcuuuguguugcuuuguugggguucaucaugugggccugccaaaaaggcaacauuaggugcaacauuugcauuuga

SEQ ID NO: 35620 - RNA, 1701 nt, Artificial Sequence; identical to SEQ ID NO: 35600
  derived and/or modified CDS sequence (wt) from hemagglutinin__InfluenzaA__ACZ05458

SEQ ID NO: 35621 - RNA, 1701 nt, Artificial Sequence; identical to SEQ ID NO: 35600
  derived and/or modified CDS sequence (wt) from hemagglutinin__InfluenzaA__ACZ05469

SEQ ID NO: 35622 - RNA, 1701 nt, Artificial Sequence; identical to SEQ ID NO: 35619
  derived and/or modified CDS sequence (wt) from hemagglutinin__InfluenzaA__ACZ05480

SEQ ID NO: 35623 - RNA, 1701 nt, Artificial Sequence; identical to SEQ ID NO: 35611
  derived and/or modified CDS sequence (wt) from hemagglutinin__InfluenzaA__ACZ05513

SEQ ID NO: 35624 - RNA, 1701 nt, Artificial Sequence; identical to SEQ ID NO: 35602
  derived and/or modified CDS sequence (wt) from hemagglutinin__InfluenzaA__ACZ05524

SEQ ID NO: 35625 - RNA, 1701 nt, Artificial Sequence
  derived and/or modified CDS sequence (wt) from hemagglutinin__InfluenzaA__ACZ05535
augaagacuaucauugcuuugagcuacauucuaugucugguuuucgcucaaaaacuuccuggaaaugacaacagcacggcaacgcugugccuugggcaccaugcaguaccaaacggaacgauagugaaaacaaucacgaaugaccaaauugaaguuacuaaugcuacugagcugguucagaguuccucaacaggugaaauaugcgacaguccucaucagauccuugauggaaaaaacugcacacuaauagaugcucuauugggagacccucagugugauggcuuccaaaauaagaaaugggaccuuuuuguugaacgcagcaaagccuacagcaacuguuacccuuaugaugugccggauuaugccucccuuaggucacuaguugccucauccggcacacuggaguuuaacaaugaaagcuucaauuggacuggagucacucaaaacggaacaagcucugcuugcauaaggagaucuaaaaacaguuucuuuaguagauugaauugguugacccacuuaaacuucaaauacccagcauugaacgugacuaugccaaacaaugaacaauuugacaaauuguacauuugggggguucaccacccggguacggacaaagaccaaaucuuccuguaugcucaagcaucaggaagaaucacagucucuaccaaaagaagccaacaaacugcaaucccgaauaucggaucuagacccagaguaaggaauaucccuagcagaauaagcaucuauuggacaauaguaaaaccgggagacauacuuuugauuaacagcacagggaaucuaauugcuccuagggguuacuucaaaauacgaagugggaaaagcucaauaaugagaucagaugcacccauuggcaaaugcaauucugaaugcaucacuccaaauggaagcauucccaaugacaaaccauuccaaaauguaaacaggaucacauacggggccugucccagauauguuaagcaaaacacucugaaauuggcaacagggaugcgaaauguaccagagaaacaaacuagaggcauauuuggcgcaaucgcggguuucauagaaaaugguugggagggaaugguggaugguugguacgguuucaggcaucaaaauucugagggaagaggacaagcagcagaucucaaaagcacucaagcagcaaucgaucaaaucaaugggaagcugaauagauugaucgggaaaaccaacgagaaauuccaucagauugaaaaagaauucucagaagucgaagggagaauucaggaccuugagaaauauguugaggacacuaaaauagaucucuggucauacaacgcggagcuucuuguugcccuggagaaccaacauacaauugaucuaacugacucagaaaugaacaaacuguuugaaaaaacaaagaagcaacugagggaaaaugcugaggauaugggcaaugguuguuucaaaauauaccacaaaugugacaaugccugcauaggaucaaucagaaauggaacuuaugaccacgauguauacagagaugaagcauuaaacaaccgguuucagaucaagggaguugagcugaagucaggguacaaagauuggauccuauggauuuccuuugccauaucauguuuuuugcuuuguguugcuuuguugggguucaucaugugggccugccaaaaaggcaacauuaggugcaacauuugcauuuga

SEQ ID NO: 35626 - RNA, 1701 nt, Artificial Sequence
  derived and/or modified CDS sequence (wt) from hemagglutinin__InfluenzaA__ACZ05546
augaagacuaucauugcuuugagcuacauucuaugucugguuuucgcucaaaaacuuccuggaaaugacaacagcacggcaacgcugugccuugggcaccaugcaguaccaaacggaacgauagugaaaacaaucacgaaugaccaaauugaaguuacgaaugcuacugagcugguucagaguuccucaacaggugaaauaugcgacaguccucaucagauccuugauggaaaaaacugcacacuaauagaugcucuauugggagacccucagugugauggcuuccaaaauaagaaaugggaccuuuuuguugaacgcagcaaagccuacagcaacuguuacccuuaugaugugccggauuaugccucccuuaggucacuaguugccucauccggcacacuggaguuuaacaaugaaagcuucaauuggacuggagucacucaaaacggaacaagcucugcuugcauaaggagaucuaaaaacaguuucuuuaguagauugaauugguugacccacuuaaacuucaaauacccagcauugaacgugacuaugccaaacaaugaacaauuugacaaauuguacauuugggggguucaccacccggguacggacaaagaccaaaucuuccuguaugcucaagcaucaggaagaaucacagucucuaccaaaagaagccaacaaacugcaaucccgaauaucggaucuagacccagaguaaggaauaucccuagcagaauaagcaucuauuggacaauaguaaaaccgggagacauacuuuugauuaacagcacagggaaucuaauugcuccuagggguuacuucaaaauacgaagugggaaaagcucaauaaugagaucagaugcacccauuggcaaaugcaauucugaaugcaucacuccaaauggaagcauucccaaugacaaaccauuccaaaauguaaacaggaucacauacggggccugucccagauauguuaagcaaaacacucugaaauuggcaacagggaugcgaaauguaccagagaaacaaacuagaggcauauuuggcgcaaucgcggguuucauagaaaaugguugggagggaaugguggaugguugguacgguuucaggcaucaaaauucugagggaagaggacaagcagcagaucucaaaagcacucaagcagcaaucgaucaaaucaaugggaagcugaauagauugaucgggaaaaccaacgagaaauuccaucagauugaaaaagaauucucagaagucgaagggagaauucaggaccuugagaaauauguugaggacacuaaaauagaucucuggucauacaacgcggagcuucuuguugcccuggagaaccaacauacaauugaucuaacugacucagaaaugaacaaacuguuugaaaaaacaaagaagcaacugagggaaaaugcugaggauaugggcaaugguuguuucaaaauauaccacaaaugugacaaugccugcauaggaucaaucagaaauggaacuuaugaccacgauguauacagagaugaagcauuaaacaaccgguuucagaucaagggaguugagcugaagucaggguacaaagauuggauccuauggauuuccuuugccauaucauguuuuuugcuuuguguugcuuuguugggguucaucaugugggccugccaaaaaggcaacauuaggugcaacauuugcauuuga

SEQ ID NO: 35627 - RNA, 1701 nt, Artificial Sequence; identical to SEQ ID NO: 35600
  derived and/or modified CDS sequence (wt) from hemagglutinin__InfluenzaA__ACZ05557

SEQ ID NO: 35628 - RNA, 1698 nt, Artificial Sequence
  derived and/or modified CDS sequence (wt) from hemagglutinin__InfluenzaA__ACZ05579
augaaaguaaaacuacugguccuguuaugcacauuuacagcuacauaugcagacacaauauguauaggcuaccaugcuaacaacucgaccgacacuguugacacaguacuugaaaagaaugugacagugacacacucugucaaccugcuugagaacagucacaaugggaaacuauguuuauuaaaaggaauagccccacuacaauuggguaacugcagcguugccggguggaucuuaggaaacccagaaugcgaauuacugauuuccaaggagucaugguccuacauuguagaaaaaccaaauccugagaauggaacauguuacccagggcauuucgcugacuaugaggaacugagggagcaauugaguucaguaucuucauuugagagguucgaaauauuccccaaagaaagcucauggcccaaccacaccguaaccggagugucagcaucaugcucccauaauggggaaagcaguuuuuacagaaauuugcuauggcugacggugaagaauggcuuguacccaaacuugagcaaguccuaugcaaacaacaaagaaaaagaaguccuuguacuaugggguguucaucacccgccaaacauaguugaccaaaagacccucuaucguacagaaaaugcuuauguuucuguagugucuucacauuauagcagaaaauucaccccagaaauagccaaaagacccaaaguaagagaucaagaaggaagaaucaacuacuacuggacucugcuugaacccggggauacaauaauauuugaggcaaauggaaaucuaauagcgccaagauaugcuuucgcacugaguagaggcuuuggaucaggaaucaucaacucaaaugcaccaauggauaaaugugaugcgaagugccaaacaccucggggagcuauaaacagcagucuuccuuuccagaacguacacccagucacaauaggagaguguccaaaguaugucaggagugcaaaauuaaggaugguuacaggacuaaggaacaucccauccauucaauccagagguuuguuuggagccauugccgguuucauugaagggggguggacuggaaugguagaugguugguaugguuaucaucaucagaaugagcaaggaucuggcuaugcugcagaucaaaaaagcacacaaaaugccauuaaugggauuacaaacaaggugaauucuguaauugagaaaaugaacacucaauucacagcagugggcaaagaauucaacaaauuggaaagaaggauggaaaacuugaauaaaaaaguugaugauggguuuauagacauuuggacauauaaugcagaacuguugguucuacuggaaaaugaaaggacuuuggauuuccaugacuccaaugugaagaaucuguaugagaaaguaaaaagccaguuaaagaauaaugcuaaagaaauaggaaauggguguuuugaauucuaucacaaguguaacgaugaaugcauggagaguguaaagaauggaaccuaugacuauccaaaauauuccgaagaaucaaaguuaaacagggagaaaauugauggagugaaauuggaaucaaugggagucuaucagauucuggcgaucuacucaacagucgccaguucucugguucuuuuggucucccugggggcaaucagcuucuggauguguuccaaugggucuuugcaguguagaauaugcaucuaa

SEQ ID NO: 35629 - RNA, 1698 nt, Artificial Sequence
  derived and/or modified CDS sequence (wt) from hemagglutinin__InfluenzaA__ACZ05590
augaaaguaaaacuacugguccuguuaugcacauuuacagcuacauaugcagacacaauauguauaggcuaccaugcuaacaacucgaccgacacuguugacacaguacuugaaaagaaugugacagugacacacucugucaaccugcuugagaacagucacaauggaaaacuaugucuauuaaaaggaauagccccacuacaauuggguaacugcagcguugccggguggaucuuaggaaacccagaaugcgaauuacugauuuccaaggagucaugguccuacauuguagaaaaaccaaauccugagaauggaacauguuacccagggcauuucgcugacuaugaggaacugagggagcaauugaguucaguaucuucguuugagagguucgaaauauuccccaaagaaagcucauggcccaaccacaccguaaccggagugucagcaucaugcucccauaauggggaaagcaguuuuuacagaaauuugcuauggcugacggggaagaaugguuuguacccaaaccugagcaaguccuaugcaaacaacaaagaaaaagaaguccuuguacuaugggguguucaucacccgccaagcauaagugaccaaaagacccucuaucauacagaagaugcuuauguuucuguagugucuucacauuauagcagaaaauucaccccagaaauagccaaaagacccaaaguaagagaucaagaaggaagaaucaacuacuacuggacucugcuugaacccggggauacaauaauauuugaggcaaauggaaaucuaauagcgccaagauaugcuuucgcacugaguagaggcuuuggaucaggaaucaucaacucaaaugcaccaauggguaaaugugaugcgaagugccaaacuccucagggagcuauaaacagcagucuuccuuuucagaacguacacccagucacaauaggagaguguccaaaguaugucaggagugcaaaauuaaggaugguuacaggacuaaggaacaucccauccauucaauccagagguuuguuuggagccauugccgguuucauugaagggggguggacuggaaugguagaugguugguaugguuaucaucaucagaaugagcaaggaucuggcuaugcugcagaucaaaaaagcacacaaaaugccauuaaugggauuacaaacaaggugaauucuguaauugagaaaaugaacacucaauucacagcagugggcaaagaauucaacaaauuggaaagaaggauggaaaacuugaauaaaaaaguugaugauggguuuauagacauuuggacauauaaugcagaacuguugguucuacuggaaaaugaaaggacuuuggauuuccaugacuccaaugugaagaaucuguaugagaaaguaaaaagccaguuaaagaauaaugcuaaagaaauaggaaauggguguuuugaauucuaucacaaguguaacgaugaaugcauggagaguguaaagaauggaacuuaugacuauccaaaauauuccgaagaaucaaaguuaaacagggagaaaauugauggagugaaauuggaaucaaugggagucuaucagauucuggcgaucuacucaacagucgccaguucucugguucuuuuggucucccugggggcaaucagcuucuggauguguuccaaugggucuuugcaguguagaauaugcaucuaa

SEQ ID NO: 35630 - RNA, 1701 nt, Artificial Sequence; identical to SEQ ID NO: 35625
  derived and/or modified CDS sequence (wt) from hemagglutinin__InfluenzaA__ACZ05950

SEQ ID NO: 35631 - RNA, 1701 nt, Artificial Sequence; identical to SEQ ID NO: 35602
  derived and/or modified CDS sequence (wt) from hemagglutinin__InfluenzaA__ACZ05961

SEQ ID NO: 35632 - RNA, 1701 nt, Artificial Sequence
  derived and/or modified CDS sequence (wt) from hemagglutinin__InfluenzaA__ACZ05972
augaagacuaucauugcuuugagcuacauucuaugucugguuuucgcucaaaaacuuccuggaaaugacaacagcacggcaacgcugugccuugggcaccaugcaguaccaaacggaacgauagugaaaacaaucacgaaugaccaaauugaaguuacuaaugcuacugagcugguucagaguuccucaacaggugaaauaugcgacaguccucaucagauccuugauggaaaaaacugcacacuaauagaugcucuauugggagacccucagugugauggcuuccaaaauaagaaaugggaccuuuuuguugaacgcagcaaagccuacagcaacuguuacccuuaugaugugccggauuaugccucccuuaggucacuaguugccucauccggcacacuggaguuuaacaaugaaagcuucaauuggacuggagucacucaaaacggaacaagcucugcuugcauaaggagaucuaaaaacaguuucuuuaguagauugaauugguugacccacuuaaacuucaaauacccagcauugaacgugacuaugccaaacaaugaacaauuugacaaauuguacauuugggggguucaccacccggguacggacaaagaccaaaucuuccuguaugcucaagcaucaggaagaaucacagucucuaccaaaagaagccaacaaacugcaaucccgaauaucggaucuagacccagaguaaggaauaucccuagcagaauaagcaucuauuggacaauaguaaaaccgggagacauacuuuugauuaacagcacagggaaucuaauugcuccuagggguuacuucaaaauacgaagugggaaaagcucaauaaugagaucagaugcacccauuggcaaaugcaauucugaaugcaucacuccaaauggaagcauucccaaugacaaaccauuccaaaauguaaacaggaucacauacggggccugucccagauauguuaagcaaaacacucugaaauuggcaacagggaugcgaaauguaccagagaaacaaacuagaggcauauuuggcgcaaucgcggguuucauagaaaaugguugggagggaaugguggaugguugguacgguuucaggcaucaaaauucugagggaagaggacaagcagcagaucucaaaagcacucaagcagcaaucgaucaaaucaaugggaagcugaauagauugaucgggaaaaccaacgagaaauuccaucagauugaaaaagaauucucagaagucgaagggagaauucaggaccuugagaaauauguugaggacacuaaaauagaucucuggucauacaacgcggagcuucuuguugcccuggagaaccaacauacaauugaucuaacugacucagaaaugaacaaacuguuugaaaaaacaaagaagcaacugagggaaaaugcugaggauaugggcaaugguuguuucaaaauauaccacaaaugugacaaugccugcauaggaucaaucagaaauggaacuuaugaccacgauguauacagagaugaagcauuaaacaaccgguuucagaucaagggaguugagcugaagucaggguacaaagauuggauccuauggauuuccuuugccauaucauguucuuugcuuuguguugcuuuguugggguucaucaugugggccugccaaaaaggcaacauuaggugcaacauuugcauuuga

SEQ ID NO: 35633 - RNA, 1701 nt, Artificial Sequence
  derived and/or modified CDS sequence (wt) from hemagglutinin__InfluenzaA__ACZ05983
augaagacuaucauugcuuugagcuacauucuaugucugguuuucgcucaaaaacuuccuggaaaugacaacagcacggcaacgcugugccuugggcaccaugcaguaccaaacggaacgauagugaaaacaaucacgaaugaccaaauugaaguuacuaaugcuacugagcugguucagaguuccucaacaggugaaauaugcgacaguccucaucagauccuugauggaaaaaacugcacacuaauagaugcucuauugggagacccucagugugauggcuuccaaaauaagaaaugggaccuuuuuguugaacgcagcaaagccuacagcaacuguuacccuuaugaugugccggauuaugccucccuuaggucacuaguugccucauccggcacacuggaguuuaacaaugaaagcuucaauuggacuggagucacucaaaacggaacaagcucugcuugcauaaggagaucuaaaaacaguuucuuuaguagauugaauugguugacccacuuaaacuucaaauacccagcauugaacgugacuaugccaaacaaugaacaauuugacaaauuguacauuugggggguucaccacccggguacggacaaagaccaaaucuuccuguaugcucaagcaucaggaagaaucacagucucuaccaaaagaagccaacaaacugcaaucccgaauaucggaucuagacccagaguaaggaauaucccuagcagaauaagcaucuauuggacaauaguaaaaccgggagacauacuuuugauuaacagcacagggaaucuaauugcuccuagggguuacuucaaaauacgaagugggaaaagcucaauaaugagaucagaugcacccauuggcaaaugcaauucugaaugcaucacuccaaauggaagcauucccaaugacaaaccauuccaaaauguaaacaggaacacauacggggccugucccagauauguuaagcaaaacacucugaaauuggcaacagggaugcgaaauguaccagagaaacaaacuagaggcauauuuggcgcaaucgcggguuucauagaaaaugguugggagggaaugguggaugguugguacgguuucaggcaucaaaauucugagggaagaggacaagcagcagaucucaaaagcacucaagcagcaaucgaucaaaucaaugggaagcugaauagauugaucgggaaaaccaacgagaaauuccaucagauugaaaaagaauucucagaagucgaagggagaauucaggaccuugagaaauauguugaggacacuaaaauagaucucuggucauacaacgcggagcuucuuguugcccuggagaaccaacauacaauugaucuaacugacucagaaaugaacaaacuguuugaaaaaacaaagaagcaacugagggaaaaugcugaggauaugggcaaugguuguuucaaaauauaccacaaaugugacaaugccugcauaggaucaaucagaaauggaacuuaugaccacgauguauacagagaugaagcauuaaacaaccgguuucagaucaagggaguugagcugaagucaggguacaaagauuggauccuauggauuuccuuugccauaucauguuuuuugcuuuguguugcuuuguugggguucaucaugugggccugccaaaaaggcaacauuaggugcaacauuugcauuuga

SEQ ID NO: 35634 - RNA, 1701 nt, Artificial Sequence
  derived and/or modified CDS sequence (wt) from hemagglutinin__InfluenzaA__ACZ05994
augaagacuaucauugcuuugagcuacauucuaugucugguuuucgcucaaaaacuuccuggaaaugacaacagcacggcaacgcugugccuugggcaccaugcaguaccaaacggaacgauagugaaaacaaucacgaaugaccaaauugaaguuacuaaugcuacugagcugguucagaguuccucaacaggugaaauaugcgacaguccucaucagauccuugauggaaaaaacugcacacuaauagaugcucuauugggagacccucagugugauggcuuccaaaauaagaaaugggaccuuuuuguugaacgcagcaaagccuacagcaacuguuacccuuaugaugugccggauuaugccucccuuaggucacuaguugccucauccggcacacuggaguuuaacaaugaaagcuucaauuggacuggagucacucaaaacggaacaagcucugcuugcauaaggagaucuaaaaacaguuucuuuaguagauugaauugguugacccacuuaaacuucaaauacccagcauugaacgugacugugccaaacaaugaacaauuugacaaauuguacauuugggggguucaccacccggguacggacaaagaccaaaucuuccuguaugcucaagcaucaggaagaaucacagucucuaccaaaagaagccaacaaacugcaaucccgaauaucggaucuagacccagaguaaggaauaucccuagcagaauaagcaucuauuggacaauaguaaaaccgggagacauacuuuugauuaacagcacagggaaucuaauugcuccuagggguuacuucaaaauacgaagugggaaaagcucaauaaugagaucagaugcacccauuggcaaaugcaauucugaaugcaucacuccaaauggaagcauucccaaugacaaaccauuccaaaauguaaacaggaucacauacggggccugucccagauauguuaagcaaaacacucugaaauuggcaacagggaugcgaaauguaccagagaaacaaacuagaggcauauuuggcgcaaucgcgggcuucauagaaaaugguugggagggaaugguggaugguugguacgguuucaggcaucaaaauucugagggaagaggacaagcagcagaucucaaaagcacucaagcagcaaucgaucaaaucaaugggaagcugaauagauugaucgggaaaaccaacgagaaauuccaucagauugaaaaagaauucucagaagucgaagggagaauucaggaccuugagaaauauguugaggacacuaaaauagaucucuggucauacaacgcggagcuucuuguugcccuggagaaccaacauacaauugaucuaacugacucagaaaugaacaaacuguuugaaaaaacaaagaagcaacugagggaaaaugcugaggauaugggcaaugguuguuucaaaauauaccacaaaugugacaaugccugcauaggaucaaucagaaauggaacuuaugaccacgauguauacagagaugaagcauuaaacaaccgguuucagaucaagggaguugagcugaagucaggguacaaagauuggauccuauggauuuccuuugccauaucauguuuuuugcuuuguguugcuuuguugggguucaucaugugggccugccaaaaaggcaacauuaggugcaacauuugcauuuga

SEQ ID NO: 35635 - RNA, 1701 nt, Artificial Sequence; identical to SEQ ID NO: 35602
  derived and/or modified CDS sequence (wt) from hemagglutinin__InfluenzaA__ACZ06005

SEQ ID NO: 35636 - RNA, 1701 nt, Artificial Sequence; identical to SEQ ID NO: 35602
  derived and/or modified CDS sequence (wt) from hemagglutinin__InfluenzaA__ACZ06016

SEQ ID NO: 35637 - RNA, 1698 nt, Artificial Sequence
  derived and/or modified CDS sequence (wt) from hemagglutinin__InfluenzaA__ACZ16013
augaaaguaaaacuacugguccuguuaugcacauuuacagcuacauaugcagacacaauauguauaggcuaccaugcuaacaacucgaccgacacuguugacacaguacuugaaaagaaugugacagugacacacucugucaaccugcuugagaacagucacaauggaaaacuauguuuauuaaaaggaauagccccacuacaauuggguaacugcagcguugccggguggaucuuaggaaacccagaaugcgaauugcugauuuccaaggagucaugguccuacauuguagaaaaaccaaauccugagaauggaacauguuacccagggcauuucgcugacuaugaggaacugagggagcaauugaguucaguaucuucauuugagagguucgaaauauuccccaaagaaagcucauggcccaaccacaccguaaccggagugucagcaucaugcucccauaauggggaaaacaguuuuuacagaaauuugcuauggcugacggggaagaaugguuuguacccaaaccugagcaaguccuaugcaaacaacaaagaaaaagaaguccuuguacuaugggguguucaucacccgccaaacauagcugaccaaaagacccucuaucauacagaaaaagcuuauguuucuguagugucuucacauuauagcagaaaauucaccccagaaauagccaaaagacccaaaguaagagaucaagaaggaagaaucaacuacuacuggacucugcuugaacccggggauacaauaauauuugaggcaaauggaaaucuaauagcgccaagauaugcuuucgcacugaguagaggcuuuggaucaggaaucaucaacucaaaugcaccaauggauaaaugugaugcgaaaugccaaacaccucaaggagcuauaaacagcagucuuccuuuccagaacguacacccagucacaauaggagaguguccaaaguaugucaggagugcaaaauuaaggaugguuacaggacuaaggaacaucccauccauucaauccagagguuuguuuggagccauugccgguuucauugaagggggguggacuggaaugguagaugguugguaugguuaucaucaucagaaugagcaaggaucuggcuaugcugcagaucaaaaaagcacacaaaaugccauuaaugggauuacaaacaaggugaauucuguaauugagaaaaugaacacucaauucacagcaguaggcaaagaauucaacaaauuggaaagaaggauggaaaacuugaauaagaaaguugaugauggguuuauagacauuuggacauauaaugcagaacuguugguucuacuggaaaaugaaaggacuuuggauuuccaugacuccaaugugaagaaucuguaugagaaaguaaaaagccaguugaagaauaaugcuaaagaaauaggaaauggguguuuugaauucuaucacaaguguaacgaugaaugcauggagaguguaaagaauggaacuuaugacuauccaaaauauuccgaagaaucaaaguuaaacagggagaaaauugauggagugaaauuggaaucaaugggagucuaucagauucuggcgaucuacucaacagucgccaguucucugguucuuuuggucucccugggggcaaucagcuucuggauguguuccaaugggucuuugcaguguagaauaugcaucuaa

SEQ ID NO: 35638 - RNA, 1698 nt, Artificial Sequence
  derived and/or modified CDS sequence (wt) from hemagglutinin__InfluenzaA__ACZ16023
augaaaguaaaacuacugguccuguuaugcacauuuacagcuacauaugcagacacaauauguauaggcuaccaugcuaacaacucgaccgacacuguugacacaguacuugaaaagaaugugacagugacacacucugucaaccugcuugagaacagucacaauggaaaacuaugucuauuaaaaggaauagccccacuacaauuggguaacugcagcguugccggguggaucuuaggaaacccagaaugcgaauuacugauuuccaaggagucaugguccuacauuguagaaaaaccaaauccugagaauggaacauguuacccagggcauuucgcugacuaugaggaacugagggagcaauugaguucaguaucuucauuugagagguucgaaauauuccccaaagaaagcucauggcccaaccacaccguaaccggagugucagcaucaugcucccauaauggggaaaacaguuuuuacagaaauuugcuauggcugacggggaagaaugguuuguacccaaaccugagcaaguccuaugcaaacaacaaagaaaaagaaguccuuguacuaugggguguucaucacccgccaaacauagcugaccaaaagacccucuaucauacagaaaaugcuuauguuucuguagugucuucacauuauagcagaaaauucaccccagaaauagccaaaagacccaaaguaagagaucaagaaggaagaaucaacuacuacuggacucugcuugaacccggggauacaauaauauuugaggcaaauggaaaucuaauagcaccaagauaugcuuucgcacugaguagaggcuuuggaucaggaaucaucaacucaaaugcaccaauggauaaaugugaugcgaagugccaaacaccucaaggagcuauaaacagcagucuuccuuuccagaacguacacccagucacaauaggagaguguccaaaguaugucaggagugcaaaacuaaggaugguuacaggacuaaggaacaucccauccauucaauccagagguuuguuuggagccauugccgguuucauugaagggggguggacuggaaugguagaugguugguaugguuaucaucaucagaaugagcaaggaucuggcuaugcugcagaucaaaaaagcacacaaaaugccauuaaugggauuacaaacaaggugaauucuguaauugagaaaaugaacacucaauucacagcaguaggcaaagaauucaacaaauuggaaagaaggauggaaaacuugaauaaaaaaguugaugauggguuuauagacauuuggacauauaaugcagaacuguugguucuacuggaaaaugaaaggacuuuggauuuccaugacuccaaugugaagaaucuguaugagaaaguaaaaagccaguuaaagaauaaugcuaaagaaauaggaaauggguguuuugaguucuaucacaaguguaacgaugaaugcauggagaguguaaagaauggaacuuaugacuauccaaaauauuccgaagaaucaaaguuaaacagggagaaaauugauggagugaaauuggaaucaaugggagucuaucagauucuggcgaucuacucaacagucgccaguucucugguucuuuuggucucccugggggcaaucagcuucuggauguguuccaaugggucuuugcaguguagaauaugcaucuaa

SEQ ID NO: 35639 - RNA, 1698 nt, Artificial Sequence
  derived and/or modified CDS sequence (wt) from hemagglutinin__InfluenzaA__ACZ16033
augaaaguaaaacuacugguccuguuaugcacauuuacagcuacauaugcagacacaauauguauaggcuaccaugcuaacaacucgaccgacacuguugacacaguacuugaaaagaaugugacagugacacacucugucaaccugcuugagaacagucacaauggaaaacuaugucuauuaaaaggaauagccccacuacaauuggguaacugcagcguugccggguggaucuuaggaaacccagaaugcgaauuacugauuuccaaggagucaugguccuacauuguagaaaaaccaaauccugagaauggaacauguuacccagggcauuucgcugacuaugaggaacugagggagcaauugaguucaguaucuucauuugagagguucgaaauauuccccaaggaaagcucauggcccaaccacaccguaaccggagcgucagcaucaugcucccauaauggggaaaacaguuuuuacagaaauuugcuauggcugacggggaagaaugguuuguacccaaaccugagcaaguccuaugcaaacaacaaagaaaaagaaguccuuguacuaugggguguucaucacccgccaaacauagcugaccaaaagacccucuaucauacagaaaaugcuuauguuucuguagugucuucacauuauagcagaaaauucaccccagaaauagccaaaagacccaaaguaagagaucaagaaggaagaaucaacuacuacuggacucugcuugaacccggggauacaauaauauuugaggcaaauggaaaucuaauagcgccaagauaugcuuucgcacugaguaggggcuuuggaucaggaaucaucaacucaaaugcaccaauggauaaaugugaugcgaagugccaaacaccucaaggagcuauaaacagcagucuuccuuuccagaacauacacccagucacaauaggagaauguccaaaguaugucaggagugcaaaauuaaggaugguuacaggacuaaggaacaucccauccauucaauccagagguuuguuuggagccauugccgguuucauugaagggggguggacuggaaugguagaugguugguaugguuaucaucaucagaaugagcaaggaucuggcuaugcugcagaucaaaaaagcacacaaaaugccauuaaugggauuacaaacaaggugaauucuguaauugagaaaaugaacacucaauucacagcagugggcaaagaauucaacaaauuggaaagaaggauggaaaacuugaauaaaaaaguugaugauggguuuauagacauuuggacauauaaugcagaacuguugguucuacuggaaaaugaaaggacuuuggauuuccaugacuccaaugugaagaaucuguaugagaaaguaaaaagccaguuaaagaauaaugcuaaagaaauaggaaauggguguuuugaauucuaucacaaguguaacgaugaaugcauggagaguguaaagaauggaacuuaugacuauccaaaauauuccgaagaaucaaaguuaaacaaggagaaaauugauggagugaaauuggaaucaaugggagucuaucagauucuggcgaucuacucaacagucgcaaguucucugguucuuuuggucucccugggggcaaucagcuucuggauguguuccaaugggucuuugcaguguagaauaugcaucuaa

SEQ ID NO: 35640 - RNA, 1701 nt, Artificial Sequence; identical to SEQ ID NO: 34705
  derived and/or modified CDS sequence (wt) from hemagglutinin__InfluenzaA__ACZ16040

SEQ ID NO: 35641 - RNA, 1701 nt, Artificial Sequence
  derived and/or modified CDS sequence (wt) from hemagglutinin__InfluenzaA__ACZ16050
augaaggcaauacuaguaguucugcuauauacauuugcaaccgcaaaugcagacacauuauguauagguuaucaugcgaacaauucaacagacacuguagacacaguacuagaaaagaauguaacaguaacacacucuguuaaccuucuagaagacaagcauaacgggaaacuaugcaaacuaagagggguagccccauugcauuuggguaaauguaacauugcuggcuggauccugggaaauccagagugugaaucacucuccacagcaagcucaugguccuacauuguggaaacaucuaguucagacaauggaacguguuacccaggagauuucaucgauuaugaggagcuaagagagcaauugagcucagugucaucauuugaaagguuugagauauuccccaagacaaguucauggcccaaucaugacucgaacaaagguguaacggcagcauguccucaugcuggagcaaaaagcuucuacaaaaauuuaauauggcuaguuaaaaaaggaaauucauacccaaagcucagcaaauccuacauuaaugauaaagggaaagaaguccucgugcuauggggcauucaccauccaucuacuagugcugaccaacaaagucucuaucagaaugcagaugcauauguuuuuguggggucaucaagauacagcaagaaguucaagccggaaauagcaauaagacccaaagugagggaucaagaagggagaaugaacuauuacuggacacuaguagagccgggagacaaaauaacauucgaagcaacuggaaaucuagugguaccgagauaugcauucgcaauggaaagaaaugcuggaucugguauuaucauuucagauacaccaguccacgauugcaauacaacuugucagacacccaagggugcuauaaacaccagccucccauuucagaauauacauccgaucacaauuggaaaauguccaaaauauguaaaaagcacaaaauugagacuggccacaggauugaggaaugucccgucuauucaaucuagaggccuauuuggggccauugccgguuucauugaagggggguggacagggaugguagauggaugguacgguuaucaccaucaaaaugagcaggggucaggauaugcagccgaccugaagagcacacagaaugccauugacgagauuacuaauaaaguaaauucuguuauugaaaagaugaauacacaguucacagcaguagguaaagaguucaaccaccuggaaaaaagaauagagaauuuaaauaaaaaaguugaugaugguuuccuggacauuuggacuuacaaugccgaacuguugguucuauuggaaaaugaaagaacuuuggacuaccacgauucaaaugugaagaacuuauaugaaaagguaagaagccagcuaaaaaacaaugccaaggaaauuggaaacggcugcuuugaauuuuaccacaaaugcgauaacacgugcauggaaagugucaaaaaugggacuuaugacuacccaaaauacucagaggaagcaaaauuaaacagagaagaaauagaugggguaaagcuggaaucaacaaggauuuaccagauuuuggcgaucuauucaacugucgccaguucauugguacugguagucucccugggggcaaucaguuucuggaugugcucuaaugggucucuacaguguagaauauguauuuaa

SEQ ID NO: 35642 - RNA, 1701 nt, Artificial Sequence; identical to SEQ ID NO: 34705
  derived and/or modified CDS sequence (wt) from hemagglutinin__InfluenzaA__ACZ16060

SEQ ID NO: 35643 - RNA, 1701 nt, Artificial Sequence
  derived and/or modified CDS sequence (wt) from hemagglutinin__InfluenzaA__ACZ16070
augaaggcaauacuaguaguucugcuauauacauuugcaaccgcaaaugcagacacauuauguauagguuaucaugcgaacaauucaacagacacuguagacacaguacuagaaaagaauguaacaguaacacacucuguuagccuucuagaagacaagcauaacgggaaacuaugcaaacuaagagggguagccccauugcauuuggguaaauguaacauugcuggcuggauccugggaaauccagagugugaaucacucuccacagcaagcucaugguccuacauuguggaaacaucuaguucagacaauggaacguguuacccaggagauuucaucgauuaugaggagcuaagagagcaauugagcucagugucaucauuugaaagguuugagauauuccccaagacaaguucauggcccaaucaugacucgaacaaagguguaacggcagcauguccucaugcuggagcaaaaagcuucuacaaaaauuuaauauggcuaguuaaaaaaggaaauucauacccaaagcucagcaaauccuacauuaaugauaaagggaaagaaguccucgugcuauggggcauucaccauccaucuacuagugcugaccaacaaagucucuaucagaaugcagaugcauauguuuuuguggggucaucaagauacagcaagaaguucaagccggaaauagcaauaagacccaaagugagggaucaagaagggagaaugaacuauuacuggacacuaguagagccgggagacaaaauaacguucgaagcaacuggaaaucuagugguaccgagauaugcauucgcaauggaaagaaaugcuggaucugguauuaucauuucagauacaccaguccacgauugcaauacaacuugucagacacccaagggugcuauaaacaccagccucccauuucagaauauacauccgaucacaauuggaaaauguccaaaauauguaaaaagcacaaaauugagacuggccacaggauugaggaaugucccgucuauucaaucuagaggccuauuuggggccauugccgguuucauugaagggggguggacagggaugguagauggaugguacgguuaucaccaucaaaaugagcaggggucaggauaugcagccgaccugaagagcacacagaaugccauugacgagauuacuaacaaaguaaauucuguuauugaaaagaugaauacacaguucacagcaguagguaaagaguucaaccaccuggaaaaaagaauagagaauuuaaauaaaaaaguugaugaugguuuccuggacauuuggacuuacaaugccgaacuguugguucuauuggaaaaugaaagaacuuuggacuaccacgauucaaaugugaagaacuuauaugaaaagguaagaagccagcuaaaaaacaaugccaaggaaauuggaaacggcugcuuugaauuuuaccacaaaugcgauaacacgugcauggaaagugucaaaaaugggacuuaugacuacccaaaauacucagaggaagcaaaauuaaacagagaagaaauagaugggguaaagcuggaaucaacaaggauuuaccagauuuuggcgaucuauucaacugucgccaguucauugguacugguagucucccugggggcaaucaguuucuggaugugcucuaaugggucucuacaguguagaauauguauuuaa

SEQ ID NO: 35644 - RNA, 1701 nt, Artificial Sequence
  derived and/or modified CDS sequence (wt) from hemagglutinin__InfluenzaA__ACZ16080
augaaggcaauacuaguaguucugcuauauacauuugcaaccgcaaaugcagacacauuauguauagguuaucaugcgaacaauucaacagacacuguagacacaguacuagaaaagaauguaacaguaacacacucuguuaaccuucuagaagacaagcauaacgggaaacuaugcaaacuaagagggguagccccauugcauuuggguaaauguaacauugcuggcuggauccugggaaauccagagugugaaucacucuccacagcaagcucaugguccuacauuguggaaacaucuaguucagacaauggaacguguuacccaggagauuucaucgauuaugaggagcuaagagagcaauugagcucagugucaucauuugaaagguuugagauauuccccaagacaaguucauggcccaaucaugacucgaacaaagguguaacggcagcauguccucaugcuggagcaaaaagcuucuacaaaaauuuaauauggcuaguuaaaaaaggaaauucauacccaaagcucagcaaauccuacauuaaugauaaagggaaagaaguccucgugcuauggggcauucaccauccaucuacuagugcugaccaacaaagucucuaucagaaugcagaugcauauguuuuuguggggucaucaagauacagcaagaaguucaagccggaaauagcaauaagacccaaagugagggaucaagaagggagaaugaacuauuacuggacacuaguagagccgggagacaaaauaacauucgaagcaacuggaaaucuagugguaccgagauaugcauucgcaauggaaagaaaugauggaucugguauuaucauuucagauacaccaguccacgauugcaauacaacuugucagacacccaagggugcuauaaacaccagccucccauuucagaauauacauccgaucacaauuggaaaauguccaaaauauguaaaaagcacaaaauugagacuggccacaggauugaggaaugucccgucuauucaaucuagaggccuauuuggggccauugccgguuucauugaagggggguggacagggaugguagauggaugguacgguuaucaccaucaaaaugagcaggggucaggauaugcagccgaccugaagagcacacagaaugccauugacgagauuacuaacaaaguaaauucuguuauugaaaagaugaauacacaguucacagcaguagguaaagaguucaaccaccuggaaaaaagaauagagaauuuaaauaaaaaaguugaugaugguuuccuggacauuuggacuuacaaugccgaacuguugguucuauuggaaaaugaaagaacuuuggacuaccacgauucaaaugugaagaacuuauaugaaaagguaagaagccagcuaaaaaacaaugccaaggaaauuggaaacggcugcuuugaauuuuaccacaaaugcgauaacacgugcauggaaagugucaaaaaugggacuuaugacuacccaaaauacucagaggaagcaaaauuaaacagagaagaaauagaugggguaaagcuggaaucaacaaggauuuaccagauuuuggcgaucuauucaacugucgccaguucauugguacugguagucucccugggggcaaucaguuucuggaugugcucuaaugggucucuacaguguagaauauguauuuaa

SEQ ID NO: 35645 - RNA, 1701 nt, Artificial Sequence
  derived and/or modified CDS sequence (wt) from hemagglutinin__InfluenzaA__ACZ16090
augaaggcaauacuauuaguucugcuauauacauuugcaaccgcaaaugcagacacauuauguauagguuaucaugcgaacaauucaacagacacuguagacacaguacuagaaaagaauguaacaguaacacacucuguuaaccuucuagaagacaagcauaacgggaaacuaugcaaacuaagagggguagccccauugcauuuggguaaauguaacauugcuggcuggauccugggaaauccagagugugaaucacucuccacagcaagcucaugguccuacauuguggaaacaucuaguucagacaauggaacguguuacccaggagauuucaucgauuaugaggagcuaagagagcaauugagcucaaugucaucauuugaaagguuugagauauuccccaagacaaguucauggcccaaucaugacucgaacaaagguguaacggcagcauguccucaugcuggagcaaaaagcuucuacaaaaauuuaauauggcuaguuaaaaaaggaaauucauacccaaagcucagcaaauccuacauuaaugauaaagggaaagaaguccucgugcuauggggcauucaccauccaucuacuagugcugaccaacaaagucucuaucagaaugcagaugcauauguuuuuguggggucaucaagauacagcaagaaguucaagccggaaauagcaauaagacccaaagugagggaucaagaagggagaaugaacuauuacuggacacuaguagagccgggagacaaaauaacauucgaagcaacuggaaaucuagugguaccgagauaugcauucgcaauggaaagaaaugcuggaucugguauuaucauuucagauacaccaguccacgauugcaauacaacuugucagacacccaagggugcuauaaacaccagccucccauuucagaauauacauccgaucacaauuggaaaauguccaaaauauguaaaaagcacaaaauugagacuggccacaggauugaggaaugucccgucuauucaaucuagaggccuauuuggggccauugccgguuucauugaagggggguggacagggaugguagauggaugguacgguuaucaccaucaaaaugagcaggggucaggauaugcagccgaccugaagagcacacagaaugccauugacgagauuacuaacaaaguaaauucuguuauugaaaagaugaauacacaguucacagcaguagguaaagaguucaaccaccuggaaaaaagaauagagaauuuaaauaaaaaaguugaugaugguuuccuggacauuuggacuuacaaugccgaacuguugguucuauuggaaaaugaaagaacuuuggauuaccacgauucaaaugugaagaacuuauaugaaaagguaagaagccagcuaaaaaacaaugccaaggaaauuggaaacggcugcuuugaauuuuaccacaaaugcgauaacacgugcauggaaagugucaaaaaugggacuuaugacuacccaaaauacucagaggaagcaaaauuaaacagagaagaaauagaugggguaaagcuggaaucaacaaggauuuaccagauuuuggcgaucuauucaacugucgccaguucauugguacugguagucucccugggggcaaucaguuucuggaugugcucuaaugggucucuacaguguagaauauguauuuaa

SEQ ID NO: 35646 - RNA, 1701 nt, Artificial Sequence; identical to SEQ ID NO: 34705
  derived and/or modified CDS sequence (wt) from hemagglutinin__InfluenzaA__ACZ16100

SEQ ID NO: 35647 - RNA, 1701 nt, Artificial Sequence
  derived and/or modified CDS sequence (wt) from hemagglutinin__InfluenzaA__ACZ16110
augaaggcaauacuaguaguucugcuauauacauuugcaaccgcaaaugcagacacauuauguauagguuaucaugcgaacaauucaacagacacuguagacacaguacuagaaaagaauguaacaguaacacacucuguuaaccuucuagaagacaagcauaacgggaaacuaugcaaacuaagagggguagccccauugcauuuggguaaauguaacauugcuggcuggauccugggaaauccagagugugaaucacucuccacagcaagcucaugguccuacauuguggaaacaucuaguucagacaauggaacguguuacccaggagauuucaucgauuaugaggagcuaagagagcaauugagcucagugucaucauuugaaagguuugagauauuccccaagacaaguucauggcccaaucaugacucgaacaaagguguaacggcagcauguccucaugcuggagcaaaaagcuucuacaaaaauuuaauauggcuaguuaaaaaaggaaauucauacccaaagcucagcaaauccuacauuaaugauaaagggaaagaaguccucgugcuauggggcauucaccauccaucuacuagugcugaucaacaaagucucuaucagaaugcagaugcauauguuuuuguggggucaucaagauacagcaagaaguucaagccggaaauagcaauaagacccaaagugagggaucaagaagggagaaugaacuauuacuggacacuaguagagccgggagacaaaauaacauucgaagcaacuggaaaucuagugguaccgagauaugcauucgcaauggaaagaaaugcuggaucugguauuaucauuucagauacaccaguccacgauugcaauacaacuugucagacacccaagggugcuauaaacaccagccucccauuucagaauauacauccgaucacaauuggaaaauguccaaaauauguaaaaagcacaaaauugagacuggccacaggauugaggaaugucccgucuauucaaucuagaggccuauuuggggccauugccgguuucauugaagggggguggacagggaugguagauggaugguacgguuaucaccaucaaaaugagcaggggucaggauaugcagccgaccugaagagcacacagaaugccauugacgagauuacuaacaaaguaaauucuguuauugaaaagaugaauacacaguucacagcaguagguaaagaguucaaccaccuggaaaaaagaauagagaauuuaaauaaaaaaguugaugaugguuuccuggacauuuggacuuacaaugccgaacuguugguucuauuggaaaaugaaagaacuuuggacuaccacgauucaaaugugaagaacuuauaugaaaagguaagaagccaguuaaaaaacaaugccaaggaaauuggaaacggcugcuuugaauuuuaccacaaaugcgauaacacgugcauggaaagugucaaaaaugggacuuaugacuacccaaaauacucagaggaagcaaaauuaaacagagaagaaauagaugggguaaagcuggaaucaacaaggauuuaccagauuuuggcgaucuauucaacugucgccaguucauugguacugguagucucccugggggcaaucaguuucuggaugugcucuaaugggucucuacaguguagaauauguauuuaa

SEQ ID NO: 35648 - RNA, 1701 nt, Artificial Sequence
  derived and/or modified CDS sequence (wt) from hemagglutinin__InfluenzaA__ACZ16120
augaaggcaauacuaguaguucugcuauauacauuugcaaccgcaaaugcagacacauuauguauagguuaucaugcgaacaauucaacagacacuguagacacaguacuagaaaagaauguaacaguaacacacucuguuaaccuuuuagaagacaagcauaacgggaaacuaugcaaacuaagagggguagccccauugcauuuggguaaauguaacauugcuggcuggauccugggaaauccagagugugaaucacucuccacagcaagcucaugguccuacauuguggaaacaucuaguucagacaauggaacguguuacccaggagauuucaucgauuaugaggagcuaagagagcaauugagcucagugucaucauuugaaagguuugagauauuccccaagacaaguucauggcccaaucaugacucgaacaaagguguaacggcagcauguccucaugcuggagcaaaaagcuucuacaaaaauuuaauauggcuaguuaaaaaaggaaauucauacccaaagcucagcaaauccuacauuaaugauaaagggaaagaaguccucguacuauggggcauucaccauccaucuacuagugcugaccaacaaagucucuaucagaaugcagaugcauauguuuuuguggggucaucaagauacagcaagaaguucaagccggaaauagcaauaagacccaaagugagggaucaagaagggagaaugaacuauuacuggacacuaguagagccgggagacaaaauaacauucgaagcaacuggaaaucuagugguaccaagauaugcauucgcaauggaaagaaaugcuggaucugguauuaucauuucagauacaccaguccacgauugcaauacaacuugucagacacccaagggugcuauaaacaccagccucccauuucagaauauacauccgaucacaauuggaaaauguccaaaauauguaaaaagcacaaaauugagacuggccacaggauugaggaaugucccgucuauucaaucuagaggccuauuuggggccauugccgguuucauugaagggggguggacagggaugguagauggaugguacgguuaucaccaucaaaaugagcaggggucaggauaugcagccgaccugaagagcacacagaaugccauugacgagauuacuaacaaaguaaauucuguuauugaaaagaugaauacacaguucacagcaguagguaaagaguucaaccaccuggaaaaaagaauagagaauuuaaauaaaaaaguugaugaugguuuccuggacauuuggacuuacaaugccgaacuguugguucuauuggaaaaugaaagaacuuuggacuaccacgauucaaaugugaagaacuuauaugaaaagguaagaagccaguuaaaaaacaaugccaaggaaauuggaaacggcugcuuugaauuuuaccacaaaugcgauaacacgugcauggaaagugucaaaaaugggacuuaugacuacccaaaauacucagaggaagcaaaauuaaacagagaagaaauagaugggguaaagcuggaaucaacaaggauuuaccagauuuuggcgaucuauucaacugucgccaguucauugguacugguagucucccugggggcaaucaguuucuggaugugcucuaaugggucucuacaguguagaauauguauuuaa

SEQ ID NO: 35649 - RNA, 1701 nt, Artificial Sequence; identical to SEQ ID NO: 35420
  derived and/or modified CDS sequence (wt) from hemagglutinin__InfluenzaA__ACZ16130

SEQ ID NO: 35650 - RNA, 1701 nt, Artificial Sequence; identical to SEQ ID NO: 34705
  derived and/or modified CDS sequence (wt) from hemagglutinin__InfluenzaA__ACZ16140

SEQ ID NO: 35651 - RNA, 1701 nt, Artificial Sequence
  derived and/or modified CDS sequence (wt) from hemagglutinin__InfluenzaA__ACZ16150
augaaggcaauacuaguaguucugcuauauacauuugcaaccgcaaaugcagacacauuauguauagguuaucaugcgaacaauucaacagacacuguagacacaguacuagaaaagaauguaacaguaacacacucuguuaaccuucuagaagacaagcauaacgggaaacuaugcaaacuaagagggguagccccauugcauuuggguaaauguaacauugcuggcuggauccugggaaauccagagugugaaucacucuccacagcaagcucaugguccuacauuguggaaacaucuaguucagacaauggaacguguuacccaggagauuucaucgauuaugaggagcuaagagagcaauugagcucagugucaucauuugaaagguuugagauauuccccaagacaaguucauggcccaaucaugacucgaacaaagguguaacggcagcauguccucaugcuggagcaaaaagcuucuacaaaaauuuaaucuggcuaguuaaaaaaggaaauucauacccaaagcucagcaaauccuacauuaaugauaaagggaaagaaguccucgugcuauggggcauucaccauccaucuacuagugcugaccaacaaagucucuaucagaaugcagaugcauauguuuuuguggggucaucaagauacagcaagaaguucaagccggaaauagcaauaagacccaaagugagggaucaagaagggagaaugaacuauuacuggacacuaguagagccgggagacaaaauaacauucgaagcaacuggaaaucuagugguaccgagauaugcauucgcaauggaaagaaaugcuggaucugguauuaucauuucagauacaccaguccacgauugcaauacaacuugucagacacccaagggugcuauaaacaccagccucccauuucagaauauacauccgaucacaauuggaaaauguccaaaauauguaaaaagcacaaaauugagacuggccacaggauugaggaaugucccgucuauucaaucuagaggccuauuuggggccauugccgguuucauugaagggggguggacagggaugguagauggaugguacgguuaucaccaucaaaaugagcaggggucaggauaugcagccgaccugaagagcacacagaaugccauugacgagauuacuaacaaaguaaauucuguuauugaaaagaugaauacacaguucacagcaguagguaaagaguucaaccaccuggaaaaaagaauagagaauuuaaauaaaaaaguugaugaugguuuccuggacauuuggacuuacaaugccgaacuguugguucuauuggaaaaugaaagaacuuuggacuaccacgauucaaaugugaagaacuuauaugaaaagguaagaagccaguuaaaaaacaaugccaaggaaauuggaaacggcugcuuugaauuuuaccacaaaugcgauaacacgugcauggaaagugucaaaaaugggacuuaugacuacccaaaauacucagaggaagcaaaauuaaacagagaagaaauagaugggguaaagcuggaaucaacaaggauuuaccagauuuuggcgaucuauucaacugucgccaguucauugguacugguagucucccugggggcaaucaguuucuggaugugcucuaaugggucucuacaguguagaauauguauuuaa

SEQ ID NO: 35652 - RNA, 1701 nt, Artificial Sequence; identical to SEQ ID NO: 34705
  derived and/or modified CDS sequence (wt) from hemagglutinin__InfluenzaA__ACZ16160

SEQ ID NO: 35653 - RNA, 1701 nt, Artificial Sequence
  derived and/or modified CDS sequence (wt) from hemagglutinin__InfluenzaA__ACZ16170
augaaggcaauacuaguaguucugcuauauacauuugcaaccgcaaaugcagacacauuauguauagguuaucaugcgaacaauucaacagacacuguagacacaguacuagaaaagaauguaacaguaacacacucuguuaacauucuagaagacaagcauaacgggaaacuaugcaaacuaagagggguagccccauugcauuuggguaaauguaacauugcuggcuggauccugggaaauccagagugugaaucacucuccacagcaagcucaugguccuacauuguggaaacaucuaguucagacaauggaacguguuacccaggagauuucaucgauuaugaggagcuaagagagcaauugagcucagugucaucauuugaaagguuugagauauuccccaagacaaguucauggcccaaucaugacucgaacaaagguguaacggcagcauguccucaugcuggagcaaaaagcuucuacaaaaauuuaauauggcuaguuaaaaaaggaaauucauacccaaagcucagcaaauccuacauuaaugauaaagggaaagagguccucgugcuauggggcauucaccauccaucuacuagugcugaccaacaaagucucuaucagaaugcagaugcauauguuuuuguggggucaucaagauacagcaagaaguucaagccggaaauagcaauaagacccaaagugagggaucaagaagggagaaugaacuauuacuggacacuaguagagccgggagacaaaauaacauucgaagcaacuggaaaucuagugguaccgagauaugcauucgcaauggaaagaaaugcuggaucugguauuaucauuucagauacaccaguccacgauugcaauacaacuugucagacacccaagggugcuauaaacaccagccucccauuucagaauauacauccgaucacaauuggaaaauguccaaaauauguaaaaagcacaaaauugagacuggccacaggauugaggaaugucccgucuauucaaucuagaggccuauuuggggccauugccgguuucauugaagggggguggacagggaugguagauggaugguacgguuaucaccaucaaaaugagcaggggucaggauaugcagccgaccugaagagcacacagaaugccauugacgagauuacuaacaaaguaaauucuguuauugaaaagaugaauacacaguucacagcaguagguaaagaguucaaccaccuggaaaaaagaauagagaauuuaaauaaaaaaguugaugaugguuuccuggacauuuggacuuacaaugccgaacuguugguucuauuggaaaaugaaagaacuuuggacuaccacgauucaaaugugaagaacuuauaugaaaagguaagaagccagcuaaaaaacaaugccaaggaaauuggaaacggcugcuuugaauuuuaccacaaaugcgauaacacgugcauggaaagugucaaaaaugggacuuaugacuacccaaaauacucagaggaagcaaaauuaaacagagaagaaauagaugggguaaaacuggaaucaacaaggauuuaccagauuuuggcgaucuauucaacugucgccaguucauugguacugguagucucccugggggcaaucaguuucuggaugugcucuaaugggucucuacaguguagaauauguauuuaa

SEQ ID NO: 35654 - RNA, 1701 nt, Artificial Sequence
  derived and/or modified CDS sequence (wt) from hemagglutinin__InfluenzaA__ACZ16180
augaaggcaauacuaguaguucugcuauauacauuugcaaccgcaaaugcagacacauuauguauagguuaucaugcgaacaauucaacagacacuguagacacaguacuagaaaagaauguaacaguaacacacucuguuaaccuucuagaagacaagcauaacgggaaacuaugcaaacuaagagggguagccccauugcauuuggguaaauguaacauugcuggcuggauccugggaaauccagagugugaaucacucuacacagcaagcucaugguccuacauuguggaaacaucuaguucagacaauggaacguguuacccaggagauuucaucgauuaugaggagcuaagagagcaauugagcucagugucaucauuugaaagguuugagauauuccccaagacaaguucauggcccaaucaugacucgaacaaagguguaacggcagcauguccucaugcuggagcaaaaagcuucuacaaaaauuuaauauggcuaguuaaaaaaggaaauucauacccaaagcucagcaaauccuacauuaaugauaaagggaaagaaguccucgugcuauggggcauucaccauccaucuacuagugcugaccaacaaagucucuaucagaaugcagaugcauauguuuuuguggggucaucaagauacagcaagaaguucaagccggaaauagcaauaagacccaaagugagggaucaagaagggagaaugaacuauuacuggacacuaguagagccgggagacaaaauaacauucgaagcaacuggaaaucuagugguaccgagauaugcauucgcaauggaaagaaaugcuggaucugguauuaucauuucagauacaccaguccacgauugcaauacaacuugucagacacccaagggugcuauaaacaccagccucccauuucagaauauacauccgaucacaauuggaaaauguccaaaauauguaaaaagcacaaaauugagacuggccacaggauugaggaaugucccgucuauucaaucuagaggccuauuuggggccauugccgguuucauugaagggggguggacagggaugguagauggaugguacgguuaucaccaucaaaaugagcaggggucaggauaugcagccgaccugaagagcacacagaaugccauugacgagauuacuaacaaaguaaauucuguuauugaaaagaugaauacacaguucacagcaguagguaaagaguucaaccaccuggaaaaaagaauagagaauuuaaauaaaaaaguugaugaugguuuccuggacauuuggacuuacaaugccgaacuguugguucuauuggaaaaugaaagaacuuuggacuaccacgauucaaaugugaagaacuuauaugaaaagguaagaagccaguuaaaaaacaaugccaaggaaauuggaaacggcugcuuugaauuuuaccacaaaugcgauaacacgugcauggaaagugucaaaaaugggacuuaugacuacccaaaauacucagaggaagcaaaauuaaacagagaagaaauagaugggguaaagcuggaaucaacaaggauuuaccagauuuuggcgaucuauucaacugucgccaguucauugguacugguagucucccugggggcaaucaguuucuggaugugcucuaaugggucucuacaauguagaauauguauuuaa

SEQ ID NO: 35655 - RNA, 1701 nt, Artificial Sequence; identical to SEQ ID NO: 35576
  derived and/or modified CDS sequence (wt) from hemagglutinin__InfluenzaA__ACZ16190

SEQ ID NO: 35656 - RNA, 1701 nt, Artificial Sequence
  derived and/or modified CDS sequence (wt) from hemagglutinin__InfluenzaA__ACZ16200
augaaggcaauacuaguaguucugcuauauacauuugcaaccgcaaauccagacacauuauguauagguuaucaugcgaacaauucaacagacacuguagacacaguacuagaaaagaauguaacaguaacacacucuguuaaccuucuagaagacaagcauaacgggaaacuaugcaaacuaagagggguagccccauugcauuuggguaaauguaacauugcuggcuggauccugggaaauccagagugugaaucacucuccacagcaagcucaugguccuacauuguggaaacaucuaguucagacaauggaacguguuacccaggagauuucaucgauuaugaggagcuaagagagcaauugagcucagugucaucauuugaaagguuugagauauuccccaagacaaguucauggcccaaucaugacucgaacaaagguguaacggcagcauguccucaugcuggagcaaaaagcuucuacaaaaauuuaauauggcuaguuaaaaaaggaaauucauacccaaagcucagcaaauccuacauuaaugauaaagggaaagaaguccucgugcuauggggcauucaccauccaucuacuagugcugaccaacaaagucucuaucagaaugcagaugcauauguuuuuguggggucaucaagauacagcaagaaguucaagccggaaauagcaauaagacccaaagugagggaucaagaagggagaaugaacuauuacuggacacuaguagagccgggagacaaaauaacauucgaagcaacuggaaaucuagugguaccgagauaugcauucgcaauggaaagaaaugcuggaucugguauuaucauuucagauacaccaguccacgauugcaauacaacuugucagacacccaagggugcuauaaacaccagccucccauuucagaauauacauccgaucacaauuggaaaauguccaaaauauguaaaaagcacaaaauugagacuggccacaggauugaggaaugucccgucuauucaaucuagaggccuauuuggggccauugccgguuucauugaagggggguggacagggaugguagauggaugguacgguuaucaccaucaaaaugagcaggggucaggauaugcagccgaccugaagagcacacagaaugccauugacgagauuacuaacaaaguaaauucuguuauugaaaagaugaauacacaguucacagcaguagguaaagaguucaaccaccuggaaaaaagaauagagaauuuaaauaaaaaaguugaugaugguuuccuggacauuuggacuuacaaugccgaacuguugguucuauuggaaaaugaaagaacuuuggacuaccacgauucaaaugugaagaacuuauaugaaaagguaagaagccaguuaaaaaacaaugccaaggaaauuggaaacggcugcuuugaauuuuaccacaaaugcgauaacacgugcauggaaagugucaaaaaugggacuuaugacuacccaaaauacucagaggaagcaaaauuaaacagagaagaaauagaugggguaaagcuggaaucaacaaggauuuaccagauuuuggcgaucuauucaacugucgccaguucauugguacugguagucucccugggggcaaucaguuucuggaugugcucuaaugggucucuacaguguagaauauguauuuaa

SEQ ID NO: 35657 - RNA, 1701 nt, Artificial Sequence
  derived and/or modified CDS sequence (wt) from hemagglutinin__InfluenzaA__ACZ16210
augaaggcaauacuaguaguucugcuauauacauuugcaaccgcaaaugcagacacauuauguauagguuaucaugcgaacaauucaacagacacuguagacacaguacuagaaaagaauguaacaguaacacacucuguuaaccuucuagaagacaagcauaacgggaaacuaugcaaacuaagagggguagccccauugcauuuggguaaauguaacauugcuggcuggauccugggaaauccagagugugaaucacucuccacagcaagcucaugguccuacauuguggaaacaucuaguucagacaauggaacguguuacccaggagauuucaucgauuaugaggagcuaagagagcaauugagcucagugucaucauuugaaagguuugagauauuccccaagacaaguucauggcccaaucaugacucgaacaaagguguaacggcagcauguccucaugcuggagcaaaaagcuucuacaaaaauuuaauauggcuaguuaaaaaaggaaauucauacccaaagcucagcaaauccuacauuaaugauaaagggaaagaaguccucgugcuauggggcauucaccauccaucuacuagugcugaccaacaaagucucuaucagaaugcagaugcauauguuuuuguggggucaucaagauacagcaagaaguucaagccggaaauagcaauaagacccaaagugagggaucaagaagggagaaugaacuauuacuggacacuaguagagccgggagacaaaauaacauucgaagcaacuggaaaucuagugguaccgagauaugcauucgcaauggaaagaaaugcuggaucugguauuaucauuucagauacaccaguccacgauugcaauacaacuugucagacacccaagggugcuauaaacaccagccucccauuucagaauauacauccgaucacaauuggaaaauguccaaaauauguaaaaagcacaaaauugagacuggccacaggauugaggaaugucccgucuauucaaucuagaggccuauuuggggccauugccgguuucauugaagggggguggacagggaugguagauggaugguacgguuaucaccaucaaaaugagcaggggucaggauaugcagccgaccugaagagcacacagaaugccauugacgagauuacuaacaaaguaaauucuguuauugaaaagaugaauacacaguucacagcaguagguaaagaguucaaccaccuggaaaaaagaauagagaauuuaaauaaaaaaguugaugaugguuuccuggacauuuggacuuacaaugccgaacuguugguucuauuggaaaaugaaagaacuuuggacuaccacgauucaaaugugaagaacuuauaugaaaagguaagaagccaguuaaaaaacaaugccaaggaaauuggaaacggcugcuuugaauuuuaccacaaaugcgauaacacgugcauggaaagugucaaaaaugggacuuaugacuauccaaaauacucagaggaagcaaaauuaaacagagaagaaauagaugggguaaagcuggaaucaacaaggauuuaccagauuuuggcgaucuauucaacugucgccaguucauugguacugguagucucccugggggcaaucaguuucuggaugugcucuaaugggucucuacaguguagaauauguauuuaa

SEQ ID NO: 35658 - RNA, 1701 nt, Artificial Sequence; identical to SEQ ID NO: 34705
  derived and/or modified CDS sequence (wt) from hemagglutinin__InfluenzaA__ACZ16220

SEQ ID NO: 35659 - RNA, 1701 nt, Artificial Sequence
  derived and/or modified CDS sequence (wt) from hemagglutinin__InfluenzaA__ACZ16230
augaaggcaauacuaguaguucugcuauauacauuugcaaccgcaaaugcagacacauuauguauagguuaucaugcgaacaauucaacagacacuguagacacaguacuagaaaagaauguaacaguaacacauucuguuaaccuucuagaagacaagcauaacgggaaacuaugcaaacuaagagggguagccccauugcauuuggguaaauguaacauugcuggcuggauccugggaaauccagagugugaaucacucuccacagcaagcucaugguccuacauuguggaaacaucuaguucagacaauggaacguguuacccaggagauuucaucgauuaugaggagcuaagagagcaauugagcucagugucaucauuugaaagguuugagauauuccccaagacaaguucauggcccaaucaugacucgaacaaagguguaacggcagcauguccucaugcuggagcaaaaagcuucuacaaaaauuuaauauggcuaguuaaaaaaggaaauucauacccaaagcucagcaaauccuacauuaaugauaaagggaaagaaguccucgugcuauggggcauucaccauccaucuacuagugcugaccaacaaagucucuaucagaaugcagaugcauauguuuuuguggggucaucaagauacagcaagaaguucaagccggaaauagcaauaaggcccaaagugagggaucaagaagggagaaugaacuauuacuggacacuaguagagccgggagacaaaauaacauucgaagcaacuggaaaucuauugguaccgagauaugcauucgcaauggaaagaaaugcuggaucugguauuaucauuucagauacaccgguccacgauugcaauacaacuugucagacacccaagggugcuauaaacaccagccucccauuucagaauauacauccgaucacaauuggaaaauguccaaaauauguaaaaagcacaaaauugagacuggccacaggauugaggaaugucccgucuauucaaucuagaggccuauuuggggccauugccgguuucauugaagggggguggacagggaugguagauggaugguacgguuaucaccaucaaaaugagcaggggucaggauaugcagccgaccugaagagcacacagaaugccauugacgagauuacuaacaaaguaaauucuguuauugaaaagaugaauacacaguucacagcaguagguaaagaguucaaccaccuggaaaaaagaauagagaauuuaaauaaaaaaguugaugaugguuuccuggacauuuggacuuacaaugccgaacuguugguucuauuggaaaaugaaagaacuuuggacuaccacgauucaaaugugaagaacuuauaugaaaagguaagaagccaguuaaaaaacaaugccaaggaaauuggaaacggcugcuuugaauuuuaccacaaaugcgauaacacgugcauggaaagugucaaaaaugggacuuaugacuacccaaaauacucagaggaagcaaaauuaaacagagaagaaauagaugggguaaagcuggaaucaacaaggauuuaccagauuuuggcgaucuauucaacugucgccaguucauugguacugguagucucccugggggcaaucaguuucuggaugugcucuaaugggucucuacaguguagaauauguauuuaa

SEQ ID NO: 35660 - RNA, 1701 nt, Artificial Sequence
  derived and/or modified CDS sequence (wt) from hemagglutinin__InfluenzaA__ACZ16240
augaaggcaauacuaguaguucugcuauauacauuugcaaccgcaaaugcagacacauuauguauagguuaucaugcgaacaauucaacagacacuguagacacaguacuagaaaagaauguaacaguaacacacucuguuaacauucuagaagacaagcauaacgggaaacuaugcaaacuaagagggguagccccauugcauuuggguaaauguaacauugcuggcuggauccugggaaauccagagugugaaucacucuccacagcaagcucaugguccuacauuguggaaacaucuaguucagacaauggaacguguuacccaggagauuucaucgauuaugaggagcuaagagagcaauugagcucagugucaucauuugaaagguuugagauauuccccaagacaaguucauggcccaaucaugacucgaacaaagguguaacggcagcauguccucaugcuggagcaaaaagcuucuacaaaaauuuaauauggcuaguuaaaaaaggaaauucauacccaaagcucagcaaauccuacauuaaugauaaagggaaagaaguccucgugcuauggggcauucaccauccaucuacuagugcugaccaacaaagucucuaucagaaugcagaugcauauguuuuuguggggucaucaagauacagcaagaaguucaagccggaaauagcaauaagacccaaagugagggaucaagaagggagaaugaacuauuacuggacacuaguagagccgggagacaaaauaacauucgaagcaacuggaaaucuagugguaccgagauaugcauucgcaauggaaagaaaugcuggaucugguauuaucauuucagauacaccaguccacgauugcaauacaacuugucagacacccaagggugcuauaaacaccagccucccauuucagaauauacauccgaucacaauuggaaaauguccaaaauauguaaaaagcacaaaauugagacuggccacaggauugaggaaugucccgucuauucaaucuagaggccuauuuggggccauugccgguuucauugaagggggguggacagggaugguagauggaugguacgguuaucaccaucaaaaugagcaggggucaggauaugcagccgaccugaagagcacacagaaugcccuugacgagauuacuaacaaaguaaauucuguuauugaaaagaugaauacacaguucacagcaguagguaaagaguucaaccaccuggaaaaaagaauagagaauuuaaauaaaaaaguugaugaugguuuccuggacauuuggacuuacaaugccgaacuguugguucuauuggaaaaugaaagaacuuuggacuaccacgauucaaaugugaagaacuuauaugaaaagguaagaagccagcuaaaaaacaaugccaaggaaauuggaaacggcugcuuugaauuuuaccacaaaugcgauaacacgugcauggaaagugucaaaaaugggacuuaugacuacccaaaauacucagaggaagcaaaauuaaacagagaagaaauagaugggguaaagcuggaaucaacaaggauuuaccagauuuuggcgaucuauucaacugucgccaguucauugguacugguagucucccugggggcaaucaguuucuggaugugcucuaaugggucucuacaguguagaauauguauuuaa

SEQ ID NO: 35661 - RNA, 1701 nt, Artificial Sequence
  derived and/or modified CDS sequence (wt) from hemagglutinin__InfluenzaA__ACZ16260
augaaagcaauacuaguaguucugcuauauacauuugcaaccgcaaaugcagacacauuauguauagguuaucaugcgaacaauucaacagacacuguagacacaguacuagaaaagaauguaacaguaacacacucuguuaaccuucuagaagacaagcauaacgggaaacuaugcaaacuaagagggguagccccauugcauuuggguaaauguaacauugcuggcuggauccugggaaauccagagugugaaucacucuccacagcaagcucaugguccuacauuguggaaacaucuaguucagacaauggaacguguuacccaggagauuucaucgauuaugaggagcuaagagagcaauugagcucagugucaucauuugaaagguuugagauauuccccaagacaaguucauggcccaaucaugacucgaacaaagguguaacggcagcauguccucaugcuggagcaaaaagcuucuacaaaaauuuaauauggcuaguuaaaaaaggaaauucauacccaaagcucagcaaauccuacauuaaugauaaagggaaagaaguccucgugcuauggggcauucaccauccaucuacuagugcugaccaacaaagucucuaucagaaugcagaugcauauguuuuuguggggucaucaagauacagcaagaaguucaagccggaaauagcaauaagacccaaagugagggaucaagaagggagaaugaacuauuacuggacacuaguagagccgggagacaaaauaacauucgaagcaacuggaaaucuagugguaccgagauaugcauucgcaauggaaagaaaugcuggaucugguauuaucauuucagauacaccaguccacgauugcaauacaacuugucagacacccaagggugcuauaaacaccagccucccauuucagaauauacauccgaucacaauuggaaaauguccaaaauauguaaaaagcacaaaauugagacuggccacaggauugaggaaugucccgucuauucaaucuagaggccuauuuggggccauugccgguuucauugaagggggguggacagggaugguagauggaugguacgguuaucaccaucaaaaugagcaggggucaggauaugcagccgaccugaagagcacacagaaugccauugacgagauuacuaacaaaguaaauucuguuauugaaaagaugaauacacaguucacagcaguagguaaagaguucaaccaccuggaaaaaagaauagagaauuuaaauaaaaaaguugaugaugguuuccuggacauuuggacuuacaaugccgaacuguugguucuauuggaaaaugaaagaacuuuggacuaccacgauucaaaugugaagaacuuauaugaaaagguaagaagccaguuaaaaaacaaugccaaggaaauuggaaacggcugcuuugaauuuuaccacaaaugcgauaacacgugcauggaaagugucaaaaaugggacuuaugacuacccaaaauacucagaggaagcaaaauuaaacagagaagaaauagaugggguaaagcuggaaucaacaaggauuuaccagauuuuggcgaucuauucaacugucgccaguucauugguacugguagucucccugggggcaaucaguuucuggaugugcucuaaugggucucuacaguguagaauauguauuuaa

SEQ ID NO: 35662 - RNA, 1701 nt, Artificial Sequence
  derived and/or modified CDS sequence (wt) from hemagglutinin__InfluenzaA__ACZ16270
augaaggcaauacuaguaguucugcuauauacauuugcaaccgcaaaugcagacacauuauguauagguuaucaugcgaacaauucaacagacacuguagacacaguacuagaaaagaauguaacaguaacacacucuguuaaccuucuagaagacaagcauaacgggaaacuaugcaaacuaagagggguagccccauugcauuuggguaaauguaacauugcuggcuggauccugggaaauccagagugugaaucacucuccacagcaagcucaugguccuacauuguggaaacaucuaguucagacaauggaacguguuacccaggagauuucaucgauuaugaggagcuaagagagcaauugagcucagugucaucauuugaaagguuugagauauuccccaagacaaguucauggcccaaucaugacucgaacaaagguguaacggcagcauguccucaugcuggagcaaaaagcuucuacaaaaauuuaauauggcuaguuaaaaaaggaaauucauacccaaagcucagcaaauccuacauuaaugauaaagggaaagaaguccucgugcuauggggcauucaccauccaucuacuagugcugaccaacaaaaucucuaucagaaugcagaugcauauguuuuuguggggucaucaagauacagcaagaaguucaagccggaaauagcaauaagacccaaagugagggaucaagaagggagaaugaacuauuacuggacacuaguagagccgggagacaaaauaacauucgaagcaacuggaaaucuagugguaccgagauaugcauucgcaauggaaagaaaugcuggaucugguauuaucauuucagauacaccaguccacgauugcaauacaacuugucagacacccaagggugcuauaaacaccagccucccauuucagaauauacauccgaucacaauuggaaaauguccaaaauauguaaaaagcacaaaauugagacuggccacaggauugaggaaugucccgucuauucaaucuagaggccuauuuggggccauugccgguuucauugaagggggguggacagggaugguagauggaugguacgguuaucaccaucaaaaugagcaggggucaggauaugcagccgaccugaagagcacacagaaugccauugacgagauuacuaacaaaguaaauucuguuauugaaaagaugaauacacaguucacagcaguagguaaagaguucaaccaccuggaaaaaagaauagagaauuuaaauaaaaaaguugaugaugguuuccuggacauuuggacuuacaaugccgaacuguugguucuauuggaaaaugaaagaacuuuggacuaccacgauucaaaugugaagaacuuauaugaaaagguaagaagccaguuaaaaaacaaugccaaggaaauuggaaacggcugcuuugaauuuuaccacaaaugcgauaacacgugcauggaaagugucaaaaaugggacuuaugacuacccaaaauacucagaggaagcaaaauuaaacagagaagaaauagaugggguaaagcuggaaucaacaaggauuuaccagauuuuggcgaucuauucaacugucgccaguucauugauacugguagucucccugggggcaaucaguuucuggaugugcucuaaugggucucuacaguguagaauauguauuuaa

SEQ ID NO: 35663 - RNA, 1701 nt, Artificial Sequence; identical to SEQ ID NO: 35357
  derived and/or modified CDS sequence (wt) from hemagglutinin__InfluenzaA__ACZ16280

SEQ ID NO: 35664 - RNA, 1701 nt, Artificial Sequence
  derived and/or modified CDS sequence (wt) from hemagglutinin__InfluenzaA__ACZ16290
augaaggcaauacuaguaguucugcuauauacauuugcaaccgcaaaugcagacacauuauguauagguuaucaugcgaacaauucaacagacacuguagacacaguacuagaaaagaauguaacaguaacacacucuguuaaccuucuagaagacaagcauaacgggaaacuaugcaaacuaagagggguagccccauugcauuuggguaaauguaacauugcuggcuggauccugggaaauccagagugugaaucacucuccacagcaagcucaugguccuacauuguggaaacaucuaguucagacaauggaacguguuacccaggagauuucaucgauuaugaggagcuaagagagcaauugagcucagugucaucauuugaaagguuugagauauuccccaagacaaguucauggcccaaucaugacucgaacaaagguguaacggcagcauguccucaugcuggagcaaaaagcuucuacaaaaauuuaauauggcuaguuaaaaaaggaaauucauacccaaagcucagcaaauccuacauuaaugauaaagggaaagaaguccuagugcuauggggcauucaccauccaucuacuagugcugaccaacaaagucucuaucagaaugcagaugcauauguuuuuguggggucaucaagauacagcaagaaguucaagccggaaauagcaauaagacccaaagugagggaucaagaagggagaaugaacuauuacuggacacuaguagagccgggagacaaaauaacauucgaagcaacuggaaaucuagugguaccgagauaugcauucgcaauggaaagaaaugcuggaucugguauuaucauuucagauacaccaguccacgauugcaauacaacuugucagacacccaagggugcuauaaacaccagccucccauuucagaauauacauccgaucacaauuggaaaauguccaaaauauguaaaaagcacaaaauugagacuggccacaggauugaggaaugucccgucuauucaaucuagaggccuauuuggggccauugccgguuucauugaagggggguggacagggaugguagauggaugguacgguuaucaccaucaaaaugagcaggggucaggauaugcagccgaccugaagagcacacagaaugccauugacgagauuacuaacaaaguaaauucuguuauugaaaagaugaauacacaguucacagcaguagguaaagaguucaaccaccuggaaaaaagaauagagaauuuaaauaaaaaaguugaugaugguuuccuggacauuuggacuuacaaugccgaacuguugguucuauuggaaaaugaaagaacuuuggacuaccacgauucaaaugugaagaacuuauaugaaaagguaagaagccaguuaaaaaacaaugccaaggaaauuggaaacggcugcuuugaauuuuaccacaaaugcgauaacacgugcauggaaagugucaaaaaugggacuuaugacuacccaaaauacucagaggaagcaaaauuaaacagagaagaaauagaugggguaaagcuggaaucaacaaggauuuaccagauuuuggcgaucuauucaacugucgccaguucauugguacugguagucucccugggggcaaucaguuucuggaugugcucuaaugggucucuacaguguagaauauguauuuaa

SEQ ID NO: 35665 - RNA, 1701 nt, Artificial Sequence
  derived and/or modified CDS sequence (wt) from hemagglutinin__InfluenzaA__ACZ16300
augaaggcaauacuaguaguucugcuauauacauuugcaaccgcaaaugcagacacauuauguauagguuaucaugcgaacaauucaacagacacuguagacacaguacuagaaaagaauguaauaguaacacauucuguuaaccuucuagaagacaagcauaacgggaaacuaugcaaacuaagagggguagccccauugcauuuggguaaauguaacauugcuggcuggauccugggaaauccagagugugaaucacucuccacagcaagcucaugguccuacauuguggaaacaucuaguucagacaauggaacguguuacccaggagauuucaucgauuaugaggagcuaagagagcaauugagcucagugucaucauuugaaagguuugagauauuccccaagacaaguucauggcccaaucaugacucgaacaaagguguaacggcagcauguccucaugcuggagcaaaaagcuucuacaaaaauuuaauauggcuaguuaaaaaaggaaauucauacccaaagcucagcaaauccuacauuaaugauaaagggaaagaaguccucgugcuauggggcauucaccauccaucuacuagugcugaccaacaaagucucuaucagaaugcagaugcauauguuuuuguggggucaucaagauacagcaagaaguucaagccggaaauagcaauaagacccaaagugagggaucaagaagggagaaugaacuauuacuggacacuaguagagccgggagacaaaauaacauucgaagcaacuggaaaucuauugguaccgagauaugcauucgcaauggaaagaaaugcuggaucugguauuaucauuucagauacaccaguccacgauugcaauacaacuugucagacacccaagggugcuauaaacaccagccucccauuucagaauauacauccgaucacaauuggaaaauguccaaaauauguaaaaagcacaaaauugagacuggccacaggauugaggaaugucccgucuauucaaucuagaggccuauuuggggccauugccgguuucauugaagggggguggacagggaugguagauggaugguacgguuaucaccaucaaaaugagcaggggucaggauaugcagccgaccugaagagcacacagaaugccauugacgagauuacuaacaaaguaaauucuguuauugaaaagaugaauacacaguucacagcaguagguaaagaguucaaccaccuggaaaaaagaauagagaauuuaaauaaaaaaguugaugaugguuuccuggacauuuggacuuacaaugccgaacuguugguucuauuggaaaaugaaagaacuuuggacuaccacgauucaaaugugaagaacuuauaugaaaagguaagaagccaguuaaaaaacaaugccaaggaaauuggaaacggcugcuuugaauuuuaccacaaaugcgauaacacgugcauggaaagugucaaaaaugggacuuaugacuacccaaaauacucagaggaagcaaaauuaaacagagaagaaauagaugggguaaagcuggaaucaacaaggauuuaccagauuuuggcgaucuauucaacugucgccaguucauugguacugguagucucccugggggcaaucaguuucuggaugugcucuaaugggucucuacaguguagaauauguauuuaa

SEQ ID NO: 35666 - RNA, 1701 nt, Artificial Sequence; identical to SEQ ID NO: 35411
  derived and/or modified CDS sequence (wt) from hemagglutinin__InfluenzaA__ACZ16310

SEQ ID NO: 35667 - RNA, 1701 nt, Artificial Sequence
  derived and/or modified CDS sequence (wt) from hemagglutinin__InfluenzaA__ACZ16320
augaaggcaauacuaguaguucugcuauauacauuugcaaccgcaaaugcagacacauuauguauagguuaucaugcgaacaauucaacagacacuguagacacaguacuagaaaagaauguaacaguaacacacucuguuaaccuuuuagaagacaagcauaacgggaaacuaugcaaacuaagagggguagccccauugcauuuggguaaauguaacauugcuggcuggauccugggaaauccagagugugaaucacucuccacagcaagcucaugguccuacauuguggaaacaucuaguucagacaauggaacguguuacccaggagauuucaucgauuaugaggagcuaagagagcaauugagcucagugucaucauuugaaagguuugagauauuccccaagacaaguucauggcccaaucaugacucgaacaaagguguaacggcagcauguccucaugcuggagcaaaaagcuucuacaaaaauuuaauauggcuaguuaaaaaaggaaauucauacccaaagcucagcaaauccuacauuaaugauaaagggaaagaaguccucguacuauggggcauucaccauccaucuacuagugcugaccaacaaagucucuaucagaaugcagaugcauauguuuuuguggggucaucaagauacagcaagaaguucaagccggaaauagcaauaagacccaaagugagggaucaagaagggagaaugaacuauuacuggacacuaguagagccgggagacaaaauaacauucgaagcaacuggaaaucuagugguaccgagauaugcauucgcaauggaaagaaaugcuggaucugguauuaucauuucagauacaccaguccacgauugcaauacaacuugucagacacccaagggugcuauaaacaccagccucccauuucagaauauacauccgaucacaauuggaaaauguccaaaauauguaaaaagcacaagauugagacuggccacaggauugaggaaugucccgucuauucaaucuagaggccuauuuggggccauugccgguuucauugaagggggguggacagggaugguagauggaugguacgguuaucaccaucaaaaugagcaggggucaggauaugcagccgaccugaagagcacacagaaugccauugacgagauuacuaacaaaguaaauucuguuauugaaaagaugaauacacaguucacagcaguagguaaagaguucaaccaccuggaaaaaagaauagagaauuuaaauaaaaaaguugaugaugguuuccuggacauuuggacuuacaaugccgaacuguugguucuauuggaaaaugaaagaacuuuggacuaccacgauucaaaugugaagaacuuauaugaaaagguaagaagccaguuaaaaaacaaugccaaggaaauuggaaacggcugcuuugaauuuuaccacaaaugcgauaacacgugcauggaaagugucaaaaaugggacuuaugacuacccaaaauacucagaggaagcaaaauuaaacagagaagaaauagaugggguaaagcuggaaucaacaaggauuuaccagauuuuggcgaucuauucaacugucgccaguucauugguacugguagucucccugggggcaaucaguuucuggaugugcucuaaugggucucuacaguguagaauauguauuuaa

SEQ ID NO: 35668 - RNA, 1701 nt, Artificial Sequence; identical to SEQ ID NO: 35411
  derived and/or modified CDS sequence (wt) from hemagglutinin__InfluenzaA__ACZ16330

SEQ ID NO: 35669 - RNA, 1701 nt, Artificial Sequence
  derived and/or modified CDS sequence (wt) from hemagglutinin__InfluenzaA__ACZ16340
augaaggcaauacuaguaguucugcuauauacauuugcaaccgcaaaugcagacacauuauguauagguuaucaugcgaacaauucaacagacacuguagacacaguacuagaaaagaauguaacaguaacacacucuguuaacauucuagaagacaagcauaacgggaaacuaugcaaacuaagagggguagccccauugcauuuggguaaauguaacauugcuggcuggauccugggaaauccagagugugaaucacucuccacagcaagcucaugguccuacauuguggaaacaucuaguucagacaauggaacguguuacccaggagauuucaucgauuaugaggagcuaagagagcaauugagcucagugucaucauuugaaagguuugagauauuccccaagacaaguucauggcccaaucaugacucgaacaaagguguaacggcagcauguccucaugcuggagcaaaaagcuucuacaaaaauuuaauauggcuaguuaaaaaaggaaauucauacccaaagcuuagcaaauccuacauuaaugauaaagggaaagaaguccucgugcuauggggcauucaccauccaucuacuagugcugaccaacaaagucucuaucagaaugcagaugcauauguuuuuguggggucaucaagauacagcaagaaguucaagccggaaauagcaauaagacccaaagugagggaucaagaagggagaaugaacuauuacuggacacuaguagagccgggagacaaaauaacauucgaagcaacuggaaaucuagugguaccgagauaugcauucgcaauggaaagaaaugcuggaucugguauuaucauuucagauacaccaguccacgauugcaauacaacuugucagacacccaagggugcuauaaacaccagccucccauuucagaauauacauccgaucacaauuggaaaauguccaaaauauguaaaaagcacaaaauugagacuggccacaggauugaggaaugucccgucuauucaaucuagaggccuauuuggggccauugccgguuucauugaagggggguggacagggaugguagauggaugguacgguuaucaccaucaaaaugagcaggggucaggauaugcagccgaccugaagagcacacagaaugccauugacgagauuacuaacaaaguaaauucuguuauugaaaagaugaauacacaguucacagcaguagguaaagaguucaaccaccuggaaaaaagaauagagaauuuaaauaaaaaaguugaugaugguuuccuggacauuuggacuuacaaugccgaacuguugguucuauuggaaaaugaaagaacuuuggacuaccacgauucaaaugugaagaacuuauaugaaaagguaagaagccagcuaaaaaacaaugccaaggaaauuggaaacggcugcuuugaauuuuaccacaaaugcgauaacacgugcauggaaagugucaaaaaugggacuuaugacuacccaaaauacucagaggaagcaaaauuaaacagagaagaaauagaugggguaaagcuggaaucaacaaggauuuaccagauuuuggcgaucuauucaacugucgccaguucauugguacugguagucucccugggggcaaucaguuucuggaugugcucuaaugggucucuacaguguagaauauguauuuaa

SEQ ID NO: 35670 - RNA, 1701 nt, Artificial Sequence; identical to SEQ ID NO: 34705
  derived and/or modified CDS sequence (wt) from hemagglutinin__InfluenzaA__ACZ16350

SEQ ID NO: 35671 - RNA, 1701 nt, Artificial Sequence; identical to SEQ ID NO: 35347
  derived and/or modified CDS sequence (wt) from hemagglutinin__InfluenzaA__ACZ16360

SEQ ID NO: 35672 - RNA, 1701 nt, Artificial Sequence; identical to SEQ ID NO: 35653
  derived and/or modified CDS sequence (wt) from hemagglutinin__InfluenzaA__ACZ16370

SEQ ID NO: 35673 - RNA, 1701 nt, Artificial Sequence; identical to SEQ ID NO: 35651
  derived and/or modified CDS sequence (wt) from hemagglutinin__InfluenzaA__ACZ16380

SEQ ID NO: 35674 - RNA, 1701 nt, Artificial Sequence
  derived and/or modified CDS sequence (wt) from hemagglutinin__InfluenzaA__ACZ16390
augaaggcaauacuaguaguucugcuauauacauuugcaaccgcaaaugcagacacauuauguauagguuaucaugcgaacaauucaacagacacuguagacacaguacuagaaaagaauguaacaguaacacacucuguuaaccuucuagaagacaagcauaacgggaaacuaugcaaacuaagagggguagccccauugcauuuggguaaauguaacauugcuggcuggauccugggaaauccagagugugaaucacucuccacagcaagcucaugguccuacauuguggaaacaucuaguucagacaauggaacguguuacccaggagauuucaucgauuaugaggagcuaagagagcaauugagcucagugucaucauuugaaagguuugagauauuccccaagacaaguucauggcccaaucaugacucgaacaaagguguaacggcagcauguccucaugcuggagcaaaaagcuucuacaaaaauuuaauauggcuaguuaaaaaaggaaauucauacccaaagcucagcaaauccuacauuaaugauaaagggaaagaaguccucgugcuauggggcauucaccauccaucuacuagugcugaucaacaaagucucuaucagaaugcagaugcauauguuuuuguggggucaucaagauacagcaagaaguucaagccggaaauagcaauaagacccaaagugagggaucaagaagggagaaugaacuauuacuggacacuaguagagccgggagacaaaauaacauucgaagcaacuggaaaucuagugguaccgagauaugcauucgcaauggaaagaaaugcuggaucugguauuaucauuucagauacaccaguccacgauugcaauacaacuugucagacacccaagggugcuauaaacaccagccucccauuucagaauauacauccgaucacaauuggaaaauguccaaaauauguaaaaagcacaaaauugagacuggccacaggauugaggaaugucccgucuauucaaucuagaggccuauuuggggccauugccgguuucauugaagggggguggacagggaugguagauggaugguacgguuaucaccaucaaaaugagcaggggucaggauaugcagccgaccugaagagcacacagaaugccauugacgagauuacuaacaaaguaaauucuguuauugaaaagaugaauacacaguucacagcaguagguaaagaguucaaucaccuggaaaaaagaauagagaauuuaaauaaaaaaguugaugaugguuuccuggacauuuggacuuacaaugccgaacuguugguucuauuggaaaaugaaagaacuuuggacuaccacgauucaaaugugaagaacuuauaugaaaagguaagaagccaguuaaaaaacaaugccaaggaaauuggaaacggcugcuuugaauuuuaccacaaaugcgauaacacgugcauggaaagugucaaaaaugggacuuaugacuacccaaaauacucagaggaagcaaaauuaaacagagaagaaauagaugggguaaagcuggaaucaacaaggauuuaccagauuuuggcgaucuauucaacugucgccaguucauugguacugguagucucccugggggcaaucaguuucuggaugugcucuaaugggucucuacaguguagaauauguauuuaa

SEQ ID NO: 35675 - RNA, 1701 nt, Artificial Sequence; identical to SEQ ID NO: 34705
  derived and/or modified CDS sequence (wt) from hemagglutinin__InfluenzaA__ACZ16400

SEQ ID NO: 35676 - RNA, 1701 nt, Artificial Sequence; identical to SEQ ID NO: 34705
  derived and/or modified CDS sequence (wt) from hemagglutinin__InfluenzaA__ACZ16410

SEQ ID NO: 35677 - RNA, 1701 nt, Artificial Sequence; identical to SEQ ID NO: 35305
  derived and/or modified CDS sequence (wt) from hemagglutinin__InfluenzaA__ACZ16420

SEQ ID NO: 35678 - RNA, 1701 nt, Artificial Sequence; identical to SEQ ID NO: 34705
  derived and/or modified CDS sequence (wt) from hemagglutinin__InfluenzaA__ACZ16430

SEQ ID NO: 35679 - RNA, 1701 nt, Artificial Sequence
  derived and/or modified CDS sequence (wt) from hemagglutinin__InfluenzaA__ACZ16440
augaaggcaauacuaguaguucugcuauauacauuugcaaccgcaaaugcagacacauuauguauagguuaucaugcgaacaauucaacagacacuguagacacaguacuagaaaagaauguaacaguaacacacucuguuaaccuucuagaagacaagcauaacgggaaacuaugcaaacuaagagggguagccccauugcauuuggguaaauguaacauugcuggcuggauccugggaaauccagagugugaaucacucuccacagcaagcucaugguccuacauuguggaaacaucuaguucagacaauggaacguguuacccaggagauuucaucgauuaugaggagcuaagagagcaauugagcucagugucaucauuugaaagguuugagauauuccccaagacaaguucauggcccaaucaugacucgaacaaagguguaacggcagcauguccucaugcuggagcaaaaagcuucuacaaaaauuuaauauggcuaguuaaaaaaggaaauucauacccaaagcucagcaaauccuacauuaaugauaaagggaaagaaguccucgugcuauggggcauucaccauccaucuacuagugcugaccaacaaagucucuaucagaaugcagaugcauauguuuuuguggggucaucaagauacagcaagaaguucaagccggaaauagcaauaagacccaaagugagggaucaagaagggagaaugaacuauuacuggacacuaguagagccgggagacaaaauaacauucgaagcaacuggaaaucuagugguaccgagauaugcauucgcaauggaaagaaaugcuggaucugguauuaucauuucagauacaccaguccacgauugcaauacaacuugucagacacccaagggugcuauaaacaccagccucccauuucagaauauacauccgaucacaauuggaaaauguccaaaauauguaaaaagcacaaaauugagacuggccacaggauugaggaaugucccgucuauucaaucuagaggccuauuuggggccauugccgguuucauugaagggggguggacagggaugguagauggaugguacgguuaucaccaucaaaaugagcaggggucaggauaugcagccgaccugaagagcacacagaaugccauugacgagauuacuaacaaaguaaauucuguuauugaaaagaugaauacacaguucacagcaguagguaaagaguucaaccaccuggaaaagagaauagagaauuuaaauaaaaaaguugaugaugguuuccuggacauuuggacuuacaaugccgaacuguugguucuauuggaaaaugaaagaacuuuggacuaccacgauucaaaugugaagaacuuauaugaaaagguaagaagccaguuaaaaaacaaugccaaggaaauuggaaacggcugcuuugaauuuuaccacaaaugcgauaacacgugcauggaaagugucaaaaaugggacuuaugacuacccaaaauacucagaggaagcaaaauuaaacagagaagaaauagaugggguaaagcuggaaucaacaaggauuuaccagauuuuggcgaucuauucaacugucgccaguucauugguacugguagucucccugggggcaaucaguuucuggaugugcucuaaugggucucuacaguguagaauauguauuuaa

SEQ ID NO: 35680 - RNA, 1701 nt, Artificial Sequence
  derived and/or modified CDS sequence (wt) from hemagglutinin__InfluenzaA__ACZ16450
augaaggcaauacuaguaguucugcuauauacauuugcaaccgcaaaugcagacacauuauguauagguuaucaugcgaacaauucaacagacacuguagacacaguacuagaaaagaauguaacaguaacacacucuguuaaccuucuagaagacaagcauaacgggaaacuaugcaaacuaagagggguagccccauugcauuuggguaaauguaacauugcuggcuggauccugggaaauccagagugugaaucacucuccacagcaagcucaugguccuacauuguggaaacaucuaguucagacaauggaacguguuacccaggagauuucaucgauuaugaggagcuaagagagcaauugagcucagugucaucauuugaaagguuugagauauuccccaagacaaguucauggcccaaucaugacucgaacaaagguguaacggcagcauguccucaugcuggagcaaaaagcuucuacaaaaauuuaauauggcuaguuaaaaaaggaaauucauacccaaagcucagcaaauccuacauuaaugauaaagggaaagaaguccucgugcuauggggcauucaccauccaucuacuagugcugaccaacaaagucucuaucagaaugcagaugcauauguuuuuguggggucaucaagauacagcaagaaguucaagccggaaauagcaauaagacccaaagugagggaucaagaagggagaaugaacuauuacuggacacuaguaaagccgggagacaaaauaacauucgaagcaacuggaaaucuagugguaccgagauaugcauucgcaauggaaagaaaugcuggaucugguauuaucauuucagauacaccaguccacgauugcaauacaacuugucagacacccaagggugcuauaaacaccagccucccauuucagaauauacauccgaucacaauuggaaaauguccaaaauauguaaaaagcacaaaauugagacuggccacaggauugaggaaugucccgucuauucaaucuagaggccuauuuggggccauugccgguuucauugaagggggguggacagggaugguagauggaugguacgguuaucaccaucaaaaugagcaggggucaggauaugcagccgaccugaagagcacacagaaugccauugacgagauuacuaacaaaguaaauucuguuauugaaaagaugaauacacaguucacagcaguagguaaagaguucaaccaccuggaaaaaagaauagagaauuuaaauaaaaaaguugaugaugguuuccuggacauuuggacuuacaaugccgaacuguugguucuauuggaaaaugaaagaacuuuggacuaccacgauucaaaugugaagaacuuauaugaaaagguaagaagccaguuaaaaaacaaugccaaggaaauuggaaacggcugcuuugaauuuuaccacaaaugcgauaacacgugcauggaaagugucaaaaaugggacuuaugacuacccaaaauacucagaggaagcaaaauuaaacagagaagaaauagaugggguaaagcuggaaucaacaaggauuuaccagauuuuggcgaucuauucaacugucgccaguucauugguacugguagucucccugggggcaaucaguuucuggaugugcucuaaugggucucuacaguguagaauauguauuuaa

SEQ ID NO: 35681 - RNA, 1701 nt, Artificial Sequence
  derived and/or modified CDS sequence (wt) from hemagglutinin__InfluenzaA__ACZ16460
augaaggcaauacuaguaguucugcuauauacauuugcaaccgcaaaugcagacacauuauguauagguuaucaugcgaacaauucaacagacacuguagacacaguacuagaaaagaauguaacaguaacacacucuguuaacauucuagaagacaagcauaacgggaaacuaugcaaacuaagagggguagccccauugcauuuggguaaauguaacauugcuggcuggauccugggaaauccagagugugaaucacucuccacagcaagcucaugguccuacauuguggaaacaucuaguucagacaauggaacguguuacccaggagauuucaucgauuaugaggagcuaagagagcaauugagcucagugucaucauuugaaagguuugagauauuccccaagacaaguucauggcccaaucaugacucgaacaaagguguaacggcagcauguccucaugcuggagcaaaaagcuucuacaaaaauuuaauauggcuaguuaaaaaaggaaauucauacccaaagcucagcaaauccuacauuaaugauaaagggaaagaaguccucgugcuauggggcauucaccauccaucuacuagugcugaccaacaaagucucuaucagaaugcagaugcauauguuuuuguggggucaucaagauacagcaagaaguucaagccggaaauagcaauaagacccaaagugagggaucaagaagggagaaugaacuauuacuggacacuaguagagccgggagacaaaauaacauucgaagcaacuggaaaucuagugguaccgagauaugcauucgcaauggaaagaaaugcuggaucugguauuaucauuucagauacaccaguccacgauugcaauacaacuugucagacacccaagggugcuauaaacaccagccucccauuucagaauauacauccgaucacaauuggaaaauguccaaaauauguaaaaagcacaaaauugagacuggccacaggauugaggaauguuccgucuauucaaucuagaggccuauuuggggccauugccgguuucauugaagggggguggacagggaugguagauggaugguacgguuaucaccaucaaaaugagcaggggucaggauaugcagccgaccugaagagcacacagaaugccauugacgagauuacuaacaaaguaaauucuguuauugaaaagaugaauacacaguucacagcaguagguaaagaguucaaccaccuggaaaaaagaauagagaauuuaaauaaaaaaguugaugaugguuuccuggacauuuggacuuacaaugccgaacuguugguucuauuggaaaaugaaagaacuuuggacuaccacgauucaaaugugaagaacuuauaugaaaagguaagaagccagcuaaaaaacaaugccaaggaaauuggaaacggcugcuuugaauuuuaccacaaaugcgauaacacgugcauggaaagugucaaaaaugggacuuaugacuacccaaaauacucagaggaagcaaaauuaaacagagaagaaauagaugggguaaagcuggaaucaacaaggauuuaccagauuuuggcgaucuauucaacugucgccaguucauugguacugguagucucccugggggcaaucaguuucuggaugugcucuaaugggucucuacaguguagaauauguauuuaa

SEQ ID NO: 35682 - RNA, 1701 nt, Artificial Sequence
  derived and/or modified CDS sequence (wt) from hemagglutinin__InfluenzaA__ACZ16470
augaaggcaauacuaguaguucugcuauauacauuugcaaccgcaaaugcagacacauuauguauagguuaucaugcgaacaauucaacagacacuguagacacaguacuagaaaagaauguaacaguaacacacucuguuaaccuucuagaagacaagcauaacgggaaacuaugcaaacuaagagggguagccccauugcauuuggguaaauguaacauugcuggcuggauccugggaaauccagagugugaaucacucuccacagcaagcucaugguccuacauuguggaaacaucuaguucagacaauggaacguguuacccaggagauuucaucgauuaugaggagcuaagagagcaauugagcucagugucaucauuugaaagguuugagauauuccccaagacaaguucauggcccaaucaugacucgaacaaagguguaacggcagcauguccucaugcuggagcaaaaagcuucuacaaaaauuuaauauggcuaguuaaaaaaggaaauucauacccaaagcucagcaaauccuacauuaaugauaaagggaaagaaguccucgugcuauggggcauucaccauccaucuacuagugcugaccaacaaagucucuaucagaaugcagaugcauauguuuuuguggggucaucaagauacagcaaaaaguucaagccggaaauagcaauaagacccaaagugagggaucaagaagggagaaugaacuauuacuggacacuaguagagccgggagacaaaauaacauucgaagcaacuggaaaucuagugguaccgagauaugcauucgcaauggaaagaaaugcuggaucugguauuaucauuucagauacaccaguccacgauugcaauacaacuugucagacacccaagggugcuauaaacaccagccucccauuucagaauauacauccgaucacaauuggaaaauguccaaaauauguaaaaagcacaaaauugagacuggccacaggauugaggaaugucccgucuauucaaucuagaggccuauuuggggccauugccgguuucauugaagggggguggacagggaugguagauggaugguacgguuaucaccaucaaaaugagcaggggucaggauaugcagccgaccugaagagcacacagaaugccauugacgagauuacuaacaaaguaaauucuguuauugaaaagaugaauacacaguucacagcaguagguaaagaguucaaccaccuggaaaaaagaauagagaauuuaaauaaaaaaguugaugaugguuuccuggacauuuggacuuacaaugccgaacuguugguucuauuggaaaaugaaagaacuuuggacuaccacgauucaaaugugaagaacuuauaugaaaagguaagaagccaguuaaaaaacaaugccaaggaaauuggaaacggcugcuuugaauuuuaccacaaaugcgauaacacgugcauggaaagugucaaaaaugggacuuaugacuacccaaaauacucagaggaagcaaaauuaaacagagaagaaauagaugggguaaagcuggaaucaacaaggauuuaccagauuuuggcgaucuauucaacugucgccaguucauugguacugguagucucccugggggcaaucaguuucuggaugugcucuaaugggucucuacaguguagaauauguauuuaa

SEQ ID NO: 35683 - RNA, 1701 nt, Artificial Sequence; identical to SEQ ID NO: 34705
  derived and/or modified CDS sequence (wt) from hemagglutinin__InfluenzaA__ACZ16480

SEQ ID NO: 35684 - RNA, 1701 nt, Artificial Sequence
  derived and/or modified CDS sequence (wt) from hemagglutinin__InfluenzaA__ACZ16490
augaaggcaauacuaguaguucugcuauauacauuugcaaccgcaaaugcagacacauuauguauagguuaucaugcgaacaauucaacagacacuguagacacaguacuagaaaagaauguaacaguaacacacucuguuaaccuucuagaagacaagcauaacgggaaacuaugcaaacuaagagggguagccccauugcauuuggguaaauguaacauugcuggcuggauccugggaaauccagagugugaaucacucuccacagcaagcucaugguccuacauuguggaaacaucuaguucagacaauggaacguguuacccaggagauuucaucgauuaugaggagcuaagagagcaauugagcucagugucaucauuugaaagguuugagauauuccccaagacaaguucauggcccaaucaugacucgaacaaagguguaacggcagcauguccucaugcuggagcaaaaagcuucuacaaaaauuuaauauggcuaguuaaaaaaggaaauucauacccaaagcucagcaaauccuacauuaaugauaaagggaaagaaguccucgugcuauggggcauucaccauccaucuaccagugcugaccaacaaagucucuaucagaaugcagaugcauauguuuuuguggggucaucaagauacagcaagaaguucaagccggaaauagcaauaagacccaaagugagggaucaagaagggagaaugaacuauuacuggacacuaguagagccgggagacaaaauaacauucgaagcaacuggaaaucuauugguaccgagauaugcauucgcaauggaaagaaaugcuggaucugguauuaucauuucagauacaccaguccacgauugcaauacaacuugucagacacccaagggugcuauaaacaccagccucccauuucagaauauacauccgaucacaauuggaaaauguccaaaauauguaaaaagcacaaaauugagacuggccacaggauugaggaaugucccgucuauucaaucuagaggccuauuuggggccauugccgguuucauugaagggggguggacagggaugguagauggaugguacgguuaucaccaucaaaaugagcaggggucaggauaugcagccgaccugaagagcacacagaaugccauugacgagauuacuaacaaaguaaauucuguuauugaaaagaugaauacacaguucacagcaguagguaaagaguucaaccaccuggaaaaaagaauagagaauuuaaauaaaaaaguugaugaugguuuccuggacauuuggacuuacaaugccgaacuguugguucuauuggaaaaugaaagaacuuuggacuaccacgauucaaaugugaagaacuuauaugaaaagguaagaagccaguuaaaaaacaaugccaaggaaauuggaaacggcugcuuugaauuuuaccacaaaugcgauaacacgugcauggaaagugucaaaaaugggacuuaugacuacccaaaauacucagaggaagcaaaauuaaacagagaagaaauagaugggguaaagcuggaaucaacaaggauuuaccagauuuuggcgaucuauucaacugucgccaguucauugguacugguagucucccugggggcaaucaguuucuggaugugcucuaaugggucucuacaguguagaauauguauuuaa

SEQ ID NO: 35685 - RNA, 1701 nt, Artificial Sequence; identical to SEQ ID NO: 34705
  derived and/or modified CDS sequence (wt) from hemagglutinin__InfluenzaA__ACZ16500

SEQ ID NO: 35686 - RNA, 1701 nt, Artificial Sequence; identical to SEQ ID NO: 35669
  derived and/or modified CDS sequence (wt) from hemagglutinin__InfluenzaA__ACZ16510

SEQ ID NO: 35687 - RNA, 1701 nt, Artificial Sequence
  derived and/or modified CDS sequence (wt) from hemagglutinin__InfluenzaA__ACZ16530
augaaggcaauacuaguaguucugcuauauacauuugcaaccgcaaaugcagacacauuauguauagguuaucaugcgaacaauucaacagacacuguagacacaguacuagaaaagaauguaacaguaacacacucuguuaaccuucuagaagacaagcauaacgggaaacuaugcaaacuaagagggguagccccauugcauuuggguaaauguaacauugcuggcuggauccugggaaauccagagugugaaucacucuccacagcaagcucaugguccuacauuguggaaacaucuaguucagacaauggaacguguuacccaggagauuucaucgauuaugaggagcuaagagagcaauugagcucagugucaucauuugaaagguuugagauauuccccaagacaaguucauggcccaaucaugacucgaacaaagguguaacggcagcauguccucaugcuggagcaaaaagcuucuacaaaaauuuaauauggcuaguuaaaaaaggaaauucauacccaaagcucagcaaauccuacauuaaugauaaagggaaagaaguccucgugcuauggggcauucaccauccaucuacuagugcugaccaacaaagucucuaucagaaugcagaugcauauguuuuuguggggucaucaagauacagcaagaaguucaagccggaaauagcaauaagacccaaagugagggaucaagaagggagaaugaacuauuacuggacacuaguagagccgggagacaaaauaacauucgaagcaacuggaaaucuagugguaccgagauaugcauucgcaauggaaagaaaugcuggaucugguauuaucauuucagauacaccaguccacgauugcaauacaacuugucagacacccaagggugcuauaaacaccagccucccauuucagaauauacauccgaucacaauuggaaaauguccaaaauauguaaaaagcacaaaauugagacuggccacaggauugaggaaugucccgucuauucaaucuagaggccuauuuggggccauugccgguuucauugaagggggguggacagggaugguagauggaugguacgguuaucaccaucaaaaugagcaggggucaggauaugcagccgaccugaagagcacacagaaugccauugacgaaauuacuaacaaaguaaauucuguuauugaaaagaugaauacacaguucacagcaguagguaaagaguucaaccaccuggaaaaaagaauagagaauuuaaauaaaaaaguugaugaugguuuccuggacauuuggacuuacaaugccgaacuguugguucuauuggaaaaugaaagaacuuuggacuaccacgauucaaaugugaagaacuuauaugaaaagguaagaagccaguuaaaaaacaaugccaaggaaauuggaaacggcugcuuugaauuuuaccacaaaugcgauaacacgugcauggaaagugucaaaaaugggacuuaugacuacccaaaauacucagaggaagcaaaauuaaacagagaagaaauagaugggguaaagcuggaaucaacaaggauuuaccagauuuuggcgaucuauucaacugucgccaguucauugguacugguagucucccugggggcaaucaguuucuggaugugcucuaaugggucucuacaguguagaauauguauuuaa

SEQ ID NO: 35688 - RNA, 1701 nt, Artificial Sequence
  derived and/or modified CDS sequence (wt) from hemagglutinin__InfluenzaA__ACZ16540
augaaggcaauacuaguaguucugcuauauacauuugcaaccgcaaaugcagacacauuauguauagguuaucaugcgaacaauucaacagacacuguagacacaguacuagaaaagaauguaacaguaacacacucuguuaacauucuagaagacaagcauaacgggaaacuaugcaaacuaagagggguagccccauugcauuuggguaaauguaacauugcuggcuggauccugggaaauccagagugugaaucacucuccacagcaagcucaugguccuacauuguggaaacaucuaguucagacaauggaacguguuacccaggagauuucaucgauuaugaggagcuaagagagcaauugagcucagugucaucauuugaaagguuugagauauuccccaagacaaguucauggcccaaucaugacucgaacaaagguguaacggcagcauguccucaugcuggagcaaaaagcuucuacaaaaauuuaauauggcuaguuaaaaaaggaaauucauacccaaagcucagcaaauccuacauuaaugauaaagggaaagagguccucgugcuauggggcauucaccauccaucuacuagugcugaccaacaaagucucuaucagaaugcagaugcauauguuuuuguggggucaucaagauacagcaagaaguucaagccggaaauagcaauaagacccaaagugagggaucaagaagggagaaugaacuauuacuggacacuaguagagccgggagacaaaauaacauucgaagcaacuggaaaucuagugguaccgagauaugcauucgcaauggaaagaaaugcuggaucugguauuaucauuucagauacaccaguccacgauugcaauacaacuugucagacacccaagggugcuauaaacaccagccucccauuucagaauauacauccgaucacaauuggaaaauguccaaaauauguaaaaagcacaaaauugagacuggccacaggauugaggaaugucccgucuauucaaucuagaggccuacuuggggccauugccgguuucauugaagggggguggacagggaugguagauggaugguacgguuaucaccaucaaaaugagcaggggucaggauaugcagccgaccugaagagcacacagaaugccauugacgagauuacuaacaaaguaaauucuguuauugaaaagaugaauacacaguucacagcaguagguaaagaguucaaccaccuggaaaaaagaauagagaauuuaaauaaaaaaguugaugaugguuuccuggacauuuggacuuacaaugccgaacuguugguucuauuggaaaaugaaagaacuuuggacuaccacgauucaaaugugaagaacuuauaugaaaagguaagaagccagcuaaaaaacaaugccaaggaaauuggaaacggcugcuuugaauuuuaccacaaaugcgauaacacgugcauggaaagugucaaaaaugggacuuaugacuacccaaaauacucagaggaagcaaaauuaaacagagaagaaauagaugggguaaaacuggaaucaacaaggauuuaccagauuuuggcgaucuauucaacugucgccaguucauugguacugguagucucccugggggcaaucaguuucuggaugugcucuaaugggucucuacaguguagaauauguauuuaa

SEQ ID NO: 35689 - RNA, 1701 nt, Artificial Sequence; identical to SEQ ID NO: 35411
  derived and/or modified CDS sequence (wt) from hemagglutinin__InfluenzaA__ACZ16550

SEQ ID NO: 35690 - RNA, 1701 nt, Artificial Sequence; identical to SEQ ID NO: 35576
  derived and/or modified CDS sequence (wt) from hemagglutinin__InfluenzaA__ACZ16583

SEQ ID NO: 35691 - RNA, 1701 nt, Artificial Sequence; identical to SEQ ID NO: 35411
  derived and/or modified CDS sequence (wt) from hemagglutinin__InfluenzaA__ACZ16593

SEQ ID NO: 35692 - RNA, 1701 nt, Artificial Sequence; identical to SEQ ID NO: 34705
  derived and/or modified CDS sequence (wt) from hemagglutinin__InfluenzaA__ACZ16603

SEQ ID NO: 35693 - RNA, 1701 nt, Artificial Sequence; identical to SEQ ID NO: 35411
  derived and/or modified CDS sequence (wt) from hemagglutinin__InfluenzaA__ACZ16630

SEQ ID NO: 35694 - RNA, 1701 nt, Artificial Sequence; identical to SEQ ID NO: 35377
  derived and/or modified CDS sequence (wt) from hemagglutinin__InfluenzaA__ACZ16640

SEQ ID NO: 35695 - RNA, 1701 nt, Artificial Sequence; identical to SEQ ID NO: 34705
  derived and/or modified CDS sequence (wt) from hemagglutinin__InfluenzaA__ACZ16650

SEQ ID NO: 35696 - RNA, 1701 nt, Artificial Sequence; identical to SEQ ID NO: 34705
  derived and/or modified CDS sequence (wt) from hemagglutinin__InfluenzaA__ACZ16660

SEQ ID NO: 35697 - RNA, 1701 nt, Artificial Sequence; identical to SEQ ID NO: 34705
  derived and/or modified CDS sequence (wt) from hemagglutinin__InfluenzaA__ACZ16670

SEQ ID NO: 35698 - RNA, 1701 nt, Artificial Sequence; identical to SEQ ID NO: 34705
  derived and/or modified CDS sequence (wt) from hemagglutinin__InfluenzaA__ACZ16680

SEQ ID NO: 35699 - RNA, 1701 nt, Artificial Sequence; identical to SEQ ID NO: 35661
  derived and/or modified CDS sequence (wt) from hemagglutinin__InfluenzaA__ACZ16690

SEQ ID NO: 35700 - RNA, 1701 nt, Artificial Sequence; identical to SEQ ID NO: 34705
  derived and/or modified CDS sequence (wt) from hemagglutinin__InfluenzaA__ACZ16700

SEQ ID NO: 35701 - RNA, 1701 nt, Artificial Sequence; identical to SEQ ID NO: 34705
  derived and/or modified CDS sequence (wt) from hemagglutinin__InfluenzaA__ACZ16710

SEQ ID NO: 35702 - RNA, 1701 nt, Artificial Sequence; identical to SEQ ID NO: 34705
  derived and/or modified CDS sequence (wt) from hemagglutinin__InfluenzaA__ACZ16720

SEQ ID NO: 35703 - RNA, 1701 nt, Artificial Sequence; identical to SEQ ID NO: 35411
  derived and/or modified CDS sequence (wt) from hemagglutinin__InfluenzaA__ACZ16730

SEQ ID NO: 35704 - RNA, 1701 nt, Artificial Sequence; identical to SEQ ID NO: 35411
  derived and/or modified CDS sequence (wt) from hemagglutinin__InfluenzaA__ACZ16740

SEQ ID NO: 35705 - RNA, 1701 nt, Artificial Sequence; identical to SEQ ID NO: 34705
  derived and/or modified CDS sequence (wt) from hemagglutinin__InfluenzaA__ACZ16750

SEQ ID NO: 35706 - RNA, 1701 nt, Artificial Sequence; identical to SEQ ID NO: 34705
  derived and/or modified CDS sequence (wt) from hemagglutinin__InfluenzaA__ACZ16760

SEQ ID NO: 35707 - RNA, 1701 nt, Artificial Sequence; identical to SEQ ID NO: 35653
  derived and/or modified CDS sequence (wt) from hemagglutinin__InfluenzaA__ACZ16770

SEQ ID NO: 35708 - RNA, 1701 nt, Artificial Sequence; identical to SEQ ID NO: 35679
  derived and/or modified CDS sequence (wt) from hemagglutinin__InfluenzaA__ACZ16780

SEQ ID NO: 35709 - RNA, 1701 nt, Artificial Sequence; identical to SEQ ID NO: 34705
  derived and/or modified CDS sequence (wt) from hemagglutinin__InfluenzaA__ACZ16790

SEQ ID NO: 35710 - RNA, 1701 nt, Artificial Sequence
  derived and/or modified CDS sequence (wt) from hemagglutinin__InfluenzaA__ACZ16800
augaaggcaauacuaguaguucugcuauauacauuugcaaccgcaaaugcagacacauuauguauagguuaucaugcgaacaauucaacagacacuguagacacaguacuagaaaagaauguaacaguaacacacucuguuaaccuucuagaagacaagcauaacgggaaacuaugcaaacuaagagggguagccccauugcauuuggguaaauguaacauugcuggcuggauccugggaaauccagagugugaaucacucuccacagcaagcucaugguccuacauuguggaaacaucuaguucagacaauggaacguguuacccaggagauuucaucgauuaugaggagcuaagagagcaauugagcucagugucaucauuugaaagguuugagauauuccccaagacaaguucauggcccaaucaugacucgaacaaagguguaacggcagcauguccucaugcuggagcaaaaagcuucuacaaaaauuuaauauggcuaguuaaaaaaggaaauucauacccaaagcucagcaaauccuacauuaaugauaaagggaaagaaguccucgugcuauggggcauucaccauccaucuacuagugcugaccaacaaagucucuaucagaaugcagaugcauauguuuuuguggggucaucaagauacagcaagaaguucaaaccggaaauagcaauaagacccaaagugagggaucaagaagggagaaugaacuauuacuggacacuaguagagccgggagacaaaauaacauucgaagcaacuggaaaucuagugguaccgagauaugcauucgcaauggaaagaaaugcuggaucugguauuaucauuucagauacaccaguccacgauugcaauacaacuugucagacacccaagggugcuauaaacaccagccucccauuucagaauauacauccgaucacaauuggaaaauguccaaaauauguaaaaagcacaaaauugagacuggccacaggauugaggaaugucccgucuauucaaucuagaggccuauuuggggccauugccgguuucauugaagggggguggacagggaugguagauggaugguacgguuaucaccaucaaaaugagcaggggucaggauaugcagccgaccugaagagcacacagaaugccauugacgagauuacuaacaaaguaaauucuguuauugaaaagaugaauacacaguucacagcaguagguaaagaguucaaccaccuggaaaaaagaauagagaauuuaaauaaaaaaguugaugaugguuuccuggacauuuggacuuacaaugccgaacuguugguucuauuggaaaaugaaagaacuuuggacuaccacgauucaaaugugaagaacuuauaugaaaagguaagaagccaguuaaaaaacaaugccaaggaaauuggaaacggcugcuuugaauuuuaccacaaaugcgauaacacgugcauggaaagugucaaaaaugggacuuaugacuacccaaaauacucagaggaagcaaaauuaaacagagaagaaauagaugggguaaagcuggaaucaacaaggauuuaccagauuuuggcgaucuauucaacugucgccaguucauugguacugguagucucccugggggcaaucaguuucuggaugugcucuaaugggucucuacaguguagaauauguauuuaa

SEQ ID NO: 35711 - RNA, 1701 nt, Artificial Sequence; identical to SEQ ID NO: 34705
  derived and/or modified CDS sequence (wt) from hemagglutinin__InfluenzaA__ACZ16810

SEQ ID NO: 35712 - RNA, 1701 nt, Artificial Sequence
  derived and/or modified CDS sequence (wt) from hemagglutinin__InfluenzaA__ACZ16820
augaaggcaauacuaguaguucugcuauauacauuuacaaccgcaaaugcagacacauuauguauagguuaucaugcgaacaauucaacagacacuguagacacaguacuagaaaagaauguaacaguaacacacucuguuaaccuucuagaagacaagcauaacgggaaacuaugcaaacuaagagggguagccccauugcauuuggguaaauguaacauugcuggcuggauccugggaaauccagagugugaaucacucuccacagcaagcucaugguccuacauuguggaaacaucuaguucagacaauggaacguguuacccaggagauuucaucgauuaugaggagcuaagagagcaauugagcucagugucaucauuugaaagguuugagauauuccccaagacaaguucauggcccaaucaugacucgaacaaagguguaacggcagcauguccucaugcuggagcaaaaagcuucuacaaaaauuuaauauggcuaguuaaaaaaggaaauucauacccaaagcucagcaaauccuacauuaaugauaaagggaaagaaguccucgugcuauggggcauucaccauccaucuacuagugcugaccaacaaagucucuaucagaaugcagaugcauauguuuuuguggggucaucaagauacagcaagaaguucaagccggaaauagcaauaagacccaaagugagggaucaagaggggagaaugaacuauuacuggacacuaguagagccgggagacaaaauaacauucgaagcaacuggaaaucuagugguaccgagauaugcauucgcaauggaaagaaaugcuggaucugguauuaucauuucagauacaccaguccacgauugcaauacaacuugucagacacucaagggugcuauaaacaccagccucccauuucagaauauacauccgaucacaauuggaaaauguccaaaauauguaaaaagcacaaaauugagacuggccacaggauugaggaaugucccgucuauucaaucuagaggccuauuuggggcuauugccgguuucauugaagggggguggacagggaugguagauggaugguacgguuaucaccaucaaaaugagcaggggucaggauaugcagccgaccugaagagcacacagaaugccauugacgagauuacuaacaaaguaaauucuguuauugaaaagaugaauacacaguucacagcaguagguaaagaguucaaccaccuggaaaaaagaauagagaauuuaaauaaaaaaguugaugaugguuuccuggacauuuggacuuacaaugccgaacuguugguucuauuggaaaaugaaagaacuuuggacuaccacgauucaaaugugaagaacuuauaugaaaagguaagaagccagcuaaaaaacaaugccaaggaaauuggaaacggcugcuuugaauuuuaccacaaaugcgauaacacgugcauggaaagugucaaaaaugggacuuaugacuacccaaaauacucagaggaagcaaaauuaaacagagaagaaauagaugggguaaagcuggaaucaacaaggauuuaccagauuuuggcgaucuauucaacugucgccaguucauugguacugguagucucccugggggcaaucaguuucuggaugugcucuaaugggucucuacaguguagaauauguauuuaa

SEQ ID NO: 35713 - RNA, 1701 nt, Artificial Sequence; identical to SEQ ID NO: 34705
  derived and/or modified CDS sequence (wt) from hemagglutinin__InfluenzaA__ACZ16830

SEQ ID NO: 35714 - RNA, 1701 nt, Artificial Sequence
  derived and/or modified CDS sequence (wt) from hemagglutinin__InfluenzaA__ACZ16840
augaaggcaauacuaguaguucugcuauauacauuugcaaccgcaaaugcagacacauuauguauagguuaucaugcgaacaauucaacagacacuguagacacaguacuagaaaagaauguaacaguaacacacucuguuaaccuucuagaagacaagcauaacgggaaacuaugcaaacuaagagggguagccccauugcauuuggguaaauguaacauugcuggcuggauccugggaaauccagagugugaaucacucuccacagcaagcucaugguccuacauuguggaaacaucuaguucagacaauggaacguguuacccaggagauuucaucgauuaugaggagcuaagagagcaauugagcucagugucaucauuugaaagguuugagauauuccccaagacaaguucauggcccaaucaugacucgaacaaagguguaacggcagcauguccucaugcuggagcaaaaagcuucuacaaaaauuuaauauggcuaguuaaaaaaggaaauucauacccaaagcucagcaaauccuacauuaaugauaaagggaaagaaguccucgugcuauggggcauucaccauccaucuacuagugcugaccaacaaagucucuaucagaaugcagaugcauauguuuuuguggggucaucaagauacagcaagaaguucaagccggaaauagcaauaagaaccaaagugagggaucaagaagggagaaugaacuauuacuggacacuaguagagccgggagacaaaauaacauucgaagcaacuggaaaucuagugguaccgagauaugcauucgcaauggaaagaaaugcuggaucugguauuaucauuucagauacaccaguccacgauugcaauacaacuugucagacacccaagggugcuauaaacaccagccucccauuucagaauauacauccgaucacaauuggaaaauguccaaaauauguaaaaagcacaaaauugagacuggccacaggauugaggaaugucccgucuauucaaucuagaggccuauuuggggccauugccgguuucauugaagggggguggacagggaugguagauggaugguacgguuaucaccaucaaaaugagcaggggucaggauaugcagccgaccugaagagcacacagaaugccauugacgagauuacuaacaaaguaaauucuguuauugaaaagaugaauacacaguucacagcaguagguaaagaguucaaccaccuggaaaaaagaauagagaauuuaaauaaaaaaguugaugaugguuuccuggacauuuggacuuacaaugccgaacuguugguucuauuggaaaaugaaagaacuuuggacuaccacgauucaaaugugaagaacuuauaugaaaagguaagaagccaguuaaaaaacaaugccaaggaaauuggaaacggcugcuuugaauuuuaccacaaaugcgauaacacgugcauggaaagugucaaaaaugggacuuaugacuacccaaaauacucagaggaagcaaaauuaaacagagaagaaauagaugggguaaagcuggaaucaacaaggauuuaccagauuuuggcgaucuauucaacugucgccaguucauugguacugguagucucccugggggcaaucaguuucuggaugugcucuaaugggucucuacaguguagaauauguauuuaa

SEQ ID NO: 35715 - RNA, 1701 nt, Artificial Sequence; identical to SEQ ID NO: 34705
  derived and/or modified CDS sequence (wt) from hemagglutinin__InfluenzaA__ACZ16850

SEQ ID NO: 35716 - RNA, 1701 nt, Artificial Sequence
  derived and/or modified CDS sequence (wt) from hemagglutinin__InfluenzaA__ACZ16860
augaaggcaauacuaguaguucugcuauauacauuugcaaccgcaaaugcagacacauuauguauagguuaucaugcgaacaauucaacagacacuguagacacaguacuagaaaagaauguaacaguaacacacucuguuaaccuucuagaagacaagcauaacgggaaacuaugcaaacuaagaggaguagccccauugcauuuggguaaauguaacauugcuggcuggauccugggaaauccagagugugaaucacucuccacagcaagcucaugguccuacauuguggaaacaucuaguucagacaauggaacguguuacccaggagauuucaucgauuaugaggagcuaagagagcaauugagcucagugucaucauuugaaagguuugagauauuccccaagacaaguucauggcccaaucaugacucgaacaaagguguaacggcagcauguccucaugcuggagcaaaaagcuucuacaaaaauuuaauauggcuaguuaaaaaaggaaauucauacccaaagcucagcaaauccuacauuaaugauaaagggaaagaaguccucgugcuauggggcauucaccauccaucuacuagugcugaccaacaaagucucuaucagaaugcagaugcauauguuuuuguggggucaucaagauacagcaagaaguucaagccggaaauagcaauaagacccaaagugagggaucaagaagggagaaugaacuauuacuggacacuaguagagccgggagacaaaauaacauucgaagcaacuggaaaucuaguggcaccgagauaugcauucgcaauggaaagaaaugcuggaucugguauuaucauuucagauacaccaguccacgauugcaauacaacuugucagacacccaagggugcuauaaacaccagccucccauuucagaauauacauccgaucacaauuggaaaauguccaaaauauguaaaaagcacaaaauugagacuggccacaggauugaggaaugucccgucuauucaaucuagaggccuauuuggggccauugccgguuucauugaagggggguggacagggaugguagauggaugguacgguuaucaccaucaaaaugagcaggggucaggauaugcagccgaccugaagagcacacagaaugccauugacgagauuacuaacaaaguaaauucuguuauugaaaagaugaauacacaguucacagcaguagguaaagaguucaaccaccuggaaaaaagaauagagaauuuaaauaaaaaaguugaugaugguuuccuggacauuuggacuuacaaugccgaacuguugguucuauuggaaaaugaaagaacuuuggacuaccacgauucaaaugugaagaacuuauaugaaaagguaagaagccaguuaaaaaacaaugccaaggaaauuggaaacggcugcuuugaauuuuaccacaaaugcgauaacacgugcauggaaagugucaaaaaugggacuuaugacuacccaaaauacucagaggaagcaaaauuaaacagagaagaaauagaugggguaaagcuggaaucaacaaggauuuaccagauuuuggcgaucuauucaacugucgccaguucauugguacugguagucucccugggggcaaucaguuucuggaugugcucuaaugggucucuacaguguagaauauguauuuaa

SEQ ID NO: 35717 - RNA, 1701 nt, Artificial Sequence
  derived and/or modified CDS sequence (wt) from hemagglutinin__InfluenzaA__ACZ16870
augaaggcaauacuaguaguucugcuauauacauuugcaaccgcaaaugcagacacauuauguauagguuaucaugcgaacaauucaacagacacuguagacacaguacuagaaaagaauguaacaguaacacacucuguuaaccuucuagaagacaagcauaacgggaaacuaugcaaacuaagagggguagccccauugcauuuggguaaauguaacauugcuggcuggauccugggaaauccagagugugaaucacucuccacagcaagcucaugguccuacauuguggaaacaucuaguucagacaauggaacguguuacccaggagauuucaucgauuaugaggagcuaagagagcaauugagcucagugucaucauuugaaagguuugagauauuccccaagacaaguucauggcccaaucaugacucgaacaaagguguaacggcagcauguccucaugcuggagcaaaaagcuucuacaaaaauuuaauauggcuaguuaaaaaaggaaauucauacccaaagcucagcaaauccuacauuaaugauaaagggaaagaaguccucgugcuauggggcauucaccauccaucuacuagugcugaccaacaaagucucuaucagaaugcagaugcauauguuuuuguggggucaucaagauacagcaagaaguucaagccggaaauagcaauaagacccaaagugagggaucaagaagggagaaugaacuauuacuggacacuaguagagccgggagacaaaauaacauucgaagcaacuggaaaucuagugguaccgagauaugcauucgcaauggaaagaaaugcuggaucugguauuaucauuucagauacaccaguccacgauugcaauacaacuugucagacacccaagggugcuauaaacaccagccucccauuucagaauauacauccgaucacaauuggaaaauguccaaaauauguaaaaagcacaaaauugagacuggccacaggauugaggaauaucccgucuauucaaucuagaggccuauuuggggccauugccgguuucauugaagggggguggacagggaugguagauggaugguacgguuaucaccaucaaaaugagcaggggucaggauaugcagccgaccugaagagcacacagaaugccauugacgagauuacuaacaaaguaaauucuguuauugaaaagaugaauacacaguucacagcaguagguaaagaguucaaccaccuggaaaaaagaauagagaauuuaaauaaaaaaguugaugaugguuuccuggacauuuggacuuacaaugccgaacuguugguucuauuggaaaaugaaagaacuuuggacuaccacgauucaaaugugaagaacuuauaugaaaagguaagaagccaguuaaaaaacaaugccaaggaaauuggaaacggcugcuuugaauuuuaccacaaaugcgauaacacgugcauggaaagugucaaaaaugggacuuaugacuacccaaaauacucagaggaagcaaaauuaaacagagaagaaauagaugggguaaagcuggaaucaacaaggauuuaccagauuuuggcgaucuauucaacugucgccaguucauugguacugguagucucccugggggcaaucaguuucuggaugugcucuaaugggucucuacaguguagaauauguauuuga

SEQ ID NO: 35718 - RNA, 1701 nt, Artificial Sequence
  derived and/or modified CDS sequence (wt) from hemagglutinin__InfluenzaA__ACZ16880
augaaggcaauacuaguaguucugcuauauacauuugcaaccgcaaaugcagacacauuauguauagguuaucaugcgaacaauucaacagacacuguagacacaguacuagaaaagaauguaacaguaacacacucuguuaaccuucuagaagacaagcauaacgggaaacuaugcaaacuaagagggguagccccauugcauuuggguaaauguaacauugcuggcuggauccugggaaauccagagugugaaucacucuccacagcaagcucaugguccuacauuguggaaacaucuaguucagacaauggaacguguuacccaggagauuucaucgauuaugaggagcuaagagagcaauugagcucagugucaucauuugaaagguuugagauauuccccaagacaaguucauggcccaaucaugacucgaacaaagguguaacggcagcauguccucaugcuggagcaaaaagcuucuacaaaaauuuaauauggcuaguuaaaaaaggaaauucauacccaaagcucagcaaauccuacauuaaugauaaagggaaagaaguccucgugcuauggggcauucaccauccaucuacuagugcugaccaacaaagucucuaucagaaugcagaugcauauguuuuuguggggucaucaagauacagcaagaaguucaagccggaaauagcaauaagacccaaagugagggaucaagaagggagaaugaacuauuacuggacacuaguagagccgggagacaaaauaacauucgaagcaacuggaaaucuagugguaccgagauaugcauucgcaauggaaagaaaugauggaucugguauuaucauuucagauacaccaguccacgauugcaauacaacuugucagacacccaagggugcuauaaacaccagccucccauuucagaauauacauccgaucacaauuggaaaauguccaaaauauguaaaaagcacaaaauugagacuggccacaggauugaggaaugucccgucuauucaaucuagaggccuauuuggggccauugccgguuucauugaagggggguggacagggaugguagauggaugguacgguuaucaccaucaaaaugagcaggggucaggauaugcagccgaccugaagagcacacagaaugccauugacgagauuacuaacaaaguaaauucuguuauugaaaagaugaauacacaguucacagcaguagguaaagaguucaaccaccuggaaaaaagaauagagaauuuaaauaaaaaaguugaugaugguuuccuggacauuuggacuuacaaugccgaacuguugguucuauuggaaaaugaaagaacuuuggacuaccacgauucaaaugugaagaacuuauaugaaaagguaagaagccaguuaaaaaacaaugccaaggaaauuggaaacggcugcuuugaauuuuaccacaaaugcaauaacacgugcauggaaagugucaaaaaugggacuuaugacuacccaaaauacucagaggaagcaaaauuaaacagagaagaaauagaugggguaaagcuggaaucaacaaggauuuaccagauuuuggcgaucuauucaacugucgccaguucauugguacugguagucucccugggggcaaucaguuucuggaugugcucuaaugggucucuacaguguagaauauguauuuaa

SEQ ID NO: 35719 - RNA, 1701 nt, Artificial Sequence
  derived and/or modified CDS sequence (wt) from hemagglutinin__InfluenzaA__ACZ16890
augaaggcaauacuaguaguucugcuauauacauuugcaaccgcaaaugcagacacauuauguauagguuaucaugcgaacaauucaacagacacuguagacacaguacuagaaaagaauguaacaguaacacauucuguuaaccuucuagaagacaagcauaacgggaaacuaugcaaacuaagagggguagccccauugcauuuggguaaauguaacauugcuggcuggauccugggaaauccagagugugaaucacucuccacagcaagcucaugguccuacauuguggaaacaucuaguucagacaauggaacguguuacccaggagauuucaucgauuaugaggagcuaagagagcaauugagcucagugucaucauuugaaagguuugagauauuccccaagacaaguucauggcccaaucaugacucgaacaaagguguaacggcagcauguccucaugcuggagcaaaaagcuucuacaaaaauuuaauauggcuaguuaaaaaaggaaauucauacccaaagcucagcaaauccuacauuaaugauaaagggaaagaaguccucgugcuauggggcauucaccauccaucuacuagugcugaccaacaaagucucuaucagaaugcagaugcauauguuuuuguggggucaucaagauacagcaagaaguucaagccggaaauagcaauaagacccaaagugagggaucaagaagggagaaugaacuauuacuggacacuaguagagccgggagacaaaauaacauucgaagcaacuggaaaucuauugguaccgagauaugcauucgcaauggaaagaaaugcuggaucugguauuaucauuucagauacaccaguccacgauugcaauacaacuugucagacacccaagggugcuauaaacaccagccucccauuucagaauauacauccgaucacaauuggaaaauguccaaaauauguaaaaagcacaaaauugagacuggccacaggauugaggaaugucccgucuauucaaucuagaggccuauuuggggccauugccgguuucauugaagggggguggacagggaugguagauggaugguacgguuaucaccaucaaaaugagcaggggucaggauaugcagccgaccugaagagcacacagaaugccauugacgagauuacuaacaaaguaaauucuguuauugaaaagaugaauacacaguucacagcaguagguaaagaguucaaccaccuggaaaaaagaauagagaauuuaaauaaaaaaguugaugaugguuuccuggacauuuggacuuacaaugccgaacuguugguucuauuggaaaaugaaagaacuuuggacuaccacgauucaaaugugaagaacuuauaugaaaagguaagaagccaguuaaaaaacaaugccaaggaaauuggaaacggcugcuuugaauuuuaccacaaaugcgauaacacgugcauggaaagugucaaaaaugggacuuaugacuacccaaaauacucagaggaagcaaaauuaaacagagaagaaauagaugggguaaagcuggaaucaacaaggauuuaccagauuuuggcgaucuauucaacugucgccaguucauugguacugguagucucccugggggcaaucaguuucuggaugugcucuaaugggucucuacaguguagaauauguauuuaa

SEQ ID NO: 35720 - RNA, 1701 nt, Artificial Sequence; identical to SEQ ID NO: 34705
  derived and/or modified CDS sequence (wt) from hemagglutinin__InfluenzaA__ACZ16900

SEQ ID NO: 35721 - RNA, 1701 nt, Artificial Sequence
  derived and/or modified CDS sequence (wt) from hemagglutinin__InfluenzaA__ACZ16910
augaaggcaauacuaguaguucugcuauauacauuugcaaccgcaaaugcagacacauuauguauagguuaucaugcgaacaauucaacagacacuguagacacaguacuagaaaagaauguaacaguaacacacucuguuaaccuucuagaagacaagcauaacgggaaacuaugcaaacuaagagggguagccccauugcauuuggguaaauguaacauugcuggcuggauccuggggaauccagagugugaaucacucuccacagcaagcucaugguccuacauuguggaaacaucuaguucagacaauggaacguguuacccaggagauuucaucgauuaugaggagcuaagagagcaauugagcucagugucaucauuugaaagguuugagauauuccccaagacaaguucauggcccaaucaugacucgaacaaagguguaacggcagcauguccucaugcuggagcaaaaagcuucuacaaaaauuuaauauggcuaguuaaaaaaggaaauucauacccaaagcucagcaaauccuacauuaaugauaaagggaaagaaguccucgugcuauggggcauucaccauccaucuacuagugcugaccaacaaagucucuaucagaaugcagaugcauauguuuuuguggggucaucaagauacagcaagaaguucaagccggaaauagcaauaagacccaaagugagggaucaagaagggagaaugaacuauuacuggacacuaguagagccgggagacaaaauaacauucgaagcaacuggaaaucuagugguaccgagauaugcauucgcaauggaaagaaaugcuggaucugguauuaucauuucagauacaccaguccacgauugcaauacaacuugucagacacccaagggugcuauaaacaccagccucccauuucagaauauacauccgaucacaauuggaaaauguccaaaauauguaaaaagcacaaaauugagacuggccacaggauugaggaaugucccgucuauucaaucuagaggccuauuuggggccauugccgguuucauugaagggggguggacagggaugguagauggaugguacgguuaucaccaucaaaaugagcaggggucaggauaugcagccgaccugaagagcacacagaaugccauugacgagauuacuaacaaaguaaauucuguuauugaaaagaugaauacacaguucacagcaguagguaaagaguucaaccaccuggaaaaaagaauagagaauuuaaauaaaaaaguugaugaugguuuccuggacauuuggacuuacaaugccgaacuguugguucuauuggaaaaugaaagaacuuuggacuaccacgauucaaaugugaagaacuuauaugaaaagguaagaagccaguuaaaaaacaaugccaaggaaauuggaaacggcugcuuugaauuuuaccacaaaugcgauaacacgugcauggaaagugucaaaaaugggacuuaugacuacccaaaauacucagaggaagcaaaauuaaacagagaagaaauagaugggguaaagcuggaaucaacaaggauuuaccagauuuuggcgaucuauucaacugucgccaguucauugguacugguagucucccugggggcaaucaguuucuggaugugcucuaaugggucucuacaguguagaauauguauuuaa

SEQ ID NO: 35722 - RNA, 1701 nt, Artificial Sequence; identical to SEQ ID NO: 34705
  derived and/or modified CDS sequence (wt) from hemagglutinin__InfluenzaA__ACZ16920

SEQ ID NO: 35723 - RNA, 1701 nt, Artificial Sequence; identical to SEQ ID NO: 34681
  derived and/or modified CDS sequence (wt) from hemagglutinin__InfluenzaA__ACZ16930

SEQ ID NO: 35724 - RNA, 1701 nt, Artificial Sequence; identical to SEQ ID NO: 34681
  derived and/or modified CDS sequence (wt) from hemagglutinin__InfluenzaA__ACZ16940

SEQ ID NO: 35725 - RNA, 1701 nt, Artificial Sequence; identical to SEQ ID NO: 34676
  derived and/or modified CDS sequence (wt) from hemagglutinin__InfluenzaA__ACZ16950

SEQ ID NO: 35726 - RNA, 1701 nt, Artificial Sequence
  derived and/or modified CDS sequence (wt) from hemagglutinin__InfluenzaA__ACZ16960
auggaggcaauacuaguaguucugcuauauacauuugcaaccgcaaaugcagacacauuauguauagguuaucaugcgaacaauucaacagacacuguagacacaguacuagaaaagaauguaacaguaacacacucuguuaaccuucuagaagacaagcauaacgggaaacuaugcaaacuaagagggguagccccauugcauuuggguaaauguaacauugcuggcuggauccugggaaauccagagugugaaucacucuccacagcaagcucaugguccuacauuguggaaacaucuaguucagacaauggaacguguuacccaggagauuucaucgauuaugaggagcuaagagagcaauugagcucagugucaucauuugaaagguuugagauauuccccaagacaaguucauggcccaaucaugacucgaacaaagguguaacggcagcauguccucaugcuggagcaaaaagcuucuacaaaaauuuaauauggcuaguuaaaaaaggaaauucauacccaaagcucagcaaauccuacauuaaugauaaagggaaagaaguccucgugcuauggggcauucaccauccaucuacuagugcugaccaacaaagucucuaucagaaugcagaugcauauguuuuuguggggucaucaagauacagcaagaaguucaagccggaaauagcaauaagacccaaagugagggaucaagaagggagaaugaacuauuacuggacacuaguagagccgggagacaaaauaacauucgaagcaacuggaaaucuagugguaccgagauaugcauucgcaauggaaagaaaugcuggaucugguauuaucauuucagauacaccaguccacgauugcaauacaacuugucagacacccaagggugcuauaaacaccagccucccauuucauaauauacauccgaucacaauuggaaaauguccaaaauauguaaaaagcacaaaauugagacuggccacaggauugaggaaugucccgucuauucaaucuagaggccuauuuggggccauugccgguuucauugaagggggguggacagggaugguagauggaugguacgguuaucaccaucaaaaugagcaggggucaggauaugcagccgaccugaagagcacacagaaugccauugacgagauuacuaacaaaguaaauucuguuauugaaaagaugaauacacaguucacagcgguagguaaagaguucaaccaccuggaaaaaagaauagagaauuuaaauaaaaaaguugaugaugguuuccuggacauuuggacuuacaaugccgaacuguugguucuauuggaaaaugaaagaacuuuggacuaccacgauucaaaugugaagaacuuauaugaaaagguaagaagccaguuaaaaaacaaugccaaggaaauuggaaacggcugcuuugaauuuuaccacaaaugcgauaacacgugcauggaaagugucaaaaaugggacuuaugacuacccaaaauacucagaggaagcaaaauuaaacagagaagaaauagaugggguaaagcuggaaucaacaaggauuuaccagauuuuggcgaucuauucaacugucgccaguucauugguacugguagucucccugggggcaaucaguuucuggaugugcucuaaugggucucuacaguguagaauauguauuuaa

SEQ ID NO: 35727 - RNA, 1701 nt, Artificial Sequence
  derived and/or modified CDS sequence (wt) from hemagglutinin__InfluenzaA__ACZ16970
augaaggcaauacuaguaguucugcuauauacauuugcaaccgcaaaugcagacacauuauguauagguuaucaugcgaacaauucaacagacacuguagacacaguacuagaaaagaauguaacaguaacacacucuguuaaccuucuagaagacaagcauaacgggaaacuaugcaaacuaagagggguagccccauugcauuuggguaaauguaacauugcuggcuggauccugggaaauccagagugugaaucacucuccacagcaagcucaugguccuacauuguggaaacaucuaguucagacaauggaacguguuacccaggagauuucaucgauuaugaggagcuaagagagcaauugagcucagugucaucauuugaaagguuugagauauuccccaagacaaguucauggcccaaucaugacucgaacaaagguguaacggcagcauguccucaugcuggagcaaaaagcuucuacaaaaauuuaauauggcuaguuaaagaaggaaauucauacccaaagcucagcaaauccuacauuaaugauaaagggaaagaaguccucgugcuauggggcauucaccauccaucuacuagugcugaccaacaaagucucuaucagaaugcagaugcauauguuuuuguggggacaucaagauacagcaagaaguucaagccggaaauagcaauaagacccaaagugagggaucaagaagggagaaugaacuauuacuggacacuaguagagccgggagacaaaauaacauucgaagcaacuggaaaucuagugguaccgagauaugcauucgcaauggaaagaaaugcuggaucugguauuaucauuucagauacaccaguccacgauugcaauacaacuugucagacacccaagggugcuauaaacaccagccucccauuucagaauauacauccgaucacaauugggaaauguccaaaauauguaaaaagcacaaaauugagacuggccacaggauugaggaaugucccgucuauucaaucuagaggccuauuuggggccauugccgguuucauugaagggggguggacagggaugguagauggaugguacgguuaucaccaucaaaaugagcaggggucaggauaugcagccgaccugaagagcacacagaaugccauugacgagauuacuaacaaaguaaauucuguuauugaaaagaugaauacacaguucacagcaguagguaaagaguucaaccaccuggaaaaaagaauagagaauuuaaauaaaaaaguugaugaugguuuccuggacauuuggacuuacaaugccgaacuguugguucuauuggaaaaugaaagaacuuuggacuaccacgauucaaaugugaagaacuuauaugaaaagguaagaagccaguuaaaaaacaaugccaaggaaauuggaaacggcugcuuugaauuuuaccacaaaugcgauaacacgugcauggaaagugucaaaaaugggacuuaugacuacccaaaauacucagaggaagcaaaauuaaacagagaagaaauagaugggguaaagcuggaaucaacaaggauuuaccagauuuuggcgaucuauucaacugucgccaguucauugguacugguagucucccugggggcaaucaguuucuggaugugcucuaaugggucucuacaguguagaauauguauuuaa

SEQ ID NO: 35728 - RNA, 1701 nt, Artificial Sequence
  derived and/or modified CDS sequence (wt) from hemagglutinin__InfluenzaA__ACZ16980
augaaggcaauacuaguaguucugcuauauacauuugcaaccgcaaaugcagacacauuauguauagguuaucaugcgaacaauucuacagacacuguagacacaguacuagaaaagaauguaacaguaacacacucuguuaaccuucuagaagacaagcauaacgggaaacuaugcaaacuaagagggguagccccauugcauuuggguaaauguaacauugcuggcuggauccugggaaauccagagugugaaucacucuccacagcaagcucaugguccuacauuguggaaacaucuaguucagacaauggaacguguuacccaggagauuucaucgauuaugaggagcuaagagagcaauugagcucagugucaucauuugaaagguuugagauauuccccaagacaaguucauggcccaaucaugacucgaacaaagguguaacggcagcauguccucaugcuggagcaaaaagcuucuacaaaaauuuaauauggcuaguuaaaaaaggaaauucauacccaaagcucagcaaauccuacauuaaugauaaagggaaagaaguccucgugcuauggggcauucaccauccaucuacuagugcugaccaacaaagucucuaucagaaugcagaugcauauguuuuuguggggacaucaagauacagcaagaaguucaagccggaaauagcaauaagacccaaagugagggaucaagaagggagaaugaacuauuacuggacacuaguagagccgggagacaaaauaacauucgaagcaacuggaaaucuagugguaccgagauaugcauucgcaauggaaagaaaugcuggaucugguauuaucauuucagauacaccaguccacgauugcaauacaacuugucagacacccaagggugcuauaaacaccagccucccauuucagaauauacauccgaucacaauuggaaaauguccaaaauauguaaaaagcacaaaauugagacuggccacaggauugaggaaugucccgucuauucaaucuagaggccuauuuggggccauugccgguuucauugaagggggguggacagggaugguagauggaugguacgguuaucaccaucaaaaugagcaggggucaggauaugcagccgaccugaagagcacacagaaugccauugacgagauuacuaacaaaguaaauucuguuauugaaaagaugaauacacaguucacagcaguagguaaagaguucaaccaccuggaaaaaagaauagagaauuuaaauaaaaaaguugaugaugguuuccuggacauuuggacuuacaaugccgaacuguugguucuauuggaaaaugaaagaacuuuggacuaccacgauucaaauguaaagaacuuauaugaaaagguaagaagccaguuaaaaaacaaugccaaggaaauuggaaacggcugcuuugaauuuuaccacaaaugcgauaacacgugcauggaaagugucaaaaaugggacuuaugacuacccaaaauacucagaggaagcaaaauuaaacagagaagaaauagaugggguaaagcuggaaucaacaaggauuuaccagauuuuggcgaucuauucaacugucgccaguucauugguacugguagucucccugggggcaaucaguuucuggaugugcucuaaugggucucuacaguguagaauauguauuuaa

SEQ ID NO: 35729 - RNA, 1701 nt, Artificial Sequence; identical to SEQ ID NO: 34681
  derived and/or modified CDS sequence (wt) from hemagglutinin__InfluenzaA__ACZ17000

SEQ ID NO: 35730 - RNA, 1701 nt, Artificial Sequence
  derived and/or modified CDS sequence (wt) from hemagglutinin__InfluenzaA__ACZ17010
augaaggcaauacuaguaguucugcuauauacauuugcaaccgcaaaugcagacacauuauguauagguuaucaugcgaacaauucaacagacacuguagacacaguacuagaaaagaauguaacaguaacacacucuguuaaccuucuagaagacaagcauaacgggaaacuaugcaaacuaagagggguagccccauugcauuuggguaaauguaacauugcuggcuggauccugggaaauccagagugugaaucacucuccacagcaagcucaugguccuacauuguggaaacaucuaguucagacaauggaacguguuacccaggagauuucaucgauuaugaggagcuaagagagcaauugagcucagugucaucauuugaaagguuugagauauuccccaagacaaguucauggcccaaucaugacucgaacaaagguguaacggcagcauguccucaugcuggagcaaaaagcuucuacaaaaauuuaauauggcuaguuaaaaaaggaaauucauacccaaagcucagcaaauccuacauuaaugauaaagggaaagaaguccucgugcuauggggcauucaccauccaucuacuagugcugaccaacaaagucucuaucagaaugcagaugcauauguuuuuguggggucaucaaaauacagcaagaaguucaagccggaaauagcaauaagacccaaagugagggaucaagaagggagaaugaacuauuacuggacacuaguagagccgggagacaaaauaacauucgaagcaacuggaaaucuagugguaccgagauaugcauucgcaauggaaagaaaugcuggaucugguauuaucauuucagauacaccaguccacgauugcaauacaacuugucagacacccaagggugcuauaaacaccagccucccauuucagaauauacauccgaucacaauuggaaaauguccaaaauauguaaaaagcacaaaauugagacuggccacaggauugaggaaugucccgucuauucaaucuagaggccuauuuggggccauugccgguuucauugaagggggguggacagggaugguagauggaugguacgguuaucaccaucaaaaugagcaggggucaggauaugcagccgaccugaagagcacacagaaugccauugacaagauuacuaacaaaguaaauucuguuauugaaaagaugaauacacaguucacagcaguagguaaagaguucaaccaccuggaaaaaagaauagagaauuuaaauaaaaaaguugaugaugguuuccuggacauuuggacuuacaaugccgaacuguugguucuauuggaaaaugaaagaacuuuggacuaccacgauucaaaugugaagaacuuauaugaaaagguaagaagccaguuaaaaaacaaugccaaggaaauuggaaacggcugcuuugaauuuuaccacaaaugcgauaacacgugcauggaaagugucaaaaaugggacuuaugacuacccaaaauacucagaggaagcaaaauuaaacagagaagaaauagaugggguaaagcuggaaucaacaaggauuuaccagauuuuggcgaucuauucaacugucgccaguucauugguacugguagucucccugggggcaaucaguuucuggaugugcucuaaugggucucuacaguguagaauauguauuuaa

SEQ ID NO: 35731 - RNA, 1701 nt, Artificial Sequence
  derived and/or modified CDS sequence (wt) from hemagglutinin__InfluenzaA__ACZ17020
augaaggcaauacuaguaguucugcuauauacauuugcaaccgcaaaugcagacacauuauguauagguuaucaugcgaacaauucaacagacacuguagacacaguacuagaaaagaauguaacaguaacacacucuguuaaccuucuagaagacaagcauaacgggaaacuaugcaaacuaagagggguagccccauugcauuuggguaaauguaacauugcuggcuggauccugggaaauccagagugugagucacucuccacagcaagcucaugguccuacauuguggaaacaucuaguucagacaauggaacguguuacccaggagauuucaucgauuaugaggagcuaagagagcaauugagcucagugucaucauuugaaagguuugagauauuccccaagacaaguucauggcccaaucaugacucgaacaaagguguaacggcagcauguccucaugcuggagcaaaaagcuucuacaaaaauuuaauauggcuaguuaaaaaaggaaauucauacccaaagcucagcaaauccuacauuaaugauaaagggaaagaaguccucgugcuauggggcauucaccauccaucuacuagugcugaccaacaaagucucuaucagaaugcagaugcauauguuuuuguggggacaucaagauacagcaagaaguucaagccggaaauagcaauaagacccaaagugagggaucaagaagggagaaugaacuauuacuggacacuaguagagccgggagacaaaauaacauucgaagcaacuggaaaucuagugguaccgagauaugcauucgcaauggaaagaaaugcuggaucugguauuaucauuucagauacaccaguccacgauugcaauacaacuugucagacacccaagggugcuauaaacaccagccucccauuucagaauauacauccgaucacaauuggaaaaugucccaaauauguaaaaagcacaaaauugagacuggccacaggauugaggaaugucccgucuauucaaucuagaggccuauuuggggccauugccgguuucauugaagggggguggacagggaugguagauggaugguacgguuaucaccaucaaaaugagcaggggucaggauaugcagccgaccugaagagcacacagaaugccauugacgagauuacuaacaaaguaaauucuguuauugaaaagaugaauacacaguucacagcaguagguaaagaguucaaccaccuggaaaaaagaauagagaauuuaaauaaaaaaguugaugaugguuuccuggacauuuggacuuacaaugccgaacuguugguucuauuggaaaaugaaagaacuuuggacuaccacgauucaaaugugaagaacuuauaugaaaagguaagaagccaguuaaaaaacaaugccaaggaaauuggaaacggcugcuuugaauuuuaccacaaaugcgauaacacgugcauggaaagugucaaaaaugggacuuaugacuacccaaaauacucagaggaagcaaaauuaaacagagaagaaauagaugggguaaagcuggaaucaacaaggauuuaccagauuuuggcgaucuauucaacugucgccaguucauugguacugguagucucccugggggcaaucaguuucuggaugugcucuaaugggucucuacaguguagaauauguauuuaa

SEQ ID NO: 35732 - RNA, 1701 nt, Artificial Sequence
  derived and/or modified CDS sequence (wt) from hemagglutinin__InfluenzaA__ACZ17030
augaaggcaacacuaguaguucugcuauauacauuugcaaccgcaaaugcagacacauuauguauagguuaucaugcgaacaauucaacagacacuguagacacaguacuagaaaagaauguaacaguaacacacucuguuaaccuucuagaagacaagcauaacgggaaacuaugcaaacuaagagggguagccccauugcauuuggguaaauguaacauugcuggcuggauccugggaaauccagagugugaaucacucuccacagcaagcucaugguccuacauuguggaagcaucuaguucagacaauggaacguguuacccaggagauuucaucgauuaugaggagcuaagagagcaauugagcucagugucaucauuugaaagguuugagauauuccccaagacaaguucauggcccaaucaugacucgaacaaagguguaacggcagcauguccucaugcuggagcaaaaagcuucuacaaaaauuuaauauggcuaguuaaaaaaggaaauucauacccaaagcucagcaaauccuacauuaaugauaaagggaaagaaguccucgugcuauggggcauucaccauccaucuacuagugcugaccaacaaagucucuaucagaaugcagaugcauauguuuuuguggggacaucaagauacagcaagaaguucaagccggaaauagcaauaagacccaaagugagggaucaagaagggagaaugaacuauuacuggacacuaguagagccgggagacaaaauaacauucgaagcaacuggaaaucuagugguaccgagauaugcauucgcaauggaaagaaaugcuggaucugguauuaucauuucagauacaccaguccacgauugcaauacaacuugucagacacccaagggugcuauaaacaccagccucccauuucagaauauacauccgaucacaauuggaaaauguccaaaauauguaaaaagcacaaaauugagacuggccacaggauugaggaaugucccgucuauucaaucuagaggccuauuuggggccauugccgguuucauugaagggggguggacagggaugguagauggaugguacgguuaucaccaucaaaaugagcaggggucaggauaugcagccgaccugaagagcacacagaaugccauugacgagauuacuaacaaaguaaauucuguuauugaaaagaugaauacacaguucacagcaguagguaaagaguucaaccaccuggaaaaaagaauagagaauuuaaauaaaaaaguugaugaugguuuccuggacauuuggacuuacaaugccgaacuguugguucuauuggaaaaugaaagaacuuuggacuaccacgauucaaaugugaagaacuuauaugaaaagguaagaagccaguuaaaaaacaaugccaaggaaauuggaaacggcugcuuugaauuuuaccacaaaugcgauaacacgugcauggaaagugucaaaaaugggacuuaugacuacccaaaauacucagaggaagcaaaauuaaacagagaagaaauagaugggguaaagcuggaaucaacaaggauuuaccagauuuuggcgaucuauucaacugucgccaguucauugguacugguagucucccugggggcaaucaguuucuggaugugcucuaaugggucucuacaguguagaauauguauuuaa

SEQ ID NO: 35733 - RNA, 1701 nt, Artificial Sequence
  derived and/or modified CDS sequence (wt) from hemagglutinin__InfluenzaA__ACZ17040
augaaggcaauacuaguaguucugcuauauacauuugcaaccgcaaaugcagacacauuauguauagguuaucaugcgaacaauucaacagacacuguagacacaguacuagaaaagaauguaacaguaacacacucuguuaaccuucuagaagacaagcauaacgggaaacuaugcaaacuaagagggguagccccauugcauuuggguaaauguaacauugcuggcuggauccugggaaauccagagugugaaucacucuccacagcaagcucaugguccuacauuguggaaacaucuaguucagacaauggaacguguuacccaggagauuucaucgauuaugaggagcuaagagagcaauugagcucagugucaucauuugaaagguuugagauauuccccaagacaaguucauggcccaaucaugacucgaacaaagguguaacggcagcauguccucaugcuggagcaaaaagcuucuacaaaaauuuaauauggcuaguuaaaaaaggaaauucauacccaaagcucagcaaauccuacauuaaugauaaagggaaagaaguccucgugcuauggggcauucaccauccaucuacuagugcugaccaacaaagucucuaucagaaugcagaugcauauguuuuuguggggacaucaagauacagcaagaaguucaagccggaaauagcaauaagacccaaagugagggaucaagaagggagaaugaacuauuacuggacauuaguagagccgggagacaaaauaacauucgaagcaacuggaaaucuagugguaccgagauaugcauucgcaauggaaagaaaugcuggaucugguauuaucauuucagauacaccaguccacgauugcaauacaacuugucagacacccaagggugcuauaaacaccagccucccauuucagaauauacauccgaucacaauuggaaaauguccaaaauauguaaaaagcacaaaauugagacuggccacaggauugaggaaugucccgucuauucaaucuagaggccuauuuggggccauugccgguuucauugaagggggguggacagggaugguagauggaugguacgguuaucaccaucaaaaugagcaggggucaggauaugcagccgaccugaagagcacacagaaugccauugacgagauuacuaacaaaguaaauucuguuauugaaaagaugaauacacaguucacagcaguagguaaagaguucaaccaccuggaaaaaagaauagagaauuuaaauaaaaaaguugaugaugguuuccuggacauuuggacuuacaaugccgaacuguugguucuauuggaaaaugaaagaacuuuggacuaccacgauucaaaugugaagaacuuauaugaaaagguaagaagccaguuaaaaaacaaugccaaggaaauuggaaacggcugcuuugaauuuuaccacaaaugcgauaacacgugcauggaaagugucaaaaaugggacuuaugacuacccaaaguacucaaaggaagcaaaauuaaacagagaagaaauagaugggguaaagcuggaaucaacaaggauuuaccagauuuuggcgaucuauucaacugucgccaguucauugguacugguagucucccugggggcaaucaguuucuggaugugcucuaaugggucucuacaguguagaauauguauuuaa

SEQ ID NO: 35734 - RNA, 1701 nt, Artificial Sequence
  derived and/or modified CDS sequence (wt) from hemagglutinin__InfluenzaA__ACZ17050
augaaggcaauacuaguaguucugcuauauacauuugcaaccgcaaaugcagacacauuauguauagguuaucaugcaaacaauucaacagacacuguagacacaguacuagaaaagaauguaacaguaacacacucuguuaaccuucuagaagacaagcauaacgggaaacuaugcaaacuaagagggguagccccauugcauuuggguaaauguaacauugcuggcuggauccugggaaauccagagugugaaucacucuccacagcaagcucaugguccuacauuguggaaacaucuaguucagacaauggaacguguuacccaggagauuucaucgauuaugaggagcuaagagagcaauugagcucagugucaucauuugaaagguuugagauauuccccaagacaaguucauggcccaaucaugacucgaacaaagguguaacggcagcauguccucaugcuggagcaaaaagcuucuacaaaaauuuaauauggcuaguuaaaaaaggaaauucauacccaaagcucagcaaauccuacauuaaugauaaagggaaagaaguccucgugcuauggggcauucaccauccaucuacuagugcugaccaacaaagucucuaucagaaugcagaugcauauguuuuuguggggacaucaagauacagcaagaaguucaagccggaaauagcaauaagacccaaagugagggaucaagaagggagaaugaacuauuacuggacacuaguagagccgggagacaaaauaacauucgaagcaacuggaaaucuagugguaccgagauaugcauucgcaauggaaagaaaugcuggaucugguauuaucauuucagauacaccaguacacgauugcaauacaacuugucagacacccaagggugcuauaaacaccagccucccauuucagaauauacauccgaucacaauuggaaaauguccaaaauauguaaaaagcacaaaauugagacuggccacaggauugaggaaugucccgucuauucaaucuagaggccuauuuggggccauugccgguuucauugaagggggguggacagggaugguagauggaugguacgguuaucaccaucaaaaugagcaggggucaggauaugcagccgaccugaagagcacacagaaugccauugacgagauuacuaacaaaguaaauucuguuauugaaaagaugaauacacaguucacagcaguagguaaagaguucaaccaccuggaaaaaagaauagagaauuuaaauaaaaaaguugaugaugguuuccuggacauuuggacuuacaaugccgaacuguugguucuauuggaaaaugaaagaacuuuggacuaccacgauucaaaugugaagaacuuauaugaaaagguaagaagccaguuaaaaaacaaugccaaggaaauuggaaacggcugcuuugaauuuuaccacaaaugcgauaacacgugcauggaaagugucaaaaaugggacuuaugacuacccaaaauacucagaggaagcaaaauuaaacagagaagaaauagaugggguaaagcuggaaucaacaaggauuuaccagauuuuggcgaucuauucaacugucgccaguucauugguacugguagucucccugggggcaaucaguuucuggaugugcucuaaugggucucuacaguguagaauauguauuuaa

SEQ ID NO: 35735 - RNA, 1701 nt, Artificial Sequence
  derived and/or modified CDS sequence (wt) from hemagglutinin__InfluenzaA__ACZ17060
augaaggcaauacuaguaguucugcuauauacauuugcaaccgcaaaugcagacacauuauguauagguuaucaugcgaacaauucaacagacacuguagacacaguacuagaaaagaauguaacaguaacacacucuguuaaccuucuagaagacaagcauaacgggaaacuaugcaaacuaagagggguagccccauugcauuuggguaaauguaacauugcuggcuggauccugggaaauccagagugugaaucacucuccacagcaagcucaugguccuacauuguggaaacaucuaguucagacaauggaacguguuacccaggagauuucaucgauuaugaggagcuaagagagcaguugagcucagugucaucauuugaaagguuugagauauuccccaagacaaguucauggcccaaucaugacucgaacaaagguguaacggcagcauguccucaugcuggagcaaaaagcuucuacaaaaauuuaauauggcuaguuaagaaaggaaauucauacccaaagcucagcaaauccuacauuaaugauaaagggaaagaaguccucgugcuauggggcauucaccauccaucuacuagugcugaccaacaaagucucuaucagaaugcagaugcauauguuuuuguggggacaucaagauacagcaagaaguucaagccggaaauagcaauaagacccaaagugagggaucaagaagggagaaugaacuauuacuggacacuaguagagccgggagacaaaauaacauucgaagcaacuggaaaucuagugguaccgagauaugcauucgcaauggaaagaaaugcuggaucugguauuaucauuucagauacaccaguccacgauugcaauacaacuugucagacacccaagggugcuauaaacaccagccucccauuucagaauauacauccgaucacaauuggaaaauguccaaaauauguaaaaagcacaaaauugagacuggccacaggauugaggaaugucccgucuauucaaucuagaggccuauuuggggccauugccgguuucauugaagggggguggacagggaugguagauggaugguacgguuaucaccaucaaaaugagcaggggucaggauaugcagccgaccugaagagcacacagaaugccauugacgagauuacuaacaaaguaaauucuguuauugaaaagaugaauacacaguucacagcaguagguaaagaguucaaccaccuggaaaaaagaauagagaauuuaaauaaaaaaguugaugaugguuuccuggacauuuggacuuacaaugccgaacuguugguucuauuggaaaaugaaagaacuuuggacuaccacgauucaaaugugaagaacuuauaugaaaagguaagaagccaguuaaaaaacaaugccaaggaaauuggaaacggcugcuuugaauuuuaccacaaaugcgauaacacgugcauggaaagugucaaaaaugggacuuaugacuacccaaaauacucagaggaagcaaaauuaaacagagaagaaauagaugggguaaagcuggaaucaacaaggauuuaccagauuuuggcgaucuauucaacugucgccaguucauugguacugguagucucccugggggcaaucaguuucuggaugugcucuaaugggucucuacaguguagaauauguauuuaa

SEQ ID NO: 35736 - RNA, 1701 nt, Artificial Sequence; identical to SEQ ID NO: 34681
  derived and/or modified CDS sequence (wt) from hemagglutinin__InfluenzaA__ACZ17070

SEQ ID NO: 35737 - RNA, 1701 nt, Artificial Sequence; identical to SEQ ID NO: 34898
  derived and/or modified CDS sequence (wt) from hemagglutinin__InfluenzaA__ACZ17080

SEQ ID NO: 35738 - RNA, 1701 nt, Artificial Sequence
  derived and/or modified CDS sequence (wt) from hemagglutinin__InfluenzaA__ACZ17090
augaaggcaauacuaguaguucugcuauauacauuugcaaccgcaaaugcagacacauuauguauagguuaucaugcgaacaauucaacagacacuguagacacaguacuagaaaagaauguaacaguaacacacucuguuaaccuucuaggagacaagcauaacgggaaacuaugcaaacuaagagggguagccccauugcauuuggguaaauguaacauugcuggcuggauccugggaaauccagagugugaaucacucuccacagcaagcucaugguccuacauuguggaaacaucuaguucagacaauggaacguguuacccaggagauuucaucgauuaugaggagcuaagagagcaauugagcucagugucaucauuugaaagguuugagauauuccccaagacaaguucauggcccaaucaugacucgaacaaagguguaacggcagcauguccucaugcuggagcaaaaagcuucuacaaaaauuuaauauggcuaguuaaaaaaggaaauucauacccaaagcucagcaaauccuacauuaaugauaaagggaaagaaguccucgugcuauggggcauucaccauccaucuacuagugcugaccaacaaagucucuaucagaaugcagaugcauauguuuuuguggggacaucaagauacagcaagaaguucaagccggaaauagcaauaagacccaaagugagggaucaagaagggagaaugaacuauuacuggacacuaguagagccgggagacaaaauaacauucgaagcaacuggaaaucuagugguaccgagauaugcauucgcaauggaaagaaaugcuggaucugguauuaucauuucagauacaccaguccacgauugcaauacaacuugucagacacccaagggugcuauaaacaccagccucccauuucagaauauacauccgaucacaauuggaaaauguccaaaauauguaaaaagcacaaaauugagacuggccacaggauugaggaaugucccgucuauucaaucuagaggccuauuuggggccauugccgguuucauugaagggggguggacagggaugguagauggaugguacgguuaucaccaucaaaaugagcaggggucaggauaugcagccgaccugaagagcacacagaaugccauugacgagauuacuaacaaaguaaauucuguuauugaaaagaugaauacacaguucacagcaguagguaaagaguucaaccaccuggaaaaaagaauagagaauuuaaauaaaaaaguugaugaugguuuccuggacauuuggacuuacaaugccgaacuguugguucuauuggaaaaugaaagaacuuuggacuaccacgauucaaaugugaagaacuuauaugaaaagguaaaaagccaguuaaaaaacaaugccaaggaaauuggaaacggcugcuuugaauuuuaccacaaaugcgauaacacgugcauggaaagugucaaaaaugggacuuaugacuacccaaaauacucagaggaagcaaaauuaaacagagaagaaauagaugggguaaagcuggaaucaacaaggauuuaccagauuuuggcgaucuauucaacugucgccaguucauugguacugguagucucccugggggcaaucaguuucuggaugugcucuaaugggucucuacaguguagaauauguauuuaa

SEQ ID NO: 35739 - RNA, 1701 nt, Artificial Sequence; identical to SEQ ID NO: 34705
  derived and/or modified CDS sequence (wt) from hemagglutinin__InfluenzaA__ACZ17100

SEQ ID NO: 35740 - RNA, 1701 nt, Artificial Sequence
  derived and/or modified CDS sequence (wt) from hemagglutinin__InfluenzaA__ACZ17110
augaaggcaauacuaguaguucugcuauauacauuugcaaccgcaaaugcagacacauuauguauagguuaucaugcgaacaauucaacagacacuguagacacaguacuagaaaagaauguaacaguaacacacucuguuaaccuucuagaagacaagcauaacgggaaacuaugcaaacuaagagggguagccccauugcauuuggguaaauguaacauugcuggcuggauccugggaaauccagagugugaaucacucuccacagcaagcucaugguccuacauuguggaaacaucuaguucagacaauggaacguguuacccaggagauuucaucgauuaugaggagcuaagagagcaauugagcucagugucaucauuugaaagguuugagauauuccccaagacaaguucauggcccaaucaugacucgaacaaagguguaacggcagcauguccucaugcuggagcaaaaagcuucuacaaaaauuuaauauggcuaguuaaaaaagggaauucauacccagagcucagcaaauccuacauuaaugauaaagggaaagaaguccucgugcuauggggcauucaccauccaucuacuagugcugaccaacaaagucucuaucagaaugcagaugcauauguuuuuguggggacaucaagauacagcaagaaguucaagccggaaauagcaauaagacccaaagugagggaucaagaagggagaaugaacuauuacuggacacuaguagagccgggagacaaaauaacauucgaagcaacuggaaaucuagugguaccgagauaugcauucgcaauggaaagaaaugcuggaucugguauuaucauuucagauacaccaguccacgauugcaauacaacuugucagacacccaagggugcuauaaacaccagccucccauuucagaauauacauccgaucacaauuggaaaauguccaaaauauguaaaaagcacaaaauugagacuggccacaggauugaggaaugucccgucuauucaaucuagaggccuauuuggggccauugccgguuucauugaagggggguggacagggaugguagauggaugguacgguuaucaccaucaaaaugagcaggggucaggauaugcagccgaccugaagagcacacagaaugccauugacgagauuacuaacaaaguaaauucuguuauugaaaagaugaauacacaguucacagcaguagguaaagaguucaaccaccuggaaaaaagaauagagaauuuaaauaaaaaaguugaugaugguuuccuggacauuuggacuuacaaugccgaacuguugguucuauuggaaaaugaaagaacuuuggacuaccacgauucaaaugugaagaacuuauaugaaaagguaagaagccaguuaaaaaacaaugccaaggaaauuggaaacggcugcuuugaauuuuaccacaaaugcgauaacacgugcauggaaagugucaaaaaugggacuuaugacuacccaaaauacucagaggaagcaaaauuaaacagagaagaaauagaugggguaaagcuggaaucaacaaggauuuaccagauuuuggcgaucuauucaacugucgccaguucauugguacugguagucucccugggggcaaucaguuucuggaugugcucuaaugggucucuacaguguagaauauguauuuaa

SEQ ID NO: 35741 - RNA, 1701 nt, Artificial Sequence
  derived and/or modified CDS sequence (wt) from hemagglutinin__InfluenzaA__ACZ17120
augaaggcaauacuaguaguucugcuauauacauuugcaaccgcaaaugcagacacauuauguauagguuaucaugcgaacaauucaacagacacuguagacacaguacuagaaaagaauguaacaguaacacacucuguuaaccuucuagaagacaagcauaacgggaaacuaugcaaacuaagagggguagccccauugcauuuggguaaauguaacauugcuggcuggauccugggaaauccagagugugaaucacucuccacagcaagcucaugguccuacauuguggaaacaucuaguucagacaauggaacguguuacccaggagauuucaucgauuaugaggagcuaagagagcaauugagcucagugucaucauuugaaagguuugagauauuccccaagacaaguucauggcccaaucaugacucgaacaaagguguaacggcagcauguccucaugcuggagcaaaaagcuucuacaaaaauuuaauauggcuaguuaaaaaaggaaauucauacccaaagcucagcaaauccuacauuaaugauaaagggaaagaaguccucgugcuauggggcauucaccauccaucuacuagugcugaccaacaaagucucuaucagaaugcagaugcauauguuuuuguggggacaucaagauacagcaagaaguucaagccggaaauagcaauaagacccaaagugagggaucaagaagggagaaugaacuauuacuggacacuaguagagccgggagacaaaauaacauucgaagcaacuggaaaucuagugguaccgagauaugcauucgcaauggaaagaaaugcuggaucugguauuaucauuucagauacaccaguccacgauugcaauacaacuugucagacacccaagggugcuauaaacaccagccucccauuucagaauauacauccgaucacaauuggaaaauguccaaaauauguaaaaagcacaaaauugagacuggccacaggauugaggaaugucccgucuauucaaucuagaggccuauuuggggccauugccgguuucauugaagggggguggacagggaugguagauggaugguacgguuaucaccaucaaaaugagcaggggucaggauaugcagccgaccugaagagcacacagaaugccauugacgagauuacuaacaaaguaaauucuguuauugaaaagaugaauacacaguucacagcaguagguaaagaguucaaccaccuggaaaaaagaauagagaauuuaaauaaaaaaguugaugaugguuuccuggacauuuggacuuacaaugccgaacuguugguucuauuggaaaaugaaagaacuuuggacuaccacgauucaaaugugaagaacuuauaugaaaagguaagaagccaguuaaaaaccaaugccaaggaaauuggaaacggcugcuuugaauuuuaccacaaaugcgauaacacgugcauggaaagugucaaaaaugggacuuaugacuacccaaaauacucagaggaagcaaaauuaaacagagaagaaauagaugggguaaagcuggaaucaacaaggauuuaccagauuuuggcgaucuauucaacugucgccaguucauugguacugguagucucccugggggcaaucaguuucuggaugugcucuaaugggucucuacaguguagaauauguauuuaa

SEQ ID NO: 35742 - RNA, 1701 nt, Artificial Sequence
  derived and/or modified CDS sequence (wt) from hemagglutinin__InfluenzaA__ACZ17130
augaaggcaauacuaguaguucugcuauauacauuugcaaccgcaaaugcagacacauuauguauagguuaucaugcgaacaauucaacagacacuguagacacaguacuagaaaagaauguaacaguaacacacucuguuaaccuucuagaagacaagcauaacgggaaacuaugcaaacuaagagggguagccccauugcauuuggguaaauguaacauugcuggcuggauccugggaaauccagagugugaaucacucuccacagcaagcucaugguccuacauuguggaaacaucuaguucagacaauggaacguguuacccaggagauuucaucgauuaugaggagcuaagagagcaauugagcucagugucaucauuugaaagguuugagauauuccccaagacaaguucauggcccaaucaugacucgaacaaagguguaacggcagcauguccucaugcuggagcaaaaagcuucuacaaaaauuuaauauggcuaguuaaaaaagggaauucauacccaaagcucagcaaauccuacauuaaugauaaagggaaagaaguccucgugcuauggggcauucaccauccaucuacuagugcugaccaacaaagucucuaucagaaugcagaugcauauguuuuuguggggacaucaagauacagcaagaaguucaagccggaaauagcaauaagacccaaagugagggaucaagaagggagaaugaacuauuacuggacacuaguagagccgggagacaaaauaacauucgaagcaacuggaaaucuagugguaccgagauaugcauucgcaauggaaagaaaugcuggaucugguauuaucauuucagauacaccaguccacgauugcaauacaacuugucagacacccaagggugcuauaaacaccagccucccauuucagaauauacauccgaucacaauuggaaaauguccaaaauauguaaaaagcacaaaauugagacuggccacaggauugaggaaugucccgucuauucaaucuagaggccuauuuggggccauugccgguuucauugaagggggguggacagggaugguagauggaugguacgguuaucaccaucaaaaugagcaggggucaggauaugcagccgaccugaagagcacacagaaugccauugacgagauuacuaacaaaguaaauucuguuauugaaaagaugaaugcacaguucacagcaguagguaaagaguucaaccaccuggaaaaaagaauagagaauuuaaauaaaaaaguugaugaugguuuccuggacauuuggacuuacaaugccgaacuguugguucuauuggaaaaugaaagaacuuuggacuaccacgauucaaaugugaagaacuuauaugaaaagguaagaagccaguuaaaaaacaaugccaaggaaauuggaaacggcugcuuugaauuuuaccacaaaugcgauaacacgugcauggaaagugucaaaaaugggacuuaugacuacccaaaauacucagaggaagcaaaauuaaacagagaagaaauagaugggguaaagcuggaaucaacaaggauuuaccagauuuuggcgaucuauucaacugucgccaguucauugguacugguagucucccugggggcaaucaguuucuggaugugcucuaaugggucucuacaguguagaauauguauuuaa

SEQ ID NO: 35743 - RNA, 1701 nt, Artificial Sequence; identical to SEQ ID NO: 35479
  derived and/or modified CDS sequence (wt) from hemagglutinin__InfluenzaA__ACZ17140

SEQ ID NO: 35744 - RNA, 1701 nt, Artificial Sequence
  derived and/or modified CDS sequence (wt) from hemagglutinin__InfluenzaA__ACZ17150
augaaggcaauacuaguaguucugcuauauacauuugcaaccgcaaaugcagacacauuauguauagguuaucaugcgaacaauucaacagacacuguagacacaguacuagaaaagaauguaacaguaacacacucuguuaaccuucuagaagacaagcauaacgggaaacuaugcaaacuaagagggguagccccauugcauuuggguaaauguaacauugcuggcuggauccugggaaauccagagugugaaucacucuccacagcaagcucaugguccuacauuguggaaacaucuaguucagacaauggaacguguuacccaggagauuucaucgauuaugaggagcuaagagagcaauugagcucagugucaucauuugaaagguuugagauauuccccaagacaaguucauggcccaaucaugacucgaacaaagguguaacggcagcauguccucaugcuggagcaaaaagcuucuacaaaaauuuaauauggcuaguuaaaaaaggaaauucauacccaaagcucagcaaauccuacauuaaugauaaagggaaagaaguccucgugcuauggggcauucaccauccaucuacuagugcugaccaacaaagucucuaucagaaugcagaugcauauguuuuuguggggacaucaagauacagcaagaaguucaagccggaaauagcaauaagacccaaagugagggaccaagaagggagaaugaacuauuacuggacacuaguagagccgggagacaaaauaacauucgaagcaacuggaaaucuagugguaccgagauaugcauucgcaauggaaagaaaugcuggaucugguauuaucauuucagauacaccaguccacgauugcaauacaacuugucagacacccgagggugcuauaaacaccagccucccauuucagaauauacauccgaucacaauuggaaaauguccaaaauauguaaaaagcacaaaauugagacuggccacaggauugaggaaugucccgucuauucaaucuagaggccuauuuggggccauugccgguuucauugaagggggguggacagggaugguagauggaugguacgguuaucaccaucaaaaugagcaggggucaggauaugcagcugaccugaagagcacacagaaugccauugacgagauuacuaacaaaguaaauucuguuauugaaaagaugaauacacaguucacagcaguagguaaagaguucaaccaccuggaaaaaagaauagagaauuuaaauaaaaaaguugaugaugguuuccuggacauuuggacuuacaaugccgaacuguugguucuauuggaaaaugaaagaacuuuggacuaccacgauucaaaugugaagaacuuauaugaaaagguaagaagccaguuaaaaaacaaugccaaggaaauuggaaacggcugcuuugaauuuuaccacaaaugcgauaacacgugcauggaaagugucaaaaaugggacuuaugacuacccaaaauacucagaggaagcaaaauuaaacagagaagaaauagaugggguaaagcuggaaucaacaaggauuuaccagauuuuggcgaucuauucaacugucgccaguucauugguacugguagucucccugggggcaaucaguuucuggaugugcucuaaugggucucuacaguguagaauauguauuuaa

SEQ ID NO: 35745 - RNA, 1701 nt, Artificial Sequence; identical to SEQ ID NO: 35744
  derived and/or modified CDS sequence (wt) from hemagglutinin__InfluenzaA__ACZ17160

SEQ ID NO: 35746 - RNA, 1701 nt, Artificial Sequence; identical to SEQ ID NO: 35744
  derived and/or modified CDS sequence (wt) from hemagglutinin__InfluenzaA__ACZ17170

SEQ ID NO: 35747 - RNA, 1701 nt, Artificial Sequence
  derived and/or modified CDS sequence (wt) from hemagglutinin__InfluenzaA__ACZ17190
augaaggcaauacuaguaguucugcuauauacauuugcaaccgcaaaugcagacacauuauguauagguuaucaugcgaacaauucaacagacacuguagacacaguacuagaaaagaauguaacaguaacacacucuguuaaccuucuagaagacaagcauaacgggaaacuaugcaaacuaagagggguagccccauugcauuuggguaaauguaacauugcuggcuggauccugggaaauccagagugugaaucacucuccacagcaagcucaugguccuacauuguggaaacaucuaguucagacaauggaacguguuacccaggagauuucaucgauuaugaggagcuaagagagcaauugagcucagugucaucauuugaaagguuugagauauuccccaagacaaguucauggcccaaucaugacucgaacaaagguguaacggcagcauguccucaugcuggagcaaaaagcuucuacaaaaauuuaauauggcuaguuaaaaaaggaaauucauacccaaagcucagcaaauccuacauuaaugauaaagggaaagaaguccucgugcuauggggcauucaccauccaucuacuagugcugaccaacaaagucucuaucagaaugcagaugcauauguuuuuguggggacaucaagauacagcaagaaguucaagccggaaauagcaauaagacccaaagugagggaccaagaagggagaaugaacuauuacuggacacuaguagagccgggagacaaaauaacauucgaagcaacuggaaaucuagugguaccgagauaugcauucgcaauggaaagaaaugcuggaucugguauuaucauuucagauacaccaguccacgauugcaguacaacuugucagacacccgagggugcuauaaacaccagccucccauuucagaauauacauccgaucacaauuggaaaauguccaaaauauguaaaaagcacaaaauugagacuggccacaggauugaggaaugucccgucuauucaaucuagaggccuauuuggggccauugccgguuucauugaagggggguggacagggaugguagauggaugguacgguuaucaccaucaaaaugagcaggggucaggauaugcagcugaccugaagagcacacagaaugccauugacgagauuacuaacaaaguaaauucuguuauugaaaagaugaauacacaguucacagcaguagguaaagaguucaaccaccuggaaaaaagaauagagaauuuaaauaaaaaaguugaugaugguuuccuggacauuuggacuuacaaugccgaacuguugguucuauuggaaaaugaaagaacuuuggacuaccacgauucaaaugugaagaacuuauaugaaaagguaagaagccaguuaaaaaacaaugccaaggaaauuggaaacggcugcuuugaauuuuaccacaaaugcgauaacacgugcauggaaagugucaaaaaugggacuuaugacuacccaaaauacucagaggaagcaaaauuaaacagagaagaaauagaugggguaaagcuggaaucaacaaggauuuaccagauuuuggcgaucuauucaacugucgccaguucauugguacugguagucucccugggggcaaucaguuucuggaugugcucuaaugggucucuacaguguagaauauguauuuaa

SEQ ID NO: 35748 - RNA, 1701 nt, Artificial Sequence; identical to SEQ ID NO: 35747
  derived and/or modified CDS sequence (wt) from hemagglutinin__InfluenzaA__ACZ17200

SEQ ID NO: 35749 - RNA, 1701 nt, Artificial Sequence; identical to SEQ ID NO: 34681
  derived and/or modified CDS sequence (wt) from hemagglutinin__InfluenzaA__ACZ17220

SEQ ID NO: 35750 - RNA, 1701 nt, Artificial Sequence
  derived and/or modified CDS sequence (wt) from hemagglutinin__InfluenzaA__ACZ17230
augaaggcaauacuaguaguucugcuauauacauuugcaaccgcaaaugcagacacauuauguauagguuaucaugcgaacaauucaacagacacuguagacacaguacuagaaaagaauguaacaguaacacacucuguuaaccuucuagaagacaagcauaacgggaaacuaugcaaacuaagagggguagccccauugcauuuggguaaauguaacauugcuggcuggauccugggaaauccagagugugaaucacucuccacagcaagcucaugguccuacauuguggaaacaucuaguucagacaauggaacguguuacccaggagauuucaucgauuaugaggagcuaaaagagcaauugagcucagugucaucauuugaaagguuugagauauuccccaagacaaguucauggcccaaucaugacucgaacaaagguguaacggcagcauguccucaugcuggagcaaaaagcuucuacaaaaauuuaauauggcuaguuaaaaaaggaaauucauacccaaagcucagcaaauccuacauuaaugauaaagggaaagaaguccucgugcuauggggcauucaccauccaucuacuagugcugaccaacaaagucucuaucagaaugcagaugcauauguuuuuguggggacaucaagauacagcaagaaguucaagccggaaauagcaauaagacccaaagugagggaucaagaagggagaaugaacuauuacuggacacuaguagagccgggagacaaaauaacauucgaagcaacuggaaaucuagugguaccgagauaugcauucgcaauggaaagaaaugcuggaucugguauuaucauuucagauacaccaguccacgauugcaauacaacuugucagacacccaagggugcuauaaacaccagccucccauuucagaauauacauccgaucacaauuggaaaauguccaaaauauguaaaaagcacaaaauugagacuggccacaggauugaggaaugucccgucuauucaaucuagaggccuauuuggggccauugccgguuucauugaagggggguggacagggaugguagauggaugguacgguuaucaccaucaaaaugagcaggggucaggauaugcagccgaccugaagagcacacagaaugccauugacgagauuacuaacaaaguaaauucuguuauugaaaagaugaauacacaguucacagcaguagguaaagaguucaaccaccuggaaaaaagaauagagaauuuaaauaaaaaaguugaugaugguuuccuggacauuuggacuuacaaugccgaacuguugguucuauuggaaaaugaaagaacuuuggacuaccacgauucaaaugugaagaacuuauaugaaaagguaagaagccaguuaaaaaacaaugccaaggaaauuggaaacggcugcuuugaauuuuaccacaaaugcgauaacacgugcauggaaagugucaaaaaugggacuuaugacuacccaaaauacucagaggaagcaaaauuaaacagagaagaaauagaugggguaaagcuggaaucaacaaggauuuaccagauuuuggcgaucuauucaacugucgccaguucauugguacugguagucucccugggggcaaucaguuucuggaugugcucuaaugggucucuacaguguagaauauguauuuaa

SEQ ID NO: 35751 - RNA, 1701 nt, Artificial Sequence; identical to SEQ ID NO: 34681
  derived and/or modified CDS sequence (wt) from hemagglutinin__InfluenzaA__ACZ17240

SEQ ID NO: 35752 - RNA, 1701 nt, Artificial Sequence; identical to SEQ ID NO: 34714
  derived and/or modified CDS sequence (wt) from hemagglutinin__InfluenzaA__ACZ17250

SEQ ID NO: 35753 - RNA, 1701 nt, Artificial Sequence; identical to SEQ ID NO: 34681
  derived and/or modified CDS sequence (wt) from hemagglutinin__InfluenzaA__ACZ17260

SEQ ID NO: 35754 - RNA, 1701 nt, Artificial Sequence
  derived and/or modified CDS sequence (wt) from hemagglutinin__InfluenzaA__ACZ17270
augaaggcaauacuaguaguucugcuauauacauuugcaaccgcaaaugcagacacauuauguauagguuaucaugcgaacaauucaacagacacuguagacacaguacuagaaaagaauguaacaguaacacacucuguuaaccuucuagaagacaagcauaacgggaaacuaugcaaacuaagagggguagccccauugcauuuggguagauguaacauugcuggcuggauccugggaaauccagagugugaaucacucuccacagcaagcucaugguccuacauuguggaaacaucuaguucagacaauggaacguguuacccaggagauuucaucgauuaugaggagcuaagagagcaauugagcucagugucaucauuugaaagguuugagauauuccccaagacaaguucauggcccaaucaugacucgaacaaagguguaacggcagcauguccucaugcuggagcaaaaagcuucuacaaaaauuuaauauggcuaguuaaaaaaggaaauucauacccaaagcucagcaaauccuacauuaaugauaaagggaaagaaguccucgugcuauggggcauucaccauccaucuacuagugcugaccaacaaagucucuaucagaaugcagaugcauauguuuuuguggggacaucaagauacagcaagaaguucaagccggaaauagcaauaagacccaaagugagggaucaagaagggagaaugaacuauuacuggacacuaguagagccgggagacaaaauaacauucgaagcaacuggaaaucuagugguaccgagauaugcauucgcaauggaaagaaaugcuggaucugguauuaucauuucagauacaccaguccacgauugcaauacaacuugucagacacccaagggugcuauaaacaccagccucccauuucagaauauacauccgaucacaauuggaaaauguccaaaauauguaaaaagcacaaaauugagacuggccacaggauugaggaaugucccgucuauucaaucuagaggccuauuuggggccauugccgguuucauugaagggggguggacagggaugguagauggaugguacgguuaucaccaucaaaaugagcaggggucaggauaugcagccgaccugaagagcacacagaaugccauugacgagauuacuaacaaaguaaauucuguuauugaaaagaugaauacacaguucacagcaguagguaaagaguucaaccaccuggaaaaaagaauagagaauuuaaauaaaaaaguugaugaugguuuccuggacauuuggacuuacaaugccgaacuguugguucuauuggaaaaugaaagaacuuuggacuaccacgauucaaaugugaagaaauuauaugaaaaaguaagaagccaguuaaaaaacaaugccaaggaaauuggaaacggcugcuuugaauuuuaccacaaaugcgauaacacgugcauggaaagugucaaaaaugggacuuaugacuacccaaaauacucagaggaagcaaaauuaaacagagaagaaauagaugggguaaagcuggaaucaacaaggguuuaccagauuuuggcgaucuauucaacugucgccaguucauugguacugguagucucccugggggcaaucaguuucuggaugugcucuaaugggucucuacaguguagaauauguauuuaa

SEQ ID NO: 35755 - RNA, 1701 nt, Artificial Sequence
  derived and/or modified CDS sequence (wt) from hemagglutinin__InfluenzaA__ACZ17290
augaaggcaauacuaguaguucugcuauauacauuugcaaccgcaaaugcagacacauuauguauagguuaucaugcgaacaauucaacagacacuguagacacaguacuagaaaagaauguaacaguaacacacucuguuaacauucuagaagacaagcauaacgggaaacuaugcaaacuaagagggguagccccauugcauuuggguaaauguaacauugcuggcuggauccugggaaauccagagugugaaucacucuccacagcaagcucaugguccuacauuguggaaacaucuaguucagacaauggaacguguuacccaggagauuucaucgauuaugaggagcuaagagagcaauugagcucagugucaucauuugaaagguuugagauauuccccaagacaaguucauggcccaaucaugacucgaacaaagguguaacggcagcauguccucaugcuggagcaaaaagcuucuacaaaaauuuaauauggcuaguuaaaaaaggaaauucauacccaaagcucagcaaauccuacauuaaugauaaagggaaagaaguccucgugcuauggggcauucaccauccaucuacuagugcugaccaacaaagucucuaucagaaugcagaugcauauguuuuuguggggucaucaagauacagcaagaaguucaagccggaaauagcaauaagacccaaagugagggaucaagaagggagaaugaacuauuacuggacacuaguagagccgggagacaaaauaacauucgaagcaacuggaaaucuagugguaccgagauaugcauucgcaauggaaagaaacgcuggaucugguauuaucauuucagauacaccaguccacgauugcaauacaacuugucagacacccaagggugcuauaaacaccagccucccauuucagaauauacauccgaucacaauuggaaaauguccaaaauauguaaaaagcacaaaauugagacuggccacaggauugaggaaugucccgucuauucaaucuagaggccuauuuggggccauugccgguuucauugaagggggguggacagggaugguagauggaugguacgguuaucaccaucaaaaugagcaggggucaggauaugcagccgaccugaagagcacacagaaugccauugacgagauuacuaacaaaguaaauucuguuauugaaaagaugaauacacaguucacagcaguagguaaagaguucaaccaccuggaaaaaagaauagagaauuuaaauaaaaaaguugaugaugguuuccuggacauuuggacuuacaaugccgaacuguugguucuauuggaaaaugaaagaacuuuggacuaccacgauucaaaugugaagaacuuauaugaaaagguaagaagccagcuaaaaaacaaugccaaggaaauuggaaacggcugcuuugaauuuuaccacaaaugcgauaacacgugcauggaaagugucaaaaaugggacuuaugacuacccaaaauacucagaggaagcaaaauuaaacagagaagaaauagaugggguaaagcuggaaucaacaaggauuuaccagauuuuggcgaucuauucaacugucgccaguucauugguacugguagucucccugggggcaaucaguuucuggaugugcucuaaugggucucuacaguguagaauauguauuuaa

SEQ ID NO: 35756 - RNA, 1701 nt, Artificial Sequence; identical to SEQ ID NO: 35755
  derived and/or modified CDS sequence (wt) from hemagglutinin__InfluenzaA__ACZ17300

SEQ ID NO: 35757 - RNA, 1701 nt, Artificial Sequence; identical to SEQ ID NO: 35755
  derived and/or modified CDS sequence (wt) from hemagglutinin__InfluenzaA__ACZ17310

SEQ ID NO: 35758 - RNA, 1701 nt, Artificial Sequence; identical to SEQ ID NO: 34681
  derived and/or modified CDS sequence (wt) from hemagglutinin__InfluenzaA__ACZ17398

SEQ ID NO: 35759 - RNA, 1701 nt, Artificial Sequence
  derived and/or modified CDS sequence (wt) from hemagglutinin__InfluenzaA__ACZ17408
augaaggcaauacuaguaguucugcuauauacauuugcaaccgcaaaugcagacacauuauguauagguuaucaugcgaacaauucaacagacacuguagacacaguacuagaaaagaauguaacaguaacacacucuguuaaccuucuagaagacaagcauaacgggaaacuaugcaaacuaagagggguagccccauugcauuuggguaaauguaacauugcuggcuggauccugggaaauccagagugugaaucacucuccacagcaagcucaugguccuacauuguggaaacaucuaguucagacaauggaacguguuacccaggagauuucaucgauuaugaggagcuaagagagcaauugagcucagugucaucauuugaaagguuugagauauuccccaagacaaguucauggcccaaucaugacucgaacaaagguguaacggcagcauguccucaugcuggagcaaaaagcuucuacaaaaauuuaauauggcuaguuaaaaaaggaaauucauacccaaagcucagcaaauccuacauuaaugauaaagggaaagaaguccucgugcuauggggcauucaccacccaucuacuagugcugaccaacaaagucucuaucagaaugcagaugcauauguuuuuguggggacaucaagauacagcaagaaguucaagccggaaauagcaauaagacccaaagugagggaucaagaagggagaaugaacuauuacuggacacuaguagagccuggagacaaaauaacauucgaagcaacuggaaaucuagugguaccgagauaugcauucgcaauggaaagaaaugcuggaucugguauuaucauuucagauacaccaguccacgauugcaauacaacuugucagacacccaagggugcuauaaacaccagccucccauuucagaacauacauccgaucacaauuggaaaauguccaaaauauguaaaaagcacaaaauugagacuggccacaggauugaggaaugucccgucuauucaaucuagaggccuauuuggggccauugccgguuucauugaagggggguggacagggaugguagauggaugguacgguuaucaccaucaaaaugagcaggggucaggauaugcagccgaccugaagagcacacagaaugccauugacgagauuacuaacaaaguaaauucuguuauugaaaagaugaauacacaguucacagcaguagguaaagaguucaaccaccuggaaaaaagaauagagaauuuaaauaaaaaaguugaugaugguuuccuggacauuuggacuuacaaugccgaacuguugguucuauuggaaaaugaaagaacuuuggacuaccacgauucaaaugugaagaacuuauaugaaaagguaaggagccaguuaaaaaacaaugccaaggaaauuggaaacggcugcuuugaauuuuaccacaaaugcgauaacacgugcauggaaagugucaaaaaugggacuuaugacuacccaaaauacucagaggaagcaaaauuaaacagagaagaaauagaugggguaaagcuggaaucaacaaggauuuaccagauuuuggcgaucuauucaacugucgccagcucauugguacugguagucucccugggggcaaucaguuucuggaugugcucuaaugggucucuacaguguagaauauguauuuaa

SEQ ID NO: 35760 - RNA, 1701 nt, Artificial Sequence; identical to SEQ ID NO: 34681
  derived and/or modified CDS sequence (wt) from hemagglutinin__InfluenzaA__ACZ17418

SEQ ID NO: 35761 - RNA, 1701 nt, Artificial Sequence
  derived and/or modified CDS sequence (wt) from hemagglutinin__InfluenzaA__ACZ17438
augaaggcaauacuaguaguucugcuauauacauuugcaaccgcaaaugcagacacauuauguauagguuaucaugcgaacaauucaacagacacuguagacacaguacuagaaaagaauguaacaguaacacacucuguuaaccuucuagaagacaagcauaacgggaaacuaugcaaacuaagagggguagccccauugcauuuggguaaauguaacauugcuggcuggauccuggguaauccagagugugaaucacucuccacagcaagcucaugguccuacauuguggaaacaucuaguucagacaauggaacguguuacccaggagauuucaucgauuaugaggagcuaagagagcaauugagcucagugucaucauuugaaagguuugagauauuccccaagacaaguucauggcccaaucaugacucgaacaaagguguaacggcagcauguccucaugcuggagcaaaaagcuucuacaaaaauuuaauauggcuaguuaaaaaaggaaauucauacccaaagcucagcaaauccuacauuaaugauaaagggaaagaaguccucgugcuauggggcauucaccauccaucuacuagugcugaccaacaaagucucuaucagaaugcagauucauauguuuuuguggggucaucaagauacagcaagaaguucaagccggaaauagcaauaagacccaaagugagggaucaagaagggagaaugaacuauuacuggacacuaguagagccgggagacaaaauaacauucgaagcaacuggaaaucuagugguaccgagauaugcauucgcaauggaaagaaaugcuggaucugguauuaucauuucagauacaccaguccacgauugcaauacaacuugucagacacccaagggugcuauaaacaccagccucccauuucagaauauacauccgaucacaauuggaaaauguccaaaauauguaaaaagcacaaaauugagacuggccacaggauugaggaaugucccgucuauucaaucuagaggccuauuuggggccauugccgguuucauugaagggggguggacagggaugguagauggaugguacgguuaucaccaucaaaaugagcaggggucaggauaugcagccgaccugaagagcacacagaaugccauugacgagauuacuaacaaaguaaauucuguuauugaaaagaugaauacacaguucacagcaguagguaaagaguucaaccaccuggaaaaaagaauagagaauuuaaauaaaaaaguugaugaugguuuccuggacauuuggacuuacaaugccgaacuguugguucuauuggaaaaugaaagaacuuuggacuaccacgauucaaaugugaagaacuuauaugaaaagguaagaagccagcuaaaaaacaaugccaaggaaauuggaaacggcugcuuugaauuuuaccacaaaugcgauaacacgugcauggaaagugucaaaaaugggacuuaugacuacccaaaauacucagaggaagcaaaauuaaacagagaagaaauagaugggguaaagcuggaaucaacaaggauuuaccagauuuuggcgaucuauucaacugucgccaguucauugguacugguagucucccugggggcaaucaguuucuggaugugcucuaaugggucucuacaguguagaauauguauuuaa

SEQ ID NO: 35762 - RNA, 1701 nt, Artificial Sequence
  derived and/or modified CDS sequence (wt) from hemagglutinin__InfluenzaA__ACZ17448
augaaggcaauacuaguaguucugcuauauacauuugcgaccgcaaaugcagacacauuauguauagguuaucaugcgaacaauucaacagacacuguagacacaguacuagaaaagaauguaacaguaacacacucuguuaaccuucuagaagacaagcauaacgggaaacuaugcaaacuaagagggguagccccauugcauuuggguaaauguaacauugcuggcuggauccugggaaauccagagugugaaucacucuccacagcaagcucaugguccuacauuguggaaacaucuaguucagacaauggaacguguuacccaggagauuucaucgauuaugaggagcuaagagagcaauugagcucagugucaucauuugaaagguuugagauauuccccaagacaaguucauggcccaaucaugacucgaacaaagguguaacggcagcauguccucaugcuggagcaaaaagcuucuacaaaaauuuaauauggcuaguuaaaaaaggaaauucauacccaaagcucagcaaauccuacauuaaugauaaagggaaagaaguccucguacuauggggcauucaccauccaucuacuagugcugaccaacaaagucucuaucagaaugcagaugcauauguuuuuguggggucaucaagauacagcaagaaguucaagccggaaauagcaauaagacccaaagugagggaucaagaagggagaaugaacuauuacuggacacuaguagagccgggagacaaaauaacauucgaagcaacuggaaaucuagugguaccgagauaugcguucgcaauggaaagaaaugcuggaucugguauuaucauuucagauacaccaguccacgauugcaauacaacuugucagacacccaagggugcuauaaacaccagccucccauuucagaauauacauccgaucacaauuggaaaauguccaaaauauguaaaaagcacaaaauugagacuggccacaggauugaggaaugucccgucuauucaaucuagaggccuauuuggggccauugccgguuucauugaaggaggguggacagggaugguagauggaugguacgguuaucaccaucaaaaugagcaggggucaggauaugcagccgaccugaagagcacacagaaugccauugacgagauuacuaacaaaguaaauucuguuauugaaaagaugaauacacaguucacagcaguagguaaagaguucaaccaccuggaaaaaagaauagagaauuuaaauaaaaaaguugaugaugguuuccuggacauuuggacuuacaaugccgaacuguugguucuauuggaaaaugaaagaacuuuggacuaccacgauucaaaugugaagaacuuauaugaaaagguaagaagccagcuaaaaaacaaugccaaggaaauuggaaacggcugcuuugaauuuuaccacaaaugcgauaacacgugcauggaaagugucaaaaaugggacuuaugacuacccgaaauacucagaggaagcaaaauuaaacagagaagaaauagaugggguaaagcuggaaucaacaaggauuuaccagauuuuggcgaucuauucaacugucgccaguucauugguacugguagucucccugggggcaaucaguuucuggaugugcucuaaugggucucuacaguguagaauauguauuuaa

SEQ ID NO: 35763 - RNA, 1701 nt, Artificial Sequence; identical to SEQ ID NO: 34681
  derived and/or modified CDS sequence (wt) from hemagglutinin__InfluenzaA__ACZ17458

SEQ ID NO: 35764 - RNA, 1701 nt, Artificial Sequence; identical to SEQ ID NO: 34676
  derived and/or modified CDS sequence (wt) from hemagglutinin__InfluenzaA__ACZ17478

SEQ ID NO: 35765 - RNA, 1701 nt, Artificial Sequence; identical to SEQ ID NO: 34681
  derived and/or modified CDS sequence (wt) from hemagglutinin__InfluenzaA__ACZ17488

SEQ ID NO: 35766 - RNA, 1701 nt, Artificial Sequence
  derived and/or modified CDS sequence (wt) from hemagglutinin__InfluenzaA__ACZ18240
augaaggcaauacuagugguucugcuauauacauuugcaaccgcaaaugcagacacauuauguauagguuaucaugcgaacaauucaacagacacuguagacacaguacuagaaaagaauguaacaguaacacacucuguuaaccuucuagaagacaagcauaacgggaaacuaugcaaacuaagagggguagccccauugcauuuggguaaauguaacauugcuggcuggauccugggaaauccagagugugaaucacucuccacaacaagcucaugguccuacauuguggaaacaucuaguucagacaauggaacguguuacccaggagauuucaucgauuaugaggagcuaagagagcaauugagcucagugucaucauuugaaagguuugagauauuccccaagacaaguucauggcccaaucaugacccgaacaaagguguaacggcagcauguccucaugcuggagcaaaaagcuucuacaaaaauuuaauauggcuaguuaaaaaaggaaauucauacccaaagcucagcaaauccuacauuaaugauaaagggaaagaaguccucgugcuauggggcauucaccauccaucuacuagugcugaccaacaaagucucuaucagaaugcagaugcauauguuuuuguggggacaucaagauacagcaagaaguucaagccggaaauagcaauaagacccaaagugagggaucaagaagggagaaugaacuauuacuggacacuaguagagccgggagacaaaauaacauucgaagcaacuggaaaucuagugguaccgagauaugcauucgcaauggaaagaaaugcuggaucugguauuaucauuucagauacaccaguccacgauugcaauacaacuugucagacacccaagggugcuauaaacaccagccucccauuucagaauauacauccgaucacaauuggaaaauguccaaaauauguaaaaagcacaaaauugagacuggccacaggauugaggaaugucccgucuauucaaucuagaggccuauuuggggccauugccgguuucauugaagggggguggacagggaugguagauggaugguacgguuaucaccaucaaaaugagcaggggucaggauaugcagccgaccugaagagcacacagaaugccauugacgagauuacuaacaaaguaaauucuguuauugaaaagaugaauacacaguucacagcaguagguaaagaguucaaccaccuggaaaaaagaauagagaauuuaaauaaaaagguugaugaugguuuccuggacauuuggacuuacaaugccgaacuguugguucuauuggaaaaugaaagaacuuuggacuaccacgauucaaaugugaagaacuuauaugaaaagguaagaagccaguuaaaaaacaaugccaaggaaauuggaaacggcugcuuugaauuuuaccacaaaugcgauaacacgugcauggaaaguguaaaaaaugggacuuaugacuacccaaaauacucagaggaagcaaaauuaaacagagaagaaauagaugggguaaagcuggaaucaacaaggauuuaccagauuuuggcgaucuauucaacugucgccaguucauugguacugguagucucccugggggcaaucaguuucuggaugugcucuaaugggucucuacaguguagaauauguauuuaa

SEQ ID NO: 35767 - RNA, 1701 nt, Artificial Sequence
  derived and/or modified CDS sequence (wt) from hemagglutinin__InfluenzaA__ACZ18241
augaaggcaauacuaguaguucugcuauauacauuugcaaccgcaaaugcagacacauuauguauagguuaucaugcgaacaauucaacagacacuguagacacaguacuagaaaagaauguaacaguaacacacucuguuaaccuucuagaagacaagcauaacgggaaacuaugcaaacuaagagggguagccccauugcauuuggguaaauguaacauugcuggcuggauccugggaaauccagagugugaaucacucuccacagcaagcucaugguccuacauuguggaaacaucuaguucagacaauggaacguguuacccaggagauuucaucgauuaugaggagcuaagagagcaauugagcucagugucaucauuugaaagguuugagauauuccccaagacaaguucauggcccaaucaugacucgaacaaaggcguaacggcagcauguccucaugcuggagcaaaaagcuucuacaaaaauuuaauauggcuaguuaaaaaaggaaauucauacccaaagcucagcaaauccuacauuaaugauaaagggaaagaaguccucgugcuauggggcauucaccauccaucuacuagugcugaccaacaaagucucuaucagaaugcagaugcauauguuuuuguggggacaucaagauacagcaagaaguucaagccggaaauagcaauaagacccaaagugagggaucaagaagggagaaugaacuauuacuggacacuaguagagccgggagacaaaauaacauucgaagcaacuggaaaucuagugguaccgagauaugcauucgcaauggaaagaaaugcuggaucugguauuaucauuucagauacaccaguccacgauugcaauacaacuugucagacacccaagggugcuauaaacaccagccucccauuucagaauauacauccgaucacaauuggaaaauguccaaaauauguaaaaagcacaaaauugagacuggccacaggauugaggaaugucccgucuauucaaucuagaggccuauuuggggccauugccgguuucauugaagggggguggacagggaugguagauggaugguacgguuaucaccaucaaaaugagcaggggucaggauaugcagccgaccugaagagcacacagaaugccauugacgagauuacuaacaaaguaaauucuguuauugaaaagaugaauacacaguucacagcaguagguaaagaguucaaccaccuggaaaaaagaauagagaauuuaaauaaaaagguugaugaugguuuccuggacauuuggacuuacaaugccgaacuguugguucuauuggaaaaugaaagaacuuuggacuaccacgauucaaaugugaagaacuuauaugaaaagguaagaagccaguuaaaaaacaaugccaaggaaauuggaaacggcugcuuugaauuuuaccacaaaugcgauaacacgugcauggaaaguguaaaaaaugggacuuaugacuacccaaaauacucagaggaagcaaaauuaaacagagaagaaauagaugggguaaagcuggaaucaacaaggauuuaccagauuuuggcgaucuauucaacugucgccaguucauugguacugguagucucccugggggcaaucaguuucuggaugugcucuaaugggucucuacaguguagaauauguauuuaa

SEQ ID NO: 35768 - RNA, 1701 nt, Artificial Sequence
  derived and/or modified CDS sequence (wt) from hemagglutinin__InfluenzaA__ACZ27800
augaaggcaauacuaguaguucugcuauauacauuugcaaccgcaaaugcagacacauuauguauagguuaucaugcgaacaauucaacagacacuguagacacaguacuagaaaagaauguaacaguaacacacucuguuaaccuucuagaagacaagcauaacgggaaacuaugcaaacuaagagggguagccccauugcauuuggguaaauguaacauugcuggcuggauccugggaaauccagagugugaaucacucuccacagcaagcucaugguccuacauuguggaaacaucuaguucagacaauggaacguguuacccaggggauuucaucgauuaugaggagcuaagagagcaauugagcucagugucaucauuugaaagguuugagauauuccccaagacaaguucauggcccaaucaugacucgaacaaagguguaacggcagcauguccucaugcuggagcaaaaagcuucuacaaaaauuuaauauggcuaguuaaaaaaggaaauucauacccaaagcucagcaaauccuacauuaaugauaaagggaaagaaguccucgugcuauggggcauucaccauccaucuacuagugcugaccaacaaagucucuaucagaaugcagaugcauauguuuuuguggggucaucaagauacagcaaggaguucaagccggaaauagcaauaagacccaaagugaggggucaagaagggagaaugaacuauuacuggacacuaguagagccgggagacaaaauaacauucgaagcaacuggaaaucuagugguaccgagauaugcauucgcaauggaaagaaaugcuggaucugguauuaucauuucagauacaccaguccacgauugcaauacaacuugucagacacccaagggugcuauaaacaccagccucccauuucagaauauacauccgaucacaauuggaaaauguccaaaauauguaaaaagcacaaaauugagacuggccacaggauugaggaaugucccgucuauucaaucuagaggccuauuuggggccauugccgguuucauugaagggggguggacagggaugguagauggaugguacgguuaucaccaucaaaaugagcaggggucaggauaugcagccgaccugaagagcacacagaaugccauugacgagauuacuaacaaaguaaauucuguuauugaaaagaugaauacacaguucacagcaguagguaaagaguucaaccaccuggaaaaaagaauagagaauuuaaauaaaaaaguugaugaugguuuccuggacauuuggacuuacaaugccgaacuguugguucuauuggaaaaugaaagaacuuuggacuaccacgauucaaaugugaagaacuuauaugaaaagguaagaagccagcuaaaaaacaaugccaaggaaauuggaaacggcugcuuugaauuuuaccacaaaugcgauaacacgugcauggaaagugucaaaaaugggacuuaugacuacccaaaauacucagaggaagcaaaauuaaacagagaagaaauagaugggguaaagcuggaaucaacaaggauuuaccagauuuuggcgaucuauucaacugucgccaguucauugguacugguagucucccugggggcaaucaguuucuggaugugcucuaaugggucucuacaguguagaauauguauuuaa

SEQ ID NO: 35769 - RNA, 1701 nt, Artificial Sequence; identical to SEQ ID NO: 34681
  derived and/or modified CDS sequence (wt) from hemagglutinin__InfluenzaA__ACZ27810

SEQ ID NO: 35770 - RNA, 1701 nt, Artificial Sequence; identical to SEQ ID NO: 34714
  derived and/or modified CDS sequence (wt) from hemagglutinin__InfluenzaA__ACZ27820

SEQ ID NO: 35771 - RNA, 1701 nt, Artificial Sequence
  derived and/or modified CDS sequence (wt) from hemagglutinin__InfluenzaA__ACZ27830
augaaggcaauacuaguaguucugcuauauacauuugcaaccgcaaaugcagacacauuauguauagguuaucaugcgaacaauucaacagacacuguagacacaguacuagaaaagaauguaacaguaacacacucuguuaaccuucuagaagacaagcauaacgggaaacuaugcaaacuaagagggguagccccauugcauuuggguaaauguaacauugcuggcuggauccugggaaauccagagugcgaaucacucuccacagcaagcucaugguccuacauuguggaaacaucuaguucagacaauggaacguguuacccaggagauuucaucgauuaugaggagcuaagagagcaauugagcucagugucaucauuugaaagguuugagauauuccccaagacaaguucauggcccaaucaugacucgaacaaagguguaacggcagcauguccucaugcuggagcaaaaagcuucuacaaaaauuuaauauggcuaguuaaaaaagggaauucauacccaaagcucagcaaauccuacauuaaugauaaagggaaagaaguccucgugcuauggggcauucaccauccaucuacuagugcugaccaacaaagucucuaucagaaugcagaugcauauguuuuuguggggacaucaagauacagcaagaaguucaagccggaaauagcaauaagacccaaagugagggaucaagaagggagaaugaacuauuacuggacacuaguagagccgggagacaaaauaacauucgaagcaacuggaaaucuagugguaccgagauaugcauucgcaauggaaagaaaugcuggaucugguauuaucauuucagauacaccaguccacgauugcaauacaacuugucagacacccaagggugcuauaaacaccagccucccauuucagaauauacauccgaucacaauuggaaaauguccaaaauauguaaaaagcacaaaauugagacuggccacaggauugaggaaugucccgucuauucaaucuagaggccuauuuggggccauugccgguuucauugaagggggguggacagggaugguagauggaugguacgguuaucaccaucaaaaugagcaggggucaggauaugcagccgaccugaagagcacacagaaugccauugacgagauuacuaacaaaguaaauucuguuauugaaaagaugaauacacaguucacagcaguagguaaagaguucaaccaccuggaaaaaagaauagagaauuuaaauaaaaaaguugaugaugguuuccuggacauuuggacuuacaaugccgaacuguugguucuauuggaaaaugaaagaacuuuggacuaccacgauucaaaugugaagaacuuauaugaaaagguaagaagccaguuaaaaaacaaugccaaggaaauuggaaacggcugcuuugaauuuuaccacaaaugcgauaacacgugcauggaaagugucaaaaaugggacuuaugacuacccaaaauacucagaggaagcaaaauuaaacagagaagaaauagaugggguaaagcuggaaucaacaaggauuuaccagauuuuggcgaucuauucaacugucgccaguucauugguacugguagucucccugggggcaaucaguuucuggaugugcucuaaugggucucuacaguguagaauauguauuuaa

SEQ ID NO: 35772 - RNA, 1701 nt, Artificial Sequence
  derived and/or modified CDS sequence (wt) from hemagglutinin__InfluenzaA__ACZ27840
augaaggcaauacuaguaguucugcuauauacauuugcaaccgcaaaugcagacacauuauguauagguuaucaugcgaacaauucaacagacacuguagacacaguacuagaaaagaauguaacaguaacacacucuguuaaccuucuagaagacaagcauaacgggaaacuaugcaaacuaagagggguagccccauugcauuuggguaaauguaacauugcuggcuggauccugggaaauccagagugugaaucacucuccacagcaagcucaugguccuacauuguggaaacaucuaguucagacaauggaacguguuacccaggagauuucaucgauuaugaggagcuaagagagcaauugagcucagugucaucauuugaaagguuugagauauuccccaagacaaguucauggcccaaucaugacucgaacaaagguguaacggcagcauguccucaugcuggagcaaaaagcuucuacaaaaauuuaauauggcuaguuaaaaaaggaaauucauacccaaagcucagcaaauccuacauuaaugauaaagggaaagaaguccucgugcuauggggcauucaccauccaucuacuagugcugaccaacaaagucucuaucagaaugcagaugcauauguuuuuguggggacaucaagauacagcaagaaguucaagccggaaauagcaauaagacccaaagugagggaacaagaagggagaaugaacuauuacuggacacuaguagagccgggagacaaaauaacauucgaagcaacuggaaaucuagugguaccgagauaugcauucgcaauggaaagaaaugcuggaucugguauuaucauuucagauacaccaguccacgauugcaauacaacuugucagacacccaagggugcuauaaacaccagccucccauuucagaauauacauccgaucacaauuggaaaauguccaaaauauguaaaaagcacaaaauugagacuggccacaggauugaggaaugucccgucuauucaaucuagaggccuauuuggggccauugccgguuucauugaagggggguggacagggaugguagauggaugguacgguuaucaccaucaaaaugagcaggggucaggauaugcagccgaccugaagagcacacagaaugccauugacgagauuacuaacaaaguaaauucuguuauugaaaagaugaauacacaguucacagcaguagguaaagaguucaaccaccuggaaaaaagaauagagaauuuaaauaaaaaaguugaugaugguuuccuggacauuuggacuuacaaugccgaacuguugguucuauuggaaaaugaaagaacuuuggacuaccacgauucaaaugugaagaacuuauaugaaaagguaagaagccaguuaaaaaacaaugccaaggaaauuggaaacggcugcuuugaauuuuaccacaaaugcgauaacacgugcauggaaagugucaaaaaugggacuuaugacuacccaaaauacucagaggaagcaaaauuaaacagagaagaaauagaugggguaaagcuggaaucaacaaggauuuaccagauuuuggcgaucuauucaacugucgccaguucauugguacugguagucucccugggggcaaucaguuucuggaugugcucuaaugggucucuacaguguagaauauguauuuaa

SEQ ID NO: 35773 - RNA, 1701 nt, Artificial Sequence
  derived and/or modified CDS sequence (wt) from hemagglutinin__InfluenzaA__ACZ45006
augaaggcaauacuaguaguucugcuauauacauuugcaaccgcaaaugcagacacauuauguauagguuaucaugcgaacaauucaacagacacuguagacacaguacuagaaaagaauguaacaguaacacacucuguuaaccuucuagaagacaagcauaacgggaaacuaugcaaacuaagggggguagccccauugcauuuggguaaauguaacauugcuggcuggauccugggaaauccagagugugaaucacucuccacagcaagcucaugguccuacauuguggaaacaucuaguucagacaauggaacguguuacccaggagauuucaucgauuaugaggagcuaagagagcaauugagcucagugucaucauuugaaagguuugagauauuccccaagacaaguucauggcccaaucaugacucgaacaaagguguaacggcagcauguccucaugcuggagcaaaaagcuucuacaaaaauuuaauauggcuaguuaaaaaaggaaauucauacccaaagcucagcaaauccuacauuaaugauaaagggaaagaaguccucgugcuauggggcauucaccauccaucuacuagugcugaccaacaaagucucuaucagaaugcagaugcauauguuuuuguggggucaucaagauacagcaagaaguucaagccggaaauagcaauaagacccaaagugagggaucaagaagggagaaugaacuauuacuggacacuaguagagccgggagacaaaauaacauucgaagcaacuggaaaucuagugguaccgagauaugcauucgcaauggaaagaaaugcuggaucugguauuaucauuucagauacaccaguccacgauugcaauacaacuugucagacacccaagggugcuauaaacaccagccucccauuucagaauauacauccgaucacaauuggaaaauguccaaaauauguaaaaagcacaaaauugagacuggccacaggauugaggaaugucccgucuauucaaucuagaggccuauuuggggccauugccgguuucauugaagggggguggacagggaugguagauggaugguacgguuaucaccaucaaaaugagcaggggucaggauaugcagccgaccugaagagcacacagaaugccauugacgagauuacuaacaaaguaaauucuguuauugaaaagaugaauacacaguucacagcaguagguaaagaguucaaccaccuggaaaaaagaauagagaauuuaaauaaaaaaguugaugaugguuuccuggacauuuggacuuacaaugccgaacuguugguucuauuggaaaaugaaagaacuuuggacuaccacgauucaaaugugaagaacuuauaugaaaagguaagaagccagcuaaaaaacaaugccaaggaaauuggaaacggcugcuuugaauuuuaccacaaaugcgauaacacgugcauggaaagugucaaaaaugggacuuaugacuacccaaaauacucagaggaagcaaaauuaaacagagaagaaauagaugggguaaagcuggaaucaacaaggauuuaccagauuuuggcgaucuauucaacugucgccaguucauugguacugguagucucccugggggcaaucaguuucuggaugugcucuaaugggucucuacaguguagaauauguauuuaa

SEQ ID NO: 35774 - RNA, 1701 nt, Artificial Sequence
  derived and/or modified CDS sequence (wt) from hemagglutinin__InfluenzaA__ACZ45007
augaaggcaauacuaguaguucugcuauauacauuugcaaccgcaaaugcagacacauuauguauagguuaucaugcgaacaauucaacagacacuguagacacaguacuagaaaagaauguaacaguaacacacucuguuaaccuucuagaagacaagcauaacgggaaacuaugcaaacuaagagggguagccccauugcauuuggguaaauguaacauugcuggcuggauccugggaaauccagagugugaaucacucuccacagcaagcucaugguccuacauuguggaaacaucuaguucagacaauggaacguguuacccaggagauuucaucgauuaugaggagcuaagagagcaauugagcucagugucaucauuugaaagguuugagauauuccccaagacaaguucauggcccaaucaugacucgaacaaagguguaacggcagcauguccucaugcuggagcaaaaagcuucuacaaaaauuuaauauggcuaguuaaaaaagggaauucauacccaaagcucagcaaauccuacauuaaugauaaagggaaagaaguccucgugcuauggggcauucaccauccaucuacuagugcugaccaacaaagucucuaucagaaugcagaugcauauguuuuugugggaacaucaagauacagcaagaaguucaagccggaaauagcaauaagacccaaagugagggaucaagaagggagaaugaacuauuacuggacacuaguagagccgggagacaaaauaacauucgaagcaacuggaaaucuagugguaccgagauaugcauucgcaauggaaagaaaugcuggaucugguauuaucauuucagauacaccaguccacgauugcaauacaacuugucagacacccaagggugcuauaaacaccagccucccauuucagaauauacauccgaucacaauuggaaaauguccaaaauauguaaaaagcacaaaauugagacuggccacaggauugaggaaugucccgucuauucaaucuagaggccuauuuggggccauugccgguuucauugaagggggguggacagggaugguagauggaugguacgguuaucaccaucaaaaugagcaggggucaggagaugcagccgaccugaagagcacacagaaugccauugacgagauuacuaacaaaguaaauucuguuauugaaaagaugaauacacaguucacagcaguagguaaagaguucaaccaccuggaaaaaagaauagagaauuuaaauaaaaaaguugaugaugguuuccuggacauuuggacuuacaaugccgaacuguugguucuauuggaaaaugaaagaacuuuggacuaccacgauucaaaugugaagaacuuauaugaaaagguaagaagccaguuaaaaaacaaugccaaggaaauuggaaacggcugcuuugaauuuuaccacaaaugcgauaacacgugcauggaaagugucaaaaaugggacuuaugacuacccaaaauacucagaggaagcaaaauuaaacagagaagaaauagaugggguaaagcuggaaucaacaaggauuuaccagauuuuggcgaucuauucaacugucgccaguucauugguacugguagucucccugggggcaaucaguuucuggaugugcucuaaugggucucuacaguguagaauauguauuuaa

SEQ ID NO: 35775 - RNA, 1701 nt, Artificial Sequence; identical to SEQ ID NO: 35772
  derived and/or modified CDS sequence (wt) from hemagglutinin__InfluenzaA__ACZ45008

SEQ ID NO: 35776 - RNA, 1701 nt, Artificial Sequence; identical to SEQ ID NO: 35772
  derived and/or modified CDS sequence (wt) from hemagglutinin__InfluenzaA__ACZ45009

SEQ ID NO: 35777 - RNA, 1701 nt, Artificial Sequence; identical to SEQ ID NO: 34965
  derived and/or modified CDS sequence (wt) from hemagglutinin__InfluenzaA__ACZ45010

SEQ ID NO: 35778 - RNA, 1701 nt, Artificial Sequence
  derived and/or modified CDS sequence (wt) from hemagglutinin__InfluenzaA__ACZ45012
augaaggcaauacuaguaguucugcuauauacauuugcaaccgcaaaugcagacacauuauguauagguuaucaugcgaacaauucaacagacacuguagacacaguacuagaaaagaauguaacaguaacacacucuguuaaccuucuagaagacaagcauaacgggaaacuaugcaaacuaagagggguagccccauugcauuuggguaaauguaacauugcuggcuggauccugggaaacccagagugugaaucacucuccacagcaagcucaugguccuacauuguggaaacaucuaguucagacaauggaacguguuacccaggagauuucaucgauuaugaggagcuaagagagcaauugagcucagugucaucauuugaaagguuugagauauuccccaagacaaguucauggcccaaucaugacucgaacaaagguguaacggcagcauguccucaugcuggagcaaaaagcuucuacaaaaauuuaauauggcuaguuaaaaaaggaaauucauacccaaagcucagcaaauccuacauuaaugauaaagggaaagaaguccucgugcuauggggcauucaccauccaucuacuagugcugaccaacaaagucucuaucagaaugcagaugcauauguuuuuguggggacaucaagauacagcaagaaguucaagccggaaauagcaauaagacccaaagugagggaucaagaagggagaaugaacuauuacuggacacuaguagagccgggagacaaaauaacauucgaagcaacuggaaaucuagugguaccgagauaugcauucgcaauggaaagaaaugcuggaucugguauuaucauuucagauacaccaguccacgauugcaauacaacuugucagacacccaagggugcuauaaacaccagccucccauuucagaauauacauccgaucacaauuggaaaauguccaaaauauguaaaaagcacaaaauugagacuggccacaggauugaggaaugucccgucuauucaaucuagaggccuauuuggggccauugccgguuucauugaagggggguggacagggaugguagauggaugguacgguuaucaccaucaaaaugagcaggggucaggauaugcagccgaccugaagagcacacagaaugccauugacgagauuacuaacaaaguaaauucuguuauugaaaagaugaauacacaguucacagcaguagguaaagaguucaaccaccuggaaaaaagaauagagaauuuaaauaaaaaaguugaugaugguuuccuggacauuuggacuuacaaugccgaacuguugguucuauuggaaaaugaaagaacuuuggacuaccacgauucaaaugugaagaacuuauaugaaaagguaagaagccaguuaaaaaacaaugccaaggaaauuggaaacggcugcuuugaauuuuaccacaaaugcgauaacacgugcauggaaagugucaaaaaugggacuuaugacuacccaaaauacucagaggaagcaaaauuaaacagagaagaaauagaugggguaaagcuggaaucaacaaggauuuaccagauuuuggcgaucuauucaacugucgccaguucauugguacugguagucucccugggggcaaucaguuucuggaugugcucuaaugggucucuacaguguagaauauguauuuaa

SEQ ID NO: 35779 - RNA, 1701 nt, Artificial Sequence
  derived and/or modified CDS sequence (wt) from hemagglutinin__InfluenzaA__ACZ45013
augaaggcaauacuaguaguucugcuauauacauuugcaaccgcaaaugcagacacauuauguauagguuaucaugcgaacaauucaacagacacuguagacacaguacuagaaaagaauguaacaguaacacacucuguuaaccuucuagaagacaagcauaacgggaaacuaugcaaacuaagagggguagccccauugcauuuggguaaauguaacauugcuggcuggauccugggaaauccagagugugaaucacucuccacagcaagcucaugguccuacauuguggaaacaucuaguucagacaauggaacguguuacccaggagauuucaucgauuaugaggagcuaagagagcaauugagcucagugucaucauuugaaagguuugagauauuccccaagacaaguucauggcccaaucaugacucgagcaaagguguaacggcagcauguccucaugcuggagcaaaaagcuucuacaaaaauuuaauauggcuaguuaaaaaaggaaauucauacccaaagcucagcaaauccuacauuaaugauaaagggaaagaaguccucgugcuauggggcauucaccauccaucuacuagugcugaccaacaaagucucuaucagaaugcagaugcauauguuuuuguggggacaucaagauacagcaagaaguucaagccggaaauagcaauaagacccaaagugagggaacaagaagggagaaugaacuauuacuggacacuaguagagccgggagacaaaauaacauucgaagcaacuggaaaucuagugguaccgagauaugcauucgcaauggaaagaaaugcuggaucugguauuaucauuucagauacaccaguccacgauugcaauacaacuugucagacacccaagggugcuauaaacaccagccucccauuucagaauauacauccgaucacaauuggaaaauguccaaaauauguaaaaagcacaaaauugagacuggccacaggauugaggaaugucccgucuauucaaucuagaggccuauuuggggccauugccgguuucauugaagggggguggacagggaugguagauggaugguacgguuaucaccaucaaaaugagcaggggucaggauaugcagccgaccugaagagcacacagaaugccauugacgagauuacuaacaaaguaaauucuguuauugaaaagaugaauacacaguucacagcaguagguaaagaguucaaccaccuggaaaaaagaauagagaauuuaaauaaaaaaguugaugaugguuuccuggacauuuggacuuacaaugccgaacuguugguucuauuggaaaaugaaagaacuuuggacuaccacgauucaaaugugaagaacuuauaugaaaagguaagaagccaguuaaaaaacaaugccaaggaaauuggaaacggcugcuuugaauuuuaccacaaaugcgauaacacgugcauggaaagugucaaaaaugggacuuaugacuacccaaaauacucagaggaagcaaaauuaaacagagaagaaauagaugggguaaagcuggaaucaacaaggauuuaccagauuuuggcgaucuauucaacugucgccaguucauugguacugguagucucccugggggcaaucaguuucuggaugugcucuaaugggucucuacaguguagaauauguauuuaa

SEQ ID NO: 35780 - RNA, 1701 nt, Artificial Sequence
  derived and/or modified CDS sequence (wt) from hemagglutinin__InfluenzaA__ACZ45014
augaaggcaauacuaguaguucugcuauauacauuugcaaccgcaaaugcagacacauuauguauagguuaucaugcgaacaauucaacagacacuguagacacaguacuagaaaagaauguaacaguaacacacucuguuaaccuucuagaagacaagcauaacgggaaacuaugcaaacuaagagggguagccccauugcauuuggguaaauguaacauugcuggcuggauccugggaaauccagagugugaaucacucuccacagcaagcucaugguccuacauuguggaaacaucuaguucagacaauggaacguguuacccaggagauuucaucgauuaugaggagcuaagagagcaauugagcucagugucaucauuugaaagguuugagauauuccccaagacaaguucauggcccaaucaugacucgaacaaagguguaacggcagcaugcccucaugcuggagcaaaaagcuucuacaaaaauuuaauauggcuaguuaaaaaaggaaauucauacccaaagcucagcaaauccuacauuaaugauaaagggaaagaaguccucgugcuauggggcauucaccauccaucuacuagugcugaccaacaaagucucuaucagaaugcagaugcauauguuuuuguggggacaucaagauacagcaagaaguucaagccggaaauagcaauaagacccaaagugagggaucaagaagggagaaugaacuauuacuggacacuaguagagccgggagacaaaauaacauucgaagcaacuggaaaucuagugguaccgagauaugcauucgcaauggaaagaaaugcugggucugguauuaucauuucagauacaccaguccacgauugcaauacaacuugucagacacccaagggugcuauaaacaccagccucccauuucagaauauacauccgaucacaauuggaaaauguccaaaauauguaaaaagcacaaaauugagacuggccacaggauugaggaaugucccgucuauucaaucuagaggccuauuuggggccauugccgguuucauugaagggggguggacagggaugguagauggaugguacgguuaucaccaucaaaaugagcaggggucaggauaugcagccgaccugaagagcacacagaaugccauugacgagauuacuaacaaaguaaauucuguuauugaaaagaugaauacacaguucacagcaguagguaaagaguucaaccaccuggaaaaaagaauagagaauuuaaauaaaaaaguugaugaugguuuccuggacauuuggacuuacaaugccgaacuguugguucuauuggaaaaugaaagaacuuuggacuaccacgauucaaaugugaagaacuuauaugaaaagguaagaagccaguuaaaaaacaaugccaaggaaauuggaaacggcugcuuugaauuuuaccacaaaugcgauaacacgugcauggaaagugucaaaaaugggacuuaugacuacccaaaauacucagaggaagcaaaauuaaacagagaagaaauagaugggguaaagcuggaaucaacaaggauuuaccagauuuuggcgaucuauucaacugucgccaguucauugguacugguagucucccugggggcaaucaguuucuggaugugcucuaaugggucucuacaguguagaauauguauuuaa

SEQ ID NO: 35781 - RNA, 1701 nt, Artificial Sequence
  derived and/or modified CDS sequence (wt) from hemagglutinin__InfluenzaA__ACZ45016
augaaggcaauacuaguaguucugcuauauacauuugcaaccgcaaaugcagacacauuauguauagguuaucaugcgaacaauucaacagacacuguagacacaguacuagaaaagaauguaacaguaacacacucuguuaaccuucuagaagacaagcauaacgggaaacuaugcaaacuaagagggguagccccauugcauuuggguaaauguaacauugcuggcuggauccugggaaauccagagugugaaucacucuccacagcaagcucaugguccuacauuguggaaacaucuaguucagacaauggaacguguuacccaggagauuucaucgauuaugaggagcuaagagagcaauugagcucagugucaucauuugaaagguuugagauauuccccaagacaaguucauggcccaaucaugacucgaacaaagguguaacggcagcauguccucaugcuggagcaaaaagcuucuacaaaaauuuaauauggcuaguuaaaaaaggaaauucauacccaaagcucagcaaauccuacauuaaugauaaagggaaagaaguccucgugcuauggggcauucaccauccaucuacuagugcugaccaacaaagucucuaucagaaugcagaugcauauguuuuuguggggacaucaagauacagcaagaaguucaagccggaaauagcaauaagacccaaagugagggaucaagaagggagaaugaacuauuacuggacacuaguagagccaggagacaaaauaacauucgaagcaacuggaaaucuagugguaccgagauaugcauucgcaauggaaagaaaugcuggaucugguauuaucauuucagauacaccaguccacgauugcaauacaacuugucagacacccaagggugcuauaaacaccagccucccauuucagaauauacauccgaucacaauuggaaaauguccaaaauauguaaaaagcacaaaauugagacuggccacaggauugaggaaugucccgucuauucaaucuagaggccuauuuggggccauugccgguuucauugaagggggguggacagggaugguagauggaugguacgguuaucaccaucaaaaugagcaggggucaggauaugcagccgaccugaagagcacacagaaugccauugacgagauuacuaacaaaguaaauucuguuauugaaaagaugaauacacaguucacagcaguagguaaagaguucaaccaccuggaaaaaagaauagagaauuuaaauaaaaagguugaugaugguuuccuggacauuuggacuuacaaugccgaacuguugguucuauuggaaaaugaaagaacuuuggacuaccacgauucaaaugugaagaacuuauaugaaaagguaagaagccaguuaaaaaacaaugccaaggaaauuggaaacggcugcuuugaauuuuaccacaaaugcgauaacacgugcauggaaagugucaaaaaugggacuuaugacuacccaaaauacucagaggaagcaaaauuaaacagagaagaaauagaugggguaaagcuggaaucaacaaggauuuaccagauuuuggcgaucuauucaacugucgccaguucauugguacugguagucucccugggggcaaucaguuucuggaugugcucuaaugggucucuacaguguagaauauguauuuaa

SEQ ID NO: 35782 - RNA, 1701 nt, Artificial Sequence
  derived and/or modified CDS sequence (wt) from hemagglutinin__InfluenzaA__ACZ45028
augaaggcaauacuaguaguucugcuauauacauuugcaaccgcaaaugcagacacauuauguauagguuaucaugcgaacaauucaacagacacuguagacacaguacuagaaaagaauguaacaguaacacacucuguuaaccuucuagaagacaagcauaacgggaaacuaugcaaacuaagagggguagccccauugcauuuggguaaauguaacauugcuggcuggauccugggaaauccagagugugaaucacucuccacagcaagcucaugguccuacauuguggaaacaucuaguucagacaauggaacguguuacccaggagauuucaucgauuaugaggagcuaagagagcaauugagcucagugucaucauuugaaagguuugagauauuccccaagacaaguucauggcccaaucaugacucgaacaaagguguaacggcagcauguccucaugcuggagcaaaaagcuucuacaaaaauuuaauauggcuaguuaaaaaaggaaauucauacccaaagcucagcaaauccuacauuaaugauaaagggaaagaaguccucgugcuauggggcauucaccauccaucuacuagugcugaccaacaaagucucuaucagaaugcagaugcauauguuuuuguggggacaucaagauacagcaagaaguucaagccggaaauagcaauaagacccaaagugagggaucaagaagggagaaugaacuauuacuggacacuaguagagccgggagacaaaauaacauucgaagcaacuggaaaucuagugguaccgagauaugcauucgcaauggaaagaaaugcuggaucugguauuaucauuucagauacaccaguccacgauugcaauacaacuugucagacacccaagggugcuauaaacaccagccucccauuucagaauauacauccgaucacaauuggaaaauguccaaaauauguaaaaagcacaaaauugagacuggccacaggauugaggaauaucccgucuauucaaucuagaggccuauuuggggccauugccgguuucauugaagggggguggacagggaugguagauggaugguacgguuaucaccaucaaaaugagcaggggucaggauaugcagccgaccugaagagcacacagaaugccauugacgagauuacuaacaaaguaaauucuguuauugaaaagaugaauacacaguucacagcaguagguaaagaguucaaccaccuggaaaaaagaauagagaauuuaaauaaaaagguugaugaugguuuccuggacauuuggacuuacaaugccgaacuguugguucuauuggaaaaugaaagaacuuuggacuaccacgauucaaaugugaagaacuuauaugaaaagguaagaagccaguuaaaaaacaaugccaaggaaauuggaaacggcugcuuugaauuuuaccacaaaugcgauaacacgugcauggaaagugucaaaaaugggacuuaugacuacccaaaauacucagaggaagcaaaauuaaacagagaagaaauagaugggguaaagcuggaaucaacaaggauuuaccagauuuuggcgaucuauucaacugucgccaguucauugguacugguagucucccugggggcaaucaguuucuggaugugcucuaaugggucucuacaguguagaauauguauuuaa

SEQ ID NO: 35783 - RNA, 1701 nt, Artificial Sequence
  derived and/or modified CDS sequence (wt) from hemagglutinin__InfluenzaA__ACZ45029
augaaggcaauacuaguaguucugcuauauacauuugcaaccgcaaaugcagacacauuauguauagguuaucaugcgaacaauucaacagacacuguagacacaguacuagaaaagaauguaacaguaacacacucuguuaaccuucuagaagacaagcauaacgggaaacuaugcaaacuaagagggguagccccauugcauuuggguaaauguaacauugcuggcuggauccugggaaauccagagugugaaucacucuccacagcaagcucaugguccuacauuguggaaacaucuaguucaggcaauggaacguguuacccaggagauuucaucgauuaugaggagcuaagagagcaauugagcucagugucaucauuugaaagguuugagauauuccccaagacaaguucauggcccaaucaugacucgaacaaagguguaacggcagcauguccucaugcuggagcaaaaagcuucuacaaaaauuuaauauggcuaguuaaaaaaggaaacucauacccaaagcucagcaaauccuacauuaaugauaaagggaaagaaguccucgugcuauggggcauucaccauccaucuacuagugcugaccaacaaagucucuaucagaaugcagaugcauauguuuuuguggggacaucaagauacagcaagaaguucaagccggaaauagcaauaagacccaaagugagggaucaagaagggagaaugaacuauuacuggacacuaguagagccgggagacaaaauaacauucgaagcaacuggaaaccuagugguaccgagauaugcauucgcaauggaaagaaaugcuggaucugguauuaucauuucagauacaccaguccacgauugcaauacaacuugucagacacccaagggugcuauaaacaccagccucccauuucagaauauacauccgaucacaauuggaaaauguccaaaauauguaaaaagcacaaaauugagacuggccacaggauugaggaaugucccgucuauucaaucuagaggccuauuuggggccauugccgguuucauugaagggggguggacagggaugguagauggaugguacgguuaucaccaucaaaaugagcaggggucaggauaugcagccgaccugaagagcacacagaaugccauugacgagauuacuaacaaaguaaauucuguuauugaaaagaugaauacacaguucacagcaguagguaaagaguucaaccaccuggaaaaaagaauagagaauuuaaauaaaaaaguugaugauggcuuccuggacauuuggacuuacaaugccgaacuguugguucuauuggaaaaugaaagaacuuuggacuaccacgauucaaaugugaagaauuuauaugaaaagguaagaagccaguuaaaaaacaaugccaaggaaauuggaaacggcugcuuugaauuuuaccacaaaugcgauaacacgugcauggaaagugucaaaaaugggacuuaugacuacccaaaauacucagaggaagcaaaauuaaacagagaagaaauagaugggguaaagcuggaaucgacaaggauuuaccagauuuuggcgaucuauucaacugucgccaguucauugguacugguagucucccugggggcaaucaguuucuggaugugcucuaaugggucucuacaguguagaauauguauuuaa

SEQ ID NO: 35784 - RNA, 1701 nt, Artificial Sequence
  derived and/or modified CDS sequence (wt) from hemagglutinin__InfluenzaA__ACZ45030
augaaggcaauacuaguaguucugcuauauacauuugcaaccgcaaaugcagacacauuauguauagguuaucaugcgaacaauucaacagacacuguagacacaguacuagaaaagaauguaacaguaacacacucuguuaaccuucuagaagacaagcauaacgggaaacuaugcaaacuaagagggguagccccauugcauuuggguaaauguaacauugcuggcuggauccugggaaauccagagugugaaucacucuccacagcaagcucaugguccuacauuguggaaacaucuaguucagacaauggaacguguuacccaggagauuucaucgauuaugaggagcuaagagagcaauugagcucagugucaucauuugaaagguuugagauauuccccaagacaaguucauggcccaaucaugacucgaacaaagguguaacggcagcauguccucaugcuggagcaaaaagcuucuacaaaaauuuaauauggcuaguuaaaaaaggaaauucauacccaaagcucagcaaauccuacauuaaugauaaagggaaagaaguccuagugcuauggggcauucaccauccaucuacuagugcugaccaacaaagucucuaucagaaugcagaugcauauguuuuuguggggacaucaacauacagcaagaaguucaagccggaaauagcaauaagacccaaagugagggaucaagaagggagaaugaacuauuacuggacacuaguagagccgggagacaaaauaacauucgaagcaacuggaaaucuagugguaccgagauaugcauucacaauggaaagaaaugcuggaucugguauuaucauuucagauacaccaguccacgauugcaauacaacuugucagacacccaagggugcuauaaacaccagccucccauuucagaauauacauccgaucacaauuggaaaauguccaaaauauguaaaaagcacaaaauugagacuggccacaggauugaggaauaucccgucuauucaaucuagaggccuauuuggggccauugccgguuucauugaagggggguggacagggaugguagauggaugguacgguuaucaccaucaaaaugagcaggggucaggauaugcagccgaccugaagagcacacagaaugccauugacgagauuacuaacaaaguaaauucuguuauugaaaagaugaauacacaguucacagcaguagguaaagaguucaaccaccuggaaaaaagaauagagaauuuaaauaaaaagguugaugaugguuuccuggacauuuggacuuacaaugccgaacuguugguucuauuggaaaaugaaagaacuuuggacuaccacgauucaaaugugaagaacuuauaugaaaagguaagaagccaguuaaaaaacaaugccaaggaaauuggaaacggcugcuuugaauuuuaccacaaaugcgauaacacgugcauggaaagugucaaaaaugggacuuaugacuacccaaaauacucagaggaagcaaaauuaaacagagaagaaauagaugggguaaagcuggaaucaacaaggauuuaccagauuuuggcgaucuauucaacugucgccaguucauugguacugguagucucccugggggcaaucaguuucuggaugugcucuaaugggucucuacaguguagaauauguauuuaa

SEQ ID NO: 35785 - RNA, 1701 nt, Artificial Sequence
  derived and/or modified CDS sequence (wt) from hemagglutinin__InfluenzaA__ACZ45031
augaaggcaauacuaguaguucugcuauauacauuugcaaccgcaaaugcagacacauuauguauagguuaucaugcgaacaauucaacagacacuguagacacaguacuagaaaagaauguaacaguaacacacucuguuaaccuucuagaagacaagcauaacgggaaacuaugcaaacuaagagggguagccccauugcauuuggguaaauguaacauugcuggcuggauccugggaaauccagagugugaaucacucuccacagcaagcucaugguccuacauuguggaaacaucuaguucagacaauggaacguguuacccaggagauuucaucgauuaugaggagcuaagagagcaauugagcucagugucaucauuugaaagguuugagauauuccccaagacaaguucauggcccaaucaugacucgaacaaagguguaacggcagcauguccucaugcuggagcaaaaagcuucuacaaaaauuuaauauggcuaguuaaaaaaggaaauucauacccaaagcucagcaaauccuacauuaaugauaaagggaaagaaguccucgugcuauggggcauucaccauccaucuacuagugcugaccaacaaagucucuaucagaaugcagaugcauauguuuuuguggggacaucaagauacagcaagaaguucaagccggaaauagcaauaagacccaaagugagggaacaagaagggagaaugaacuauuacuggacacuaguagagccgggagacaaaauaacauucgaagcaacuggaaaucuagugguaccgagauaugcauucacaauggaaagaaauguuggaucugguauuaucauuucagauacaccaguccacgauugcaauacaacuugucagacacccaagggugcuauaaacaccagccucccauuucagaauauacauccgaucacaauuggaaaauguccaaaauauguaaaaagcacaaaauugagacuggccacaggauugaggaaugucccgucuauucaaucuagaggccuauuuggggccauugccgguuucauugaagggggguggacagggaugguagauggaugguacgguuaucaccaucaaaaugagcagggaucaggauaugcagccgaccugaagagcacacagaaugccauugacgagauuacuaacaaaguaaauucuguuauugaaaagaugaauacacaguucacagcaguagguaaagaguucaaccaccuggaaaaaagaauagagaauuuaaauaaaaaaguugaugaugguuuccuggacauuuggacuuacaaugccgaacuguugguucuauuggaaaaugaaagaacuuuggacuaccacgauucaaaugugaagaacuuauaugaaaagguaagaagccaguuaaaaaacaaugccaaggaaauuggaaacggcugcuuugaauuuuaccacaaaugcgauaacacgugcauggaaagugucaaaaaugggacuuaugacuacccaaaauacucagaggaagcaaaauuaaacagagaagaaauagaugggguaaagcuggaaucaacaaggauuuaccagauuuuggcgaucuauucaacugucgccaguucauugguacugguagucucccugggggcaaucaguuucuggaugugcucuaaugggucucuacaguguagaauauguauuuaa

SEQ ID NO: 35786 - RNA, 1701 nt, Artificial Sequence
  derived and/or modified CDS sequence (wt) from hemagglutinin__InfluenzaA__ACZ45034
augaaggcaauacuaguaguucugcuauauacauuugcaaccgcaaaugcagacacauuauguauagguuaucaugcgaacaauucaacagacacuguagacacaguacuagaaaagaauguaacaguaacacacucuguuaaccuucuagaagacaagcauaacgggaaacuaugcaaacuaagagggguagccccauugcauuuggguaaauguaacauugcuggcuggauccugggaaauccagagugugaaucacucuccacagcaagcucaugguccuacauuguggaaacaucuaguucagacaauggaacguguuacccaggagauuucaucgauuaugaggagcuaagagagcaauugagcucagugucaucauuugaaagguuugagauauuccccaagacaaguucauggcccaaucaugacucgaacaaagguguaacggcagcauguccucaugcuggagcaaaaagcuucuacaaaaauuuaauauggcuaguuaaaaaaggaaauucauacccaaagcucagcaaauccuacauuaaugauaaagggaaagaaguccucgugcuauggggcauucaccauccaucuacuagugcugaccaacaaagucucuaucagaaugcagaugcauauguuuuuguggggacaucaagauacagcaagaaguucaagccggaaauagcaauaagacccaaagugagggaucaagaagggagaaugaacuauuacuggacacuaguagagccgggagacaaaauaacauucgaagcaacuggaaaucuagugguaccgagauaugcauucgcaauggaaagaaaugcuggaucugguauuaucauuucagauacaccaguccacgauugcaauacaacuugucagacacccaagggugcuauaaacaccagccucccauuucagaauguacauccgaucacaauuggaaaauguccaaaauauguaaaaagcacaaaauugagacuggccacaggauugaggaaugucccgccuauucaaucuagaggccuauuuggggccauugccgguuucauugaagggggguggacagggaugguagauggaugguacgguuaucaccaucaaaaugagcaggggucaggauaugcagccgaccugaagagcacacagaaugccauugacgagauuacuaacaaaguaaauucuguuauugaaaagaugaauacacaguucacagcaguagguaaagaguucaaccaccuggaaaaaagaauagagaauuuaaauaaaaaaguugaugaugguuuccuggacauuuggacuuacaaugccgaacuguugguucuauuggaaaaugaaagaacuuuggacuaccacgauucaaaugugaagaacuuauaugaaaagguaagaagccaguuaaaaaacaaugccaaggaaauuggaaacggcugcuuugaauuuuaccacaaaugcgauaacacgugcauggaaagugucaaaaaugggacuuaugacuacccaaaauacucagaggaagcaaaauuaaacagagaagaaauagaugggguaaagcuggaaucaacaaggauuuaccagauuuuggcgaucuauucaacugucgccaguucauugguacugguagucucccugggggcaaucaguuucuggaugugcucuaaugggucucuacaguguagaauauguauuuaa

SEQ ID NO: 35787 - RNA, 1701 nt, Artificial Sequence; identical to SEQ ID NO: 34714
  derived and/or modified CDS sequence (wt) from hemagglutinin__InfluenzaA__ACZ45036

SEQ ID NO: 35788 - RNA, 1701 nt, Artificial Sequence; identical to SEQ ID NO: 34714
  derived and/or modified CDS sequence (wt) from hemagglutinin__InfluenzaA__ACZ45037

SEQ ID NO: 35789 - RNA, 1701 nt, Artificial Sequence
  derived and/or modified CDS sequence (wt) from hemagglutinin__InfluenzaA__ACZ45038
augaaggcaauacuaguaguucugcuauauacauuugcaaccgcaaaugcagacacauuauguauagguuaucaugcgaacaauucaacagacacuguagacacaguacuagaaaagaauguaacaguaacacacucuguuaaccuucuagaagacaagcauaacgggaaacuaugcaaacuaagagggguagccccauugcauuuggguaaauguaacauugcuggcuggauccugggaaauccagagugugaaucacucuccacagcaagcucaugguccuacauuguggaaacaucuaguucagacaauggaacguguuacccaggagauuucaucgauuaugaggagcuaagagagcaauugagcucagugucaucauuugaaagguuugagauauuccccaagacaaguucauggcccaaucaugacucgaacaaagguguaacggcagcauguccucaugcuggagcaaaaagcuucuacaaaaauuuaauauggcuaguuaaaaaaggaaauucauacccaaagcucagcaaauccuacauuaaugauaaagggaaagaaguccuagugcuauggggcauucaccauccaucuacuagugcugaccaacaaagucucuaucagaaugcagaugcauauguuuuuguggggacaucaagauacagcaagaaguucaagccggaaauagcaauaagacccaaagugagggaucaagaagggagaaugaacuauuacuggacacuaguagagccgggagacaaaauaacauucgaagcaacuggaaaucuagugguaccgagauaugcauucgcaauggaaagaaaugcuggaucugguauuaucauuucagauacaccaguccacgauugcaauacaacuugucagacacccaagggugcuauaaacaccagccucccauuucagaauauacauccgaucacaauuggaaaauguccaaaauauguaaaaagcacaaaauugagacuggccacaggauugaggaauaucccgucuauucaaucuagaggccuauuuggggccauugccgguuucauugaagggggguggacagggaugguagauggaugguacgguuaucaccaucaaaaugagcaggggucaggauaugcagccgaccugaagagcacacagaaugccauugacgagauuacuaacaaaguaaauucuguuauugaaaagaugaauacacaguucacagcaguagguaaagaguucaaccaccuggaaaaaagaauagagaauuuaaauaaaaagguugaugaugguuuccuggacauuuggacuuacaaugccgaacuguugguucuauuggaaaaugaaagaacuuuggacuaccacgauucaaaugugaagaacuuauaugaaaagguaagaagccaguuaaaaaacaaugccaaggaaauuggaaacggcugcuuugaauuuuaccacaaaugcgauaacacgugcauggaaagugucaaaaaugggacuuaugacuacccaaaauacucagaggaagcaaaauuaaacagagaagaaauagaugggguaaagcuggaaucaacaaggauuuaccagauuuuggcgaucuauucaacugucgccaguucauugguacugguagucucccugggggcaaucaguuucuggaugugcucuaaugggucucuacaguguagaauauguauuuaa

SEQ ID NO: 35790 - RNA, 1701 nt, Artificial Sequence
  derived and/or modified CDS sequence (wt) from hemagglutinin__InfluenzaA__ACZ45039
augaaggcaauacuaguaguucugcuauauacauuugcaaccgcaaaugcagacacauuauguauagguuaucaugcgaacaauucaacagacacuguagacacaguacuagaaaagaauguaacaguaacacacucuguuaaccuucuagaagacaagcauaacgggaaacuaugcaaacuaagagggguagccccauugcauuuggguaaauguaacauugcuggcuggauccugggaaauccagagugugaaucacucuccacagcaagcucaugguccuacauuguggaaacaucuaguucagacaaugguacguguuacccaggagauuucaucgauuaugaggagcuaagagagcaauugagcucagugucaucauuugaaagguuugagauauuccccaagacaaguucauggcccaaucaugacucgaacaaagguguaacggcagcauguccucaugcuggagcaaaaagcuucuacaaaaauuuaauauggcuaguuaaaaaaggaaauucauacccaaagcucagcaaauccuacauuaaugauaaagggaaagaaguccucgugcuauggggcauucaccauccaucuacuagugcugaccaacaaagucucuaucagaaugcagaugcauauguuuuuguggggacaucaagauacagcaagaaguucaagccggaaauagcaauaagacccaaagugagggaacaagaagggagaaugaacuauuacuggacacuaguagagccgggagacaaaauaacauucgaagcaacuggaaaucuagugguaccgagauaugcauucgcaauggaaagaaaugcuggaucugguauuaucauuucagauacaccaguccacgauugcaauacaacuugucagacacccaagggugcuauaaacaccagccucccauuucagaauauacauccgaucacaauuggaaaauguccaaaauauguaaaaagcacaaaauugagacuggccacaggauugaggaaugucccgucuauucaaucuagaggccuauuuggggccauugccgguuucauugaagggggguggacagggaugguagauggaugguacgguuaucaccaucaaaaugagcaggggucaggauaugcagccgaccugaagagcacacagaaugccauugacgagauuacuaacaaaguaaauucuguuauugaaaagaugaauacacaguucacagcaguagguaaagaguucaaccaccuggaaaaaagaauagagaauuuaaauaaaaaaguugaugaugguuuccuggacauuuggacuuacaaugccgaacuguugguucuauuggaaaaugaaagaacuuuggacuaccacgauucaaaugugaagaacuuauaugaaaagguaagaagccaguuaaaaaacaaugccaaggaaauuggaaacggcugcuuugaauuuuaccacaaaugcgauaacacgugcauggaaagugucaaaaaugggacuuaugacuacccaaaauacucagaggaagcaaaauuaaacagagaagaaauagaugggguaaagcuggaaucaacaaggauuuaccagauuuuggcgaucuauucaacugucgccaguucauugguacugguagucucccugggggcaaucaguuucuggaugugcucuaaugggucucuacaguguagaauauguauuuaa

SEQ ID NO: 35791 - RNA, 1701 nt, Artificial Sequence; identical to SEQ ID NO: 34681
  derived and/or modified CDS sequence (wt) from hemagglutinin__InfluenzaA__ACZ45040

SEQ ID NO: 35792 - RNA, 1701 nt, Artificial Sequence
  derived and/or modified CDS sequence (wt) from hemagglutinin__InfluenzaA__ACZ52567
augaaggcaauacuaguaguucugcuauauacauuugcaaccgcaaaugcagacacauuauguauagguuaucaugcgaacaauucaacagacacuguagacacaguacuagaaaagaauguaacaguaacacacucuguuaaccuucuagaagacaagcauaacgggaaacuaugcaaacuaagagggguagccccauugcauuuggguaaauguaacauugcuggcuggauccugggaaauccagagugugaaucacucuccacagcaagcucaugguccuacauuguggaaacaucuaguucagacaauggaacguguuacccaggagauuucaucgauuaugaggagcuaagagagcaauugagcucagugucaucauuugaaagguuugagauauuccccaagacaaguucauggcccaaucaugacucgaacaaagguguaacggcagcauguccucaugcuggagcaaaaagcuucuacaaaaauuuaauauggcuaguuaaaaaaggaaauucauacccaaagcucagcaaauccuacauuaaugauaaagggaaagaaguccucgugcuauggggcauucaccauccaucuacuagugcugaccaacaaagucucuaucagaaugcagaugcauauguuuuuguggggacaucaagauacagcaagaaguucaagccggaaauagcaauaagacccaaagugagggaucaagaagggagaaugaacuauuacuggacacuaguagagccgggagacaaaauaacauucgaagcaacuggaaaucuagugguaccgagauaugcauucgcaauggaaagaaaugcuggaucugguauuaucauuucagauacaccaguccacgauugcaauacaacuugucagacacccaagggugcuauaaacaccagccucccauuucagaauauacauccgaucacaauuggaaaauguccaaaauauguaaaaagcacaaaauugagacuggccacaggauugaggaaugucccgucuauucaaucuagaggccuauuuggggccauugccgguuucauugaagggggguggacagggaugguagauggaugguacgguuaucaccaucaaaaugagcaggggucaggauaugcagccgaccugaagagcacacagaaugccauugacgagauuacuaacaaaguaaauucuguuauugaaaagaugaauacacaguucacagcaguagguaaagaguucaaccaccuggaaaaaagaauagagaauuuaaauaaaaaaguugaugaugguuuccuggacauuuggacuuacaaugccgaacuguugguucuauuggaaaaugaaagaacuuuggacuaccacgauucaaaugugaagaacuuauaugaaaagguaagaagccaguuaaaaaacaaugccaaggaaauuggaaauggcugcuuugaauuuuaccacaaaugcgauaacacgugcauggaaagugucaaaaaugggacuuaugacuacccaaaauacucagaggaagcaaaauuaaacagagaagaaauagaugggguaaagcuggaaucaacaaggauuuaccagauuuuggcgaucuauucaacugucgccaguucauugguacugguagucucccugggggcaaucaguuucuggaugugcucuaaugggucucuacaguguagaauauguauuuaa

SEQ ID NO: 35793 - RNA, 1701 nt, Artificial Sequence; identical to SEQ ID NO: 34681
  derived and/or modified CDS sequence (wt) from hemagglutinin__InfluenzaA__ACZ52568

SEQ ID NO: 35794 - RNA, 1701 nt, Artificial Sequence
  derived and/or modified CDS sequence (wt) from hemagglutinin__InfluenzaA__ACZ52569
augaaggcaauacuaguaguucugcuauauacauuugcaaccgcaaaugcagacacauuauguauagguuaucaugcgaacaauucaacagacacuguagacacaguacuagaaaagaauguaacaguaacacacucuguuaaccuucuagaagacaagcauaacgggaaacuaugcaaacuaagagggguagccccauugcauuuggguaaauguaacauugcuggcuggauccugggaaauccagagugugaaucacucuccacagcaagcucaugguccuacauuguggaaacaucuaguucagacaauggaacguguuacccaggagauuucaucgauuaugaggagcuaagagagcaauugagcucagugucaucauuugaaagguuugagauauuccccaagacaaguucauggcccaaucaugacucgaacaaagguguaacggcagcauguccucaugcuggagcaaaaagcuucuacaaaaauuuaauauggcuaguuaaaaaaggaaauucauacccaaagcucagcaaauccuacauuaaugauaaagggaaagaaguccucgugcuauggggcauucaccauccaucuacuagugcugaccaacaaagucucuaucagaaugcagaugcauauguuuuuguggggacaucaagauacagcaagaaguucaagccggaaauagcaauaagacccaaagugagggaucaagaagggagaaugaacuauuacuggacacuaguagagccgggagacaaaauaacauucgaagcaacuggaaaucuagugguaccgagauaugcauucgcaauggaaagaaaugcuggaucugguauuaucauuucagauacaccaguccacaauugcaauacaacuugucagacacccaagggugcuauaaacaccagccucccauuucagaauauacauccgaucacaauuggaaaauguccaaaauauguaaaaagcacaaaauugagacuggccacaggauugaggaaugucccgucuauucaaucuagaggccuauuuggggccauugccgguuucauugaagggggguggacagggaugguagaugggugguacgguuaucaccaucaaaaugagcaggggucaggauaugcagccgaccugaagagcacacagaaugccauugacgagauuacuaacaaaguaaauucuguuauugaaaagaugaauacacaguucacagcaguagguaaagaguucaaccaccuggaaaaaagaauagagaauuuaaauaaaaaaguugaugaugguuuccuggacauuuggacuuacaaugccgaacuguugguucuauuggaaaaugaaagaacuuuggacuaccacgauucaaaugugaagaacuuauaugaaaagguaagaagccaguuaaaaaacaaugccaaggaaauuggaaacggcugcuuugaauuuuaccacaaaugcgauaacacgugcauggaaagugucaaaaaugggacuuaugacuacccaaaauacucagaggaagcaaaauuaaacagagaagaaauagaugggguaaagcuggaaucaacaaggauuuaccagauuuuggcgaucuauucaacugucgccaguucauugguacugguagucucccugggggcaaucaguuucuggaugugcucuaaugggucucuacaguguagaauauguauuuaa

SEQ ID NO: 35795 - RNA, 1701 nt, Artificial Sequence
  derived and/or modified CDS sequence (wt) from hemagglutinin__InfluenzaA__ACZ53956
augaagaccaucauugcuuugagcuacauuuucugucuggcucucgcucaaaaacuuccuggaaaugacaacagcacggcaacgcugugccugggacaccaugcagugccaaacggaacgcuagugaaaacaaucacgaaugaccaaauugaagugacuaaugcuacugagcugguucagaguuccucaacagguagaauaugcgacaguccucaccaaauccuugauggagaaaacugcacacugauagaugcucuauugggagacccacauugugauggcuuccaaaauaaggaaugggaccuuuuuguugaacgcagcaaagccuacagcaacuguuacccuuaugaugugccggauuaugccucccuuaggucacuaguugccucauccggcacccuggaguuuaacaaugaaagcuucaauuggacuggagucgcucagaauggaacaagcucugcuugcaaaaggagaucuauuaaaaguuucuuuaguacauugaauugguugcaccaauuacaaaacagauauccagcacugaacgugacuaugccaaacaaugacaaauuugacaaauuguacauuugggggguucaccacccgaguacggacagugaccaaaucagcguauaugcccaagcaucagggagagucacagucucuaccaaaagaagccaacaaacuguaaucccgaauaucggauccagacccuggguaaggggugucuccagcagaauaagcaucuauuggacaauaguaaaaccgggagacauacuuuugauuaacagcacagggaaucuaauugcuccucgggguuacuucaaaauacgaagugggaaaagcucaauaaugaggucagaugcacccauuggcaaaugcaauucugaaugcaucacuccaaauggaagcauucccaaugacaaaccauuucaaaauguaaacaggaucacauauggggccugucccagauauguuaagcaaaacacucugaaauuggcaacagggaugcggaauguaccagagaaacaaacuagaggcauauucggcgcaaucgcggguuucauagaaaaugguugggagggaaugauggacgguugguacgguuucaggcaucaaaauucugagggcacaggacaagcagcagaucuuaaaagcacucaagcagcaaucaaccaaaucaacgggaaacugaauagguuaaucgagaaaacgaacgagaaauuccaucaaauugaaaaagaauucucagaaguagaagggagaauucaggaccucgagaaauauguugaggacacuaaaauagaucucuggucguacaacgcggagcuucuuguugcccuggagaaccaacauacaauugaucuaacugacucagaaaugaacaagcuguuugaaagaacaaggaagcaacugagagaaaaugcugaggauaugggcaaugguuguuucaaaauauaccacaaaugugacaaugccugcauagggucaaucagaaauggaacuuaugaccaugauguauacagagacgaagcauuaaacaaccgguuccagaucaaagguguugagcugaagucaggauacaaagauuggauccuauggauuuccuuugccauaucauguuuuuugcuuuguguuguuuugcugggguucaucaugugggccugccagagaggcaacauuaggugcaacauuugcauuuga

SEQ ID NO: 35796 - RNA, 1701 nt, Artificial Sequence
  derived and/or modified CDS sequence (wt) from hemagglutinin__InfluenzaA__ACZ53967
augaagaccaucauugcuuugagcuacauuuucugucuggcucucgcucaaaaacuuccuggaaaugacaacagcacggcaacgcugugccugggacaccaugcagugccaaacggaacgcuagugaaaacaaucacgaaugaccaaauugaagugacuaaugcuacugagcugguucagaguuccucaacagguagaauaugcgacaguccucaccaaauccuugauggagaaaacugcacacugauagaugcucuauugggagacccacauugugauggcuuccaaaauaaggaaugggaccuuuuuguugaacgcagcaaagccuacagcaacuguuacccuuaugaugugccggauuaugccucccuuaggucacuaguugccucauccggcacccuggaguuuaacaaugaaagcuucaauuggacuggagucgcucagaauggaacaagcucugcuugcaaaaggagaucuauuaaaaguuucuuuaguacauugaauugguugcaccaauuacaaaacagauauccagcacugaacgugacuaugccaaacaaugacaaauuugacaaauuguacauuugggggguucaccacccgaguacggacagugaccaaaccagccuauaugcccaagcaucagggagagucacagucucuaccaaaagaagccaacaaacuguaaucccgaauaucggauccagacccuggguaaggggugucuccaguagaauaagcaucuauuggacaauaguuaagccgggagacguacugguaauuaauaguaaugggaaccuaaucgcuccucgggguuauuucaaaaugcgcagugggaaaagcucaauaaugaggucagaugcacccauuggcaaaugcaauucugaaugcaucacuccaaauggaagcauucccaaugacaaaccauuucaaaauguaaacaggaucacauacggggccugucccagauauguuaagcaaaacacucugaaauuggcaacagggaugcggaauguaccagagaaacaaacuagaggcauauucggcgcaaucgcggguuucauagaaaaugguugggagggaaugauggacgguugguacgguuucaggcaucaaaauucugagggcacaggacaagcagcagaucuuaaaagcacucaagcagcaaucaaccaaaucaacgggaaacugaauaaguuaaucgagaaaacgaacgagaaauuccaucaaauugaaaaagaauucucagaaguagaagggagaauucaggaccucgagaaauauguugaggacacuaaaauagaucucuggucguacaacgcggagcuucuuguugcccuggagaaccaacauacaauugaucuaacugacucagaaaugaacaaacuguuugaaagaacaaggaagcaacugagagaaaaugcugaggauaugggcaaugguuguuucaaaauauaccacaaaugugacaaugccugcauagggucaaucagaaauggaacuuaugaccaugauguauacagagacgaagcauuaaacaaccgguuccagaucaaagguguugagcugaagucaggauacaaagauuggauccuauggauuuccuuugccauaucauguuuuuugcuuuguguuguuuugcuggggucuaucaugugggccugccagagaggcaacauuaggugcaacauuugcauuuga

SEQ ID NO: 35797 - RNA, 1701 nt, Artificial Sequence
  derived and/or modified CDS sequence (wt) from hemagglutinin__InfluenzaA__ACZ53978
augaagaccaucauugcuuugagcuacauuuucugucuggcucucgcucaaaaacuuccuggaaaugacaacagcacggcaacgcugugccugggacaccaugcagugccaaacggaacgcuagugaaaacaaucacgaaugaccaaauugaagugacuaaugcuacugagcugguucagaguuccucaacagguagaauaugcgacaguccucaccaaauccuugauggagaaaacugcacacugauagaugcucuauugggagacccacauugugauggcuuccaaaauaaggaaugggaccuuuuuguugaacgcagcaaagccuacagcaacuguuacccuuaugaugugccggauuaugccucccuuaagucacuaauugccucauccggcacccuggaguuuaacaaugaaagcuucaauuggauuggagucucucaaaauggaacaagcucugcuugcaaaaggauaucaauaacaguuucuuuuaauaaauugaauugguugcaccaauuaaaauacagauauccagcacugaacgugacuaugccaaacaaugacaaauuugacaaauuguacauuugggggguucaccacccgaguacggacagugaccaaaccagccuauaugcccaagcaucagggagagucacagucucuaccaaaagaagccaacaaacuguaaucccgaauaucggauccagacccuggguaaggggugucuccaguagaauaagcaucuauuggacaauaguuaagccgggagacguacugguaauuaauaguaaugggaaccuaaucgcuccucgggguuauuucaaaaugcgcagugggaaaagcucaauaaugaggucagaugcacccauuggcaaaugcaauucugaaugcaucacuccaaauggaagcauucccaaugacaaaccauuucaaaauguaaacaggaucacauauggggccugucccagauauguuaagcaaaacacucugaaauuggcaacagggaugcggaauguaccagagaaacaaacuagaggcauauucggcgcaaucgcagguuucauagaaaaugguugggagggaaugguagacgguugguacgguuucaggcaucaaaauucugagggcacaggacaagcagcagaucuuaaaagcacucaagcagcaaucaaccaaaucaccgggaaacugaauaaguuaaucgagaaaacgaacgagaaauuccaucaaauugaaaaagaauucucagaaguagaagggagaauucaggaccucgagaaauauguugaggacacuaaaauagaucucuggucguacaacgcggagcuucuuguugcccuggagaaccaacauacaauugaucuaacugacucagaaaugaacaaacuguuugaaagaacaaggaagcaacugagagaaaaugcugaggauaugggcaaugguuguuucaaaauauaccacaaaugugacaaugccugcauagggucaaucagaaauggaacuuaugaccaugauguauacagagacgaagcauuaaacaaccgguuccagaucaaagguguugagcugaagucaggauacaaagauuggauccuauggauuuccuuugccauaucauguuuuuugcuuuguguuguuuugcugggguucaucaugugggccugccagagaggcaacauuaggugcaacauuugcauuuga

SEQ ID NO: 35798 - RNA, 1701 nt, Artificial Sequence
  derived and/or modified CDS sequence (wt) from hemagglutinin__InfluenzaA__ACZ56080
augaaggcaauacuaguaguucugcuauauacauuugcaaccgcaaaugcagacacauuauguauagguuaucaugcgaacaauucaacagacacuguagacacaguacuagaaaagaauguaacaguaacacacucuguuaaccuucuagaagacaagcauaacgggaaacuaugcaaacuaagagggguagccccauugcauuuggguaaauguaacauugcuggcuggauccugggaaauccagagugugaaucacucuccacagcaagcucaugguccuacauuguggaaacaucuaguucagacaauggaacguguuacccaggagauuucaucgauuaugaggagcuaagagagcaauugagcucagugucaucauuugaaagguuugagauauuccccaagacaaguucauggcccaaucaugacucgaacaaagguguaacggcagcauguucucaugcuggagcaaaaagcuucuacaaaaauuuaauauggcuaguuaaaaaaggaaauucauacccaaagcucagcaaauccuacauuaaugauaaagggaaagaaguccucgugcuauggggcauucaccauccaucuacuagugcugaccaacaaagucucuaucagaaugcagaugcauauguuuuuguggggacaucaagauacagcaagaaguucaagccggaaauagcaauaagacccaaagugaggggacaagaagggagaaugaacuauuacuggacacuaguagagccgggagacaaaauaacauucgaagcaacuggaaaucuagugguaccgagauaugcauucgcaauggaaagaaaugcuggaucugguauuaucauuucagauacaccaguccacgauugcaauacaacuugucagacacccaagggugcuauaaacaccagccucccauuucagaauauacauccgaucacaauuggaaaauguccaaaauauguaaaaagcacaaaauugagacuggccacaggauugaggaaugucccgucuauucaaucuagaggccuauuuggggccauugccgguuucauugaagggggguggacagggaugguagauggaugguacgguuaucaccaucaaaaugagcaggggucaggauaugcagccgaccugaagagcacacagaaugccauugacgagauuacuaacaaaguaaauucuguuauugaaaagaugaauacacaguucacagcaguagguaaagaguucaaccaccuggaaaaaagaauagagaauuuaaauaaaaaaguugaugaugguuuccuggacauuuggacuuacaaugccgaacuguugguucuauuggaaaaugaaagaacuuuggacuaccacgauucaaaugugaagaacuuauaugaaaagguaagaagccaguuaaaaaacaaugccaaggaaauuggaaacggcugcuuugaauuuuaccacaaaugcgauaacacgugcauggaaagugucaaaaaugggacuuaugacuacccaaaauacucagaggaagcaaaauuaaacagagaagaaauagaugggguaaagcuggaaucaacaaggauuuaccagauuuuggcgaucuauucaacugucgccaguucauugguacugguagucucccugggggcaaucaguuucuggaugugcucuaaugggucucuacaguguagaauauguauuuaa

SEQ ID NO: 35799 - RNA, 1701 nt, Artificial Sequence
  derived and/or modified CDS sequence (wt) from hemagglutinin__InfluenzaA__ACZ61118
augaaggcaauacuaguaguucugcuauauacauuugcaaccgcaaaugcagacacauuauguauagguuaucaugcgaacaauucaacagacacuguagacacaguacuagaaaagaauguaacaguaacacacucuguuaaccuucuagaagacaagcauaacgggaaacuaugcaaacuaagagggguagccccauugcauuuggguaaauguaacauugcuggcuggauccugggaaauccagagugugaaucacucuccacagcaagcucaugguccuacauuguggaaacaucuaguucagacaauggaacguguuacccaggagauuucaucgauuaugaggagcuaagagagcaauugagcucagugucaucauuugaaagguuugagauauuccccaagacaaguucauggcccaaucaugacucgaacaaagguguaacggcagcauguccucaugcuggagcaaaaagcuucuacaaaaauuuaauauggcuaguuaaaaaaggaaauucauacccaaagcucagcaaauccuacauuaaugauaaagggaaagaaguccucgugcuauggggcauucaccaucaaucuacuagugcugaccaacaaagucucuaucagaaugcagaugcauauguuuuuguggggucaucaagauacagcaagaaguucaagccggaaauagcaauaagacccaaagugagggaucaagaagggagaaugaacuauuacuggacacuaguagagccgggagacaaaauaacauucgaagcaacuggaaaucuagugguaccgagauaugcauucgcaauggaaagaaaugcuggaucugguauuaucauuucagauacaccaguccacgauugcaauacaacuugucagacacccaagggugcuauaaacaccagccucccauuucagaauauacauccgaucacaauuggaaaauguccaaaauauguaaaaagcacaaaauugagacuggccacaggauugaggaaugucccgucuauucaaucuagaggccuauuuggggccauugccgguuucauugaagggggguggacagggaugguagauggaugguacgguuaucaccaucaaaaugagcaggggucaggauaugcagccgaccugaagagcacacagaaugccauugacgagauuacuaacaaaguaaauucuguuauugaaaagaugaauacacaguucacagcaguagguaaagaguucaaccaccuggaaaaaagaauagagaauuuaaauaaaaaaguugaugaugguuuccuggacauuuggacuuacaaugccgaacuguugguucuauuggaaaaugaaagaacuuuggacuaccacgauucaaaugugaagaacuuauaugaaaagguaagaagccaguuaaaaaacaaugccaaggaaauuggaaacggcugcuuugaauuuuaccacaaaugcgauaacacgugcauggaaagugucaaaaaugggacuuaugacuacccaaaauacucagaggaagcaaaauuaaacagagaagaaauagaugggguaaagcuggaaucaacaaggauuuaccagauuuuggcgaucuauucaacugucgccaguucauugguacugguagucucccugggggcaaucaguuucuggaugugcucuaaugggucucuacaguguagaauauguauuuaa

SEQ ID NO: 35800 - RNA, 1701 nt, Artificial Sequence
  derived and/or modified CDS sequence (wt) from hemagglutinin__InfluenzaA__ACZ61119
auggaggcaauacuaguaguucugcuauauacauuugcaaccgcaaaugcagacacauuauguauagguuaucaugcgaacaauucaacagacacuguagacacaguacuagaaaagaauguaacaguaacacacucuguuaaccuucuagaagacaagcauaacgggaaacuaugcaaacuaagagggguagccccauugcauuuggguaaauguaacauugcuggcuggauccugggaaauccagagugugaaucacucuccacagcaagcucaugguccuacauuguggaaacaucuaguucagacaauggaacguguuacccaggagauuucaucgauuaugaggagcuaagagagcaauugagcucagugucaucauuugaaagguuugagauauuccccaagacaaguucauggcccaaucaugacucgaacaaagguguaacggcagcauguccucaugcuggagcaaaaagcuucuacaaaaauuuaauauggcuaguuaaaaaaggaaauucauacccaaagcucagcaaauccuacauuaaugauaaagggaaagaaguccucgugcuauggggcauucaccauccaucuacuagugcugaccaacaaagucucuaucagaaugcagaugcauauguuuuuguggggucaucaagauacagcaagaaguucaagccggaaauagcaauaagacccaaagugagggaucaagaagggagaaugaacuauuacuggacacuaguagagccgggagacaaaauaacauucgaagcaacuggaaaucuagugguaccgagauaugcauucgcaauggaaagaaaugcuggaucugguauuaucauuucagauacaccaguccacgauugcaauacaacuugucagacacccaagggugcuauaaacaccagccuccccuuucauaauauacauccgaucacaauuggaaaauguccaaaauauguaaaaagcacaaaauugagacuggccacaggauugaggaaugucccgucuauucaaucuagaggccuauuuggggccauugccgguuucauugaagggggguggacagggaugguagauggaugguacgguuaucaccaucaaaaugagcaggggucaggauaugcagccgaccugaagagcacacagaaugccauugacgagauuacuaacaaaguaaauucuguuauugaaaagaugaauacacaguucacagcaguagguaaagaguucaaccaccuggaaaaaagaauagagaauuuaaauaaaaaaguugaugaugguuuccuggacauuuggacuuacaaugccgaacuguugauucuauuggaaaaugaaagaacuuuggacuaccacgauucaaaugugaagaacuuauaugaaaagguaagaagccaguuaaaaaacaaugccaaggaaauuggaaacggcugcuuugaauuuuaccacaaaugcgauaacacgugcauggaaagugucaaaaaugggacuuaugacuacccaaaauacucagaggaagcaaaauuaaacagagaagaaauagaugggguaaagcuggaaucaacaaggauuuaccagauuuuggcgaucuauucaacugucgccaguucauugguacugguagucucccugggggcaaucaguuucuggaugugcucuaaugggucucuacaguguagaauauguauuuaa

SEQ ID NO: 35801 - RNA, 1701 nt, Artificial Sequence
  derived and/or modified CDS sequence (wt) from hemagglutinin__InfluenzaA__ACZ61122
augaaggcaauacuaguaguucugcuauauacauuugcaaccgcaaaugcagacacauuauguauagguuaucaugcgaacaauucaacagacacuguagacacaguacuagaaaagaauguaacaguaacacacucuguuaaccuucuagaagacaagcauaacgggaaacuaugcaaacuaagagggguagccccauugcauuuggguaaauguaacauugcuggcuggauccugggaaauccagagugugaaucacucuccacagcaagcucaugguccuacauuguggaaacaucuaguucagacaaugguacguguuacccaggagauuucaucgauuaugaggagcuaagagagcaauugagcucagugucaucauuugaaagguuugagauauuccccaagacaaguucauggcccaaucaugacucgaacaaagguguaacggcagcauguccucaugcuggagcaaaaagcuucuacaaaaauuuaauauggcuaguuaaaaaaggaaauucauacccaaagcucagcaaauccuacauuaaugauaaagggaaagaaguccucgugcuauggggcauucaccauccaucuacuagugcugaccaacaaagucucuaucagaaugcagaugcauauguuuuuguggggacaucaagauacagcaagaaguucaagccggaaauagcaauaagacccaaagugagggaucaagaagggagaaugaacuauuacuggacacuaguagagccgggagacaaaauaacauucgaagcaacuggaaaucuagugguaccgagauaugcauucgcaauggaaagaaaugcuggaucugguauuaucauuucagauacaccaguccacgauugcaauacaacuugucagacacccaagggugcuauaaacaccagccucccauuucagaauauacauccgaucacaauuggaaaauguccaaaauauguaaaaagcacaaaauugagacuggccacaggauugaggaaugucccgucuauucaaucuagaggccuauuuggggccauugccgguuucauugaagggggguggacagggaugguagauggaugguacgguuaucaccaucaaaaugagcaggggucaggauaugcagccgaccugaagagcacacagaaugccauugacgagauuacuaacaaaguaaauucuguuauugaaaagaugaauacacaguucacagcaguagguaaagaguucaaccaccuggaaaaaagaauagagaauuuaaauaaaaaaguugaugaugguuuccuggacauuuggacuuacaaugccgaacuguugguucuauuggaaaaugaaagaacuuuggacuaccacgauucaaaugugaagaacuuauaugaaaagguaagaagccaguuaaaaaacaaugccaaggaaauuggaaacggcugcuuugaauuuuaccacaaaugcgauaacacgugcauggaaagugucaaaaaugggacuuaugacuacccaaaauacucagaggaagcaaaauuaaacagagaagaaauagaugggguaaagcuggaaucaacaaggauuuaccagauuuuggcgaucuauucaacugucgccaguucauugguacugguagucucccugggggcaaucaguuucuggaugugcucuaaugggucucuacaguguagaauauguauuuaa

SEQ ID NO: 35802 - RNA, 1701 nt, Artificial Sequence
  derived and/or modified CDS sequence (wt) from hemagglutinin__InfluenzaA__ACZ61123
augaaggcaauacuaguaguucugcuauauacauuugcaaccgcaaaugcagacacauuauguauagguuaucaugcgaacaauucaacagacacuguagacacaguacuagaaaagaauguaacaguaacacacucuguuaaccuucuagaagacaagcauaacgggaaacuaugcaaacuaagagggguagccccauugcauuuggguaaauguaacauugcuggcuggauccugggaaauccagagugugaaucacucuccacagcaagcucaugguccuacauuguggaaacaucuaguucagacaauggaacguguuacccaggagauuucaucgauuaugaggagcuaagagagcaauugagcucagugucaucauuugaaagguuugagauauuccccaagacaaguucauggcccaaucaugacucgaacaaagguguaacggcagcauguccucaugcuggagcaaaaagcuucuacaaaaauuuaauauggcuaguuaaaaaaggaaauucauacccaaagcucagcaaauccuacauuaaugauaaagggaaagaaguccucgugcuauggggcauucaccauccaucuacaagugcugaccaacaaagucucuaucagaaugcagaugcauauguuuuuguggggacaucaagauacagcaagaaguucaagccggaaauagcaauaagacccaaagugagggaucaagaagggagaaugaacuauuacuggacacuaguagagccgggagacaaaauaacauucgaagcaacuggaaaucuagugguaccgagauaugcauucgcaauggaaagaaaugcuggaucugguauuaucauuucagauacaccaguccacgauugcaauacaacuugucagacacccaagggugcuauaaacaccagccucccauuucagaauauacauccgaucacaauuggaaaauguccaaaauauguaaaaagcacaaaauugagacuggccacaggauugaggaaugucccgucuauucaaucuagaggccuauuuggggccauugccgguuucauugaagggggguggacagggaugguagauggaugguacgguuaucaccaucaaaaugagcaggggucaggauaugcagccgaccugaagagcacacagaaugccauugacgagauuacuaacaaaguaaauucuguuauugaaaagaugaauacacaguucacagcaguagguaaagaguucaaccaccuggaaaaaagaauagagaauuuaaauaaaaaaguugaugaugguuuccuggacauuuggacuuacaaugccgaacuguugguucuauuggaaaaugaaagaacuuuggacuaccacgauucaaaugugaagaacuuauaugaaaagguaagaagccaguuaaaaaacaaugccaaggaaauuggaaacggcugcuuugaauuuuaccacaaaugcgauaacacgugcauggaaagugucaaaaaugggacuuaugacuacccaaaauacucagaggaagcaaaauuaaacagagaagaaauagaugggguaaagcuggaaucaacaaggauuuaccagauuuuggcgaucuauucaacugucgccaguucauugguacugguagucucccugggggcaaucaguuucuggaugugcucuaaugggucucuacaguguagaauauguauuuaa

SEQ ID NO: 35803 - RNA, 1701 nt, Artificial Sequence; identical to SEQ ID NO: 35479
  derived and/or modified CDS sequence (wt) from hemagglutinin__InfluenzaA__ACZ74627

SEQ ID NO: 35804 - RNA, 1698 nt, Artificial Sequence
  derived and/or modified CDS sequence (wt) from hemagglutinin__InfluenzaA__ACZ81554
augaaaguaaaacuacugguccuguuaugcacauuuacagcuacauaugcagacacaauauguauaggcuaccaugcuaacaacucgaccgauacuguugacacaguacuugaaaagaaugugacagugacacacucugucaaccugcuugagaacaaucacaauggaaaacuaugucuauuaaaaggaauagccccacuacaauuggguaacugcaccguugccggguggaucuuaggaaacccagaaugcgaauuacugauuuccaaggagucauggucuuacauuguagaaaaaccaaauccugagaauggaacauguuacccagggcauuucgcugacuaugaggaacugagggagcaauugaguucaguaucuucauuugagagguucgaaauauuccccaaagaaagcucauggcccaaccacaccguaaccggagugucagcaucaugcucccauaauggggaaaacaguuuuuacagaaauuugcuauggcugacggggaagaaugguuuguacccaaaccugagcaaguccuaugcaaacaacaaagaaaaagaaguccuuguacuaugggguguucaucacccgccaaacauagcugaccaaaagacccucuaucauacagaaaaugcuuauguuucuguagugucuucacauuauagcagaaaauucaccccagaaauagccaaaagacccaaaauaagagaucaagaaggaagaaucaacuacuacuggacucugcuugaacccggggauacaauaauauuugaggcaaauggaaaucuaauagcgccaagauaugcuuucgcacugaguagaggcuuuggaucaggaaucaucaacucaaaugcaccaauggauaaaugugaugcgaagugccaaacaccucaaggagcuauaaacagcagucuuccuuuccagaacguacacccagucacaauaggagaguguccaaaguaugucaggagugcaaaauuaaggaugguuacaggacuaaggaacaucccauccauucaauccagagguuuguuuggagccauugccgguuucauugaagggggguggacuggaaugguagaugguugguaugguuaucaucaucagaaugagcaaggaucuggcuaugcugcagaucaaaaaagcacacaaaaugccauuaaugggauuacaaacaaggugaauucuguaauugagaaaaugaacacucaauucacagcagugggcaaagaauucaacaaauuggaaagaaggauggaaaacuugaauaaaaaaguugaugauggguuuauagacauuuggacauauaaugcagaacuguugguucuacuggaaaaugaacggacuuuggauuuccaugacuccaaugugaagaaucuguaugagaaaguaaaaagccaguuaaagaauaaugcuaaagaaauaggaaauggguguuuugaauucuaucacaaguguaacgaugaaugcauggagaguguaaagaauggaacuuaugacuauccaaaauauuccgaagaaucaaaguuaaacagggagaaaauugauggagugaaauuggaaucaaugggagucuaucagauucuggcgaucuacucaacagucgccaguucucugguucuuuuggucucccugggggcaaucagcuucuggauguguuccaaugggucuuugcaguguagaauaugcaucuaa

SEQ ID NO: 35805 - RNA, 1698 nt, Artificial Sequence
  derived and/or modified CDS sequence (wt) from hemagglutinin__InfluenzaA__ACZ81555
augaaaguaaaacuacugguccuguuaugcacauuuacagcuacauaugcagacacaauauguauaggcuaccaugcuaacaacucgaccgacacuguugacacaguacuugaaaagaaugugacagugacacacucugucaaccugcuugagaacagucacaauggaaaacuaugucuauuaaaaggaauagccccacuacaauuggguaacugcagcguugccggguggaucuuaggaaacccagaaugcgaauugcugauuuccaaggagucaugguccuacauuguagaaaaaccaaauccugagaauggaacauguuacccagggcauuucgcugacuaugaggaacugagggagcaauugaguucaguaucuucauuugagagguucgaaauauuccccaaagaaagcucauggcccaaccacaccguaaccggagugucagcaucaugcucccauaauggggaaaacaguuuuuacagaaaucugcuauggcugacggggaagaaugguuuguacccaaaccugagcaaguccuaugcaaacaacaaagaaaaagaaguccuuguacuaugggguguucaucacccgccaaacauaggugaccaaaagacccucuaucauacagaaaaugcuuauguuucuguagugucuucacauuauagcagaaaauucaccccagaaauagccaaaagacccaaaguaagagaucaagaaggaagaaucaacuacuacugggcucugcuggaacccggggauacaauaauauuugaggcaaauggaaaucuaauagcgccaagauaugcuuucgcacugaguagaggcuuuggaucaggaaucaucaacucaaaugcaccaauggauaaaugugaugcgaagugccaaacaccucaaggagcuauaaacagcagucuuccuuuccagaacguacacccagucacaauaggagaguguccaaaguaugucaggagugcaaaauuaaggaugguuacaggacuaaggaacaucccauccauucaauccagagguuuguuuggagccauugccgguuucauugaagggggguggacuggaaugguagaugguugguaugguuaucaucaucagaaugagcaaggaucuggcuaugcugcagaucaaaaaagcacacaaaaugccauuaaugggauuacaaacaaggugaauucuguaauugagaaaaugaacacucaauucacagcaguaggcaaagaauucaacaaauuggaaagaaggauggaaaacuugaauaagaaaguugaugauggguuuauagacauuuggacauauaaugcagaacuguugguucuacuggaaaaugaaaggacuuuggauuuccaugacuccaaugugaagaaucuguaugagaaaguaaaaagccaguuaaagaauaaugcuaaagaaauaggaaauggguguuuugaauucuaucacaaguguaacgaugaaugcauggagaguguaaagaauggaacuuaugacuauccaaaauauuccgaagaaucaaaguuaaacagggagaaaauugauggagugaaauuggaaucaaugggagucuaucagauucuggcgaucuacucaacagucgccaguucucugguucuuuuggucucccugggggcaaucagcuucuggauguguuccaaugggucuuugcaguguagaauaugcaucuaa

SEQ ID NO: 35806 - RNA, 1698 nt, Artificial Sequence
  derived and/or modified CDS sequence (wt) from hemagglutinin__InfluenzaA__ACZ81556
augaaaguaaaacuacugguccuguuaugcacauuuacagcuacauaugcagacacaauauguauaggcuaccaugcuaacaacucgaccgacacuguugacacaguacuugaaaagaaugugacagugacacacucugucaaccugcuugagaacagucacaauggaaaacuaugucuauuaaaaggaauagccccacuacaauuggguaacugcagcguugccggguggaucuuaggaaacccagaaugcgaauuacugauuuccaaggagucaugguccuacauuguagaaaaaccaaauccugagaauggaacauguuacccagggcauuucgcugacuaugaggaacugagggagcaauugaguucaguaucuucauuugagagguucgaaauauuccccaaggaaagcucauggcccaaccacaccguaaccggagcgucagcaucaugcucccauaauggggaaaacaguuuuuacagaaauuugcuauggcugacggggaagaaugguuuguacccaaaccugagcaaguccuaugcaaacaacaaagaaaaagaaguccuuguacuaugggguguucaucacccgccaaacauagcugaccaaaagacccucuaucauacagaaaaugcuuauguuucuguagugucuucacauuauagcagaaaauucaccccagaaauagccaaaagacccaaaguaagagaucaagaaggaagaaucaacuacuacuggacucugcuugaacccggggauacaauaauauuugaggcaaauggaaaucuaauagcgccaagauaugcuuucgcacugaguaggggcuuuggaucaggaaucaucaacucaaaugcaccaauggauaaaugugaugcgaagugccaaacaccucaaggagcuauaaacagcagucuuccuuuccagaacguacacccagucacaauaggagaauguccaaaguaugucaggagugcaaaauuaaggaugguuacaggacuaaggaacaucccauccauucaauccagagguuuguuuggagccauugccgguuucauugaagggggguggacuggaaugguagaugguugguaugguuaucaucaucagaaugagcaaggaucuggcuaugcugcagaucaaaaaagcacacaaaaugccauuaaugggauuacaaacaaggugaauucuguaauugagaaaaugaacacucaauucacagcagugggcaaagaauucaacaaauuggaaagaaggauggaaaacuugaauaaaaaaguugaugauggguuuauagacauuuggacauauaaugcagaacuguugguucuacuggaaaaugaaaggacuuuggauuuccaugacuccaaugugaagaaucuguaugagaaaguaaaaagccaguuaaagaauaaugcuaaagaaauaggaaauggguguuuugaauucuaucacaaguguaacgaugaaugcauggagaguguaaaaaauggaacuuaugacuauccaaaauauuccgaagaaucaaaguuaaacaaggagaaaauugauggagugaaauuggaaucaaugggagucuaucagauucuagcgaucuacucaacagucgcaaguucucugguucuuuuggucucccugggggcaaucagcuucuggauguguuccaaugggucuuugcaguguagaauaugcaucuaa

SEQ ID NO: 35807 - RNA, 1701 nt, Artificial Sequence
  derived and/or modified CDS sequence (wt) from hemagglutinin__InfluenzaA__ACZ81557
augaagacuaucauugcuuugagcuacauucuaugucugguuuucgcucaaaaacuuccuggaaaugacaacagcacggcaacgcugugccuugggcaccaugcaguaccaaacggaacgauagugaaaacaaucacgaaugaccaaauugaaguuacuaaugcuacugagcuaguucagaguuccucaacaggugaaauaugcggcaguccucaucagauccuugauggaaaaaacugcacacuaauagaugcucuauugggagacccucagugugauggcuuccaaaauaagaaaugggaccuuuuuguugaacgcagcaaagccuacagcaacuguuacccuuaugaugugccggauuaugccucccuuaggucacuaguugccucauccggcacacuggaguuuaacaaugaaagcuucaauuggacuggagucacucaaaacggaacaagcucugcuugcauaaggagaucuaaaaacaguuucuuuaguagauugaauugguugacccacuuaaacuucaaauaccaagcauuaaacgugacuaugccgaacaaugaacaauuugacaaauuguacauuugggggguucaccacccggguacggacaaagaccaaaucuuccuguaugcucaagcaucaggaagaaucacagucucuaccaaaagaagccaacaaacuguaaucccgaauaucggaucuagaccccgaguaaggaauaucccuagcagaauaagcaucuauuggacaauaguaaaaccgggagacauacuuuugauuaacagcacagggaaucuaauugcuccuagggguuacuucaaaauacaaagugggaaaagcucaauaaugagaucagaugcacccauuggcaaaugcaauucugaaugcaucacuccaaauggaagcauucccaaugacaaaccauuccaaaauguaaacaggaucacauacggggccugucccagauauguuaagcaaaacacucugaaauuggcaacagggaugcgaaauguaccagagaaacaaacuagaggcauauuuggcgcaaucgcagguuucauagaaaaugguugggagggaaugguggaugguugguacgguuucaggcaucaaaauucugagggaagaggacaagcagcagaucucaaaagcacucaagcagcaaucgaucaaaucaaugggaagcugaauagauugaucgggaaaaccaacgagaaauuccaucagauugaaaaagaauucucagaagucgaagggagaauucaggaccuugagaaauauguugaggacacuaaaauagaucucuggucauacaacgcggagcuucuuguugcccuggagaaccaacauacaauugaucuaacugacucagaaaugaacaaacuguuugaaaaaacaaagaagcaacugagggaaaaugcugaggauaugggcaaugguuguuucaaaauauaccacaaaugugacaaugccugcauaggaucaaucagaaauggaacuuaugaccacgauguauacagagaugaagcauuaaacaaccgguuucagaucaagggaguugagcugaagucaggguacaaagauuggauccuauggauuuccuuugccauaucauguuuuuugcuuuguguugcuuuguugggguucaucaugugggccugccaaaaaggcaacauuaggugcaacauuugcauuuga

SEQ ID NO: 35808 - RNA, 1701 nt, Artificial Sequence
  derived and/or modified CDS sequence (wt) from hemagglutinin__InfluenzaA__ACZ81558
augaagacuaucauugcuuugagcuacauucuaugucugguuuucgcucaaaaacuuccuggaaaugacaacagcacggcaacgcugugccuugggcaccaugcaguaccaaacggaacgauagugaaaacaaucacgaaugaccaaauugaaguuacuaaugcuacugagcugguucagaguuccucaacaggugaaauaugcgacaguccucaucagauccuugauggaaaaaacugcacacuaauagaugcucuauuaggagacccucauugugauggcuuccaaaauaagaaaugggaccuuuuuguugaacgcagcaaagccuacagcaacuguuacccuuaugaugugccggauuaugccucccuuaggucgcuaguugcuucauccggcacacuggaguuuaacaaugaaagcuucaauuggacuggagucacucaaaacggaacaagcucugcuugcauaaggagaucuaaaaacaguuucuuuaguagauugaauugguugacccacuuaaacuucaaauacccagcauugaacgugacuaugccaaacaaugaacaauuugacaaauuguacauuugggggguucaccacccggguacggacaaagaccaaaucuuccuguaugcucaagcaucaggaagaaucacagucucuaccaaaagaagccaacaaacugcaaucccgaauaucggaucuagacccagaguaaggaauaucccuagcagaauaagcaucuauuggacaauaguaaaaccgggagacauacuuuugauuaacagcacagggaaucuaauugcuccuagggguuacuucaaaauacgaagugggaaaagcucaauaaugagaucagaugcacccauuggcaaaugcaauucugaaugcaucacuccaaauggaagcauucccaaugacaaaccauuccaaaauguaaacaggaucacauacggggccugucccagauauguuaagcaaaacacucugaaauuggcaacagggaugcgaaaugugccagagaaacaaacuagaggcauauuuggcgcaaucgcggguuucauagaaaaugguugggagggaaugguggaugguugguacgguuucaggcaucaaaauucugagggaagaggacaagcagcagaucucaaaagcacucaagcagcaauagaucaaaucaaugggaagcugaauagguugaucgagaaaaccaacgagaaauuccaucagauugaaaaagaauucucagaagucgaagggagaauucaggaccuugagaaauauguugaggacacuaaaauagaucucuggucauacaacgcggagcuucuuguugcccuggagaaccaacauacaauugaucuaacugacucagaaaugaacaaacuguuugaaaaaacaaagaagcaacugagggaaaaugcugaggauaugggcaaugguuguuucaaaauauaccacaaaugugacaaugccugcauaggaucaaucagaaauggaacuuaugaccacgauguauacagagaugaagcauuaaacaaccgguuucagaucaagggaguugagcugaagucaggguacaaagauuggauccuauggauuuccuuugccauaucauguuuuuugcuuuguguugcuuuguugggguucaucaugugggccugccaaaaaggcaacauuaggugcaacauuugcauuuga

SEQ ID NO: 35809 - RNA, 1701 nt, Artificial Sequence
  derived and/or modified CDS sequence (wt) from hemagglutinin__InfluenzaA__ACZ81559
augaagacuaucauugcuuugagcuacauucuaugucugguuuucgcucaaaaacuuccuggaaaugacaacagcacggcaacgcugugccuugggcaccaugcaguaccaaacggaacgauagugaaaacaaucacgaaugaccaaauugaaguuacuaaugcuacugagcugguucagaguuccucaacaggugaaauaugcgacaguccucaucagauccuugauggaaaaaacugcacacuaauagaugcucuauugggagacccucauugugauggcuuccaaaauaagaaaugggaccuuuuuguugaacgcagcaaagccuacagcaacuguuacccuuaugaugugccggauuaugccucccuuaggucacuaguugcuucauccggcacacuggaguuuaacaaugaaagcuucaauuggacuggagucacucaaaacggaacaagcucugcuugcauaaggagaucuaaaaacaguuucuuuaguagauugaauugguugacccacuuaaacuucaaauacccagcauugaacgugacuaugccaaacaaugaacaauuugacaaauuguacauuugggggguucaccacccggguacggacaaagaccaaaucuuccuguaugcucaagcaucaggaagaaucacagucucuaccaaaagaagccaacaaacugcaaucccgaauaucggaucuagacccagaguaaggaauaucccuagcagaauaagcaucuauuggacaauaguaaaaccgggagacauacuuuugauuaacagcacagggaaucuaauugcuccuagggguuacuucaaaauacgaagugggaaaagcucaauaaugagaucagaugcacccauuggcaaaugcaauucugaaugcaucacuccaaauggaagcauucccaaugacaaaccauuccaaaauguaaacaggaucacauacggggccugucccagauauguuaagcaaaacacucugaaauuggcaacagggaugcgaaauguaccagagaaacaaacuagaggcauauuuggcgcaaucgcggguuucauagaaaaugguugggagggaaugguggaugguugguacgguuucaggcaucaaaauucugagggaagaggacaagcagcagaucucaaaagcacucaagcagcaaucgaucaaaucaaugggaagcugaauagguugaucgggaaaaccaacgagaaauuccaucagauugaaaaagaauucucagaagucgaagggagaauucaggaccuugagaaauauguugaggacacuaaaauagaucucuggucauacaacgcggagcuucuuguugcccuggagaaccaacauacaauugaucuaacugacucagaaaugaacaaacuguuugaaaaaacaaagaagcaacugagggaaaaugcugaggauaugggcaaugguuguuucaaaauauaccacaaaugugacaaugccugcauaggaucaaucagaaauggaacuuaugaccacgauguauacagagaugaagcauuaaacaaccgguuucagaucaagggaguugagcugaagucaggguacaaagauuggauccuauggauuuccuuugccauaucauguuuuuugcuuuguguugcuuuguugggguucaucaugugggccugccaaaaaggcaacauuagaugcaacauuugcauuuga

SEQ ID NO: 35810 - RNA, 1701 nt, Artificial Sequence; identical to SEQ ID NO: 34681
  derived and/or modified CDS sequence (wt) from hemagglutinin__InfluenzaA__ACZ81632

SEQ ID NO: 35811 - RNA, 1701 nt, Artificial Sequence
  derived and/or modified CDS sequence (wt) from hemagglutinin__InfluenzaA__ACZ81642
augaaggcaauacuaguaguucugcuauauacauuugcaaccgcaaaugcagacacauuauguauagguuaucaugcgaacaauucaacagacacuguagacacaguacuagaaaagaauguaacaguaacacacucuguuaaccuucuagaagacaagcauaacgggaaacuaugcaaacuaagagggguagccccauugcauuuggguaaauguaacauugcuggcuggauccugggaaauccagagugugaaucacucuccacagcaagcucaugguccuacauuguggaaacaucuaguucagacaauggaacguguuacccaggagauuucaucgauuaugaggagcuaagagagcaauugagcucagugucaucauuugaaagguuugagauauuccccaagacaaguucauggcccaaucaugacucgaacaaagguguaacggcagcauguccucaugcuggagcaaaaagcuucuacaaaaauuuaauauggcuaguuaaaaaagggaauucauacccaaagcucagcaaauccuacauuaaugauaaagggaaagaaguccucgugcuauggggcauucaccauccaucuacuagugcugaccaacaaagucucuaucagaaugcagaugcauauguuuuuguggggacaucaagauacagcaagaaguucaagccggaaauagcaauaagacccaaagugagggaucaagaagggagaaugaacuauuacuggacacuaguagagccgggagacaaaauaacauucgaagcaacuggaaaucuagugguaccgagauaugcauucgcaauggaaagaaaugcuggaucugguauuaucauuucagauacaccaguccacgauugcaauacaacuugucagacacccaagggugcuauaaacaccagccucccauuucagaauauacauccgaucacaauuggaaaauguccaaaauauguaaaaagcacaaaauugagacuggccacaggauugaggaaugucccgucuauucaaucuagaggccuauuuggggccauugccgguuucauugaagggggguggacagggaugguagauggaugguacgguuaucaccaucaaaaugagcaggggucaggauaugcagccgaccugaagagcacacagaaugccauugacgagauuacuaacaaaguaaauucuguuauugaaaagaugaauacacaguucacagcaguagguaaagaguucaaccaccuggaaaaaagaauagagaauuuaaauaaaaaaguugaugaugguuuccuggacauuuggacuuacaaugccgaacuguugguucuauuggaaaaugaaagaacuuuggacuaccacgauucaaaugugaagaacuuauaugaaaagguaagaagccaguuaaaaaacaaugccaaggaaauuggaaacggcugcuuugaauuuuaccacaaaugcgauaauacgugcauggaaagugucaaaaaugggacuuaugacuacccaaaauacucagaggaagcaaaauuaaacagagaagaaauagaugggguaaagcuggaaucaacaaggauuuaccagauuuuggcgaucuauucaacugucgccaguucauugguacugguagucucccugggggcaaucaguuucuggaugugcucuaaugggucucuacaguguagaauauguauuuaa

SEQ ID NO: 35812 - RNA, 1701 nt, Artificial Sequence
  derived and/or modified CDS sequence (wt) from hemagglutinin__InfluenzaA__ACZ81652
augaaggcaauacuaguaguucugcuauauacauuugcaaccgcaaaugcagacacauuauguauagguuaucaugcgaacaauucaacagacacuguagacacaguacuagaaaggaauguaacaguaacacacucuguuaaccuucuagaagacaagcauaacgggaaacuaugcaaacuaagagggguagccccauugcauuuggguaaauguaacauugcuggcuggauccugggaaauccagagugugaaucacucuccacagcaagcucaugguccuacauuguggaaacaucuaguucagacaauggaacguguuacccaggagauuucauugauuaugaggagcuaagagagcaauugagcucagugucaucauuugaaagguuugagauauuccccaagacaaguucauggcccaaucaugacucgaacaaagguguaacggcagcauguccucaugcugaagcaaaaagcuucuacaaaaauuuaauauggcuaguuaaaaaaggaaauucauacccaaagcucagcaaauccuacauuaaugauaaagggaaagaaguccucgugcuauggggcauucaccauccaucuacuagugcugaccaacaaagccucuaucagaaugcagaugcauauguuuuuguggggacaucaagauacagcaagaaguucaagccggaaauagcaauaagacccaaagugaggggucaagaagggagaaugaacuauuacuggacacuaguagagccgggagacaaaauaacauucgaagcaacuggaaaucuagugguaccgagauaugcauucgcaauggaaagaaaugcuggaucugguauuaucauuucagauacaccaguccacgauugcaauacaacuugucagacacccaagggugcuauaaacaccagccucccauuucagaauauacauccgaucacaauuggaaaauguccaaaauauguaaaaagcacaaaauugagacuggccacaggauugaggaaugucccgucuauucaaucuagaggccuauuuggggccauugccgguuucauugaagggggguggacagggaugguagauggaugguacgguuaucaccaucaaaaugagcaggggucaggauaugcagccgaccugaagagcacacagaaugccauugacgagauuacuaacaaaguaaauucuguuauugaaaagaugaauacacaguucacagcaguagguaaagaguucaaccaccuggaaaaaagaauagagaauuuaaauaaaaaaguugaugaugguuuccuagacauuuggacuuacaaugccgaacugcugguucuauuggaaaaugaaagaacuuuggacuaccacgauucaaaugugaagaacuuauaugaaaagguaagaagccaguuaaaaaacaaugccaaggaaauuggaaacggcugcuuugaauuuuaccacaaaugcgauaacacgugcauggaaagugucaaaaaugggacuuaugacuacccaaaauacucagaggaagcaaaauuaaacagagaagaaauagaugggguaaagcuggaaucaacaaggauuuaccagauuuuggcgaucuauucaacugucgccaguucauugguacugguagucucccugggggcaaucaguuucuggaugugcucuaaugggucucuacaguguagaauauguauuuaa

SEQ ID NO: 35813 - RNA, 1701 nt, Artificial Sequence
  derived and/or modified CDS sequence (wt) from hemagglutinin__InfluenzaA__ACZ92130
auggaggcaauacuaguaguucugcuauauacauuugcaaccgcaaaugcagacacauuauguauagguuaucaugcgaacaauucaacagacacuguagacacaguacuagaaaagaauguaacaguaacacacucuguuaaccuucuagaagacaagcauaacgggaaacuaugcaaacuaagagggguagccccauugcauuuggguaaauguaacauugcuggcuggauccugggaaauccagagugugaaucacucuccacagcaagcucaugguccuacauuguggaaacaucuaguucagacaauggaacguguuacccaggagauuucaucgauuaugaggagcuaagagagcaauugagcucagugucaucauuugaaagguuugagauauuccccaagacaaguucauggcccaaucaugacucgaacaaagguguaacggcagcauguccucaugcuggagcaaaaagcuucuacaaaaauuuaauauggcuaguuaaaaaaggaaauucauacccaaagcucagcaaauccuacauuaaugauaaagggaaagaaguccucgugcuauggggcauucaccauccaucuacuagugcugaccaacaaagucucuaucagaaugcagaugcauauguuuuuguggggucaucaagauacagcaagaaguucaagccggaaauagcaauaagacccaaagugagggaucaagaagggagaaugaacuauuacuggacacuaguagagccgggagacaaaauaacauucgaagcaacuggaaaucuagugguaccgagauaugcauucgcaauggaaagaaaugcuggaucugguauuaucauuucagauacaccaguccacgauugcaauacaacuugucagacacccaagggugcuauaaacaccagccucccauuucauaauauacauccgaucacaauuggaaaauguccaaaauauguaaaaagcacaaaauugagacuggccacaggauugaggaaugucccgucuauucaaucuagaggccuauuuggggccauugccgguuucauugaagggggguggacagggaugguagauggaugguacgguuaucaccaucaaaaugagcaggggucaggauaugcagccgaccugaagagcacacagaaugccauugacgagauuacuaacaaaguaaauucuguuauugaaaagaugaauacacaguucacagcaguagguaaagaguucaaccacuuggaaaaaagaauagagaauuuaaauaaaaaaguugaugaugguuuccuggacauuuggacuuacaaugccgaacuguugguucuauuggaaaaugaaagaacuuuggacuaccacgauucaaaugugaagaacuuauaugaaaagguaagaagccaguuaaaaaacaaugccaaggaaauuggaaacggcugcuuugaauuuuaccacaaaugcgauaacacgugcauugaaagugucaaaaaugggacuuaugacuacccaaaauacucagaggaagcaaaauuaaacagagaagaaauagaugggguaaagcuggaaucaacaaggauuuaccagauuuuggcgaucuauucaacugucgccaguucauugguacugguagucucccugggggcaaucaguuucuggaugugcucuaaugggucucuacaguguagaauauguauuuaa

SEQ ID NO: 35814 - RNA, 1701 nt, Artificial Sequence
  derived and/or modified CDS sequence (wt) from hemagglutinin__InfluenzaA__ACZ92131
auggaggcaauacuaguaguucugcuauauacauuugcaaccgcaaaugcagacacauuauguauagguuaucaugcgaacaauucaacagacacuguagacacaguacuagaaaagaauguaacaguaacacacucuguuaaccuucuagaagacaaacauaacgggaaacuaugcaaacuaagagggguagccccauugcauuuggguaaauguaacauugcuggcuggauccugggaaauccagagugugaaucacucuccacagcaagcucaugguccuacauuguggaaacaucuaguucagacaauggaacguguuacccaggagauuucaucgauuaugaggagcuaagagagcaauugagcucagugucaucauuugaaagguuugagauauuccccaagacaaguucauggcccaaucaugacucgaacaaagguguaacggcagcauguccucaugcuggagcaaaaagcuucuacaaaaauuuaauauggcuaguuaaaaaaggaaauucauacccaaagcucagcaaauccuacauuaaugauaaagggaaagaaguccucgugcuauggggcauucaccauccaucuacuagugcugaccaacaaagucucuaucagaaugcagaugcauauguuuuuguggggucaucaagauacagcaagaaguucaagccggaaauagcaauaagacccaaagugagggaucaagaagggagaaugaacuauuacuggacacuaguagagccgggagacaaaauaacauucgaagcaacuggaaaucuagugguaccgagauaugcauucgcaauggaaagaaaugcuggaucugguauuaucauuucagauacaccaguccacgauugcaauacaacuugucagacacccaagggugcuauaaacaccagccucccauuucauaauauacauccgaucacaauuggaaaauguccaaaauauguaaaaagcacaaaauugagacuggccacaggauugaggaaugucccgucuauucaaucuagaggccuauuuggggccauugccgguuucauugaagggggguggacagggaugguagauggaugguacgguuaucaccaucaaaaugagcaggggucaggauaugcagccgaccugaagagcacacagaaugccauugacgagauuacuaacaaaguaaauucuguuauugaaaagaugaauacacaguucacagcaguagguaaagaguucaaccaccuggaaaaaagaauagagaauuuaaauaaaaaaguugaugaugguuuccuggacauuuggacuuacaaugccgaacuguugguucuauuggaaaaugaaagaacuuuggacuaccacgauucaaaugugaagaacuuauaugaaaagguaagaagccaguuaaaaaacaaugccaaggaaauuggaaacggcugcuuugaauuuuaccacaaaugcgauaacacgugcauggaaagugucaaaaaugggacuuaugacuacccaaaauacucagaggaagcaaaauuaaacagagaagaaauagaugggguaaagcuggaaucaacaaggauuuaccagauuuuggcgaucuauucaacugucgccaguucauugguacugguagucucccugggggcaaucaguuucuggaugugcucuaaugggucucuacaguguagaauauguauuuaa

SEQ ID NO: 35815 - RNA, 1701 nt, Artificial Sequence; identical to SEQ ID NO: 34965
  derived and/or modified CDS sequence (wt) from hemagglutinin__InfluenzaA__ACZ92132

SEQ ID NO: 35816 - RNA, 1701 nt, Artificial Sequence; identical to SEQ ID NO: 34965
  derived and/or modified CDS sequence (wt) from hemagglutinin__InfluenzaA__ACZ92133

SEQ ID NO: 35817 - RNA, 1701 nt, Artificial Sequence; identical to SEQ ID NO: 34681
  derived and/or modified CDS sequence (wt) from hemagglutinin__InfluenzaA__ACZ92134

SEQ ID NO: 35818 - RNA, 1701 nt, Artificial Sequence
  derived and/or modified CDS sequence (wt) from hemagglutinin__InfluenzaA__ACZ95465
augaaggcaauacuaguaguucugcuauauacauuugcaaccgcaaaugcagacacauuauguauagguuaucaugcgaacaauucaacagacacuguagacacaguacuagaaaagaauguaacaguaacacacucuguuaaccuucuagaagacaagcauaacgggaaacuaugcaaacuaagagggguagccccauugcauuuggguaaauguaacauugcuggcuggauccugggaaauccagagugugaaucacucuccacagcaagcucaugguccuacauuguggaaacaucuaguucagacaauggaacguguuacccaggagauuucaucgauuaugaggagcuaagagagcaauugagcucaguaucaucauuugaaagguuugagauauuccccaagacaaguucauggcccaaucaugacucgaacaaaggcguaacggcagcauguccucaugcuggagcaaaaagcuucuacaaaaauuuaauauggcuaguuaaaaaaggaaauucauacccaaagcucagcaaauccuacauuaaugauaaagggaaagaaguccucgugcuauggggcauucaccauccaucuacuagugcugaccaacaaagucucuaucagaaugcagaugcauauguuuuuguggggacaucaagauacagcaagaaguucaagccggaaauagcaauaagacccaaagugagggaucaagaagggagaaugaacuauuacuggacacuaguagagccgggagacaaaauaacauucgaagcaacuggaaaucuagugguaccgagauaugcauucgcaauggaaagaaaugcuggaucugguauuaucauuucagauacaccaguccacgauugcaauacaacuugucagacacccaagggugcuauaaacaccagccucccauuucagaauauacauccgaucacaauuggaaaauguccaaaauauguaaaaagcacaaaauugagacuggccacaggauugaggaaugucccgucuauucaaucuagaggccuauuuggggccauugccgguuucauugaagggggguggacagggaugguagauggaugguacgguuaucaccaucaaaaugagcaggggucaggauaugcagccgaccugaagagcacacagaaugccauugaugagauuacuaacaaaguaaauucuguuauugaaaagaugaauacacaguucacagcaguagguaaagaguucaaccaccuggaaaaaagaauagagaauuuaaauaaaaagguugaugaugguuuccuggacauuuggacuuacaaugccgaacuguugguucuauuggaaaaugaaagaacuuuggacuaccacgauucaaaugugaagaacuuauaugaaaagguaagaagccaguuaaaaaacaaugccaaggaaauuggaaacggcugcuuugaauuuuaccacaaaugcgauaacacgugcauggaaaguguaaaaaaugggacuuaugacuacccaaaauacucagaggaagcaaaauuaaacagagaagaaauagaugggguaaagcuggaaucaacaaggauuuaccagauuuuggcgaucuauucaacugucgccaguucauugguacugguagucucccugggggcaaucaguuucuggaugugcucuaaugggucucuacaguguagaauauguauuuaa

SEQ ID NO: 35819 - RNA, 1701 nt, Artificial Sequence
  derived and/or modified CDS sequence (wt) from hemagglutinin__InfluenzaA__ACZ95837
augaaggcaauacuaguaguucugcuauauacauuugcaaccgcaaaugcagacacauuauguauagguuaucaugcgaacaauucaacagacacuguagacacaguacuagaaaagaauguaacaguaacacacucuguuaaccuucuagaagacaagcacaacgggaaacuaugcaaacuaagagggguagccccauugcaucuggguaaauguaacauugcuggcuggauccugggaaauccagagugugaaucacucuccacagcaagcucaugguccuacauuguggaaacaucuaguucagacaauggaacguguuacccaggagauuucaucgauuaugaggagcuaagagagcaauugagcucagugucaucauuugaaagguuugagauauuccccaagacaaguucauggcccaaucaugacucgaacaaagguguaacggcagcauguccucaugcuggagcaaaaagcuucuacaaaaauuuaauauggcuaguuaaaaaaggaaauucauacccaaagcucagcaaauccuacauuaaugauaaagggaaagaaguccucgugcuauggggcauucaccauccaucuacuagugcugaccaacaaagucucuaucagaaugcagaugcauauguuuuuguggggucaucaagauacagcaagaaguucaagccggaaauagcaauaagacccaaagugagggaucaagaagggagaaugaacuauuacuggacacuaguagagccgggagacaaaauaacauucgaagcaacuggaaaucuagugguaccgagauaugcauucgcaauggaaagaaaugcuggaucugguauuaucauuucagauacaccaguccacgauugcaauacaacuugucagacacccaagggugcuauaaacaccagccucccauuucagaauauacauccgaucacaauuggaaaauguccaaaauauguaaaaagcacaaaauugagacuggccacaggauugaggaaugucccgucuauucaaucuagaggccuauuuggggccauugccgguuucauugaagggggguggacagggaugguagauggaugguacgguuaucaccaucaaaaugagcaggggucaggauaugcagccgaccugaagagcacacagaaugccauugacgagauuacuaacaaaguaaauucuguuauugaaaagaugaauacacaguucacagcaguagguaaagaguucaaccaccuggaaaaaagaauagagaauuuaaauaaaaaaguugaugaugguuuccuggacauuuggacuuacaaugccgaacuguugguucuauuggaaaaugaaagaacuuuggacuaccacgauucaaaugugaagaacuuauaugaaaagguaagaagccagcuaaaaaacaaugccaaggaaauuggaaacggcugcuuugaauuuuaccacaaaugcgauaacacgugcauggaaagugucaaaaaugggacuuaugacuacccaaaauacucagaggaagcaaaauuaaacagagaagaaauagaugggguaaagcuggaaucaacaaggauuuaccagauuuuggcgaucuauucaacugucgccaguucauugguacugguagucucccugggggcaaucaguuucuggaugugcucuaaugggucucuacaguguagaauauguauuuaa

SEQ ID NO: 35820 - RNA, 1701 nt, Artificial Sequence; identical to SEQ ID NO: 34681
  derived and/or modified CDS sequence (wt) from hemagglutinin__InfluenzaA__ACZ95847

SEQ ID NO: 35821 - RNA, 1701 nt, Artificial Sequence
  derived and/or modified CDS sequence (wt) from hemagglutinin__InfluenzaA__ACZ95857
augaaggcaauacuaguaguucugcuauauacauuugcaaccgcaaaugcagacacauuauguauagguuaucaugcgaacaauucaacagacacuguagacacaguacuagaaaagaauguaacaguaacacacucuguuaaccuucuagaagacaagcauaacgggaaacuaugcaaacuaagagggguagccccauugcauuuggguaaauguaacauugcuggcuggauccugggaaauccagagugugaaucacucuccacagcaagcucaugguccuacauuguggaaacaucuaguucagacaauggaacguguuacccaggagauuucaucgauuaugaggagcuaagagagcaauugagcucagugucaucauuugaaagguuugagauauuccccaagacaaguucauggcccaaucaugacucgaacaaagguguaacggcagcauguccucaugcuggagcaaaaagcuucuacaaaaauuuaauauggcuaguuaaaaaaggaaauucauacccaaagcucagcaaauccuacauuaaugauaaagggaaagaaguccucgugcuauggggcauucaccauccaucuacuagugcugaccaacaaagucucuaucagaaugcagaugcauauguuuuuguggggacaucaagauacagcaagaaguucaagccggaaauagcaauaagacccaaagugagggaucaagaagggagaaugaacuauuacuggacacuaguagagccgggagacaaaauaacauucgaagcaacuggaaaucuagugguaccgagauaugcauucgcaauggaaagaaaugcuggaucugguauuaucauuucagauacaccaguccacgauugcaauacaacuugucagacauccaagggugcuauaaacaccagccucccauuucagaauauacauccgaucacaauuggaaaauguccaaaauauguaaaaagcacaaaauugagacuggccacaggauugaggaaugucccgucuauucaaucuagaggccuauuuggggccauugccgguuucauugaagggggguggacagggaugguagauggaugguacgguuaucaccaucaaaaugagcaggggucaggauaugcagccgaccugaagagcacacagaaugccauugacgagauuacuaacaaaguaaauucuguuauugaaaagaugaauacacaguucacagcaguagguaaagaguucaaccaccuggaaaaaagaauagagaauuuaaauaaaaaaguugaugaugguuuccuggacauuuggacuuacaaugccgaacuguugguucuauuggaaaaugaaagaacuuuggacuaccacgauucaaaugugaagaacuuauaugaaaagguaagaagccaguuaaaaaacaaugccaaggaaauuggaaacggcugcuuugaauuuuaccacaaaugcgauaacacgugcauggaaagugucaaaaaugggacuuaugacuacccaaaauacucagaggaagcaaaauuaaacagagaagaaauagaugggguaaagcuggaaucaacaaggauuuaccagauuuuggcgaucuauucaacugucgccaguucauugguacugguagucucccugggggcaaucaguuucuggaugugcucuaaugggucucuacaguguagaauauguauuuaa

SEQ ID NO: 35822 - RNA, 1701 nt, Artificial Sequence; identical to SEQ ID NO: 34681
  derived and/or modified CDS sequence (wt) from hemagglutinin__InfluenzaA__ACZ95867

SEQ ID NO: 35823 - RNA, 1701 nt, Artificial Sequence
  derived and/or modified CDS sequence (wt) from hemagglutinin__InfluenzaA__ACZ95887
auggaggcaauacuaguaguucugcuauauacauuugcaaccgcaaaugcagacacauuauguauagguuaucaugcgaacaauucaacagacacuguagacacaguacuagaaaagaauguaacaguaacacacucuguuaaccuucuagaagacaagcauaacgggaaacuaugcaaacuaagagggguagccccauugcauuuggguaaauguaacauugcuggcuggauccugggaaauccagagugugaaucacucuccacagcaagcucaugguccuacauuguggaaacaucuaguucagacaauggaacguguuacccaggagauuucaucgauuaugaggagcuaagagagcaauugagcucagugucaucauuugaaagguuugagauauuccccaagacaaguucauggcccaaucaugacucgaacaaagguguaacagcagcauguccucaugcuggagcaaaaagcuucuacaaaaauuuaauauggcuaguuaaaaaaggaaauucauacccaaagcucagcaaauccuacauuaaugauaaagggaaagaaguccucgugcuauggggcauucaccauccaucuacuagugcugaccaacaaagucucuaucagaaugcagaugcauauguuuuuguggggucaucaagauacagcaagaaguucaagccggaaauagcaauaagacccaaagugaggaaucaagaagggagaaugaacuauuacuggacacuaguagagccgggagacaaaauaacauucgaagcaacuggaaaucuagugguaccgagauaugcauucgcaauggaaagaaaugcuggaucugguauuaucauuucagauacaccaguccacgauugcaauacaacuugucagacacccaagggugcuauaaacaccagccucccauuucauaauauacauccgaucacaauuggaaaauguccaaaauauguaaaaagcacaaaauugagacuggccacaggauugaggaaugucccgucuauucaaucuagaggccuauuuggggccauugccgguuucauugaagggggguggacagggaugguagauggaugguacgguuaucaccaucaaaaugagcaggggucaggguaugcagccgaccugaagagcacacagaaugccauugacgagauuacuaacaaaguaaauucuguuauugaaaagaugaauacacaguucacagcaguagguaaagaguucaaccaccuggaaaaaagaauagagaauuuaaauaaaaaaguugaugaugguuuccuggacauuuggacuuacaaugccgaacuguugguucuauuggaaaaugaaagaacuuuggacuaccacgauucaaaugugaagaacuuauaugaaaagguaagaagccaguuaaaaaacaaugccaaggaaauuggaaacggcugcuuugaauuuuaccacaaaugcgauaacacgugcauggaaagugucaaaaaugggacuuaugacuacccaaaauacucagaggaagcaaaauuaaacagagaagaaauagaugggguaaagcuggaaucaacaaggauuuaccagauuuuggcgaucuauucaacugucgccaguucauugguacugguagucucccugggggcaaucaguuucuggaugugcucuaaugggucucuacaguguagaauauguauuuaa

SEQ ID NO: 35824 - RNA, 1701 nt, Artificial Sequence; identical to SEQ ID NO: 34681
  derived and/or modified CDS sequence (wt) from hemagglutinin__InfluenzaA__ACZ95897

SEQ ID NO: 35825 - RNA, 1701 nt, Artificial Sequence
  derived and/or modified CDS sequence (wt) from hemagglutinin__InfluenzaA__ACZ95907
augaaggcaauacuaguaguucugcuauauacauuugcaaccgcaaaugcagacacauuauguauagguuaucaugcgaacaauucaacagacacuguagacacaguacuagaaaagaauguaacaguaacacacucuguuaaccuucuagaagacaagcauaacgggaaacuaugcaaacuaagagggguagccccauugcauuuggguaaaugcaacauugcuggcuggauccugggaaauccagagugugaaucacucuccacagcaagcucaugguccuacauuguggaaacaucuaguucagacaauggaacguguuacccaggagauuucaucgauuaugaggagcuaagagagcaauugagcucagugucaucauuugaaagguuugagauauuccccaagacaaguucauggcccaaucaugacucgaacaaagguguaacggcagcauguccucaugcuggagcaaaaagcuucuacaaaaauuuaauauggcuaguuaaaaaaggaaauucauacccaaagcucagcaaauccuacauuaaugauaaagggaaagaaguccucgugcuauggggcauucaccauccaucuacuagugcugaccaacaaagucucuaucagaaugcagaugcauauguuuuuguggggacaucaagauacagcaagaaguucaagccggaaauagcaauaagacccaaagugagggaucaagaagggagaaugaacuauuacuggacacuaguagagccgggagacaaaauaacauucgaagcaacuggaaaucuagugguaccgagauaugcauucgcaauggaaagaaaugcuggaucugguauuaucauuucagauacaccagucuacgauugcaauacaacuugucagacacccaagggugcuauaaacaccagccucccauuucagaauauacauccgaucacaauuggaaaauguccaaaauauguaaaaagcacaaaauugagacuggccacaggauugaggaaugucccgucuauucaaucuagaggccuauuuggggccauugccgguuucauugaagggggguggacagggaugguagauggaugguacgguuaucaccaucaaaaugagcaggggucaggauaugcagccgaccugaagagcacacagaaugccauugacgagauuacuaacaaaguaaauucuguuauugaaaagaugaauacacaguucacagcaguagguaaagaguucaaccaccuggaaaaaagaauagagaauuuaaauaaaaaaguugaugaugguuuccuggacauuuggacuuacaaugccgaacuguugguucuauuggaaaaugaaagaacuuuggacuaccacgauucaaaugugaagaacuuauaugaaaagguaagaagccaguuaaaaaacaaugccaaggaaauuggaaacggcugcuuugaauuuuaccacaaaugcgauaacacgugcauggaaagugucaaaaaugggacuuaugacuacccaaaauacucagaggaagcaaaauuaaacagagaagaaauagaugggguaaagcuggaaucaacaaggauuuaccagauuuuggcgaucuauucaacugucgccaguucauugguacugguagucucccugggggcaaucaguuucuggaugugcucuaaugggucucuacaguguagaauauguauuuaa

SEQ ID NO: 35826 - RNA, 1701 nt, Artificial Sequence
  derived and/or modified CDS sequence (wt) from hemagglutinin__InfluenzaA__ACZ95927
augaaggcaauacuaguaguucugcuauauacauuugcaaccgcaaaugcagacacauuauguauagguuaucaugcgaacaauucaacagacacuguagacacaguacuagaaaagaauguaacaguaacacacucuguuaaccuucuagaagacaagcauaacgggaaacuaugcaaacuaagagggguagccccauugcauuuggguaaauguaacauugcuggcuggauccugggaaauccagagugugaaucacucuccacagcaagcucaugguccuacauuguggaaacaucuaguucagacaauggaacguguuacccaggagauuucaucgauuaugaggagcugagagagcaauugagcucagugucaucauuugaaagguuugagauauuccccaagacaaguucauggcccaaucaugacucgaacaaagguguaacggcagcauguccucaugcuggagcaaaaagcuucuacaaaaauuuaauauggcuaguuaaaaaaggaaauucauacccaaagcucagcaaauccuacauuaaugauaaagggaaagaaguccucgugcuauggggcauucaccauccaucuacuagugcugaccaacaaagucucuaucagaaugcagaugcauauguuuuuguggggacaucaagauacagcaagaaguucaagccggaaauagcaauaagacccaaagugagggaucaagaagggagaaugaacuauuacuggacacuaguagagccgggagacaaaauaacauucgaagcaacuggaaaucuagugguaccgagauaugcauucgcaauggaaagaaaugcuggaucugguauuaucauuucagauacaccaguccacgauugcaauacaacuugucagacacccaagggugcuauaaacaccagccucccauuucagaauauacauccgaucacaauuggaaaauguccaaaauauguaaaaagcacaaaauugagacuggccaccggauugaggaaugucccgucuauucaaucuagaggccuauuuggggccauugccgguuucauugaagggggguggacagggaugguagauggaugguacgguuaucaccaucaaaaugagcaggggucaggguaugcagccgaccugaagagcacacagaaugccauugacgagauuacuaacaaaguaaauucuguuauugaaaagaugaauacacaguucacagcaguagguaaagaguucaaccaccuggaaaaaagaauagagaauuuaaauaaaaaaguugaugaugguuuccuggacauuuggacuuacaaugccgaacuguugguucuauuggaaaaugaaagaacuuuggacuaccacgauucaaaugugaagaacuuauaugaaaagguaagaagccaguuaaaaaacaaugccaaggaaauuggaaacggcugcuuugaauuuuaccacaaaugcgauaacacgugcauggaaagugucaaaaaugggacuuaugacuacccaaaauacucagaggaagcaaaauuaaacagagaagaaauagaugggguaaagcuggaaucaacaaggauuuaccagauuuuggcgaucuauucaacugucgccaguucauugguacugguagucucccugggggcaaucaguuucuggaugugcucuaaugggucucuacaguguagaauauguauuuaa

SEQ ID NO: 35827 - RNA, 1701 nt, Artificial Sequence
  derived and/or modified CDS sequence (wt) from hemagglutinin__InfluenzaA__ACZ95937
auggaggcaauacuaguaguucugcuauauacauuugcaaccgcaaaugcagacacauuauguauagguuaucaugcgaacaauucaacagacacuguagacacaguacuagaaaagaauguaacaguaacacacucuguuaaccuucuagaagacaagcauaacgggaaacuaugcaaacuaagagggguagccccauugcauuuggguaaauguaacauugcuggcuggauccugggaaauccagagugugaaucacucuccacagcaagcucaugguccuacauuguggaaacaucuaguucagacaauggaacguguuacccaggagauuucaucgauuaugaggagcuaagagagcaauugagcucagugucaucauuugaaagguuugagauauuccccaagacaaguucauggcccaaucaugacucgaacaaagguguaacggcagcauguccucaugcuggagcaaaaagcuucuacaaaaauuuaauauggcuaguuaaaaaaggaaauucauacccaaagcucagcaaauccuacauuaaugauaaagggaaagaaguccucgugcuauggggcauucaccauccaucuacuaaugcugaccaacaaagucucuaucagaaugcagaugcauauguuuuuguggggucaucaagauacagcaagaaguucaagccggaaauagcaauaagacccaaagugagggaucaagaggggagaaugaacuauuacuggacacuaguagagccgggagacaaaauaacauucgaagcaacuggaaaucuagugguaccgagauaugcauucgcaauggaaagaaaugcuggaucugguauuaucauuucagauacaccaguccacgauugcaauacaacuugucagacacccaagggugcuauaaacaccagccucccauuucauaauauacauccgaucacaauuggaaaauguccaaaauauguaaaaagcacaaaauugagacuggccacaggauugaggaaugucccgucuauucaaucuagaggccuauuuggggccauugccgguuucauugaagggggguggacagggaugguagauggaugguacgguuaucaccaucaaaaugagcaggggucaggauaugcagccgaccugaagagcacacagaaugccauugacgagauuacuaacaaaguaaauucuguuauugaaaagaugaauacacaguucacagcaguagguaaagaguucaaccaccuggaaaaaagaauagagaauuuaaauaaaaaaguugaugaugguuuccuggacauuuggacuuacaaugccgaacuguugguucuauuggaaaaugaaagaacuuuggacuaccacgauucaaaugugaagaacuuauaugaaaagguaagaagccaguuaaaaaacaaugccaaggaaauuggaaacgguugcuuugaauuuuaccacaaaugcgauaacacgugcauggaaagugucaaaaaugggacuuaugacuacccaaaauacucagaggaagcaaaauuaaacagagaagaaauagaugggguaaagcuggaaucaacaaggauuuaccagauuuuggcgaucuauucaacugucgccaguucauugguacugguagucucccugggggcaaucaguuucuggaugugcucuaaugggucucuacaguguagaauauguauuuaa

SEQ ID NO: 35828 - RNA, 1701 nt, Artificial Sequence; identical to SEQ ID NO: 34965
  derived and/or modified CDS sequence (wt) from hemagglutinin__InfluenzaA__ACZ95947

SEQ ID NO: 35829 - RNA, 1701 nt, Artificial Sequence; identical to SEQ ID NO: 34681
  derived and/or modified CDS sequence (wt) from hemagglutinin__InfluenzaA__ACZ95957

SEQ ID NO: 35830 - RNA, 1701 nt, Artificial Sequence; identical to SEQ ID NO: 34965
  derived and/or modified CDS sequence (wt) from hemagglutinin__InfluenzaA__ACZ95967

SEQ ID NO: 35831 - RNA, 1701 nt, Artificial Sequence
  derived and/or modified CDS sequence (wt) from hemagglutinin__InfluenzaA__ACZ95977
auggaggcaauacuaguaguucugcuauauacauuugcaaccgcaaaugcagacacauuauguauagguuaucaugcgaacaauucaacagacacuguagacacaguacuagaaaagaauguaacaguaacacacucuguuaaccuucuagaagacaagcauaacgggaaacuaugcaaacuaagagggguagccccauugcauuuggguaaauguaacauugcuggcuggauccugggaaauccagagugugaaucacucuccacagcaagcucaugguccuacauuguggaaacaucuaguucagacaauggaacguguuacccaggagauuucaucgauuaugaggagcuaagagagcaauugagcucagugucaucauuugaaagguuugagauauuccccaagacaaguucauggcccaaucaugacucgaacaaagguguaacggcagcauguccucaugcuggagcaaaaagcuucuacaaaaauuuaauauggcuaguuaaaaaaggaaauucauacccaaagcucagcaaauccuacauuaaugauaaagggaaagaaguccucgugcuauggggcauucaccauccaucuacuaaugcugaccaacaaagucucuaucagaaugcagaugcauauguuuuuguggggucaucaagauacagcaagaaguucaagccggaaauagcaauaagacccaaagugagggaucaagaagggagaaugaacuauuacuggacacuaguagagccgggagacaaaauaacauucgaagcaacuggaaaucuagugguaccgagauaugcauucgcaauggaaagaaaugcuggaucugguauuaucauuucagauacaccaguccacgauugcaauacaacuugucagacacccaagggugcuauaaacaccagccucccauuucauaauauacauccgaucacaauuggaaaauguccaaaauauguaaaaagcacaaaauugagacuggccacaggauugaggaaugucccgucuauucaaucuagaggccuauuuggggccauugccgguuucauugaagggggguggacagggaugguagauggaugguacgguuaucaccaucaaaaugagcaggggucaggauaugcagccgaccugaagagcacacagaaugccauugacgagauuacuaacaaaguaaauucuguuauugaaaagaugaauacacaguucacagcaguagguaaagaguucaaccaccuggaaaaaagaauagagaauuuaaauaaaaaaguugaugaugguuuccuggacauuuggacuuacaaugccgaacuguugguucuauuggaaaaugaaagaacuuuggacuaccacgauucaaaugugaagaacuuauaugaaaagguaagaagccaguuaaaaaacaaugccaaggaaauuggaaacgguugcuuugaauuuuaccacaaaugcgauaacacgugcauggaaagugucaaaaaugggacuuaugacuacccaaaauacucagaggaagcaaaauuaaacagagaagaaauagaugggguaaagcuggaaucaacaaggauuuaccagauuuuggcgaucuauucaacugucgccaguucauugguacugguagucucccugggggcaaucaguuucuggaugugcucuaaugggucucuacaguguagaauauguauuuaa

SEQ ID NO: 35832 - RNA, 1701 nt, Artificial Sequence
  derived and/or modified CDS sequence (wt) from hemagglutinin__InfluenzaA__ACZ95987
augaaggcaauacuaguaguucugcuauauacauuugcaaccgcaaaugcagacacauuauguauagguuaucaugcgaacaauucaacagacacuguagacacaguacuagaaaagaauguaacaguaacacacucuguuaaccuucuagaagacaagcauaacgggaaacuaugcaaacuaagagggguagccccauugcauuuggguaaauguaacauugcuggcuggauccugggaaauccagagugugaaucacucuccacagcaagcucaugguccuacauuguggaaacaucuaguucagacaauggaacguguuacccaggagauuucaucgauuaugaggagcuaagagagcaauugagcucagugucaucauuugaaagguuugagauauuccccaagacaaguucauggcccaaucaugacucgaacaaagguguaacggcagcauguccucaugcuggagcaaaaagcuucuacaaaaauuuaauauggcuaguuaaaaaaggaaauucauacccaaagcucagcaaauccuacauuaaugauaaagggaaagaaguccucgugcuauggggcauucaccauccaucuacuagugcugaccaacaaagucucuaucagaaugcagaugcauauguuuuuguggggacaucaagauacagcaagaaguucaagccggaaauagcaauaagacccaaagugagggaucaagaagggagaaugaacuauuacuggacacuaguagagccgggagacaaaauaacauucgaagcaacuggaaaucuagugguaccgagauaugcauucgcaauggaaagaaaugcuggaucugguauuaucauuucagauacaccaguccacgauugcaauacaacuugucagacacccaagggugcuauaaacaccagccucccauuucagaauauacauccgaucacaauuggaaaauguccaaaauauguaaaaagcacaaaauugagacuggccacaggauugaggaauaucccgucuauucaaucuagaggccuauuuggggccauugccgguuucauugaagggggguggacagggaugauagauggaugguacgguuaucaccaucaaaaugagcaggggucaggauaugcagccgaccugaagagcacacagaaugccauugacgagauuacuaacaaaguaaauucuguuauugaaaagaugaauacacaguucacagcaguagguaaagaguucaaccaccuggaaaaaagaauagagaauuuaaauaaaaaaguugaugaugguuuccuggacauuuggacuuacaaugccgaacuguugguucuauuggaaaaugaaagaacuuuggacuaccacgauucaaaugugaagaacuuauaugaaaagguaagaagccaguuaaaaaacaaugccaaggaaauuggaaacggcugcuuugaauuuuaccacaaaugcgauaacacgugcauggaaagugucaaaaaugggacuuaugacuacccaaaauacucagaggaagcaaaauuaaacagagaagaaauagaugggguaaagcuggaaucaacaaggauuuaccagauuuuggcgaucuauucaacugucgccaguucauugguacugguagucucccugggggcaaucaguuucuggaugugcucuaaugggucucuacaguguagaauauguauuuaa

SEQ ID NO: 35833 - RNA, 1701 nt, Artificial Sequence
  derived and/or modified CDS sequence (wt) from hemagglutinin__InfluenzaA__ACZ95997
augaaggcaauacuaguaguucugcuauauacauuugcaaccgcaaaugcagacacauuauguauagguuaucaugcgaacaauucaacagacacuguagacacaguacuagaaaagaauguaacaguaacacacucuguuaaccuucuagaagacaagcauaacgggaaacuaugcaaacuaagagggguagccccauugcauuuggguaaauguaacauugcuggcuggauccugggaaauccagagugugaaucacucuccacagcaagcucaugguccuacauuguggaaacaucuaguucagacaauggaacguguuacccaggagauuucaucgauuaugaggagcuaagagagcaauugagcucagugucaucauuugaaagguuugagauauuccccaagacaaguucauggcccaaucaugacucgaacaaagguguaacggcagcauguccucaugcuggagcaaaaagcuucuacaaaaauuuaauauggcuaguuaaaaaaggaaauucauacccaaagcucagcaaauccuacauuaaugauaaagggaaagaaguccucgugcuauggggcauucaccauccaucuacuagugcugaccaacaaagucucuaucagaaugcagaugcauauguuuuuguggggacaucaagauacagcaagaaguucaagccggaaauagcaauaagacccaaagugagggaucaagaagggagaaugaacuauuacuggacacuaguagagccgggagacaaaauaacauucgaagcaacuggaaaucuagugguaccgagauaugcauucgcaauggaaagaaaugcuggaucugguauuaucauuucagauacaccaguccacgauugcaauacaacuugucagacacccaagggugcuauaaacacuagccucccauuucagaauauacauccgaucacaauuggaaaauguccaaaauauguaaaaagcacaaaauugagacuggccacaggauugaggaaugucccgucuauucaaucuagaggccuauuuggggccauugccgguuucauugaagggggguggacagggaugguagauggaugguacgguuaucaccaucaaaaugagcaggggucaggauaugcagccgaccugaagagcacacagaaugccauugacgagauuacuaacaaaguaaauucuguuauugaaaagaugaauacacaguucacagcaguagguaaagaguucaaccaccuggaaaaaagaauagagaauuuaaauaaaaaaguugaugaugguuuccuggacauuuggacuuacaaugccgaacuguugguucuauuggaaaaugaaagaacuuuggacuaccacgauucaaaugugaagaacuuauaugaaaagguaagaagccaguuaaaaaacaaugccaaggaaauuggaaacggcugcuuugaauuuuaccacaaaugcgauaacacgugcauggaaagugucaaaaaugggacuuaugacuacccaaaauacucagaggaagcaaaauuaaacagagaagaaauagaugggguaaagcuggaaucaacaaggauuuaccagauuuuggcgaucuauucaacugucgccaguucauugguacugguagucucccugggggcaaucaguuucuggaugugcucuaaugggucucuacaguguagaauauguauuuaa

SEQ ID NO: 35834 - RNA, 1701 nt, Artificial Sequence; identical to SEQ ID NO: 34714
  derived and/or modified CDS sequence (wt) from hemagglutinin__InfluenzaA__ACZ96007

SEQ ID NO: 35835 - RNA, 1701 nt, Artificial Sequence
  derived and/or modified CDS sequence (wt) from hemagglutinin__InfluenzaA__ACZ96017
augaaggcaauacuaguaguucugcuauauacauuugcaaccgcgaaugcagacacauuauguauagguuaucaugcgaacaauucaacagacacuguagacacaguacuagaaaagaauguaacaguaacacacucuguuaaccuucuagaagacaagcauaacgggaaacuaugcaaacuaagagggguagccccauugcauuuggguaaauguaacauugcuggcuggauccugggaaauccagagugugaaucacucuccacagcaagcucaugguccuacauuguggaaacaucuaguucagacaauggaacguguuacccaggagauuucaucgauuaugaggagcuaagagagcaauugagcucagugucaucauuugaaagguuugagauauuccccaagacaaguucauggcccaaucaugacucgaacaaagguguaacggcagcauguccucaugcuggagcaaaaagcuucuacaaaaauuuaauauggcuaguuaaaaaaggaaauucauacccaaagcucagcaaauccuacauuaaugauaaagggaaagaaguccucgugcuauggggcauucaccauccaucuacuagugcugaccaacaaagucucuaucagaaugcagaugcauauguuuuuguggggucaucaagauacagcaagaaguucaagccggaaauagcaauaagacccaaagugagggaucaagaagggagaaugaacuauuacuggacacuaguagagccgggagacaaaauaacauucgaagcaacuggaaaucuagugguaccgagauaugcauucgcaauggaaagaaaugcuggaucugguauuaucauuucagauacaccaguccacgauugcaauacaacuugucagacacccaagggugcuauaaacaccagccucccauuucagaauauacauccgaucacaauuggaaaauguccaaaauauguaaaaagcacaaaauugagacuggccacaggauugaggaaugucccgucuauucaaucuagaggccuauuuggggccauugccgguuucauugaagggggguggacagggaugguagauggaugguacgguuaucaccaucaaaaugagcaggggucaggauaugcagccgaccugaagagcacacagaaugccauugacgagauuacuaacaaaguaaauucuguuauugaaaagaugaauacacaguucacagcaguagguaaagaguucaaccaccuggaaaaaagaauagagaauuuaaauaaaaaaguugaugaugguuucuuggacauuuggacuuacaaugccgaacuguugguucuauuggaaaaugaaagaacuuuggacuaccacgauucaaaugugaagaacuuauaugaaaagguaagaagccagcuaaaaaacaaugccaaggaaauuggaaacggcugcuuugaauuuuaccacaaaugcgauaacacgugcauggaaagugucaaaaaugggacuuaugacuacccaaaauacucagaggaagcaaaauuaaacagagaagaaauagaugggguaaagcuggaaucaacaaggauuuaccagauuuuggcgaucuauucaacugucgccaguucauugguacugguagucucccugggggcaaucaguuucuggaugugcucuaaugggucucuacaguguagaauauguauuuaa

SEQ ID NO: 35836 - RNA, 1701 nt, Artificial Sequence
  derived and/or modified CDS sequence (wt) from hemagglutinin__InfluenzaA__ACZ96027
augaaggcaauacuaguaguucugcuauauacauuugcaaccgcaaaugcagacacauuauguauagguuaucaugcgaacaauucaacagacacuguagacacaguacuagaaaagaauguaacaguaacacacucuguuaaccuucuagaagauaagcauaacgggaaacuaugcaaacuaagagggguagccccauugcauuuggguaaauguaacauugcuggcuggauccugggaaauccagagugugaaucacucuccacagcaagcucaugguccuacauuguggaaacaucuaguucagacaauggaacguguuacccaggagauuucaucgauuaugaggagcuaagagagcaauugagcucagugucaucauuugaaagguuugagauauuccccaagacaaguucauggcccaaucaugacucgaacaaagguguaacggcagcauguccucaugcuggagcaaaaagcuucuacaaaaauuuaauauggcuaguuaaaaaaggaaauucauacccaaagcucagcaaauccuacauuaaugauaaagggaaagaaguccucgugcuauggggcauucaccauccaucuacuagugcugaccaacaaagucucuaucagaaugcagaugcauauguuuuuguggggacaucaagauacagcaagaaguucaagccggaaauagcaauaagacccaaagugagggaucaagaagggagaaugaacuauuacuggacacuaguagagccgggagacaaaauaacauucgaagcaacuggaaaucuagugguaccgagauaugcauucgcaauggaaagaaaugcuggaucugguauuaucauuucagauacaccaguccacgauugcaauacaacuugucagacacccaagggugcuauaaacaccagccucccauuucagaauauacauccgaucacaauuggaaaauguccaaaauauguaaaaagcacaaaauugagacuggccacaggauugaggaaugucccgucuauucaaucuagaggccuauuuggggccauugccgguuucauugaagggggguggacagggaugguagauggaugguacgguuaucaccaucaaaaugagcaggggucaggauaugcagccgaccugaagagcacacagaaugccauugacgagauuacuaacaaaguaaauucuguuauugaaaagaugaauacacaguucacagcaguagguaaagaguucaaccaccuggaaaaaagaauagagaauuuaaauaaaaaaguugaugaugguuuccuggacauuuggacuuacaaugccgaacuguugguucuauuggaaaaugaaagaacuuuggacuaccacgauucaaaugugaagaacuuauaugaaaagguaagaagccaguuaaaaaacaaugccaaggaaauuggaaacggcugcuuugaauuuuaccacaaaugcgauaacacgugcauggaaagugucaaaaaugggacuuaugacuacccaaaauacucagaggaagcaaaauuaaacagagaagaaauagaugggguaaagcuggaaucaacaaggauuuaccagauuuuggcgaucuauucaacugucgccaguucauugguacugguagucucccugggggcaaucaguuucuggaugugcucuaaugggucucuacaguguagaauauguauuuaa

SEQ ID NO: 35837 - RNA, 1701 nt, Artificial Sequence; identical to SEQ ID NO: 35831
  derived and/or modified CDS sequence (wt) from hemagglutinin__InfluenzaA__ACZ96047

SEQ ID NO: 35838 - RNA, 1701 nt, Artificial Sequence
  derived and/or modified CDS sequence (wt) from hemagglutinin__InfluenzaA__ACZ96057
augaaggcaauacuaguaguucugcuauauacauuugcaaccgcaaaugcagacacauuauguauagguuaucaugcgaacaauucaacagacacuguagacacaguacuagaaaagaauguaacaguaacacacucuguuaaccuucuagaagacaagcauaacgggaaacuaugcaaacuaagagggguagccccauugcauuuggguaaauguaacauugcuggcuggauccugggaaauccagagugugaaucacucuccacagcaagcucaugguccuacauuguggaaacaucuaguucagacaauggaacguguuacccaggagauuucaucgauuaugaggagcuaagagagcaauugagcucagugucaucauuugaaagguuugagauauuccccaagacaaguucauggcccaaucaugacucgaacaaagguguaacggcagcaugucuucaugcuggagcaaaaagcuucuacaaaaauuuaauauggcuaguuaaaaaaggaaauucauacccaaagcucagcaaauccuacauuaaugauaaagggaaagaaguccucgugcuauggggcauucaccauccaucuacuagugcugaccaacaaagccucuaucagaaugcagaugcauauguuuuuguggggacaucaagauacagcaagaaguucaagccggaaauagcaauaagacccaaagugagggaucaagaagggagaaugaacuauuacuggacacuaguagagccgggagacaaaauaacauucgaagcaacuggaaaucuagugguaccgagauaugcauucgcaauggaaagaaaugcuggaucugguauuaucauuucagauacaccaguccacgauugcaauacaacuugucagacacccaagggugcuauaaacaccagccucccauuucagaauauacauccgaucacaauuggaaaauguccaaaauauguaaaaagcacaaaauugagacuggccacaggauugaggaauaucccgucuauucaaucuagaggccuauuuggggccauugccgguuucauugaagggggguggacagggaugguagauggaugguacgguuaucaccaucaaaaugagcaggggucaggauaugcagccgaccugaagagcacacagaaugccauugacgagauuacuaacaaaguaaauucuguuauugaaaagaugaauacacaguucacagcaguagguaaagaguucaaccaccuggaaaaaagaauagagaauuuaaauaaaaaaguugaugaugguuuccuggacauuuggacuuacaaugccgaacuguugguucuauuggaaaaugaaagaacuuuggacuaccacgauucaaaugugaagaacuuauaugaaaagguaagaagccaguuaaaaaacaaugccaaggaaauuggaaacggcugcuuugaauuuuaccacaaaugcgauaacacgugcauggaaagugucaaaaaugggacuuaugacuacccaaaauacucagaggaagcaaaauuaaacagagaagaaauagaugggguaaagcuggaaucaacaaggauuuaccagauuuuggcgaucuauucaacugucgccaguucauugguacugguagucucccugggggcaaucaguuucuggaugugcucuaaugggucucuacaguguagaauauguauuuaa

SEQ ID NO: 35839 - RNA, 1701 nt, Artificial Sequence
  derived and/or modified CDS sequence (wt) from hemagglutinin__InfluenzaA__ACZ96069
augaaggcaauacuaguaguucugcuauauacauuugcaaccgcaaaugcagacacauuauguauagguuaucaugcgaacaauucaacagacacuguagacacaguacuagaaaagaauguaacaguaacacacucuguuaaccuucuagaagacaagcauaacgggaaacuaugcaaacuaagagggguagccccauugcauuuggguaaauguaacauugcuggcuggauccugggaaauccagagugugaaucacucuccacagcaagcucaugguccuacauuguggaaacaucuaguucagacaauggaacguguuacccaggagauuucaucgauuaugaggagcuaagagagcaauugagcucagugucaucauuugaaagguuugagauauuccccaagacaaguucauggcccaaucaugacucgaacaaagguguaacggcagcauguccucaugcuggagcaaaaagcuucuacaaaaauuuaauauggcuaguuaaaaaaggaaauucauacccaaagcucagcaaauccuacauuaaugauaaagggaaagaaguccucgugcuauggggcauucaccauccaucuacuagugcugaccaacaaagucucuaucagaaugcagaugcauauguuuuuguggggacaucaagauacagcaagaaguucaagccggaaauagcaauaagacccaaagugagggaucaagaagggagaaugaacuauuacuggacacuaguagagccgggaaacaaaauaacauucgaagcaacuggaaaucuagugguaccgagauaugcauucgcaauggaaagaaaugcuggaucugguauuaucauuucagauacaccaguccacgauugcaauacaacuugucagacacccaagggugcuauaaacaccagccucccauuucagaauauacauccgaucacaauuggaaaauguccaaaauauguaaaaagcacaaaauugagacuggccacaggauugaggaaugucccgucuauucaaucuagaggccuauuuggggccauugccgguuucauugaagggggguggacagggaugguagauggaugguacgguuaucaccaucaaaaugagcaggggucaggauaugcagccgaccugaagagcacacagaaugccauugacgagauuacuaacaaaguaaauucuguuauugaaaagaugaauacacaguucacagcaguagguaaagaguucaaccaccuggaaaaaagaauagagaauuuaaauaaaaagguugaugaugguuuccuggacauuuggacuuacaaugccgaacuguugguucuauuggaaaaugaaagaacuuuggacuaccacgauucaaaugugaagaacuuauaugaaaagguaagaagccaguuaaaaaacaaugccaaggaaauuggaaacggcugcuuugaauuuuaccacaaaugcgauaacacgugcauggaaagugucaaaaaugggacuuaugacuacccaaaauacucagaggaagcaaaauuaaacagagaagaaauagaugggguaaagcuggaaucaacaaggauuuaccagauuuuggcgaucuauucaacugucgccaguucauugguacugguagucucccugggggcaaucaguuucuggaugugcucuaaugggucucuacaguguagaauauguauuuaa

SEQ ID NO: 35840 - RNA, 1701 nt, Artificial Sequence; identical to SEQ ID NO: 35831
  derived and/or modified CDS sequence (wt) from hemagglutinin__InfluenzaA__ACZ96089

SEQ ID NO: 35841 - RNA, 1701 nt, Artificial Sequence
  derived and/or modified CDS sequence (wt) from hemagglutinin__InfluenzaA__ACZ96119
augaaggcaauacuaguaguucugcuauauacauuugcaaccgcaaaugcagacacauuauguauagguuaucaugcgaacaauucaacagacacuguagacacaguacuagaaaagaauguaacaguaacacacucuguuaaccuucuagaagacaagcauaacgggaaacuaugcaaacuaagagggguagccccauugcauuuggguaaauguaacauugcuggcuggauccugggaaauccagagugugaaucacucuccacagcaagcucaugguccuacauuguggaaacaucuaguucagacaauggaacguguuacccaggagauuucaucgauuaugaggagcuaagagagcaauugagcucagugucaucauuugaaagguuugagauguuccccaagacaaguucauggcccaaucaugacucgaacaaagguguaacggcagcauguccucaugcuggagcaaaaagcuucuacaaaaauuuaauauggcuaguuaaaaaaggaaauucauacccaaagcucagcaaauccuacauuaaugauaaagggaaagaaguccucgugcuauggggcauucaccauccaucuacuagugcugaccaacaaagucucuaucagaaugcagaugcauauguuuuuguggggacaucaagauacagcaagaaguucaagccggaaauagcaauaagacccaaagugagggaucaagaagggagaaugaacuauuacuggacacuaguagagccgggagacaaaauaacauucgaagcaacuggaaaucuagugguaccgagauaugcauucgcaauggaaagaaaugcuggaucugguauuaucauuucagauacaccaguccacgauugcaauacaacuugucagacaccuaagggugcuauaaacaccagccucccauuucagaauauacauccgaucacaauuggaaaauguccaaaauauguaaaaagcacaaaauugagacuggccacaggcuugaggaaugucccgucuauucaaucuagaggccuauuuggggccauugccgguuucauugaagggggguggacagggaugguagauggaugguacgguuaucaccaucaaaaugagcaggggucaggauaugcagccgaccugaagagcacacagaaugccauugacgagauuacuaacaaaguaaauucuguuauugaaaagaugaauacacaguucacagcaguagguaaagaguucaaccaccuggaaaaaagaauagagaauuuaaauaaaaaaguugaugaugguuuccuggacauuuggacuuacaaugccgaacuguugguucuauuggaaaaugaaagaacuuuggacuaccacgauucaaaugugaagaacuuauaugaaaagguaagaagccaguuaaaaaacaaugccaaggaaauuggaaacggcugcuuugaauuuuaccacaaaugcgauaacacgugcauggaaagugucaaaaaugggacuuaugacuacccaaaauacucagaggaagcaaaauuaaacagagaagaaauagaugggguaaagcuggaaucaacaaggauuuaccagauuuuggcgaucuauucaacugucgccaguucauugguacugguagucucccugggggcaaucaguuucuggaugugcucuaaugggucucuacaguguagaauauguauuuaa

SEQ ID NO: 35842 - RNA, 1701 nt, Artificial Sequence
  derived and/or modified CDS sequence (wt) from hemagglutinin__InfluenzaA__ACZ96129
augaaggcaauacuaguaguucugcuauauacauuugcaaccgcaaaugcagacacauuauguauagguuaucaugcgaacaauucaacagacacuguagacacaguacuagaaaagaauguaacaguaacacacucuguuaaccuucuagaagacaagcauaacgggaaacuaugcaaacuaagagggguagccccauugcauuuggguaaauguaacauugcuggcuggauccugggaaauccagagugugaaucacucuccacagcaagcucaugguccuacauuguggaaacaucuaguucagacaauggaacguguuacccaggagaguucaucgauuaugaggagcuaagagagcaauugagcucagugucaucauuugaaagguuugagauauuccccaagacaaguucauggcccaaucaugacucgaacaaagguguaacggcagcauguccucaugcuggagcaaaaagcuucuacaaaaauuuaauauggcuaguuaaaaaaggaaauucauacccaaagcucagcaaauccuacauuaaugauaaagggaaagaaguccucgugcuauggggcauucaccauccaucuacuagugcugaccaacaaagucucuaucagaaugcagaugcauauguuuuuguggggacaucaagauacagcaagaaguucaagccggaaauagcaauaagacccaaagugagggaucaggaagggagaaugaacuauuacuggacacuaguagagccgggagacaaaauaacauucgaagcaacuggaaaucuagugguaccgagauaugcauucgcaauggaaagaaaugcuggaucugguauuaucauuucagauacaccaguccacgauugcaauacaacuugucagacacccaagggugcuauaaacaccagccucccauuucagaauauacauccgaucacaauuggaaaauguccaaaauauguaaaaagcacaaaauugagacuggccacaggauugaggaaugucccgucuauucaaucuagaggccuauuuggggccauugccgguuucauugaagggggguggacagggaugguagauggaugguacgguuaucaccaucaaaaugagcaggggucaggauaugcagccgaccugaagagcacacagaaugccauugacgagauuacuaacaaaguaaauucuguuauugaaaagaugaauacacaguucacagcaguagguaaagaguucaaccaccuggaaaaaagaauagagaauuuaaauaaaaaaguugaugaugguuuccuggacauuuggacuuacaaugccgaacuguugguucuauuggaaaaugaaagaacuuuggacuaccacgauucaaaugugaagaacuuauaugaaaagguaagaagccaguuaaaaaacaaugccaaggaaauuggaaacggcugcuuugaauuuuaccacaaaugcgauaacacgugcauggaaagugucaaaaaugggacuuaugacuacccaaaauacucagaggaagcaaaauuaaacagagaagaaauagaugggguaaagcuggaaucaacaaggauuuaccagauuuuggcgaucuauucaacugucgccaguucauugguacugguagucucccugggggcaaucaguuucuggaugugcucuaaugggucucuacaguguagaauauguauuuaa

SEQ ID NO: 35843 - RNA, 1701 nt, Artificial Sequence; identical to SEQ ID NO: 34714
  derived and/or modified CDS sequence (wt) from hemagglutinin__InfluenzaA__ACZ96149

SEQ ID NO: 35844 - RNA, 1701 nt, Artificial Sequence; identical to SEQ ID NO: 35833
  derived and/or modified CDS sequence (wt) from hemagglutinin__InfluenzaA__ACZ96159

SEQ ID NO: 35845 - RNA, 1701 nt, Artificial Sequence
  derived and/or modified CDS sequence (wt) from hemagglutinin__InfluenzaA__ACZ96179
augaaggcaauacuaguaguucugcuauauacauuugcaaccgcaaaugcagacacauuauguauagguuaucaugcgaacaauucaacagacacuguagacacaguacuagaaaagaauguaacaguaacacacucuguuaaccuucuagaagacaagcauaacgggaaacuaugcaaacuaagagggguagccccauugcauuuggguaaauguaacauugcuggcuggauccugggaaauccagagugugaaucacucuccacagcaagcucaugguccuacauuguggaaacaucuaguucagacaauggaacguguuacccaggagauuucaucgauuaugaggagcuaagagagcaauugagcucagugucaucauuugaaagguuugagauauuccccaagacaaguucauggcccaaucaugacucgaacaaagguguaacggcagcauguccucaugcuggagcaaaaagcuucuacaaaaauuuaauauggcuaguuaaaaaaggaaauucauacccaaagcucagcaaauccuacauuaaugauaaagggaaagaaguccucgugcuauggggcauucaccauccaucuacuagugcugaccaacaaagucucuaucagaaugcagaugcauauguuuuuguggggacaucaagauacagcaagaaguucaagccggaaauagcaauaagacccaaagugagggaucaagaagggagaaugaacuauuacuggacacuaguagagccgggagacaaaauaacauucgaagcaacuggaaaucuagugguaccgagauaugcauucgcaauggaaagaaaugcuggaucugguauuaucauuucagauacaccaguccacgauugcaauacaacuugucagacacccaagggugcuauaaacaccagccucccauuucagaauauacauccgaucacaauuggaaaauguccaaaauauguaaaaagcacaaaauugagacuggccacaggauugaggaaugucccgucuauucaaucuagaggccuauuuggggccauugccgguuucauugaagggggguggacagggaugguagauggaugguacgguuaucaccaucaaaaugagcaggggucaggauaugcagccgaccugaagagcacacagaaugccauugacaagauuacuaacaaaguaaauucuguuauugaaaagaugaauacacaguucacagcaguagguaaagaguucaaccaccuggaaaaaagaauagagaauuuaaauaaaaaaguugaugaugguuuccuggacauuuggacuuacaaugccgaacuguugguucuauuggaaaaugaaagaacuuuggacuaccacgauucaaaugugaagaacuuauaugaaaagguaagaagccaguuaaaaaacaaugccaaggaaauuggaaacggcugcuuugaauuuuaccacaaaugcgauaacacgugcauggaaagugucaaaaaugggacuuaugacuacccaaaauacucagaggaagcaaaauuaaacagagaagaaauagaugggguaaagcuggaaucaacaaggauuuaccagauuuuggcgaucuauucaacugucgccaguucauugguacugguagucucccugggggcaaucaguuucuggaugugcucuaaugggucucuacaguguagaauauguauuuaa

SEQ ID NO: 35846 - RNA, 1701 nt, Artificial Sequence; identical to SEQ ID NO: 35838
  derived and/or modified CDS sequence (wt) from hemagglutinin__InfluenzaA__ACZ96189

SEQ ID NO: 35847 - RNA, 1701 nt, Artificial Sequence
  derived and/or modified CDS sequence (wt) from hemagglutinin__InfluenzaA__ACZ96199
augaaggcaauacuaguaguucugcuauauacauuugcaaccgcaaaugcagacacauuauguauagguuaucaugcgaacaauucaacagacacuguagacacaguacuagaaaagaauguaacaguaacacacucuguuaaccuucuagaagacaagcauaacgggaaacuaugcaaacuaagagggguagccccauugcauuuggguaaauguaacauugcuggcuggauccugggaaauccagagugugaaucacucuccacagcaagcucaugguccuacauuguggaaacaucuaguucagacaauggaacguguuacccaggagauuucaucgauuaugaggagcuaagagagcaauugagcucagugucaucauuugaaagguuugagauauuccccaagacaaguucauggcccaaucaugacucgaacaaagguguaacggcagcauguccucaugcuggagcaaaaagcuucuacaaaaauuuaauauggcuaguuaaaaaaggaaauucauacccaaagcucagcaaauccuacauuaaugauaaagggaaagaaguccucgugcuauggggcauucaccauccaucuacuagugcugaccaacaaagucucuaucagaaugcagaugcauauguuuuuguggggacaucaagauacagcaagaaguucaagccggaaauagcaauaagacccaaagugagggaucaagaagggagaaugaacuauuacuggacacuaguagagccgggagacaaaauaacauucgaagcaacuggaaaucuagugguaccgagauaugcauucgcaauggaaagaaaugcuggaucugguauuaucauuucagauacaccaguccacgauugcaauacaacuugucagacacccaagggugcuauaaacaccagccucccauuucagaauauacauccgaucacaauuggaaaauguccaaaauauguaaaaagcacaaaauugagacuggccacaggauugaggaaugucccgucuauucaaucuagaggccuauuuggggccauugccgguuucauugaagggggguggacagggaugguagauggaugguacgguuaucaccaucaaaaugagcaggggucaggauaugcagccgaccugaagagcacacagaaugccauugacaagauuacuaacaaaguaaauucuguuauugaaaagaugaacacacaguucacagcaguagguaaagaguucaaccaccuggaaaaaagaauagagaauuuaaauaaaaaaguugaugaugguuuccuggacauuuggacuuacaaugccgaacuguugguucuauuggaaaaugaaagaacuuuggacuaccacgauucaaaugugaagaacuuauaugaaaagguaagaagccaguuaaaaaacaaugccaaggaaauuggaaacggcugcuuugaauuuuaccacaaaugcgauaacacgugcauggaaagugucaaaaaugggacuuaugacuacccaaaauacucagaggaagcaaaauuaaacagagaagaaauagaugggguaaagcuggaaucaacaaggauuuaccagauuuuggcgaucuauucaacugucgccaguucauugguacugguagucucccugggggcaaucaguuucuggaugugcucuaaugggucucuacaguguagaauauguauuuaa

SEQ ID NO: 35848 - RNA, 1701 nt, Artificial Sequence; identical to SEQ ID NO: 34980
  derived and/or modified CDS sequence (wt) from hemagglutinin__InfluenzaA__ACZ96209

SEQ ID NO: 35849 - RNA, 1701 nt, Artificial Sequence
  derived and/or modified CDS sequence (wt) from hemagglutinin__InfluenzaA__ACZ96219
augaaggcaauacuaguaguucugcuauauacauuugcaaccgcaaaugcagacacauuauguauagguuaucaugcgaacaauucaacagacacuguagacacaguacuagaaaagaauguaacaguaacacacucuguuaaccuucuagaagacaagcauaacgggaaacuaugcaaacuaagagggguagccccauugcauuuggguaaauguaacauugcuggcuggauccugggaaauccagagugugaaucacucuccacagcaagcucaugguccuacauuguggaaacaucuaguucagacaauggaacguguuacccaggagauuucaucgauuaugaggagcuaagagagcaauugagcucagugucaucauuugaaagguuugagauauuccccaagacaaguucauggcccaaucaugacucgaacaaagguguaacggcagcauguccucaugcuggagcaaaaagcuucuacaaaaauuuaauauggcuaguuaaaaaaggaaauucauacccaaagcucagcaaauccuacauuaaugauaaagggaaagaaguccucgugcuauggggcauucaccauccaucuacuagugcugaccaacaaagucucuaucagaaugcagaugcauauguuuuuguggggacaucaagauacagcaagaaguucaagccggaaauagcaauaagacccaaagugagggaucaagaagggagaaugaacuauuacuggacacuaguagagccgggagacaaaauaaaauucgaagcaacuggaaaucuagugguaccgagauaugcauucgcaauggaaagaaaugcuggaucugguauuaucauuucagauacaccaguccacgauugcaauacaacuugucagacauccaagggugcuauaaacaccagccucccauuucagaauauacauccgaucacaauuggaaaauguccaaaauauguaaaaagcacaaaauugagacuggccacaggauugaggaaugucccgucuauucaaucuagaggccuauuuggggccauugccgguuucauugaagggggguggacagggaugguagauggaugguacgguuaucaccaucaaaaugagcaggggucaggauaugcagccgaccugaaaagcacacagaaugccauugacgagauuacuaacaaaguaaauucuguuauugaaaagaugaauacacaguucacagcaguagguaaagaguucaaccaccuggaaaaaagaauagagaauuuaaauaaaaaaguugaugaugguuuccuggacauuuggacuuacaaugccgaacuguugguucuauuggaaaaugaaagaacuuuggacuaccacgauucaaaugugaagaacuuauaugaaaagguaagaagccaguuaaaaaacaaugccaaggaaauuggaaacggcugcuuugaauuuuaccacaaaugcgauaacacgugcauggaaagugucaaaaaugggacuuaugacuacccaaaauacucagaggaagcaaaauuaaacagagaagaaauagcuggaguaaagcuggaaucaacaaggauuuaccagauuuuggcgaucuauucaacugucgccaguucauugguacugguagucucccugggggcaaucaguuucuggaugugcucuaaugggucucuacaguguagaauauguauuuaa

SEQ ID NO: 35850 - RNA, 1701 nt, Artificial Sequence; identical to SEQ ID NO: 34980
  derived and/or modified CDS sequence (wt) from hemagglutinin__InfluenzaA__ACZ96229

SEQ ID NO: 35851 - RNA, 1701 nt, Artificial Sequence
  derived and/or modified CDS sequence (wt) from hemagglutinin__InfluenzaA__ACZ96239
augaaggcaauacuaguaguucugcuauauacauuugcaaccgcaaaugcagacacauuauguauagguuaucaugcgaacaauucaacagacacuguagacacaguacuagaaaagaauguaacaguaacacacucuguuaaccuucuagaagacaagcauaacgggaaacuaugcaaacuaagagggguagccccauugcauuuggguaaauguaacauugcuggcuggauccugggaaauccagagugugaaucacucuccacagcaagcucaugguccuacauuguggaaacaucuaguucagacaauggaacguguuacccaggagauuucaucgauuaugaggagcuaagagagcaauugagcucagugucaucauuugaaagguuugagauauuccccaagacaaguucauggcccaaucaugacucgaacaaagguguaacggcagcauguccucaugcuggagcaaaaagcuucuacaaaaauuuaauauggcuaguuaaaaaaggaaauucauacccaaagcucagcaaauccuacauuaaugauaaagggaaagaaguccucgugcuauggggcauucaccauccaucuacuagugcugaccaacaaagucucuaucagaaugcagaugcauauguuuuuguggggacaucaagauacagcaagaaguucaagccggaaauagcaauaagacccaaagugagggaucaagaagggagaaugaacuauuacuggacacuaguagagccgggagacaaaauaacauucgaagcaacuggaaaucuagugguaccgagauaugcauucgcaauggaaagaaaugcuggaucugguauuaucauuucagauacaccaguccacgauugcaauacaacuugccagacacccaagggugcuauaaacaccagccucccauuucagaauauacauccgaucacaauuggaaaauguccaaaauauguaaaaagcacaaaauugagacuggccacaggauugaggaaugucccgucuauucaaucuagaggccuauuuggggccauugcugguuucauugaagggggguggacagggaugguagauggaugguacgguuaucaccaucaaaaugagcaggggucaggauaugcagccgaccugaagagcacacagaaugccauugacaagauuacuaacaaaguaaauucuguuauugaaaagaugaauacacaguucacagcaguagguaaagaguucaaccaccuggaaaaaagaauagagaauuuaaauaaaaaaguugaugaugguuuccuggacauuuggacuuacaaugccgaacuguugguucuauuggaaaaugaaagaacuuuggacuaccacgauucaaaugugaagaacuuauaugaaaagguaagaagccaguuaaaaaacaaugccaaggaaauuggaaacggcugcuuugaauuuuaccacaaaugcgauaacacgugcauggaaagugucaaaaaugggacuuaugacuacccaaaauacucagaggaagcaaaauuaaacagagaagaaauagaugggguaaagcuagaaucaacaaggauuuaccagauuuuggcgaucuauucaacugucgccaguucauugguacugguagucucccugggggcaaucaguuucuggaugugcucuaaugggucucuacaguguagaauauguauuuaa

SEQ ID NO: 35852 - RNA, 1701 nt, Artificial Sequence; identical to SEQ ID NO: 34714
  derived and/or modified CDS sequence (wt) from hemagglutinin__InfluenzaA__ACZ96249

SEQ ID NO: 35853 - RNA, 1701 nt, Artificial Sequence
  derived and/or modified CDS sequence (wt) from hemagglutinin__InfluenzaA__ACZ96269
augaaggcaauacuaguaguucugcuauauacauuugcaaccgcaaaugcagacacauuauguauagguuaucaugcgaacaauucaacagacacuguagacacaguacuagaaaggaauguaacaguaacacacucuguuaaccuucuagaagacaagcauaacgggaaacuaugcaaacuaagagggguagccccauugcauuuggguaaauguaacauugcuggcuggauccugggaaauccagagugugaaucacucuccacagcaagcucaugguccuacauuguggaaacaucuaguucagacaauggaacguguuacccaggagauuucaucgauuaugaggagcuaagagagcaauugagcucagugucaucauuugaaagguuugagauauuccccaagacaaguucauggcccaaucaugacucgaacaaagguguaacggcagcauguccucaugcuggagcaaaaagcuucuacaaaaauuuaauauggcuaguuaaaaaaggaaauucauacccaaagcucagcaaauccuacauuaaugauaaagggaaagaaguccucgugcuauggggcauucaccauccaucuacuagugcugaccaacaaagucucuaucagaaugcagaugcauauguuuuuguggggacaucaagauacagcaagaaguucaagccggaaauagcaauaagacccaaagugagggaucaagaagggagaaugaacuauuacuggacacuaguagagccgggagacaaaauaacauucgaagcaacuggaaaucuagugguaccgagauaugcauucgcaauggaaagaaaugcuggaucugguauuaucauuucagauacaccaguccacgauugcaauacaacuugucagacacccaagggugcuauaaacaccagccucccauuucagaauauacauccgaucacaauuggaaaauguccaaaauauguaaaaagcacaaaauugagacuggccacaggauugaggaaugucccgucuauucaaucuagaggccuauuuggggccauugccgguuucauugaagggggguggacagggaugguagauggaugguacgguuaucaccaucaaaaugagcaggggucaggauaugcagccgaccugaagagcacacagaaugccauugacgagauuacuaacaaaguaaauucuguuauugaaaagaugaauacacaguucacagcaguagguaaagaguucaaccaccuggaaaaaagaauagagaauuuaaauaaaaaaguugaugaugguuuccuggacauuuggacuuacaaugccgaacuguugguucuauuggaaaaugaaagaacuuuggacuaccacgauucaaaugugaagaacuuauaugaaaagguaagaagccaguuaaaaaacaaugccaaggaaauuggaaacggcugcuuugaauuuuaccacaaaugcgauaacacgugcauggaaagugucaaaaaugggacuuaugacuacccaaaauacucagaggaagcaaaauuaaacagagaagaaauagaugggguaaagcuggaaucaacaaggauuuaccagauuuuggcgaucuauucaacugucgccaguucauugguacugguagucucccugggggcaaucaguuucuggaugugcucuaaugggucucuacaguguagaauauguauuuaa

SEQ ID NO: 35854 - RNA, 1701 nt, Artificial Sequence; identical to SEQ ID NO: 34681
  derived and/or modified CDS sequence (wt) from hemagglutinin__InfluenzaA__ACZ96299

SEQ ID NO: 35855 - RNA, 1701 nt, Artificial Sequence
  derived and/or modified CDS sequence (wt) from hemagglutinin__InfluenzaA__ACZ96309
augaaggcaauacuaguaguucugcuauauacauuugcaaccgcaaaugcagacacauuauguauagguuaucaugcgaacaauucaacagacacuguagacacaguacuagaaaagaauguaacaguaacacacucuguuaaccuucuagaagacaagcauaacgggaaacuaugcaaacuaagagggguagccccauugcauuuggguaaauguaacauugcuggcuggauccugggaaauccagagugugaaucacucuccacagcaagcucaugguccuacauuguggaaacaucuaguucagacaauggaacguguuacccaggagauuucaucgauuaugaggagcuaagagagcaauugagcucagugucaucauuugaaagguuugagauauuccccaagacaaguucauggcccaaucaugauucgaacaaagguguaacggcagcauguccucaugcuggagcaaaaagcuucuacaaaaauuuaauauggcuaguuaaaaaaggaaauucauacccaaagcucagcaaauccuacauuaaugauaaagggaaagaaguccucgugcuauggggcauucaccauccaucuacuagugcugaccaacaaagucucuaucagaaugcagaugcauauguuuuuguggggacaucaagauacagcaagaaguucaagccggaaauagcaauaagacccaaagugagggaucaagaagggagaaugaacuauuacuggacacuaguagagccgggagacaaaauaacauucgaagcaacuggaaaucuagugguaccgagauaugcauucgcaauggaaagaaaugcuggaucugguauuaucauuucagauacaccaguccacgauugcaauacaacuugucagacacccaagggugcuauaaacaccagccucccauuucagaauauacauccgaucacaauuggaaaauguccaaaauauguaaaaagcacaaaauugagacuggccacaggauugaggaaugucccgucuauucaaucuagaggccuauuuggggccauugccgguuucauugaagggggguggacagggaugguagauggaugguacgguuaucaccaucaaaaugagcaggggucaggauaugcagccgaccugaagagcacacagaaugccauugacgagauuacuaacaaaguaaauucuguuauugaaaagaugaauacacaguucacagcaguagguaaagaguucaaccaccuggaaaaaagaauagagaauuuaaauaaaaagguugaugaugguuuccuggacauuuggacuuacaaugccgaacuguugguucuauuggaaaaugaaagaacuuuagacuaccacgauucaaaugugaagaacuuauaugaaaagguaagaagccaguuaaaaaacaaugccaaggaaauuggaaacggcugcuuugaauuuuaccacaaaugcgauaacacgugcauggaaagugucaaaaaugggacuuaugacuacccaaaauacucagaggaagcaaaauuaaacagagaagaaauagaugggguaaagcuggaaucaacaaggauuuaccagauuuuggcgaucuauucaacugucgccaguucauugguacugguagucucccugggggcaaucaguuucuggaugugcucuaaugggucucuacaguguagaauauguauuuaa

SEQ ID NO: 35856 - RNA, 1701 nt, Artificial Sequence
  derived and/or modified CDS sequence (wt) from hemagglutinin__InfluenzaA__ACZ96319
augaaggcaauacuaguaguucugcuauauacauuugcaaccgcaaaugcagacacauuauguauagguuaucaugcgaacaauucaacagacacuguagacacaguacuagaaaagaauguaacaguaacacacucuguuaaccuucuagaagacaagcauaacgggaaacuaugcaaacuaagagggguagccccauugcauuuggguauauguaacauugcuggcuggauccugggaaauccagagugugaaucacucuccacagcaagcucaugguccuacauuguggaaacaucuaguucagacaauggaacguguuacccaggagauuucaucgauuaugaggagcuaagagagcaauugagcucagugucaucauuugaaagguuugagauauuccccaagacaaguucauggcccaaucaugacucgaacaaagguguaacggcagcauguccucaugcuggagcaaaaagcuucuacaaaaauuuaauauggcuaguuaaaaaaggaaauucauacccaaagcucagcaaauccuacauuaaugauaaagggaaagaaguccucgugcuauggggcauucaccauccaucuacuagugcugaccaacaaagucucuaucagaaugcagaugcauauguuuuuguggggacaucaagauacagcaagaaguucaagccggaaauagcaauaagacccaaagugagggaucaagaagggagaaugaacuauuacuggacacuaguagagccgggagacaaaauaacauucgaagcaacuggaaaucuagugguaccgagauaugcauucgcaauggaaagaaaugcuggaucugguauuaucauuucagauacaccaguccacgauugcaauacaacuugucagacacccaagggugcuauaaacaccagccucccauuucagaauauacauccgaucacaauuggaaaauguccaaaauauguaaaaagcacaaaauugagacuggccacaggauugaggaaugucccgucuauucaaucuagaggccuauuuggggccauugccgguuucauugaagggggguggacagggaugguagauggaugguacgguuaucaccaucaaaaugagcaggggucaggauaugcagccgaccugaagagcacacagaaugccauugacgagauuacuaacaaaguaaauucuguuauugaaaagaugaauacacaguucacagcaguagguaaagaguucaaccaccuggaaaaaagaauagagaauuuaaauaaaaaaguugaugaugguuuccuggacauuuggacuuacaaugccgaacuguugguucuauuggaaaaugaaagaacuuuggacuaccacgauucaaaugugaagaacuuauaugaaaagguaagaagccaguuaaaaaacaaugccaaggaaauuggaaacggcugcuuugaauuuuaccacaaaugcgauaacacgugcauggaaagugucaaaaaugggacuuaugacuacccaaaauacucagaggaagcaaaauuaaacagagaagaaauagaugggguaaagcuggaaucaacaaggauuuaccagauuuuggcgaucuauucaacugucgccaguucauugguacugguagucucccugggggcaaucaguuucuggaugugcucuaaugggucucuacaguguagaauauguauuuaa

SEQ ID NO: 35857 - RNA, 1701 nt, Artificial Sequence; identical to SEQ ID NO: 35856
  derived and/or modified CDS sequence (wt) from hemagglutinin__InfluenzaA__ACZ96329

SEQ ID NO: 35858 - RNA, 1701 nt, Artificial Sequence
  derived and/or modified CDS sequence (wt) from hemagglutinin__InfluenzaA__ACZ96339
augaaggcaauacuaguaguucugcuauauacauuugcaaccgcaaaugcagacacauuauguauagguuaucaugcgaacaauucaacagacacuguagacacaguacuagaaaagaauguaacaguaacacacucuguuaaccuucuagaagacaagcauaacgggaaacuaugcaaacuaagagggguagccccauugcauuuggguaaauguaacauugcuggcuggauccugggaaauccagagugugaaucacucuccacagcaagcucaugguccuacauuguggaaacaucuaguucagacaauggaacguguuacccaggagauuucaucgauuaugaggagcuaagagagcaauugagcucagugucaucauuugaaagguuugagauauuccccaagacaaguucauggcccaaucaugacucgaacaaagguguaacggcagcauguccucaugcuggagcaaaaagcuucuacaaaaauuuaauauggcuaguuaaaaaaggaaauucauacccaaagcucagcaaauccuacaucaaugauaaagggaaagaaguccucgugcuauggggcauucaccauccaucuacuagugcugaccaacaaagucucuaucagaaugcagauucauauguuuuuguggggacaucaagauacagcaagaaguucaagccggaaauagcaauaagacccaaagugagggaucaagaagggagaaugaacuauuacuggacacuaguagagccgggagacaaaauaacauucgaagcaacuggaaaucuagugguaccgagauaugcauucgcaauggaaagaaaugcuggaucugguauuaucauuucagauacaccaguccacgauugcaauacaacuugucagacacccgagggugcuauaaacaccagccucccauuucagaauauacauccgaucacaauuggaaaauguccaaaauauguaaaaagcacaaaauugagacuggcaacaggauugaggaauguuccgucuauucaaucuagaggccuauuuggggccauugccgguuucauugaagggggguggacagggaugguagauggaugguacgguuaucaccaucaaaaugagcaggggucaggauaugcagccgaccugaagagcacacagaaugccauugacgagauuacuaacaaaguaaauucuguuauuaaaaagaugaauacacaguucacagcaguagguaaagaguucaaccaccuggaaaaaagaauagagaauuuaaauaaaaaaguugaugaugguuuccuggacauuuggacuuacaaugccgaacuguugguucuauuggaaaaugaaagaacuuuggacuaccacgauucaaaugugaagaacuuauaugaaaagguaagaagccaguuaaaaaacaaugccaaggaaauuggaaacggcugcuuugaauuuuaccacaaaugcgauaacacgugcauggaaagugucaaaaaugggacuuaugacuacccaaaauacucagaggaagcaaaauuaaacagagaagaaauagaugggguaaagcuggaaucaacaaggauuuaccagauuuuggcgaucuauucaacugucgccaguucauugguacugguagucucccugggggcaaucaguuucuggaugugcucuaaugggucucuacaguguagaauauguauuuaa

SEQ ID NO: 35859 - RNA, 1701 nt, Artificial Sequence
  derived and/or modified CDS sequence (wt) from hemagglutinin__InfluenzaA__ACZ96349
augaaggcaauacuaguaguucugcuauauacauuugcaaccgcaaaugcagacacauuauguauagguuaucaugcgaacaauucaacagacacuguagacacaguacuagaaaagaauguaacaguaacacacucuguuaaccuucuagaagacaagcauaacgggaaacuaugcaaacuaagagggguagccccauugcauuuggguaaauguaacauugcuggcuggauccugggaaauccagagugugaaucacucuccacagcaagcucaugguccuacauuguggaaacaucaaguucagacaauggaacguguuacccaggagauuucaucgauuaugaggagcuaagagagcaauugagcucagugucaucauuugaaagguuugagauauuccccaagacaaguucauggcccaaucaugacucgaacaaagguguaacggcagcauguccucaugcuggagcaaaaagcuucuacaaaaauuuaauauggcuaguuaaaaaaggaaauucauacccaaagcucagcaaauccuacauuaaugauaaagggaaagaaguccucgugcuauggggcauucaccauccaucuacuagugcugaccaacaaagucucuaucagaaugcagaugcauauguuuuuguggggacaucaagauacagcaagaaguucaagccggaaauagcaauaagacccaaagugagggaucaagaagggagaaugaacuauuacuggacacuaguagagccgggagacaaaauaacauucgaagcaacuggaaaucuagugguaccgagauaugcauucgcaauggaaagaaaugcuggaucugguauuaucauuucagauacaccaguccacgauugcaauacaacuugucagacacccaagggugcuauaaacaccagccucccauuucagaauauacauccgaucacaauuggaaaauguccaaaauauguaaaaagcacaaaauugagacuggccacaggauugaggaaugucccgucuauucaaucuagaggccuauuuggggccauugccgguuucauugaagggggguggacagggaugguagauggaugguacgguuaucaccaucaaaaugagcaggggucaggauaugcagccgaccugaagagcacacagaaugccauugacgagauuacuaacaaaguaaauucuguuauugaaaagaugaauacacaguucacagcaguagguaaagaguucaaccaccuggaaaaaagaauagagaauuuaaauaaaaaaguugaugaugguuuccuggacauuuggacuuacaaugccgaacuguugguucuauuggaaaaugaaagaacuuuggacuaccacgauucaaaugugaagaacuuauaugaaaagguaagaagccaguuaaaaaacaaugccaaggaaauuggaaacggcugcuuugaauuuuaccacaaaugcgauaacacgugcauggaaagugucaaaaaugggacuuaugacuacccaaaauacucagaggaagcaaaauuaaacagagaagaaauagaugggguaaagcuggaaucaacaaggauuuaccagauuuuggcgaucuauucaacugucgccaguucauugguacugguagucucccugggggcaaucaguuucuggaugugcucuaaugggucucuacaguguagaauauguauuuaa

SEQ ID NO: 35860 - RNA, 1701 nt, Artificial Sequence; identical to SEQ ID NO: 35856
  derived and/or modified CDS sequence (wt) from hemagglutinin__InfluenzaA__ACZ96359

SEQ ID NO: 35861 - RNA, 1701 nt, Artificial Sequence
  derived and/or modified CDS sequence (wt) from hemagglutinin__InfluenzaA__ACZ96372
augaaggcaauacuaguaguucugcuauauacauuugcaaccgcaaaugcagacacauuauguauagguuaucaugcgaacaauucaacagacacuguagacacaguacuagaaaagaauguaacaguaacacacucuguuaaccuucuagaagacaagcauaacgggaaacuaugcaaacuaagagggguagccccauugcauuuggguaaauguaacauugcuggcuggauccugggaaauccagagugugaaucacucuccacagcaagcucaugguccuacauuguggaaacaucuaguucagacaauggaacguguuacccaggagauuucaucgauuaugaggagcuaagagagcaauugagcucagugucaucauuugaaagguuugagauauuccccaagacaaguucauggcccaaucaugacucgaacaaagguguaacggcagcauguccucaugcuggagcaaaaagcuucuacaaaaauuuaauauggcuaguuaaaaaaggaaauucauacccaaagcucagcaaauccuacauuaaugauaaagggaaagaaguccucgugcuauggggcauucaccauccaucuacuagugcugaccagcaaagucucuaucagaaugcagaugcauauguuuuuguggggacaucaagauacagcaagaaguucaagccggaaauagcaauaagacccaaagugagggaucaagaagggagaaugaacuauuacuggacacuaguagagccgggagacaaaauaacauucgaagcaacuggaaaucuagugguaccgagauaugcauucgcaauggaaagaaaugcuggaucugguauuaucauuucagauacaccaguccacgauugcaauacaacuugucagacacccaagggugcuauaaacaccagccucccauuucagaauauacauccgaucacaauuggaaaauguccaaaauauguaaaaagcacaaaauugagacuggccacaggauugaggaaugucccgucuauucaaucuagaggcuuauuuggggccauugccgguuucauugaagggggguggacagggaugguagauggaugguacgguuaucaccaucaaaaugagcaggggucaggguaugcagccgaccugaagagcacacagaaugccauugacgagauuacuaacaaaguaaauucuguuauugaaaagaugaauacacaguucacagcaguagguaaagaguucaaccaccuggaaaaaagaauagagaauuuaaauaaaaaaguugaugaugguuuccuggacauuuggacuuacaaugccgaacuguugguucuauuggaaaaugaaagaacuuuggacuaccacgauucaaaugugaagaacuuauaugaaaagguaagaagccaguuaaaaaacaaugccaaggaaauuggaaacggcugcuuugaauuuuaccacaaaugcgauaacacgugcauggaaagugucaaaaaugggacuuaugacuacccaaaauacucagaggaagcaaaauuaaacagagaagaaauagaugggguaaagcuggaaucaacaaggauuuaccagauuuuggcgaucuauucaacugucgccaguucauugguacugguagucucccugggggcaaucaguuucuggaugugcucuaaugggucucuacaguguagaauauguauuuaa

SEQ ID NO: 35862 - RNA, 1701 nt, Artificial Sequence; identical to SEQ ID NO: 35856
  derived and/or modified CDS sequence (wt) from hemagglutinin__InfluenzaA__ACZ96382

SEQ ID NO: 35863 - RNA, 1701 nt, Artificial Sequence
  derived and/or modified CDS sequence (wt) from hemagglutinin__InfluenzaA__ACZ96392
augaaggcaauacuaguaguucugcuauauacauuugcaaccgcgaaugcagacacauuauguauagguuaucaugcgaacaauucaacagacacuguagacacaguacuagaaaagaauguaacaguaacacacucuguuaaccuucuagaagacaagcauaacgggaaauuaugcaaacuaagagggguagccccauugcauuuggguaaauguaacauugcuggcuggauccugggaaauccagagugugaaucacucuccacagcaagcucaugguccuacauuguggaaacaucuaguucagacaauggaacguguuacccaggagauuucaucgauuaugaggagcuaagagagcaauugagcucagugucaucauuugaaagauuugagauauuccccaagacaaguucauggcccaaucaugacucgaacaaagguguaacggcagcauguccucaugcuggagcaaaaagcuucuacaaaaauuuaauauggcuaguuaaaaaaggaaauucauacccaaagcucagcaaauccuacauuaaugauaaagggaaagaaguccucgugcuauggggcauucaccauccaucuacuagugcugaccaacaaagucucuaucagaaugcagaugcauauguuuuuguggggucaucaagauacagcaagaaguucaagccggaaauagcaauaagacccaaagugagggaucaagaagggagaaugaacuauuacuggacacuaguagagccgggagacaaaauaacauucgaagcaacuggaaaucuagugguaccgagauaugcauucgcaauggaaagaaaugcuggaucugguauuaucauuucagauacaccaguccacgauugcaauacaacuugucagacacccaagggugcuauaaacaccagccucccauuucagaauauacauccgaucacaauuggaaaauguccaaaauauguaaaaagcacaaaauugagacuggccacaggauugaggaaugucccgucuauucaaucuagaggccuauuuggggccauugccgguuucauugaagggggguggacagggaugguagauggaugguacgguuaucaccaucaaaaugagcaggggucaggauaugcagccgaccugaagagcacacagaaugccauugacgagauuacuaacaaaguaaauucuguuauugaaaagaugaauacacaguucacagcaguagguaaagaguucaaccaccuggaaaaaagaauagagaauuuaaauaaaaaaguugaugaugguuucuuggacauuuggacuuacaaugccgaacuguugguucuauuggaaaaugaaagaacuuuggacuaccacgauucaaaugugaagaacuuauaugaaaagguaagaagccagcuaaaaaacaaugccaaggaaauuggaaacggcugcuuugaauuuuaccacaaaugcgauaacacgugcauggaaagugucaaaaaugggacuuaugacuacccaaaauacucagaggaagcaaaauuaaacagagaagaaauagaugggguaaagcuggaaucaacaaggauuuaccagauuuuggcgaucuauucaacugucgccaguucauugguacugguagucucccugggggcaaucaguuucuggaugugcucuaaugggucucuacaguguagaauauguauuuaa

SEQ ID NO: 35864 - RNA, 1701 nt, Artificial Sequence
  derived and/or modified CDS sequence (wt) from hemagglutinin__InfluenzaA__ACZ96405
auggaggcaauacuaguaguucugcuauauacauuugcaaccgcaaaugcagacacauuauguauagguuaucaugcgaacaauucaacagacacuguagacacaguacuagaaaagaauguaacaguaacacacucuguuaaccuucuagaagacaagcauaacgggaaacuaugcaaacuaagagggguagccccauugcauuuggguaaauguaacauugcuggcuggauccugggaaauccagagugugaaucacucuccacagcaagcucaugguccuacauuguggaaacaucuaguucagacaauggaacguguuacccaggagauuucaucgauuaugaggagcuaagagagcaauugagcucagugucaucauuugaaagguuugagauauuccccaagacaaguucauggcccaaucaugacucgaacaaagguguaacggcagcauguccucaugcuggagcaaaaagcuucuacaaaaauuuaauauggcuaguuaaaaaaggaaauucauacccaaagcucagcaaauccuacauuaaugauaaagggaaagaaguccucgugcuauggggcauucaccauccaucuacuagugcugaccaacaaagucucuaucagaaugcagaugcauauguuuuuguggggucaucaagauacagcaagaaguucaagccggaaauagcaauaagacccaaagugagggaucaagaagggagaaugaacuauuacuggacacuaguagagccgggagacaaaauaacauucgaagcaacuggaaaucuagugguaccgagauaugcauucgcaauggaaagaaaugcuggaucugguauuaucauuucagauacaccaguccacgauugcaauacaacuugucagacacccaagggugcuauaaacaccagccucccauuucauaauauacauccgauuacaauuggaaaaugucccaaauauguaaaaagcacaaaauugagacuggccacaggauugaggaaugucccgucuauucaaucuagaggccuauuuggggccauugccgguuucauugaagggggguggacagggaugguagauggaugguacgguuaucaccaucaaaaugagcaggggucaggauaugcagccgaccugaagagcacacagaaugccauugacgagauuacuaacaaaguaaauucuguuauugaaaagaugaauacacaguucacagcaguagguaaagaguucaaccaccuggaaaaaagaauagagaauuuaaauaaaaaaguugaugaugguuuccuggacauuuggacuuacaaugccgaacuguugguucuauuggaaaaugaaagaacuuuggacuaccacgauucaaaugugaagaacuuauaugaaaagguaagaagccaguuaaaaaacaaugccaaggaaauuggaaacggcugcuuugaauuuuaccacaaaugcgauaacacgugcauggaaagugucaaaaaugggacuuaugacuacccaaaauacucagaggaagcaaaauuaaacagagaagaaauagaugggguaaagcuggaaucaacaaggauuuaccagauuuuggcgaucuauucaacugucgccaguucauugguacugguagucucccugggggcaaucaguuucuggaugugcucuaaugggucucuacaguguagaauauguauuuaa

SEQ ID NO: 35865 - RNA, 1701 nt, Artificial Sequence
  derived and/or modified CDS sequence (wt) from hemagglutinin__InfluenzaA__ACZ96415
augaaggcaauacuaguaguucugcuauauacauuugcaaccgcaaaugcagacacauuauguauagguuaucaugcgaacaauucaacagacacuguagacacaguacuagaaaagaauguaacaguaacacacucuguuaaccuucuagaagacaagcauaacgggaaauuaugcaaacuaagagggguagccccauugcauuuggguaaauguaacauugcuggcuggauccugggaaauccagagugugaaucacucuccacagcaagcucaugguccuacauuguggaaacaucuaguucagacaauggaacguguuacccaggagauuucaucgauuaugaggagcuaagagagcaauugagcucagugucaucauuugaaagguuugagauauuccccaagacaaguucauggcccaaucaugacucgaacaaagguguaacggcagcauguccucaugcuggagcaaaaagcuucuacaaaaauuuaauauggcuaguuaaaaaaggaaauucauacccaaagcucagcaaauccuacauuaaugauaaagggaaagaaguccucgugcuauggggcauucaccauccaucuacuagugcugaccaacaaagucucuaucagaaugcagaugcauauguuuuuguggggacaucaagauacagcaagaaguucaagccggaaauagcaauaagacccaaagugagggaucaagaagggagaaugaacuauuacuggacacuaguagagccgggagacaaaauaacauucgaagcaacuggaaaucuagugguaccgagauaugcauucgcaauggaaagaaaugcuggaucugguauuaucauuucagauacaccaguccacgauugcaauacaacuugucagacacccaagggugcuauaaacaccagccucccauuucagaauauacauccgaucacaauuggaaaauguccaaaauauguaaaaagcacaaaauugagacuggccacaggauugaggaaugucccgucuauucaaucuagaggccuauuuggggccauugccgguuucauugaagggggguggacagggaugguagauggaugguacgguuaucaccaucaaaaugagcaggggucaggauaugcagccgaccugaagagcacacagaaugccauugacgagauuacuaacaaaguaaauucuguuauugaaaagaugaauacacaguucacagcaguagguaaagaguucaaccaccuggaaaaaagaauagagaauuuaaauaaaaagguugaugaugguuuccuagacauuuggacuuacaaugccgaacuguugguucuauuggaaaaugaaagaacuuuggacuaccacgauucaaaugugaagaacuuauaugaaaagguaagaagccaguuaaaaaacaaugccaaggaaauuggaaacggcugcuuugaauuuuaccacaaaugcgauaacacgugcauggaaagugucaaaaaugggacuuaugacuacccaaaauacucagaggaagcaaaauuaaacagagaagaaauagaugggguaaagcuggaaucaacaaggauuuaccagauuuuggcgaucuauucaacugucgccaguucauugguacugguagucucccugggggcaaucaguuucuggaugugcucuaaugggucucuacaguguagaauauguauuuaa

SEQ ID NO: 35866 - RNA, 1701 nt, Artificial Sequence
  derived and/or modified CDS sequence (wt) from hemagglutinin__InfluenzaA__ACZ96425
augaaggcaauacuaguaguucugcuauauacauuugcaaccgcaaaugcagacacauuauguauagguuaucaugcgaacaauucaacagacacuguagacacaguacuagaaaagaauguaacaguaacacacucuguuaaccuucuagaagacaagcauaacgggaaacuaugcaaacuaagagggguagccccauugcauuuggguaaauguaacauugcuggcuggauccugggaaauccagagugugaaucacucuccacagcaagcucaugguccuacauuguggaaacaucuaguucagacaauggaacguguuacccaggagauuucaucgauuaugaggagcuaagagagcaauugagcucagugucaucauuugaaagguuugagauauuccccaagacaaguucauggcccaaucaugacucgaacaaagguguaacggcagcauguccucaugcuggagcaaaaagcuucuacaaaaauuuaauauggcuaguuaaaaaaggaaauucauacccaaagcucagcaaauccuacauuaaugauaaagggaaagaaguccucgugcuauggggcauucaccauccaucuacuagugcugaccaacaaagucucuaucagaaugcagaugcauauguuuuuguggggacaucaagauacagcaagaaguucaagccggaaauagcaauaagacccaaagugagggaucaggaagggagaaugaacuauuacuggacacuaguagagccgggagacaaaauaacauucgaagcaacuggaaaucuagugguaccgagauaugcauucgcaauggaaagaaaugcuggaucugguauuaucauuucagauacaccaguccacgauugcaauacaacuugucagacacccaagggugcuauaaacaccagccucccauuucagaauauacauccgaucacaauuggaaaauguccaaaauauguaaaaagcacaaaauugagacuggccacaggauugaggaaugucccgucuauucaaucuagaggccuauuuggggccauugccgguuucauugaagggggguggacagggaugguagauggaugguacgguuaucaccaucaaaaugagcaggggucaggauaugcagccgaccugaagagcacacagaaugccauugacgagauuacuaacaaaguaaauucuguuauugaaaagaugaauacacaguucacagcaguagguaaagaguucaaccaccuggaaaaaagaauagagaauuuaaauaaaaaaguugaugaugguuuccuggacauuuggacuuacaaugccgaacuguugguucuauuggaaaaugaaagaacuuuggacuaccacgauucaaaugugaagaacuuauaugaaaagguaagaagccaguuaaaaaacaaugccaaggaaauuggaaacggcugcuuugaauuuuaccacaaaugcgauaacacgugcauggaaagugucaaaaaugggacuuaugacuacccaaaauacucagaggaagcaaaauuaaacagagaagaaauagaugggguaaagcuggaaucaacaaggauuuaccagauuuuggcgaucuauucaacugucgccaguucauugguacugguagucucccugggggcaaucaguuucuggaugugcucuaaugggucucuacaguguagaauauguauuuaa

SEQ ID NO: 35867 - RNA, 1701 nt, Artificial Sequence
  derived and/or modified CDS sequence (wt) from hemagglutinin__InfluenzaA__ACZ96435
augaaggcaauacuaguaguucugcuauauacauuugcaaccgcaaaugcagacacauuauguauagguuaucaugcgaacaauucaacagacacuguagacacaguacuagaaaagaauguaacaguaacacacucuguuaaccuucuagaagacaagcauaacgggaaacuaugcaaacuaagagggguagcccaauugcauuuggguaaauguaacauugcuggcuggauccugggaaauccagagugugaaucacucuccacagcaagcucaugguccuacauuguggaaacaucuaguucagacaauggaacguguuacccaggagauuucaucgauuaugaggagcuaagagagcaauugagcucagugucaucauuugaaagguuugagauauuccccaagacaaguucauggcccaaucaugacucgaacaaagguguaacggcagcauguccucaugcuggagcaaaaagcuucuacaaaaauuuaauauggcuaguuaaaaaaggaaauucauacccaaagcucagcaaauccuacauuaaugauaaagggaaagaaguccucgugcuauggggcauucaccauccaucuacuagugcugaccaacaaagucucuaucagaaugcagaugcauauguuuuuguggggacaucaagauacagcaagaaguucaagccggaaauagcaauaagacccaaagugagggaucaagaagggagaaugaacuauuacuggacacuaguagagccgggagacaaaauaacauucgaagcaacuggaaaucuaaugguaccgagauaugcauucgcaauggaaagaaaugcuggaucugguauuaucauuucagauacaccaguccacgauugcaauacaacuugucagacacccaagggugcuauaaacaccagccucccauuucagaauauacauccgaucacaauuggaaaauguccaaaauauguaaaaagcacaaaauugagacuggccacaggauugaggaaugucccgucuauucaaucuagaggccuauuuggggccauugccgguuucauugaagggggguggacagggaugguagauggaugguacgguuaucaccaucaaaaugagcaggggucaggauaugcagccgaccugaagagcacacagaaugccauugacgagauuacuaacaaaguaaauucuguuauugaaaagaugaauacacaguucacagcaguagguaaagaguucaaccaccuggaaaaaagaauagagaauuuaaauaaaaagguugaugaugguuuccuggacauuuggacuuacaaugccgaacuguugguucuauuggaaaaugaaagaacuuuggacuaccacgauucaaaugugaagaacuuauaugaaaagguaagaagccaguuaaaaaacaaugccaaggaaauuggaaacggcugcuuugaauuuuaccacaaaugcgauaacacgugcauggaaagugucaaaaaugggacuuaugacuacccaaaauacucagaggaagcaaaauuaaacagagaagaaauagaugggguaaagcuggaaucaacaaggauuuaccagauuuuggcgaucuauucaacugucgccaguucauugguacugguagucucccugggggcaaucaguuucuggaugugcucuaaugggucucuacaguguagaauauguauuuaa

SEQ ID NO: 35868 - RNA, 1701 nt, Artificial Sequence
  derived and/or modified CDS sequence (wt) from hemagglutinin__InfluenzaA__ACZ96445
augaaggcaauacuaguaguucugcuauauacauuugcaaccgcaaaugcagacacauuauguauagguuaucaugcgaacaauucaacagacacuguagacacaguacuagaaaagaauguaacaguaacacacucuguuaaccuucuagaagacaagcauaacgggaaacuaugcaaacuaagagggguagccccauugcauuuggguaaauguaacauugcuggcuggauccugggaaauccagagugugaaucacucuccacagcaagcucaugguccuacauuguggaaacaucuaguucagacaauggaacguguuacccaggagauuucaucgauuaugaggagcuaagagagcaauugagcucagugucaucauuugaaagguuugagauauuccccaagacaaguucauggcccaaucaugacucgaacaaagguguaacagcagcauguccucaugcuggagcaaaaagcuucuacaaaaauuuaauauggcuaguuaaaaaaggaaauucauacccaaagcucagcaaauccuacauuaaugauaaagggaaagaaguccucgugcuauggggcauucaccauccaucuacuagugcugaccaacaaagucucuaucagaaugcagaugcauauguuuuuguggggacaucaagauacagcaagaaauucaagccggaaauagcaauaagacccaaagugagggaucaagaagggagaaugaacuauuacuggacacuaguagagccgggagacaaaauaacauucgaagcaacuggaaaucuagugguaccgagauaugcauucgcaauggagagaaaugcuggaucugguauuaucauuucagauacaccaguccacgauugcaauacaacuugucagacacccaagggugcuauaaacaccagccucccauuucagaauauacauccgaucacaauuggaaaauguccaaaauauguaaaaagcacaaaauugagacuggccacaggauugaggaaugucccgucuauucaaucuagaggccuauuuggggccauugccgguuucauugaagggggguggacagggaugguagauggaugguacgguuaucaccaucaaaaugagcaggggucaggauaugcagccgaccugaagagcacacagaaugccauugacgagauuacuaacaaaguaaauucuguuauugaaaagaugaauacacaguucacagcaguagguaaagaguucaaccaccuggaaaaaagaauagagaauuuaaauaaaaaaguugaugaugguuuccuggacauuuggacuuacaaugccgaacuguugguucuauuggaaaaugaaagaacuuuggacuaccacgauucaaaugugaagaacuuauaugaaaagguaagaagccaguuaaaaaacaaugccaaggaaauuggaaacggcugcuuugaauuuuaccacaaaugcgauaacacgugcauggaaagugucaaaaaugggacuuaugacuacccaaaauacucagaggaagcaaaauuaaacagagaagaaauagaugggguaaagcuggaaucaacaaggauuuaccagauuuuggcgaucuauucaacugucgccaguucauugguacugguagucucccugggggcaaucaguuucuggaugugcucuaaugggucucuacaguguagaauauguauuuaa

SEQ ID NO: 35869 - RNA, 1701 nt, Artificial Sequence
  derived and/or modified CDS sequence (wt) from hemagglutinin__InfluenzaA__ACZ96476
augaaggcaauacuaguaguucugcuauauacauuugcaaccgcauaugcagacacauuauguauagguuaucaugcgaacaauucaacagacacuguagacacaguacuagaaaagaauguaacaguaacacacucuguuaaccuucuagaagacaagcauaacgggaaacuaugcaaacuaagagggguagccccauugcauuuggguaaauguaacauugcuggcuggauccugggaaacccagagugugaaucacucuccacagcaagcucaugguccuacauuguggaaacaucuaguucagacaauggaacguguuacccaggagauuucaucgauuaugaggagcuaagagagcaauugagcucagugucaucauuugaaagguuugagauauuccccaagacaaguucauggcccaaucaugacucgaacaaagguguaacggcagcauguccucaugcuggagcaaaaagcuucuacaaaaauuuaauauggcuaguuaaaaaaggaaauucauacccaaagcucagcaaauccuacauuaaugauaaagggaaagaaguccucgugcuauggggcauucaccauccaucuacuagugcugaccaacaaagucucuaucagaaugcagaugcauauguuuuuguggggacaucaagauacagcaagaaguucaagccggaaauagcaauaagacccaaagugagggaucaagaagggagaaugaacuauuacuggacacuaguagagccgggagacaaaauaacauucgaagcaacuggaaaucuagugguaccgagauaugcauucgcaauggaaagaaaugcuggaucugguauuaucauuucagauacaccaguccacgauugcaauacaacuugucagacacccaagggugcuauaaacaccagccucccauuucagaauauacauccgaucacaauuggaaaauguccaaaauauguaaaaagcacaaaauugagacuggccacaggauugaggaaugucccgucuauucaaucuagaggccuauuuggggccauugccgguuucauugaagggggguggacagggaugguagauggaugguacgguuaucaccaucaaaaugagcaggggucaggauaugcagccgaccugaagagcacacagaaugccauugacgagauuacuaacaaaguaaauucuguuauugaaaagaugaauacacaguucacagcaguagguaaagaguucaaccaccuggaaaaaagaauagagaauuuaaauaaaaaaguugaugaugguuuccuggacauuuggacuuacaaugccgaacuguugguucuauuggaaaaugaaagaacuuuggacuaccacgauucaaaugugaagaacuuauaugaaaagguaagaagccaguuaaaaaacaaugccaaggaaauuggaaacggcugcuuugaauuuuaccacaaaugcgauaacacgugcauggaaagugucaaaaaugggacuuaugacuacccaaaauacucagaggaagcaaaauuaaacagagaagaaauagaugggguaaagcuggaaucaacaaggauuuaccagauuuuggcgaucuauucaacugucgccaguucauugguacugguagucucccugggggcaaucaguuucuggaugugcucuaaugggucucuacaguguagaauauguauuuaa

SEQ ID NO: 35870 - RNA, 1701 nt, Artificial Sequence; identical to SEQ ID NO: 35833
  derived and/or modified CDS sequence (wt) from hemagglutinin__InfluenzaA__ACZ96496

SEQ ID NO: 35871 - RNA, 1701 nt, Artificial Sequence
  derived and/or modified CDS sequence (wt) from hemagglutinin__InfluenzaA__ACZ96506
augaaggcaauacuaguaguucugcuauauacauuugcaaccgcaaaugcagacacauuauguauagguuaucaugcgaacaauucaacagacacuguagacacaguacuagaaaagaauguaacaguaacacacucuguuaaccuucuagaagacaagcauaacgggaaacuaugcaaacuaagagggguagccccauugcauuuggguaaauguaacauugcuggcuggauccugggaaauccagagugugaaucacucuccacagcaagcucaugguccuacauuguggaaacaucuaguucagacaauggaacguguuacccaggagauuucaucgauuaugaggagcuaagagagcaauugagcucagugucaucauuugaaagguuugagauauuccccaagacaaguucauggcccaaucaugacucgaacaaagguguaacggcagcauguccucaugcuggagcaaaaagcuucuacaaaaauuuaauauggcuaguuaaaaaaggaaauucauacccaaagcucagcaaauccuacauuaaugauaaagggaaagaaguccucgugcuauggggcauucaccauccaucuacuagugcugaccaacaaagucucuaucagaaugcagaugcauauguuuuuguggggacaucaagauacagcaagaaguucaagccggaaauagcaauaagacccaaagugagggaucaagaagggagaaugaacuauuacuggacacuaguagagccgggagacaaaauaacauucgaagcaacuggaaaucuagugguaccgagauaugcauucgcaauggaaagaaaugcuggaucugguauuaucauuucagauacaccaguccacgauugcaauacaacuugucagacacccaagggugcuauaaacaccagccucccauuucagaauauacauccgaucacaauuggaaaauguccaaaauauguaaaaagcacaaaauugagacuggccacaggauugaggaaugucccgucuauucaaucuagaggccuauuuggggccauugccgguuucauugaagggggguggacagggaugguagauggaugguacgguuaucaccaucaaaaugagcaggggucaggauaugcagccgaccugaagagcacacagaaugccauugacgagauuacuaacaaaguaaauucuguuauugaaaagaugaacacacaguucacagcaguagguaaagaguucaaccaccuggaaaaaagaauagagaauuuaaauaaaaaaguugaugaugguuuccuggacauuuggacuuacaaugccgaacuguugguucuauuggaaaaugaaagaacuuuggacuaccacgauucaaaugugaagaacuuauaugaaaagguaagaagccaguuaaaaaacaaugccaaggaaauuggaaacggcugcuuugaauuuuaccacaaaugcgauaacacgugcauggaaagugucaaaaaugggacuuaugacuacccaaaauacucagaggaagcaaaauuaaacagagaagaaauagaugggguaaagcuggaaucaacaaggauuuaccagauuuuggcgaucuauucaacugucgccaguucauugguacugguagucucccugggggcaaucaguuucuggaugugcucuaaugggucucuacaguguagaauauguauuuaa

SEQ ID NO: 35872 - RNA, 1701 nt, Artificial Sequence; identical to SEQ ID NO: 35833
  derived and/or modified CDS sequence (wt) from hemagglutinin__InfluenzaA__ACZ96526

SEQ ID NO: 35873 - RNA, 1701 nt, Artificial Sequence
  derived and/or modified CDS sequence (wt) from hemagglutinin__InfluenzaA__ACZ96536
augaaggcaauacuaguaguucugcuauauacauuugcaaccgcaaaugcagacacauuauguauagguuaucaugcgaacaauucaacagacacuguagacacaguacuagaaaagaauguaacaguaacacacucuguuaacauucuagaagacaagcauaacgggaaacuaugcaaacuaaaagggguagccccauugcauuuggguaaauguaacauugcuggcuggauccugggaaauccagagugugaaucacucuccacagcaagcucaugguccuacauuguggaaacaucuaguucagacaauggaacguguuacccaggagauuucaucgauuaugaggagcuaagagagcaauugagcucagugucaucauuugaaagguuugagauauuccccaagacaaguucauggcccaaucaugacucgaacaaagguguaacggcagcauguccucaugcuggagcaaaaagcuucuacaaaaauuuaauauggcuaguuaaaaaaggaaauucauacccaaagcucagcaaauccuacauuaaugauaaagggaaagaaguccucgugcuauggggcauucaccauccaucuacuagugcugaccaacaaagucucuaucagaaugcagauacauauguuuuuguggggucaucaaaauacagcaagaaguucaagccggaaauagcaauaagacccaaagugagggaucaagaagggagaaugaacuauuacuggacacuaguagagccgggagacaaaauaacauucgaagcaacuggaaaucuagugguaccgagauaugcauucgcaauggaaagaaaugcuggaucugguauuaucauuucagauacaccaguccacgauugcaauacaacuugucagacacccaagggugcuauaaacaccagccucccauuucagaauauacauccgaucacaauuggaaaauguccaaaacauguaaaaagcacaaaauugagacuggccacaggauugaggaaugucccgucuauucaaucuagaggccuauuuggggccauugccgguuucauugaagggggguggacagggaugguagauggaugguacgguuaucaccaucaaaaugagcaggggucaggauaugcagccgaccugaagagcacacagaaugccauugacgagauuacuaacaaaguaaauucuguuauugaaaagaugaauacacaguucacagcaguagguaaagaguucaaccaccuggaaaaaagaauagagaauuuaaauaaaaaaguugaugaugguuuccuggacauuuggacuuacaaugccgaacuguugguucuauuggaaaaugaaagaacuuuggacuaccacgauucaaaugugaagaacuuauaugaaaagguaagaagccagcuaaaaaacaaugccaaagaaauuggaaacggcugcuuugaauuuuaccacaaaugcgauaacacgugcauggaaagugucaaaaaugggacuuaugacuacccaaaauacucagaggaagcaaaauuaaacagagaagaaauagaugggguaaagcuggaaucaacaaggauuuaccagauuuuggcgaucuauucaacugucgccaguucauugguacugguagucucccugggggcaaucaguuucuggaugugcucuaaugggucucuacaauguagaauauguauuuaa

SEQ ID NO: 35874 - RNA, 1701 nt, Artificial Sequence
  derived and/or modified CDS sequence (wt) from hemagglutinin__InfluenzaA__ACZ96549
augaaggcaauacuaguaguucugcuauauacauuugcaaccgcaaaugcagacacauuauguauagguuaucaugcgaacaauucaacagacacuguagacacaguacuagaaaagaauguaacaguaacacacucuguuaaccuucuagaagacaagcauaacgggaaacuaugcaaacuaagagggguagccccauugcauuuggguaaauguaacauugcuggcuggauccugggaaauccagagugugaaucacucuccacagcaagcucaugguccuacauuguggaaacaucuaguucagacaauggaacguguuacccaggagauuucaucgauuaugaggagcuaagagagcaauugagcucagugucaucauuugaaagguuugagauauuccccaagacaaguucauggcccaaucaugacucgaacaaagguguaacggcagcauguccucaugcuggagcaaaaagcuucuacaaaaauuuaauauggcuaguuaaaaaaggaaauucauacccaaagcucagcaaauccuacauuaaugauaaagggaaagaaguccucgugcuauggggcauucaccauccaucuacuagugcugaccagcaaagucucuaucagaaugcagaugcauauguuuuuguggggacaucaagauacagcaagaaguucaagccggaaauagcaauaagacccaaagugagggaucaagaagggagaaugaacuauuacuggacacuaguagagccgggagacaaaauaacauucgaagcaacuggaaaucuagugguaccgagauaugcauucgcaauggaaagaaaugcuggaucugguauuaucauuucagauacaccaguccacgauugcaauacaacuugucagacacccaagggugcuauaaacaccagccucccauuucagaauauacauccgaucacaauuggaaaauguccaaaauauguaaaaagcacaaaauugagacuggccacaggauugaggaaugucccgucuauucaaucuagaggccuauuuggggccauugccgguuucauugaagggggguggacagggaugguagauggaugguacgguuaucaccaucaaaaugagcaggggucaggguaugcagccgaccugaagagcacacagaaugccauugacgagauuacuaacaaaguaaauucuguuauugaaaagaugaauacacaguucacagcaguagguaaagaguucaaccaccuggaaaaaagaauagagaauuuaaauaaaaaaguugaugaugguuuccuggacauuuggacuuacaaugccgaacuguugguucuauuggaaaaugaaagaacuuuggacuaccacgauucaaaugugaagaacuuauaugaaaagguaagaagccaguuaaaaaacaaugccaaggaaauuggaaacggcugcuuugaauuuuaccacaaaugcgauaacacgugcauggaaagugucaaaaaugggacuuaugacuacccaaaauacucagaggaagcaaaauuaaacagagaagaaauagaugggguaaagcuggaaucaacaaggauuuaccagauuuuggcgaucuauucaacugucgccaguucauugguacugguagucucccugggggcaaucaguuucuggaugugcucuaaugggucucuacaguguagaauauguauuuaa

SEQ ID NO: 35875 - RNA, 1701 nt, Artificial Sequence
  derived and/or modified CDS sequence (wt) from hemagglutinin__InfluenzaA__ACZ96559
augaaggcaauacuaguaguucugcuauauacauuugcaaccgcaaaugcagacacauuauguauagguuaucaugcgaacaauucaacagacacuguagacacaguacuagaaaagaauguaacaguaacacacucuguuaaccuucuagaagacaagcauaacgggaaacuaugcaaacuaagagggguagccccauugcauuuggguaaauguaacauugcuggcuggauccugggaaauccagagugugaaucacucuccacagcaagcucaugguccuacauuguggaaacaucuaguucagacaauggaacguguuacccaggagauuucaucaauuaugaggagcuaagagagcaauugagcucagugucaucauuugaaagguuugagauauuccccaagacaaguucauggcccaaucaugacucgaacaaagguguaacggcagcauguccucaugcuggagcaaaaagcuucuacaaaaauuuaauauggcuaguuaaaaaaggaaauucauacccaaagcucagcaaauccuacauuaaugauaaagggaaagaaguccucgugcuauggggcauucaccauccaucuacuagugcugaccaacaaagucucuaucagaaugcagaugcauauguuuuuguggggacaucaagauacagcaagaaguucaagccggaaauagcaauaagacccaaagugagggaucaagaagggagaaugaacuauuacuggacacuaguagagccgggagacaaaauaacauucgaagcaacuggaaaucuagugguaccgagauaugcauucgcaauggaaagaaaugcuggaucugguauuaucauuucagauacaccaguccacgauugcaauacaacuugucagacacccaagggugcuauaaacaccagccucccauuucagaauauacauccgaucacaauuggaaaauguccaaaauauguaaaaagcacaaaauugagacuggccacaggauuaaggaaugucccgucuauucaaucuagaggccuauuuggggccauugccgguuucauugaagggggguggacagggaugguagauggaugguacgguuaucaccaucaaaaugagcaggggucaggauaugcagccgaccugaagagcacacagaaugccauugacgagauuacuaacaaaguaaauucuguuauugaaaagaugaauacacaguucacagcaguagguaaagaguucaaccaccuggaaaaaagaauagagaauuuaaauaaaaaaguugaugaugguuuccuggacauuuggacuuacaaugccgaacuguugguucuauuggaaaaugaaagaacuuuggacuaccacgauucaaaugugaagaacuuauaugaaaagguaagaagccaguuaaaaaacaaugccaaggaaauuggaaacggcugcuuugaauuuuaccacaaaugcgauaacacgugcauggaaagugucaaaaaugggacuuaugacuacccaaaauacucagaggaagcaaaauuaaacagagaagaaauagauggaguaaagcuggaaucaacaaggauuuaccagauuuuggcgaucuauucaacugucgccaguucauugguacugguagucucccugggggcaaucaguuucuggaugugcucuaaugggucucuacaguguagaauauguauuuaa

SEQ ID NO: 35876 - RNA, 1701 nt, Artificial Sequence
  derived and/or modified CDS sequence (wt) from hemagglutinin__InfluenzaA__ACZ96569
auggaggcaauacuaguaguucugcuauauacauuugcaaccgcaaaugcagacacauuauguauagguuaucaugcgaacaauucaacagacacuguagacacaguacuagaaaagaauguaacaguaacacacucuguuaaccuucuagaagacaagcauaacgggaaacuaugcaaacuaagagggguagccccauugcauuuagguaaauguaacauugcuggcuggauccugggaaauccagagugugaaucacucuccacagcaagcucaugguccuacauuguggaaacaucuaguucagacaauggaacguguuacccaggagauuucaucaauuaugaggagcuaagagagcaauugagcucagugucaucauuugaaagguuugagauauuccccaagacaaguucauggcccaaucaugacucgaacaaagguguaacggcagcauguccucaugcuggagcaaaaagcuucuacaaaaauuuaauauggcuaguuaaaaaaggaaauucauacccaaagcucagcaaauccuacauuaaugauaaagggaaagaaguccucgugcuauggggcauucaccauccaucuacuagugcugaccaacaaagucucuaucagaaugcagaugcauauguuuuuguggggucaucaagauacagcaagaaguucaagccggaaauagcaauaagacccaaagugagggaucaagaagggagaaugaacuauuacuggacacuaguagagccgggagacaaaauaacauucgaagcaacuggaaaucuagugguaccgagauaugcauucgcaauggaaagaaaugcuggaucugguauuaucauuucagauacaccaguccacgauugcaauacaacuugucagacacccaagggugcuauaaacaccagccucccauuucauaauauacauccgaucacaauuggaaaauguccaaaauauguaaaaagcacaaaauugagacuggccacaggauugaggaaugucccgucuauucaaucuagaggccuauuuggggccauugccgguuucauugaagggggguggacagggaugguagauggaugguacgguuaucaccaucaaaaugagcaggggucaggauaugcagccgaccugaagagcacacagaaugccauugacgagauuacuaacaaaguaaauucuguuauugaaaagaugaauacacaguucacagcaguagguaaagaguucaaccaccuggaaaaaagaauagagaauuuaaauaaaaaaguugaugaugguuuccuggacauuuggacuuacaaugccgaacuguugguucuauuggaaaaugaaagaacuuuggacuaccacgauucaaaugugaagaacuuauaugaaaagguaagaagccaguuaaaaaacaaugccaaggaaauuggaaacggcugcuuugaauuuuaccacaaaugcgauaacacgugcauggaaagugucaaaaaugggacuuaugacuacccaaaauacucagaggaagcaaaauuaaacagagaagaaauagaugggguaaagcuggaaucaacaaggauuuaccagauuuuggcgaucuauucaacugucgccaguucauugguacugguagucucccugggggcaaucaguuucuggaugugcucuaaugggucucuacaguguagaauauguauuuaa

SEQ ID NO: 35877 - RNA, 1701 nt, Artificial Sequence
  derived and/or modified CDS sequence (wt) from hemagglutinin__InfluenzaA__ACZ96579
auggaggcaauacuaguaguucugcuauauacauuugcaaccgcaaaugcagacacauuauguauagguuaucaugcgaacaauucaacagacacuguagacacaguacuagaaaagaauguaacaguaacacacucuguuaaccuucuagaagacaagcauaacgggaagcuaugcaaacuaagagggguagccccauugcauuuggguaaauguaacauugcuggcuggauccugggaaauccagagugugaaucacucuccacagcaagcucaugguccuacauuguggaaacaucuaguucagacaauggaacguguuacccaggagauuucaucgauuaugaggagcuaagagagcaauugagcucagugucaucauuugaaagguuugagauauuccccaagacaaguucauggcccaaucaugacucgaacaaagguguaacggcagcauguccucaugcuggagcaaaaagcuucuacaaaaauuuaauauggcuaguuaaaaaaggaaauucauacccaaagcucagcaaauccuacauuaaugauaaagggaaagaaguccucgugcuauggggcauucaccauccaucuucuagugcugaccaacaaagucucuaucagaaugcagaugcauauguuuuuguggggucaucaagauacagcaagaaguucaagccggaaauagcaauaagacccaaagugagggaucaagaagggagaaugaacuauuacuggacacuaguagagccgggagacaaaauaacauucgaagcaacuggaaaucuagugguaccgagauaugcauucgcaauggaaagaaaugcuggaucugguauuaucauuucagauacaccaguccacgauugcaauacaacuugucagacacccaagggugcuauaaacaccagccucccauuucauaauauacauccgaucacaauuggaaaaugcccaaaauauguaaaaagcacaaaauugagacuggccacaggauugaggaaugucccgucuauucaaucuagaggccuauuuggggccauugccgguuucauugaagggggguggacagggaugguagauggaugguacgguuaucaccaucaaaaugagcaggggucaggauaugcagccgaccugaagagcacacagaaugccauugacgagauuacuaacaaaguaaauucuguuauugaaaagaugaauacacaguucacagcaguagguaaagaguucaaccaccuggaaaaaagaauagagaauuuaaauaaaaaaguugaugaugguuuccuggacauuuggacuuacaaugccgaacuguugguucuauuggaaaaugaaagaacuuuggacuaccacgauucaaaugugaagaacuuauaugaaaagguaagaagccaguuaaaaaacaaugccaaggaaauuggaaacggcugcuuugaauuuuaccacaaaugcgauaacacgugcauggaaagugucaaaaaugggacuuaugacuacccaaaauacucagaggaagcaaaauuaaacagagaagaaauagaugggguaaagcuggaaucaacaaggauuuaccagauuuuggcgaucuauucaacugucgccaguucauugguacugguagucucccugggggcaaucaguuucuggaugugcucuaaugggucucuacaguguagaauauguauuuaa

SEQ ID NO: 35878 - RNA, 1701 nt, Artificial Sequence; identical to SEQ ID NO: 35865
  derived and/or modified CDS sequence (wt) from hemagglutinin__InfluenzaA__ACZ96589

SEQ ID NO: 35879 - RNA, 1701 nt, Artificial Sequence
  derived and/or modified CDS sequence (wt) from hemagglutinin__InfluenzaA__ACZ96599
augaaggcaauacuaguaguucugcuauauacauuugcaaccgcaaaugcagacacauuauguauagguuaucaugcgaacaauucaacagacacuguagacacaguacuagaaaagaauguaacaguaacacacucuguuaaccuucuagaagacaagcauaacgggaaacuaugcaaacuaagagggguagccccauugcauuuggguaaauguaacauugcuggcuggauccugggaaauccagagugugaaucacucuccacagcaagcucaugguccuacauuguggaaacaucuaguucagacaauggaacguguuacccaggagauuucaucgauuaugaggagcuaagagagcaauugagcucagugucaucauuugaaagguuugagauauuccccaagacaaguucauggcccaaucaugacucgaacaaagguguaacggcagcauguccucaugcuggagcaaaaagcuucuacaaaaauuuaauauggcuaguuaaaaaaggaaauucauacccaaagcucagcaaauccuacauuaaugauaaagggaaagaaguccucgugcuauggggcauucaccauccaucuacuagugcugaccaacaaagucucuaucagaaugcagaugcauauguuuuuguggggacaucaagauacagcaagaaguucaagccggaaauagcaauaagacccaaagugagggaacaagaagggagaaugaacuauuacuggacacuaguagagccgggagacaaaauaacauucgaagcaacuggaaaucuagugguaccgagauaugcauucgcaauggaaagaaauacuggaucugguauuaucauuucagauacaccaguccacgauugcaauacaacuugucagacacccaagggugcuauaaacaccagccucccauuucagaauauacauucgaucacaauuggaaaauguccaaaauauguaaaaagcacaaaauugagacuggccacaggauugaggaaugucccgucuauucaaucuagaggccuauuuggggccauugccgguuucauugaagggggguggacagggaugguagauggaugguacgguuaucaccaucaaaaugagcaggggucaggauaugcagccgaccugaagagcacacagaaugccauugacgagauuacuaacaaaguaaauucuguuauugaaaagaugaauacacaguucacagcaguagguaaagaguucaaccaccuggaaaaaagaauagagaauuuaaauaaaaaaguugaugaugguuuccuggacauuuggacuuacaaugccgaacuguugguucuauuggaaaaugaaagaacuuuggacuaccacgauucaaaugugaagaacuuauaugaaaagguaagaagccaguuaaaaaacaaugccaaggaaauuggaaacggcugcuuugaauuuuaccacaaaugcgauaacacgugcauggaaagugucaaaaaugggacuuaugacuacccaaaauacucagaggaagcaaaauuaaacagagaagaaauagaugggguaaagcuggaaucaacaaggauuuaccagauuuuggcgaucuauucaacugucgccaguucauugguacugguagucucccugggggcaaucaguuucuggaugugcucuaaugggucucuacaguguagaauauguauuuaa

SEQ ID NO: 35880 - RNA, 1701 nt, Artificial Sequence
  derived and/or modified CDS sequence (wt) from hemagglutinin__InfluenzaA__ACZ96609
augaaggcaauacuaguaguucugcuauauacauuugcaaccgcaaaugcagacacauuauguauagguuaucaugcgaacaauucaacagacacuguagacacaguacuagaaaagaauguaacaguaacacacucuguuaaccuucuagaagacaagcauaacgggaaacuaugcaaacuaagagggguagccccauugcauuuggguaaauguaacauugcuggcuggauccugggaaauccagagugugaaucacucuccacagcaagcucaugguccuacauuguggaaacaucuaguucagacaauggaacguguuacccaggagauuucaucaauuaugaggagcuaagagagcaauugagcucagugucaucauuugaaagguuugagauauuccccaagacaaguucauggcccaaucaugacucgaacaaagguguaacggcagcauguccucaugcuggagcaaaaagcuucuacaaaaauuuaauauggcuaguuaaaaaaggaaauucauacccaaagcucagcaaauccuacauuaaugauaaagggaaagaaguccucguacuauggggcauucaccauccaucuacuagugcugaccaacaaagucucuaucagaaugcagaugcauauguuuuuguggggucaucaagauacagcaagaaguucaagccggaaauagcaauaagacccaaagugagggaucaagaagggagaaugaacuauuacuggacacuaguagagccgggagacaaaauaacauucgaagcaacuggaaaucuagugguaccgagauaugcauucgcaauggaaagaaaugcuggaucugguauuaucauuucagauacaccaguccacgauugcaauacaacuugucagacacccaagggugcuauaaacaccagccucccauuucagaauauacauccgaucacaauuggaacauguccaaaauauguaaaaagcacaaaauugagacuggccacaggauugaggaaugucccgucuauucaaucuagaggccuauuuggggccauugccgguuucauugaaggaggguggacagggaugguagauggaugguacgguuaucaccaucaaaaugagcaggggucaggauaugcagccgaccugaagagcacacagaaugccauugacgagauuacuaacaaaguaaauucuguuauugaaaagaugaauacacaguucacagcaguagguaaagaguucaaccaccuggaaaaaagaauagagaauuuaaauaaaaaaguugaugaugguuuccuggacauuuggacuuacaaugccgaacuguugguucuauuggaaaaugaaagaacuuuggacuaccacgauucaaaugugaagaacuuauaugaaaagguaagaagccagcuaaaaaacaaugccaaggaaauuggaaacggcugcuuugaauuuuaccacaaaugcgauaacacgugcauggaaagugucaaaaaugggacuuaugacuacccaaaauacucagaggaagcaaaauuaaacagagaagaaauagaugggguaaagcuggaaucaacaaggauuuaccagauuuuggcgaucuauucaacugucgccaguucauugguacugguagucucccugggggcaaucaguuucuggaugugcucuaaugggucucuacaguguagaauauguauuuaa

SEQ ID NO: 35881 - RNA, 1701 nt, Artificial Sequence; identical to SEQ ID NO: 35755
  derived and/or modified CDS sequence (wt) from hemagglutinin__InfluenzaA__ACZ96619

SEQ ID NO: 35882 - RNA, 1701 nt, Artificial Sequence; identical to SEQ ID NO: 35755
  derived and/or modified CDS sequence (wt) from hemagglutinin__InfluenzaA__ACZ96629

SEQ ID NO: 35883 - RNA, 1701 nt, Artificial Sequence; identical to SEQ ID NO: 35755
  derived and/or modified CDS sequence (wt) from hemagglutinin__InfluenzaA__ACZ96639

SEQ ID NO: 35884 - RNA, 1701 nt, Artificial Sequence; identical to SEQ ID NO: 35755
  derived and/or modified CDS sequence (wt) from hemagglutinin__InfluenzaA__ACZ96649

SEQ ID NO: 35885 - RNA, 1701 nt, Artificial Sequence; identical to SEQ ID NO: 35755
  derived and/or modified CDS sequence (wt) from hemagglutinin__InfluenzaA__ACZ96659

SEQ ID NO: 35886 - RNA, 1701 nt, Artificial Sequence; identical to SEQ ID NO: 35755
  derived and/or modified CDS sequence (wt) from hemagglutinin__InfluenzaA__ACZ96669

SEQ ID NO: 35887 - RNA, 1701 nt, Artificial Sequence; identical to SEQ ID NO: 35755
  derived and/or modified CDS sequence (wt) from hemagglutinin__InfluenzaA__ACZ96679

SEQ ID NO: 35888 - RNA, 1701 nt, Artificial Sequence; identical to SEQ ID NO: 35755
  derived and/or modified CDS sequence (wt) from hemagglutinin__InfluenzaA__ACZ96689

SEQ ID NO: 35889 - RNA, 1701 nt, Artificial Sequence; identical to SEQ ID NO: 35755
  derived and/or modified CDS sequence (wt) from hemagglutinin__InfluenzaA__ACZ96699

SEQ ID NO: 35890 - RNA, 1701 nt, Artificial Sequence; identical to SEQ ID NO: 35755
  derived and/or modified CDS sequence (wt) from hemagglutinin__InfluenzaA__ACZ96719

SEQ ID NO: 35891 - RNA, 1701 nt, Artificial Sequence; identical to SEQ ID NO: 35755
  derived and/or modified CDS sequence (wt) from hemagglutinin__InfluenzaA__ACZ96729

SEQ ID NO: 35892 - RNA, 1701 nt, Artificial Sequence; identical to SEQ ID NO: 35755
  derived and/or modified CDS sequence (wt) from hemagglutinin__InfluenzaA__ACZ96739

SEQ ID NO: 35893 - RNA, 1701 nt, Artificial Sequence
  derived and/or modified CDS sequence (wt) from hemagglutinin__InfluenzaA__ACZ96749
augaagacaauacuaguaguucugcuauauacauuugcaaccgcaaaugcagacacauuauguauagguuaucaugcgaacaauucaacagacacuguagacacaguacuagaaaagaauguaacaguaacacacucuguuaaccuucuagaagacaagcauaacgggaaacuaugcaaacuaagagggguagccccauugcauuuggguaaauguaacauugcuggcuggauccugggaaauccagagugugaaucacucuccacagcaagcucaugguccuacauuguggaaacaucuaguucagacaauggaacguguuacccaggagauuucaucgauuaugaggagcuaagagagcaauugagcucagugucaucauuugaaagguuugagauauuccccaagacaaguucauggcccaaucaugacucgaacaaagguguaacggcagcauguccucaugcuggagcaaaaagcuucuacaaaaauuuaauauggcuaguuaaaaaaggaaauucauacccaaagcucagcaaauccuacauuaaugauaaagggaaagaaguccucgugcuauggggcauucaccauccaucuacuagugcugaccaacaaagucucuaucagaaugcagaugcauauguuuuuguggggucaucaagauacagcaagaaguucaagccggaaauagcaauaagacccaaagugagggaucaagaagggagaaugaacuauuacuggacacuaguagagccgggagacaaaauaacauucgaagcaacuggaaaucuagugguaccgagauaugcauucgcaauggaaagaaaugcuggaucugguauuaucauuucagauacaccaguccacgauugcaauacaacuugucagacacccaagggugcuauaaacaccagccucccauuucagaauauacauccgaucacaauuggaaaauguccaaaauauguaaaaagcacaaaauugagacuggccacaggauugaggaaugucccgucuauucaaucuagaggccuauuuggggccauugccgguuucauugaagggggguggacagggaugguagauggaugguacgguuaucaccaucaaaaugagcaggggucaggauaugcagccgaccugaagagcacacagaaugccauugacgagauuacuaacaaaguaaauucuguuauugaaaagaugaauacacaguucacagcaguagguaaagaguucaaccaccuggaaaaaagaauagagaauuuaaauaaaaaaguugaugaugguuuccuggacauuuggacuuacaaugccgaacuguugguucuauuggaaaaugaaagaacuuuggacuaccacgauucaaaugugaagaacuuauaugaaaagguaagaagccagcuaaaaaacaaugccaaggaaauuggaaacggcugcuuugaauuuuaccacaaaugcgauaacacgugcauggaaagugucaaaaaugggacuuaugacuacccaaaauacucagaggaagcaaaauuaaacagagaagaaauagaugggguaaagcuggaaucaacaaggauuuaccagauuuuggcgaucuauucaacugucgccaguucauugguacugguagucucccugggggcaaucaguuucuggaugugcucuaaugggucucuacaguguagaauauguauuuaa

SEQ ID NO: 35894 - RNA, 1701 nt, Artificial Sequence; identical to SEQ ID NO: 34823
  derived and/or modified CDS sequence (wt) from hemagglutinin__InfluenzaA__ACZ96759

SEQ ID NO: 35895 - RNA, 1701 nt, Artificial Sequence; identical to SEQ ID NO: 34823
  derived and/or modified CDS sequence (wt) from hemagglutinin__InfluenzaA__ACZ96769

SEQ ID NO: 35896 - RNA, 1701 nt, Artificial Sequence; identical to SEQ ID NO: 34676
  derived and/or modified CDS sequence (wt) from hemagglutinin__InfluenzaA__ACZ96779

SEQ ID NO: 35897 - RNA, 1701 nt, Artificial Sequence; identical to SEQ ID NO: 34676
  derived and/or modified CDS sequence (wt) from hemagglutinin__InfluenzaA__ACZ96789

SEQ ID NO: 35898 - RNA, 1701 nt, Artificial Sequence
  derived and/or modified CDS sequence (wt) from hemagglutinin__InfluenzaA__ACZ96809
augaaggcaauacuaguaguucugcuauauacauuugcaaccgcaaaugcagacacauuauguauagguuaucaugcgaacaauucaacagacacuguagacacaguacuagaaaagaauguaacaguaacacacucuguuaaccuucuagaagacaagcauaacgggaaacuaugcaaacuaagagggguagccccauugcauuuggguaaauguaacauugcuggcuggauccugggaaauccagagugugaaucacucuccacagcaagcucaugguccuacauuguggaaacaucuaguucagacaauggaacguguuacccaggagauuucaucgauuaugaggagcuaagagagcaauugagcucagugucaucauuugaaagguuugagauauuccccaagacaaguucauggcccaaucaugacucgaacaaagguguaacggcagcauguccucaugcuggagcaaaaagcuucuacaaaaauuuaauauggcuaguuaaaaaaggaaauucauacccaaagcucagcaaauccuacauuaaugauaaagggaaagaaguccucgugcuauggggcauucaccauccaucuacuaaugcugaccaacaaagucucuaucagaaugcagaugcauauguuuuuguggggacaucaagauacagcaagaaguucaagccggaaauagcaauaagacccaaagugagggaucaagaagggagaaugaacuauuacuggacacuaguagagccgggagacaaaauaacauucgaagcaacuggaaaucuagugguaccgagauaugcauucgcaauggaaagaaaugcuggaucugguauuaucauuucagauacaccaguucacgauugcaauacaacuugucagacacccaagggugcuauaaacaccagccucccauuucagaauauacauccgaucacaauuggaaaauguccaaaauauguaaaaagcacaaaauugagacuggccacaggauugaggaaugucccgucuauucaaucuagaggccuauuuggggccauugccgguuucauugaagggggguggacagggaugguagauggaugguacgguuaucaccaucaaaaugagcaggggucaggauaugcagccgaccugaagagcacacagaaugccauugacgagauuacuaacaaaguaaauucuguuauugaaaagaugaauacacaguucgcagcaguagguaaagaguucaaccaccuggaaaaaagaauagagaauuuaaauaaaaaaguugaugaugguuuccuggacauuuggacuuacaaugccgaacuguugguucuauuggaaaaugaaagaacuuuggacuaccacgauucaaaugugaagaacuuauaugaaaagguaagaagccaguuaaaaaacaaugccaaggaaauuggaaacggcugcuuugaauuuuaccacaaaugcgauaacacgugcauggaaagugucaaaaaugggacuuaugacuacccaaaauacucagaggaagcaaaauuaaacagagaagaaauagaugggguaaagcuggaaucaacaaggauuuaccagauuuuggcgaucuauucaacugucgccaguucauugguacugguagucucccugggggcaaucaguuucuggaugugcucuaaugggucucuacaguguagaauauguauuuaa

SEQ ID NO: 35899 - RNA, 1701 nt, Artificial Sequence
  derived and/or modified CDS sequence (wt) from hemagglutinin__InfluenzaA__ACZ96819
augaaggcaauacuaguaguucugcuauauacauuugcaaccgcaaaugcagacacauuauguauagguuaucaugcgaacaauucaacagacacuguagacacaguacuagaaaagaauguaacaguaacacacucuguuaaccuucuagaagacaagcauaacgggaaacuaugcaaacuaagagggguagccccauugcauuuggguaaauguaacauugcuggcuggauccugggaaauccagagugugaaucacucuccacagcaagcucaugguccuacauuguggaaacaucuaguucagacaauggaacguguuacccaggagauuucaucgauuaugaggagcuaagagagcaauugagcucagugucaucauuugaaagguuugagauauuccccaagacaaguucauggcccaaucaugacucgaacaaagguguaacggcagcauguccucaugcuggagcaaaaagcuucuacaaaaauuuaauauggcuaguuaaaaaaggaaauucauacccaaagcucagcaaauccuacauuaaugauaaagggaaagaaguccucguacuauggggcauucaccauccaucuacuagugcugaccaacaaagucucuaucagaaugcagaugcauauguuuuuguggggucaucaagauacagcaagaaguucaagccggaaauagcaauaagacccaaagugagggaucaagaagggagaaugaacuauuacuggacacuaguagagccgggagacaaaauaacauucgaagcaacuggaaaucuagugguaccgagauaugcguucgcaauggaaagaaaugcuggaucugguauuaucauuucagauacaccaguccacgauugcaauacaacuugucagacacccaagggugcuauaaacaccagccucccauuucagaauauacauccgaucacaauuggaaaauguccaaaauauguaaaaagcacaaaauugagacuggccacaggauugaggaaugucccgucuauucaaucuagaggccuauuuggggccauugccgguuucauugaaggaggguggacagggaugguagauggaugguacgguuaucaccaucaaaaugagcaggggucaggauaugcagccgaccugaagagcacacagaaugccauugacgagauuacuaacaaaguaaauucuguuauugaaaagaugaauacacaguucacagcaguagguaaagaguucaaccaccuggaaaaaagaauagagaauuuaaauaaaaaaguugaugaugguuuccuggacauuuggacuuacaaugccgaacuguugguucuauuggaaaaugaaagaacuuuggacuaccacgauucaaaugugaagaacuuauaugaaaagguaagaagccagcuaaaaaacaaugccaaggaaauuggaaacggcugcuuugaauuuuaccacaaaugcgauaacacgugcauggaaagugucaaaaaugggacuuaugacuacccaaaauacucagaggaagcaaaauuaaacagagaagaaauagaugggguaaagcuggaaucaacaaggauuuaccagauuuuggcgaucuauucaacugucgccaguucauugguacugguagucucccugggggcaaucaguuucuggaugugcucuaaugggucucuacaguguagaauauguauuuaa

SEQ ID NO: 35900 - RNA, 1701 nt, Artificial Sequence; identical to SEQ ID NO: 34676
  derived and/or modified CDS sequence (wt) from hemagglutinin__InfluenzaA__ACZ96829

SEQ ID NO: 35901 - RNA, 1701 nt, Artificial Sequence; identical to SEQ ID NO: 34676
  derived and/or modified CDS sequence (wt) from hemagglutinin__InfluenzaA__ACZ96839

SEQ ID NO: 35902 - RNA, 1701 nt, Artificial Sequence; identical to SEQ ID NO: 35821
  derived and/or modified CDS sequence (wt) from hemagglutinin__InfluenzaA__ACZ96849

SEQ ID NO: 35903 - RNA, 1701 nt, Artificial Sequence; identical to SEQ ID NO: 34681
  derived and/or modified CDS sequence (wt) from hemagglutinin__InfluenzaA__ACZ96859

SEQ ID NO: 35904 - RNA, 1701 nt, Artificial Sequence
  derived and/or modified CDS sequence (wt) from hemagglutinin__InfluenzaA__ACZ96869
augaaggcaauacuaguaguucugcuauauacauuugcaaccgcaaaugcagacacauuauguauagguuaucaugcgaacaauucaacagacacuguagacacaguacuagaaaagaauguaacaguaacacacucuguuaaccuucuagaagacaagcauaacgggaaacuaugcaaacuaagagggguagccccauugcauuuggguaaauguaacauugcuggcuggauccugggaaauccagagugugaaucacucuccacagcaagcucaugguccuacauuguggaaacaucuaguucagacaauggaacguguuacccaggagauuucaucgauuaugaggagcuaagagagcaauugagcucagugucaucauuugaaagguuugagauauuccccaagacaaguucauggcccaaucaugacucgaacaaagguguaacggcagcauguccucaugcuggagcaaaaagcuucuacaaaaauuuaauauggcuaguuaaaaaaggaaauucauacccaaagcucagcaaauccuacauuaaugauaaagggaaagaaguccucgugcuauggggcauucaccauccaucuacuagugcugaccaacaaagucucuaucagaaugcagaugcauauguuuuuguggggucaucaagauacagcaagaaguucaagccggaaauagcaauaagacccaaagugagggaucaagaagggagaaugaacuauuacuggacacuaguagagccgggagacaaaauaacauucgaagcaacuggaaaucuagugguaccgagauaugcauucgcaauggaaagaaaugcuggaucugguauuaucauuucagauacaccaguccacgauugcaauacaacuugucagacacccaagggugcuauaaacaccagccucccauuucagaauauacauccgaucacaauuggaaaauguccaaaauauguaaaaagcacaaaauugagacuggccacaggauugaggaaugucccgucuauucaaucuagaggccuauuuggggccauugccgguuucauugaagggggguggacagggaugguagauggaugguacgguuaucaccaucaaaaugagcaagggucaggauaugcagccgaccugaagagcacacagaaugccauugacgagauuacuaacaaaguaaauucuguuauugaaaagaugaauacacaguucacagcaguagguaaagaguucaaccaccuggaaaaaagaauagagaauuuaaauaaaaaaguugaugaugguuuccuggacauuuggacuuacaaugccgaacuguugguucuauuggaaaaugaaagaacuuuggacuaccacgauucaaaugugaagaacuuauaugaaaagguaagaagccaguuaaaaaacaaugccaaggaaauuggaaacggcugcuuugaauuuuaccacaaaugcgauaacacgugcauggaaagugucaaaaaugggacuuaugacuacccaaaauacucagaggaagcaaaauuaaacagagaagaaauagaugggguaaagcuggaaucaacaaggauuuaccagauuuuggcgaucuauucaacugucgccaguucauugguacugguagucucccugggggcaaucaguuucuggaugugcucuaaugggucucuacaguguagaauauguauuuaa

SEQ ID NO: 35905 - RNA, 1701 nt, Artificial Sequence; identical to SEQ ID NO: 35899
  derived and/or modified CDS sequence (wt) from hemagglutinin__InfluenzaA__ACZ96879

SEQ ID NO: 35906 - RNA, 1701 nt, Artificial Sequence
  derived and/or modified CDS sequence (wt) from hemagglutinin__InfluenzaA__ACZ96899
augaaggcaauacuaguaguucugcuauauacauuugcaaccgcaaaugcagacacauuauguauagguuaucaugcgaacaauucaacagacacuguagacacaguacuagaaaagaauguaacaguaacacacucuguuaaccuucuagaagacaagcauaacgggaaacuaugcaaacuaagagggguagccccauugcauuuggguaaauguaacauugcuggcuggauccugggaaauccagagugugaaucacucuccacagcaagcucaugguccuacauuguggaaacaucuaguucagacaauggaacguguuacccaggagauuucaucgauuaugaggagcuaagagagcaauugagcucagugucaucauuugaaagguuugagauauuccccaagacaaguucauggcccaaucaugacucgaacaaagguguaacggcagcauguccucaugcuggagcaaaaagcuucuacaaaaauuuaauauggcuaguuaaaaaaggaaauucauacccaaagcucagcaaauccuacauuaaugauaaagggaaagaaguccucgugcuauggggcauucaccauucaucuacuagugcugaccaacaaagucucuaucagaaugcagaugcauauguuuuuguggggucaucaagauacagcaagaaguucaagccggaaauagcaauaagacccaaagugagggaucaagaagggagaaugaacuauuacuggacacuaguagagccgggagacaaaauaacauucgaagcaacuggaaaucuagugguaccgagauaugcauucgcaauggaaagaaaugcuggaucugguauuaucauuucagauacaccaguccacgauugcaauacaacuugucagacacccaagggugcuauaaacaccagccucccauuucagaauauacauccgaucacaauuggaaaauguccaaaauauguaaaaagcacaaaauugagacuggccacaggauugaggaaugucccgucuauucaaucuagaggccuauuuggggccauugccgguuucauugaagggggguggacagggaugguagauggaugguacgguuaucaccaucaaaaugagcaagggucaggauaugcagccgaccugaagagcacacagaaugccauugacgagauuacuaacaaaguaaauucuguuauugaaaagaugaauacacaguucacagcaguagguaaagaguucaaccaccuggaaaaaagaauagagaauuuaaauaaaaaaguugaugaugguuuccuggacauuuggacuuacaaugccgaacuguugguucuauuggaaaaugaaagaacuuuggacuaccacgauucaaaugugaagaacuuauaugaaaagguaagaagccaguuaaaaaacaaugccaaggaaauuggaaacggcugcuuugaauuuuaccacaaaugcgauaacacgugcauggaaagugucaaaaaugggacuuaugacuacccaaaauacucagaggaagcaaaauuaaacagagaagaaauagaugggguaaagcuggaaucaacaaggauuuaccagauuuuggcgaucuauucaacugucgccaguucauugguacugguagucucccugggggcaaucaguuucuggaugugcucuaaugggucucuacaguguagaauauguauuuaa

SEQ ID NO: 35907 - RNA, 1701 nt, Artificial Sequence
  derived and/or modified CDS sequence (wt) from hemagglutinin__InfluenzaA__ACZ96909
augaaggcaauacuaguaguucugcuauauacauuugcaaccgcaaaugcagacacauuauguauagguuaucaugcgaacaauucaacagacacuguagacacaguacuagaaaagaauguaacaguaacacacucuguuaaccuucuagaagacaagcauaacgggaaacuaugcaaacuaagagggguagccccauugcauuuggguaaauguaacauugcuggcuggauccugggaaauccagagugugaaucacucuccacagcaagcucaugguccuacauuguggaaacaucuaguucagacaauggaacguguuacccaggagauuucaucgauuaugaggagcuaagagagcaauugagcucagugucaucauuugaaagguuugagauauuccccaagacaaguucauggcccaaucaugacucgaacaaagguguaacggcagcauguccucaugcuggagcaaaaagcuucuacaaaaauuuaauauggcuaguuaaaaaaggaaauucauacccaaagcucagcaaauccuacauuaaugauaaagggaaagaaguccucguacuauggggcauucaccauccaucuacuagugcugaccaacaaagucucuaucagaaugcagaugcauauguuuuuguggggucaucaagauacagcaagaaguucaagccggaaauagcaauaagacccaaagugagggaucaagaagggagaaugaacuauuacuggacacuaguagagccgggagacaaaauaacauucgaagcaacuggaaaucuagugguaccgagauaugcauucgcaauggaaagaaaugcuggaucugguauuaucauuucagauacaccaguccacgauugcaauacaacuugucagacacccaagggugcuauaaacaccagccucccauuucagaauauacauccgaucacaauuggaaaauguccaaaauauguaaaaagcacaaaauugagacuggccacaggauugaggaaugucccgucuauucaaucuagaggccuauuuggggccauugccgguuucauugaaggaggguggacagggaugguagauggaugguacgguuaucaccaucaaaaugagcaggggucaggauaugcagccgaccugaagagcacacagaaugccauugacgagauuacuaacaaaguaaauucuguuauugaaaagaugaauacacaguucacagcaguagguaaagaguucaaccaccuggaaaaaagaauagagaauuuaaauaaaaaaguugaugaugguuuccuggacauuuggacuuacaaugccgaacuguugguucuauuggaaaaugaaagaacuuuggacuaccacgauucaaaugugaagaacuuauaugaaaagguaagaagccagcuaaaaaacaaugccaaggaaauuggaaacggcugcuuugaauuuuaccacaaaugcgauaacacgugcauggaaagugucaaaaaugggacuuaugacuacccaaaauacucagaggaagcaaaauuaaacagagaagaaauagaugggguaaagcuggaaucaacaaggauuuaccagauuuuggcgaucuauucaacugucgccaguucauugguacugguagucucccugggggcaaucagcuucuggaugugcucuaaugggucucuacaguguagaauauguauuuaa

SEQ ID NO: 35908 - RNA, 1701 nt, Artificial Sequence; identical to SEQ ID NO: 35907
  derived and/or modified CDS sequence (wt) from hemagglutinin__InfluenzaA__ACZ96919

SEQ ID NO: 35909 - RNA, 1701 nt, Artificial Sequence; identical to SEQ ID NO: 35687
  derived and/or modified CDS sequence (wt) from hemagglutinin__InfluenzaA__ACZ96929

SEQ ID NO: 35910 - RNA, 1701 nt, Artificial Sequence; identical to SEQ ID NO: 34705
  derived and/or modified CDS sequence (wt) from hemagglutinin__InfluenzaA__ACZ96939

SEQ ID NO: 35911 - RNA, 1701 nt, Artificial Sequence
  derived and/or modified CDS sequence (wt) from hemagglutinin__InfluenzaA__ACZ96949
augaaggcaauacuaguaguucugcuauauacauuugcaaccgcaaaugcagacacauuauguauagguuaucaugcgaacaauucaacagacacuguagacacaguacuagaaaagaauguaacaguaacacacucuguuaaccuucuagaagacaagcauaacgggaaacuaugcaaacuaagagggguagccccauugcauuuggguaaauguaauauugcuggcuggauccugggaaauccagagugugaaucacucuccacagcaagcucaugguccuacauuguggaaacaucuaguucagacaauggaacguguuacccaggagauuucaucgauuaugaggagcuaagagagcaauugagcucagugucaucauuugaaagguuugagauauuccccaagacaaguucauggcccaaucaugacucgaacaaagguguaacggcagcauguccucaugcuggagcaaaaagcuucuacaaaaauuuaauauggcuagucaaaaaaggaaauucauacccaaagcucagcaaauccuacauuaaugauaaagggaaagaaguccucgugcuauggggcauucaccauccaucuacuagugcugaccaacaaagucucuaucagaaugcagaugcauauguuuuuguggggucaucaagauacagcaagaaguucaagccggaaauagcaauaagacccaaagugagggaucaagaagggagaaugaacuauuacuggacacuaguagagccgggagacaaaauaacauucgaagcaacuggaaaucuagugguaccgagauaugcauucgcaauggaaagaaaugcuggaucugguauuaucauuucagauacaccaguccacgauugcaauacaacuugucagacacccaagggugcuauaaacaccagccucccauuucagaauauacauccgaucacaauuggaaaauguccaaaauauguaaaaagcacaaaauugagacuggccacaggauugaggaaugucccgucuauucaaucuagaggccuauuuggggccauugccgguuucauugaagggggguggacagggaugguagauggaugguacgguuaucaccaucaaaaugagcaggggucaggauaugcagccgaccugaagagcacacagaaugccauugacgagauuacuaacaaaguaaauucuguuauugaaaagaugaauacacaguucacagcaguagguaaagaguucaaccaccuggaaaaaagaauagagaauuuaaauaaaaaaguugaugaugguuuccuggacauuuggacuuacaaugccgaaauguugguucuauuggaaaaugaaagaacuuuggacuaccacgauucaaaugugaagaacuuauaugaaaagguaagaagccagcuaaaaaacaaugccaaggaaauuggaaacggcugcuuugaauuuuaccacaaaugcgauaacacgugcauggaaagugucaaaaaugggacuuaugacuacccaaaauacucagaggaagcaaaauuaaacagagaagaaauagaugggguaaagcuggaaucaacaaggauuuaccagauuuuggcgaucuauucaacugucgccaguucauugguacugguagucucccugggggcaaucaguuucuggaugugcucuaaugggucucuacaguguagaauaugcauuuaa

SEQ ID NO: 35912 - RNA, 1701 nt, Artificial Sequence
  derived and/or modified CDS sequence (wt) from hemagglutinin__InfluenzaA__ACZ97021
augaaggcaauacuaguaguucugcuauauacauuugcaaccgcaaaugcagacacauuauguauagguuaucaugcgaacaauucaacagacacuguagacacaguacuagaaaagaauguaacaguaacacacucuguuaaccuucuagaagacaagcauaacgggaaacuaugcaaacuaagagggguagccccauugcauuuggguaaauguaauauugcuggcuggauccugggaaauccagagugugaaucacucuccacagcaagcucaugguccuacauuguggaaacaucuaguucagacaauggaacguguuacccaggagauuucaucgauuaugaggagcuaagagagcaauugagcucagugucaucauuugaaagguuugagauauuccccaagacaaguucauggcccaaucaugacucgaacaaagguguaacggcagcauguccucaugcuggagcaaaaagcuucuacaaaaauuuaauauggcuagucaaaaaaggaaauucauacccaaagcucagcaaauccuacauuaaugauaaagggaaagaaguccucgugcuauggggcauucaccauccaucuacuagugcugaccaacaaagucucuaucagaaugcagaugcauauguuuuuguggggucaucaagauacagcaagaaguucaagccggaaauagcaauaagacccaaagugagggaucaagaagggagaaugaacuauuacuggacacuaguagagccgggagacaaaauaacauucgaagcaacuggaaaucuagugguaccgagauaugcauucgcaauggaaagaaaugcuggaucugguauuaucauuucagauacaccaguccacgauugcaauacaacuugucagacacccaagggugcuauaaacaccagccucccauuucagaauauacauccgaucacaauuggaaaauguccaaaauauguaaaaagcacaaaauugagacuggccacaggauugaggaaugucccgucuauucaaucuagaggccuauuuggggccauugccgguuucauugaagggggguggacagggaugguagauggaugguacgguuaucaccaucaaaaugagcaggggucaggauaugcagccgaccugaagagcacacagaaugccauugacgagauuacuaacaaaguaaauucuguuauugaaaagaugaauacacaguucacagcaguagguaaagaguucaaccaccuggaaaaaagaauagagaauuuaaauaaaaaaguugaugaugguuuccuggacauuuggacuuacaaugccgaacuguugguucuauuggaaaaugaaagaacuuuggacuaccacgauucaaaugugaagaacuuauaugaaaagguaagaagccagcuaaaaaacaaugccaaggaaauuggaaacggcugcuuugaauuuuaccacaaaugcgauaacacgugcauggaaagugucaaaaaugggacuuaugacuacccaaaauacucagaggaagcaaaauuaaacagagaagaaauagaugggguaaagcuggaaucaacaaggauuuaccagauuuuggcgaucuauucaacugucgccaguucauugguacugguagucucccugggggcaaucaguuucuggaugugcucuaaugggucucuacaguguagaauaugcauuuaa

SEQ ID NO: 35913 - RNA, 1701 nt, Artificial Sequence
  derived and/or modified CDS sequence (wt) from hemagglutinin__InfluenzaA__ACZ97343
augaaggcaauacuaguaguucugcuauauacauuugcaaccgcaaaugcagacacauuauguauagguuaucaugcgaacaauucaacagacacuguagacacaguacuagaaaagaauguaacaguaacacacucuguuaaccuucuagaagacaagcauaacgggaaacuaugcaaacuaagagggguagccccauugcauuuggguaaauguaacauugcuggcuggauccugggaaauccagagugugaaucacucuccacagcaagcucaugguccuacauuguggaaacaucuaguucagacaauggaacguguuacccaggagauuucaucgauuaugaggagcuaagagagcaauugagcucagugucaucauuugaaagguuugagauauuccccaagacaaguucauggcccaaucaugacucgaacaaagguguaacggcagcauguccucaugcuggagcaaaaagcuucuacaaaaauuuaauauggcuaguuaaaaaaggaaauucauacccaaagcucagcaaauccuacauuaaugauaaagggaaagaaguccucgugcuauggggcauucaccauccaucuacuaaugcugaccaacaaagucucuaucagaaugcagaugcauauguuuuuguggggucaucaagauacagcaagaaguucaagccggaaauagcaauaagacccaaagugagggaucaagaagggagaaugaacuauuacuggacacuaguagagccgggagacaaaauaacauucgaagcaacuggaaaucuagugguaccgagauaugcauucgcaauggaaagaaaugcuggaucugguauuaucauuucagauacaccaguccacgauugcaauacaacuugucagacacccaagggugcuauaaacaccagccucccauuucagaauauacauccgaucacaauuggaaaauguccaaaauauguaaaaagcacaaaauugagacuggccacaggauugaggaaugucccgucuauucaaucuagaggccuauuuggggccauugccgguuucauugaagggggguggacagggaugguagauggaugguacgguuaucaccaucaaaaugagcaagggucaggauaugcagccgaccugaagagcacacagaaugccauugacgagauuacuaacaaaguaaauucuguuauugaaaagaugaauacacaguucacagcaguagguaaagaguucaaccaccuggaaaaaagaauagagaauuuaaauaaaaaaguugaugaugguuuccuggacauuuggacuuacaaugccgaacuguugguucuauuggaaaaugaaagaacuuuggacuaccacgauucaaaugugaagaacuuauaugaaaagguaagaagccaguuaaaaaacaaugccaaggaaauuggaaacggcugcuuugaauuuuaccacaaaugcgauaacacgugcauggaaagugucaaaaaugggacuuaugacuacccaaaauacucagaggaagcaaaauuaaacagagaagaaauagaugggguaaagcuggaaucaacaaggauuuaccagauuuuggcgaucuauucaacugucgccaguucauugguacugguagucucccugggggcaaucaguuucuggaugugcucuaaugggucucuacaguguagaauauguauuuaa

SEQ ID NO: 35914 - RNA, 1701 nt, Artificial Sequence; identical to SEQ ID NO: 35913
  derived and/or modified CDS sequence (wt) from hemagglutinin__InfluenzaA__ACZ97353

SEQ ID NO: 35915 - RNA, 1701 nt, Artificial Sequence
  derived and/or modified CDS sequence (wt) from hemagglutinin__InfluenzaA__ACZ97363
augaaggcaauacuaguaguucugcuauauacauuugcaaccgcaaaugcagacacauuauguauagguuaucaugcgaacaauucaacagacacuguagacacaguacuagaaaagaauguaacaguaacacacucuguuaaccuucuagaagacaagcauaacgggaaacuaugcaaacuaagagggguagccccauugcauuuggguaaauguaacauugcuggcuggauccugggaaauccagagugcgaaucacucuccacagcaagcucaugguccuacauuguggaaacaucuaguucagacaauggaacguguuacccaggagauuucaucgauuaugaggagcuaagagagcaauugagcucagugucaucauuugaaagguuugagauauuccccaagacaaguucauggcccaaucaugacucgaacaaagguguaacggcagcauguccucaugcuggagcaaaaagcuucuacaaaaauuuaauauggcuaguuaaaaaaggaaauucauacccaaagcucagcaaauccuacauuaaugauaaagggaaagaaguccucgugcuauggggcauucaccauccaucuacuagugcugaccaacaaagucucuaucagaaugcagaugcauauguuuuuguggggucaucaagauacagcaagaaguucaagccggaaauagcaauaagacccaaagugagggaucaagaagggagaaugaacuauuacuggacacuaguagagccgggagacaaaauaacauucgaagcaacuggaaaucuagugguaccgagauaugcauucgcaauggaaagaaaugcuggaucugguauuaucauuucagauacaccaguccacgauugcaauacaacuugucagacacccaagggugcuauaaacaccagccucccauuucagaauauacauccgaucacaauuggaaaauguccaaaauauguaaaaagcacaaaauugagacuggccacaggauugaggaaugucccgucuauucaaucuagaggccuauuuggggccauugccgguuucauugaagggggguggacagggaugguagauggaugguacgguuaucaccaucaaaaugagcaggggucaggauaugcagccgaccugaagagcacacagaaugccauugacgagauuacuaacaaaguaaauucuguuauugaaaagaugaauacacaguucacagcaguagguaaagaguucaaccaccuggaaaaaagaauagagaauuuaaauaaaaaaguugaugaugguuuccuggacauuuggacuuacaaugccgaacuguugguucuauuggaaaaugaaagaacuuuggacuaccacgauucaaaugugaagaacuuauaugaaaagguaagaagccaguuaaaaaacaaugccaaggaaauuggaaacggcugcuuugaauuuuaccacaaaugcgauaacacgugcauggaaagugucaaaaaugggacuuaugacuacccaaaauacucagaggaagcaaaauuaaacagagaagaaauagaugggguaaagcuggaaucaacaaggauuuaccagauuuuggcgaucuauucaacugucgccaguucauugguacugguagucucccugggggcaaucaguuucuggauguguucuaaugggucucuacaguguagaauauguauuuaa

SEQ ID NO: 35916 - RNA, 1701 nt, Artificial Sequence
  derived and/or modified CDS sequence (wt) from hemagglutinin__InfluenzaA__ACZ97383
augaaggcaauacuaguaguucugcuauauacauuugcaaccgcaaaugcagacacauuauguauagguuaucaugcgaacaauucaacagacacuguagacacaguacuagaaaagaauguaacaguaacacacucuguuaaccuucuagaagacaagcauaacgggaaacuaugcaaacuaagagggguagccccauugcauuuggguaaauguaacauugcuggcuggauccugggaaauccagagugugaaucacucuccacagcaagcucaugguccuacauuguggaaacaucuacuucagacaauggaacguguuacccaggagauuucaucgauuaugaggagcuaagagagcaauugagcucagugucaucauuugaaagguuugagauauuccccaagacaaguucauggcccaaucaugacucgaacaaagguguaacggcagcauguccucaugcuggagcaaaaagcuucuacaaaaauuuaauauggcuaguuaaaaaaggaaauucauacccaaagcucagcaaauccuacauuaaugauaaagggaaagaaguccucgugcuauggggcauucaccauccaucuacuagugcugaccaacaaagucucuaucagaaugcagaugcauauguuuuuguggggucaucaagauacagcaagaaguucaagccggaaauagcaauaagacccaaagugagggaucaagaagggagaaugaacuauuacuggacacuaguagagccgggagacaaaauaacauucgaagcaacuggaaaucuagugguaccgagauaugcauucgcaauggaaagaaaugcuggaucugguauuaucauuucagauacaccaguccacgauugcaauacaacuugucagacacccaagggugcuauaaacaccagccucccauuucagaauauacauccgaucacaauuggaaaauguccaaaauauguaaaaagcacaaaauugagacuggccacaggauugaggaaugucccgucuauucaaucuagaggccuauuuggggccauugccgguuucauugaagggggguggacagggaugguagauggaugguacgguuaucaccaucaaaaugagcaggggucaggauaugcagccgaccugaagagcacacagaaugccauugacgagauuacuaacaaaguaaauucuguuauugaaaagaugaauacacaguucacagcaguagguaaagaguucaaccaccuggaaaaaagaauagagaauuuaaauaaaaaaguugaugaugguuuccuggacauuuggacuuacaaugccgaacuguugguucuauuggaaaaugaaagaacuuuggacuaccacgauucaaaugugaagaacuuauaugaaaagguaagaagccaguuaaaaaacaaugccaaggaaauuggaaacggcugcuuugaauuuuaccacaaaugcgauaacacgugcauggaaagugucaaaaaugggacuuaugacuacccaaaauacucagaggaagcaaaauuaaacagagaagaaauagaugggguaaagcuggaaucaacaaggauuuaccagauuuuggcgaucuauucaacugucgccaguucauugguacugguagucucccugggggcaaucaguuucuggauguguucuaaugggucucuacaguguagaauauguauuuaa

SEQ ID NO: 35917 - RNA, 1701 nt, Artificial Sequence; identical to SEQ ID NO: 34705
  derived and/or modified CDS sequence (wt) from hemagglutinin__InfluenzaA__ACZ97393

SEQ ID NO: 35918 - RNA, 1701 nt, Artificial Sequence
  derived and/or modified CDS sequence (wt) from hemagglutinin__InfluenzaA__ACZ98178
augaaggcaauacuaguaguucugcuauauacauuugcaaccgcaaaugcagacacauuauguauagguuaucaugcgaacaauucaacagacacuguagacacaguacuagaaaagaauguaacaguaacacacucuguuaaccuucuagaagacaagcauuacgggaaacuaugcaaacuaagagggguagccccauugcauuuggguaaauguaacauugcuggcuggauccugggaaauccagagugugaaucacucuccacagcaagcucaugguccuacauuguggaaacaucuaguucagacaauggaacguguuacccaggagauuucaucgauuaugaggagcuaagagagcaauugagcucagugucaucauuugaaagguuugagauauuccccaagacaaguucauggcccaaucaugacucgaacaaagguguaacgacagcauguccucaugcuggagcaaaaagcuucuacaaaaauuuaauauggcuaguuaaaaaaggaaauucauacccaaagcucagcaaauccuacauuaaugauaaagggaaagaaguccucgugcuauggggcauucaccauccaucuacuagugcugaccaacaaagucucuaucagaaugcagaugcauauguuuuuguggggacaucaagauacagcaagaaguucaagccggaaauagcaauaagacccaaagugagggaucaagaagggagaaugaacuauuacuggacacuaguagagccgggagacaaaauaacauucgaagcaacuggaaaucuagugguaccgagauaugcauucgcaauggaaagaaaugcuggaucugguauuaucauuucagauacaccaguccacgauugcaauacaacuugucagacacccaagggugcuauaaacaccagccucccauuucagaauauacauccgaucacaauuggaaaauguccaaaauauguaaaaagcacaaaauugagacuggccacaggauugaggaaugucccgucuauucaaucuagaggccuauuuggggccauugccgguuucauugaagggggguggacagggaugguagauggaugguacgguuaucaccaucaaaaugagcaggggucaggauaugcagccgaccugaagagcacacagaaugccauugacgagauuacuaacaaaguaaauucuguuauugaaaagaugaauacacaguucacagcaguagguaaagaguucaaccaccuggaaaaaagaauagagaauuuaaauaaaaaaguugaugaugguuuccuggacauuuggacuuacaaugccgaacuguugguucuauuggaaaaugaaagaacuuuggacuaccacgauucaaaugugaagaacuuauaugaaaagguaagaagccaguuaaaaaacaaugccaaggaaauuggaaacggcugcuuugaauuuuaccacaaaugugauaacacgugcauggaaagugucaaaaaugggacuuaugacuacccaaaauacucagaggaagcaaaauuaaacagagaagaaauagaugggguaaagcuggaaucaacaaggauuuaccagauuuuggcgaucuauucaacugucgccaguucauugguacugguagucucccugggggcaaucaguuucuggaugugcucuaaugggucucuacaguguagaauauguauuuaa

SEQ ID NO: 35919 - RNA, 1701 nt, Artificial Sequence
  derived and/or modified CDS sequence (wt) from hemagglutinin__InfluenzaA__ACZ98188
augaaggcaauacuaguaguucugcuauauacauuugcaaccgcaaaugcagacacauuauguauagguuaucaugcgaacaauucaacagacacuguagacacaguacuagaaaagaauguaacaguaacacacucuguuaaccuucuagaagacaagcauaacgggaaacuaugcaaacuaagagggguagccccauugcauuuggguaaauguaacauugcuggcuggauccugggaaauccagagugugaaucacucuccacagcaagcucaugguccuacauuguggaaacaucuaguucagacaauggaacguguuacccaggagauuucaucgauuaugaggagcuaagagagcaauugagcucagugucaucauuugaaagguuugagauauuccccaagacaaguucauggcccaaucaugacucgaacaaagguguaacggcagcauguccucaugcuggagcaaaaagcuucuacaaaaauuuaauauggcuaguuaaaaaaggaaauucauacccaaagcucagcaaauccuacauuaaugauaaagggaaagaaguccucgugcuauggggcauucaccauccaucuacuagugcugaccaacaaagucucuaucagaaugcagaugcauauguuuuuguggggucaucaagauacagcaagaaguucaagccggaaauagcaauaagacccaaagugagggaucaagaagggagaaugaacuauuacuggacacuaguagagccgggagacaaaauaacauucgaagcaacuggaaaucuagugguaccgagguaugcauucgcaauggaaagaaaugcuggaucugguauuaucauuucagauacaccaguccacgauugcaauacaacuugucagacacccaagggugcuauaaacaccagccucccauuucagaauauacauccgaucacaauuggaaaauguccaaaauauguaaaaagcacaaaauugagacuggccacaggauugaggaaugucccgucuauucaaucuagaggccuauuuggggccauugccgguuucauugaagggggguggacagggaugguagauggaugguacgguuaucaccaucaaaaugagcaggggucaggauaugcagccgaccugaagagcacacagaaugccauugacgagauuacuaacaaaguaaauucuguuauugaaaagaugaauacacaguucacagcaguagguaaagaguucaaccaccuggaaaaaagaauagagaauuuaaauaaaaaaguugaugaugguuuccuggacauuuggacuuacaaugccgaacuguugguucuauuggaaaaugaaagaacuuuggacuaccacgauucaaaugugaagaacuuauaugaaaagguaagaagccaguuaaaaaacaaugccaaggaaauuggaaacggcugcuuugaauuuuaccacaaaugcgauaacacgugcauggaaagugucaaaaaugggacuuaugacuacccaaaauacucagaggaagcaaaauuaaacagagaagaaauagaugggguaaagcuggaaucaacaaggauuuaccagauuuuggcgaucuauucaacugucgccaguucauugguacugguagucucccugggggcaaucaguuucuggaugugcucuaaugggucucuacaguguagaauauguauuuaa

SEQ ID NO: 35920 - RNA, 1701 nt, Artificial Sequence; identical to SEQ ID NO: 35261
  derived and/or modified CDS sequence (wt) from hemagglutinin__InfluenzaA__ACZ98198

SEQ ID NO: 35921 - RNA, 1701 nt, Artificial Sequence; identical to SEQ ID NO: 34681
  derived and/or modified CDS sequence (wt) from hemagglutinin__InfluenzaA__ACZ98208

SEQ ID NO: 35922 - RNA, 1701 nt, Artificial Sequence; identical to SEQ ID NO: 34681
  derived and/or modified CDS sequence (wt) from hemagglutinin__InfluenzaA__ACZ98218

SEQ ID NO: 35923 - RNA, 1701 nt, Artificial Sequence; identical to SEQ ID NO: 34714
  derived and/or modified CDS sequence (wt) from hemagglutinin__InfluenzaA__ACZ98228

SEQ ID NO: 35924 - RNA, 1701 nt, Artificial Sequence
  derived and/or modified CDS sequence (wt) from hemagglutinin__InfluenzaA__ACZ98238
augaaggcaauacuaguaguucugcuauauacauuugcaaccgcaaaugcagacacauuauguauagguuaucaugcgaacaauucaacagacacuguagacacaguacuagaaaagaauguaacaguaacacacucuguuaaccuucuagaagacaagcauaacgggaaacuaugcaaacuaagagggguagccccauuacauuuggguaaauguaacauugcuggcuggauccugggaaauccagagugugaaucacucuccacagcaagcucaugguccuacauuguggaaacaucuaguucagacaauggaacguguuacccaggagauuucaucgauuaugaggagcuaagagagcaauugagcucagugucaucauuugaaagguuugagauauuccccaagacaaguucauggcccaaucaugacucgaacaaagguguaacggcagcauguccucaugcuggagcaaaaagcuucuacaaaaauuuaauauggcuaguuaaaaaaggaaauucauacccaaagcucagcaaauccuacauuaaugauaaagggaaagaaguccucgugcuauggggcauucaccauccaucuacuagugcugaccaacaaagucucuaucagaaugcagaugcauauguuuuuguggggacaucaagauacagcaagaaguucaagccggaaauagcaauaagacccaaagugagggaucaagaagggagaaugaacuauuacuggacacuaguagagccgggagacaaaauaacauucgaagcaacuggaaaucuagugguaccgagauaugcauucgcaauggaaagaaaugcuggaucugguauuaucauuucagauacaccaguccacgauugcaauacaacuugucagacacccaagggugcuauaaacaccagccucccauuucagaauauacauccgaucacaauuggaaaauguccaaaauauguaaaaagcacaaaauugagacuggccacaggauugaggaaugucccgucuauucaaucuagaggccuauuuggggccauugccgguuucauugaagggggguggacagggaugguagauggaugguacgguuaucaccaucaaaaugagcaggggucaggauaugcagccgaccugaagagcacacagaaugccauugacgagauuacuaacaaaguaaauucuguuauugaaaagaugaauacacaguucacagcaguagguaaagaguucaaccaccuggaaaaaagaauagagaauuuaaauaaaaaaguugaugaugguuuccuggacauuuggacuuacaaugccgaacuguugguucuauuggaaaaugaaagaacuuuggacuaccacgauucaaaugugaagaacuuauaugaaaagguaagaagccaguuaaaaaacaaugccaaggaaauuggaaacggcugcuuugaauuuuaccacaaaugcgauaacacgugcauggaaagugucaaaaaugggacuuaugacuacccaaaauacucagaggaagcaaaauuaaacagagaagaaauagaugggguaaagcuggaaucaacaaggauuuaccagauuuuggcgaucuauucaacugucgccaguucauugguacugguagucucccugggggcaaucaguuucuggaugugcucuaaugggucucuacaguguagaauauguauuuaa

SEQ ID NO: 35925 - RNA, 1701 nt, Artificial Sequence; identical to SEQ ID NO: 35744
  derived and/or modified CDS sequence (wt) from hemagglutinin__InfluenzaA__ACZ98248

SEQ ID NO: 35926 - RNA, 1701 nt, Artificial Sequence; identical to SEQ ID NO: 34681
  derived and/or modified CDS sequence (wt) from hemagglutinin__InfluenzaA__ACZ98258

SEQ ID NO: 35927 - RNA, 1701 nt, Artificial Sequence; identical to SEQ ID NO: 34681
  derived and/or modified CDS sequence (wt) from hemagglutinin__InfluenzaA__ACZ98268

SEQ ID NO: 35928 - RNA, 1701 nt, Artificial Sequence; identical to SEQ ID NO: 35821
  derived and/or modified CDS sequence (wt) from hemagglutinin__InfluenzaA__ACZ98278

SEQ ID NO: 35929 - RNA, 1701 nt, Artificial Sequence; identical to SEQ ID NO: 35821
  derived and/or modified CDS sequence (wt) from hemagglutinin__InfluenzaA__ACZ98288

SEQ ID NO: 35930 - RNA, 1701 nt, Artificial Sequence
  derived and/or modified CDS sequence (wt) from hemagglutinin__InfluenzaA__ACZ98298
augaaggcaauacuaguaguucugcuauauacauuugcaaccgcaaaugcagacacauuauguauagguuaucaugcgaacaauucaacagacacuguagacacaguacuagaaaagaauguaacaguaacacacucuguuaaccuucuagaagacaagcauaacgggaaacuaugcaaacuaagagggguagccccauugcauuuggguaaauguaacauugcuggcuggauccugggaaauccagagugugaaucacucuccacagcaagcucaugguccuacauuguggaaacaucuaguucagacaauggaacguguuacccaggagauuucaucgauuaugaggagcuaagagagcaauugagcucagugucaucauuugaaaaguuugagauauuccccaagacaaguucauggcccaaucaugacucgaacaaagguguaacggcagcauguccucaugcuggagcaaaaagcuucuacaaaaauuuaauauggcuaguuaaaaaaggaaauucauacccaaagcucagcaaauccuacauuaaugauaaagggaaagaaguccucgugcuauggggcauucaccauccaucuacuagugcugaccaacaaagucucuaucagaaugcagaugcauauguuuuuguggggucaucaagauacagcaagaaguucaagccggaaauagcaauaagacccaaagugagggaucaagaagggagaaugaacuauuacuggacacuaguagagccgggagacaaaauaacauucgaagcaacuggaaaucuagugguaccgagauaugcauucgcaauggaaagaaaugcuggaucugguauuaucauuucagauacaccaguccacgauugcaauacaacuugucagacacccaagggugcuauaaacaccagccucccauuucagaauauacauccgaucacaauuggaaaauguccaaaauauguaaaaagcacaaaauugagacuggccacaggauugaggaaugucccgucuauucaaucuagaggccuauuuggggccauugccgguuucauugaagggggguggacagggaugguagauggaugguacgguuaucaccaucaaaaugagcaggggucaggauaugcagccgaccugaagagcacacagaaugccauugacgggauuacuaacaaaguaaauucuguuauugaaaagaugaauacacaguucacagcaguagguaaagaguucaaccaccuggaaaaaagaauagagaauuuaaauaaaaaaguugaugaugguuuccuggacauuuggacuuacaaugccgaacuguugguucuauuggaaaaugaaagaacuuuggacuaccacgauucaaaugugaagaacuuauaugaaaagguaagaagccagcuaaaaaacaaugccaaggaaauuggaaacggcugcuuugaauuuuaccacaaaugcgauaacacgugcauggaaagugucaaaaaugggacuuaugacuacccaaaauacucagaggaagcaaaauuaaacagagaagaaauagaugggguaaaacuggaaucaacaaggauuuaccagauuuuggcgaucuauucaacugucgccaguucauugguacugguagucucccugggggcaaucaguuucuggaugugcucuaaugggucucuacaguguagaauauguauuuaa

SEQ ID NO: 35931 - RNA, 1701 nt, Artificial Sequence
  derived and/or modified CDS sequence (wt) from hemagglutinin__InfluenzaA__ACZ98318
augaaggcaauacuaguaguucugcuauauacauuugcaaccgcaaaugcagacacauuauguauagguuaucaugcgaacaauucaacagacacuguagacacaguacuagaaaagaauguaacaguaacacacucuguuaaccuucuagaagacaagcauaacgggaaacuaugcaaacuaagagggguagccccauugcauuuggguaaauguaacauugcuggcuggauccugggaaauccagagugugaaucacucuccacagcaagcucaugguccuacauuguggaaacaucuaguucagacaauggaacguguuacccaggagauuucaucgauuaugaggagcuaagagagcaauugagcucagugucaucauuugaaagguuugagauauuccccaagacaaguucauggcccaaucaugacucgaacaaagguguaacggcagcauguccucaugcuggagcaaaaagcuuuuacaaaaauuuaauauggcuaguuaaaaaaggaaauucauacccaaagcucagcaaauccuacauuaaugauaaagggaaagaaguccucgugcuauggggcauucaccauccaucuacuagugcugaccaacaaagucucuaucagaaugcagaugcauauguuuuuguggggacaucaagauacagcaagaaguucaagccggaaauagcaauaagacccaaagugagggaucaagaagggagaaugaacuauuacuggacacuaguagagccgggagacaaaauaacauucgaagcaacuggaaaucuagugguaccgagauaugcauucgcaauggaaagaaaugcuggaucugguauuaucauuucagauacaccaguccacgauugcaauacaacuugucagacacccaagggugcuauaaacaccagccucccauuucagaauauacauccgaucacaauuggaaaauguccaaaauauguaaaaagcacaaaauugagacuggccacaggauugaggaaugucccgucuauucaaucuagaggccuauuuggggccauugccgguuucauugaagggggguggacagggaugguagauggaugguacgguuaucaccaucaaaaugagcaggggucaggauaugcagccgaccugaagagcacacagaaugccauugacgagauuacuaacaaaguaaauucuguuauugaaaagaugaauacacaguucacagcaguagguaaagaguucaaccaccuggaaaaaagaauagagaauuuaaauaaaaaaguugaugaugguuuccuggacauuuggacuuacaaugccgaacuguugguucuauuggaaaaugaaagaacuuuggacuaccacgauucaaaugugaagaacuuauaugaaaagguaagaagccaguuaaaaaacaaugccaaggaaauuggaaacggcugcuuugaauuuuaccacaaaugcgauaacacgugcauggaaagugucaaaaaugggacuuaugacuacccaaaauacucagaggaagcaaaauuaaacagagaagaaauagaugggguaaagcuggaaucaacaaggauuuaccauauuuuggcgaucuauucaacugucgccaguucauugguacugguagucucccugggggcaaucaguuucuggaugugcucuaaugggucucuacaguguagaauauguauuuaa

SEQ ID NO: 35932 - RNA, 1701 nt, Artificial Sequence; identical to SEQ ID NO: 35864
  derived and/or modified CDS sequence (wt) from hemagglutinin__InfluenzaA__ACZ98328

SEQ ID NO: 35933 - RNA, 1701 nt, Artificial Sequence; identical to SEQ ID NO: 34681
  derived and/or modified CDS sequence (wt) from hemagglutinin__InfluenzaA__ACZ98338

SEQ ID NO: 35934 - RNA, 1701 nt, Artificial Sequence; identical to SEQ ID NO: 35821
  derived and/or modified CDS sequence (wt) from hemagglutinin__InfluenzaA__ACZ98348

SEQ ID NO: 35935 - RNA, 1701 nt, Artificial Sequence; identical to SEQ ID NO: 34681
  derived and/or modified CDS sequence (wt) from hemagglutinin__InfluenzaA__ACZ98358

SEQ ID NO: 35936 - RNA, 1701 nt, Artificial Sequence; identical to SEQ ID NO: 34681
  derived and/or modified CDS sequence (wt) from hemagglutinin__InfluenzaA__ACZ98368

SEQ ID NO: 35937 - RNA, 1701 nt, Artificial Sequence; identical to SEQ ID NO: 34965
  derived and/or modified CDS sequence (wt) from hemagglutinin__InfluenzaA__ACZ98388

SEQ ID NO: 35938 - RNA, 1701 nt, Artificial Sequence
  derived and/or modified CDS sequence (wt) from hemagglutinin__InfluenzaA__ACZ98398
augaaggcaauacuaguaguucugcuauauacauuugcaaccgcaaaugcagacacauuauguauagguuaucaugcgaacaauucaacagacacuguagacacaguacuagaaaagaauguaacaguaacacacucuguuaaccuucuagaagacaagcauaacgggaaacuaugcaaacuaagagggguagccccauugcauuuggguaaauguaacauugcuggcuggauccugggaaauccagagugugaaucacucuccacagcaagcucaugguccuacauuguggaaacaucuaguucagacaauggaacguguuacccaggagauuucaucgauuaugaggagcuaagagagcaauugagcucagugucaucauuugaaagguuugagauauuccccaagacaaguucauggcccaaucaugacucgaacaaagguguaacggcagcauguccucaugcuggagcaaaaagcuucuacaaaaauuuaauauggcuaguuaaaaaaggaaauucauacccaaagcucagcaaauccuacauuaaugauaaagggaaagaaguccucgugcuauggggcauucaccauccaucuacuagugcugaccaacaaagucucuaucagaaugcagaugcauauguuuuuguggggacaucaagauacagcaagaaguucaagccggaaauagcaauaagacccaaagugagggaucaagaagggagaaugaacuauuacuggacacuaguagagccuggagacaaaauaacauucgaagcaacuggaaaucuagugguaccgagauaugcauucgcaauggaaagaaaugcuggaucugguauuaucauuucagauacaccaguccacgauugcaauacaacuugucagacacccaagggugcuauaaacaccagccucccauuucagaacauacauccgaucacaauuggaaaauguccaaaauauguaaaaagcacaaaauugagacuggccacaggauugaggaaugucccgucuauucaaucuagaggccuauuuggggccauugccgguuucauugaagggggguggacagggaugguagauggaugguacgguuaucaccaucaaaaugagcaggggucaggauaugcagccgaccugaagagcacacagaaugccauugacgagauuacuaacaaaguaaauucuguuauugaaaagaugaauacacaguucacagcaguagguaaagaguucaaccaccuggaaaaaagaauagagaauuuaaauaaaaaaguugaugaugguuuccuggacauuuggacuuacaaugccgaacuguugguucuauuggaaaaugaaagaacuuuggacuaccacgauucaaaugugaagaacuuauaugaaaagguaaggagccaguuaaaaaacaaugccaaggaaauuggaaacggcugcuuugaauuuuaccacaaaugcgauaacacgugcauggaaagugucaaaaaugggacuuaugacuacccaaaauacucagaggaagcaaaauuaaacagagaagaaauagaugggguaaagcuggaaucaacaaggauuuaccagauuuuggcgaucuauucaacugucgccagcucauugguacugguagucucccugggggcaaucaguuucuggaugugcucuaaugggucucuacaguguagaauauguauuuaa

SEQ ID NO: 35939 - RNA, 1701 nt, Artificial Sequence; identical to SEQ ID NO: 34681
  derived and/or modified CDS sequence (wt) from hemagglutinin__InfluenzaA__ACZ98408

SEQ ID NO: 35940 - RNA, 1701 nt, Artificial Sequence; identical to SEQ ID NO: 35755
  derived and/or modified CDS sequence (wt) from hemagglutinin__InfluenzaA__ACZ98418

SEQ ID NO: 35941 - RNA, 1701 nt, Artificial Sequence; identical to SEQ ID NO: 34681
  derived and/or modified CDS sequence (wt) from hemagglutinin__InfluenzaA__ACZ98428

SEQ ID NO: 35942 - RNA, 1701 nt, Artificial Sequence; identical to SEQ ID NO: 34681
  derived and/or modified CDS sequence (wt) from hemagglutinin__InfluenzaA__ACZ98438

SEQ ID NO: 35943 - RNA, 1701 nt, Artificial Sequence; identical to SEQ ID NO: 34681
  derived and/or modified CDS sequence (wt) from hemagglutinin__InfluenzaA__ACZ98448

SEQ ID NO: 35944 - RNA, 1701 nt, Artificial Sequence; identical to SEQ ID NO: 35821
  derived and/or modified CDS sequence (wt) from hemagglutinin__InfluenzaA__ACZ98458

SEQ ID NO: 35945 - RNA, 1701 nt, Artificial Sequence
  derived and/or modified CDS sequence (wt) from hemagglutinin__InfluenzaA__ACZ98546
augaaggcaauacuaguaguucugcuauauacauuugcaaccgcaaaugcagacacauuauguauagguuaucaugcgaacaauucaacagacacuguagacacaguacuagaaaagaauguaacaguaacacacucuguuaaccuucuagaagacaagcauaacgggaaacuaugcaaacuaagagggguagccccauugcauuuggguaaauguaacauugcuggcuggauccugggaaauccagagugugaaucacucuccacagcaagcucaugguccuacauuguggaaacaucuaguucagacaauggaacguguuacccaggagauuucaucgauuaugaggagcuaagagagcaauugagcucagugucaucauuugaaagguuugagauauuccccaagacaaguucauggcccaaucaugacccgaacaaagguguaacggcagcauguccucaugcuggagcaaaaagcuucuacaaaaauuuaauauggcuaguuaaaaaaggaaauucauacccaaagcucagcaaauccuacauuaaugauaaagggaaagaaguccucgugcuauggggcauucaccauccaucuacuagugcugaccaacaaagucucuaucagaaugcagaugcauauguuuuuguggggacaucaagauacagcaagaaguucaagccggaaauagcaauaagacccaaagugagggaucaagaagggagaaugaacuauuacuggacacuaguagagccgggagacaaaauaacauucgaagcaacuggaaaucuagugguaccgagauaugcauucgcaauggaaagaaaugcuggaucugguauuaucauuucagauacaccaguccacgauugcaauacaacuugucagacacccaagggugcuauaaacaccagccucccauuucagaauauacauccgaucacaauuggaaaauguccaaaauauguaaaaagcacaaaauugagacugaccacaggauugaggaauguaccgucuauucaauauagaggcuuauuuggggccaucaccgguuucauugaagggggguggacagggaugguagauggaugguacgguuaucaccaucaaaaugagcaggggucaggauaugcagccgaccugaagagcacacagaaugccauugacgagauuacuaacaaaguaaauucuguuauugaaaagaugaauacacaguucacagcaguagguaaagaguucaaucaccuggaaaaaagaauagagaauuuaaauaaaaaaguugaugaugguuuccuggacauuuggacuuacaaugccgaacuguugguucuauuggaaaaugaaagaacuuuggacuaccacgauucaaaugugaagaacuuauaugaaaagguaagaagccaguuaaaaaacaaugccaaggaaauuggaaacggcugcuuugaauuuuaccacaaaugcgauaacacgugcauggaaagugucaaaaaugggacuuaugacuacccaaaauacucagaggaagcaaaauuaaacagagaagaaauagaugggguaaaacuggaaucaacaaggauuuaccagauuuuggcgaucuauucaacugucgccaguucauugguacugguagucucccugggggcaaucaguuucuggaugugcucuaaugggucucuacaguguagaauauguauuuaa

SEQ ID NO: 35946 - RNA, 1701 nt, Artificial Sequence
  derived and/or modified CDS sequence (wt) from hemagglutinin__InfluenzaA__ACZ98560
augaaggcaauacgaguaguucugcuauauacauuugcaaccgcaaaugcagacacauuauguauagguuaucaugcgaacaauucaacagacacuguagacacaguacuagaaaagaauguaacaguaacacacucuguuaaccuucuagaagacaagcauaacgggaaacuaugcaaacuaagagggguagccccauugcauuuggguaaauguaacauugcuggcuggauccugggaaauccagagugugaaucacucuccacagcaagcucaugguccuacauuguggaaacaucuaguucagacaauggaacguguuacccaggagauuucaucgauuaugaggagcuaagagagcaauugagcucagugucaucauuugaaagguuugagauauuccccaagacaaguucauggcccaaucaugacccgaacaaagguguaacggcagcauguccucaugcuggagcaaaaagcuucuacaaaaauuuaauauggcuaguuaaaaaaggaaauucauacccaaagcucagcaaauccuacauuaaugauaaagggaaagaaguccucgugcuauggggcauucaccauccaucuacuagugcugaccaacaaagucucuaucagaaugcagaugcauauguuuuuguggggacaucaagauacagcaagaaguucaagccggaaauagcaauaagacccaaagugagggaucaagaagggagaaugaacuauuacuggacacuaguagagccgggagacaaaauaacauucgaagcaacuggaaaucuagugguaccgagauaugcauucgcaauggaaagaaaugcuggaucugguauuaucauuucagauacaccaguccacgauugcaauacaacuugucagacacccaagggugcuauaaacaccagccucccauuucagaauauacauccgaucacaauuggaaaauguccaaaauauguaaaaagcccaaaauugagacuggccacaggaaugaggaauguaccguuuauucaauauagaggccuauuuggggccauuaccgguuucauugaagggggguggacagggaugguagauggaugguacgguuaucaccaucaaaaugagcaggggucaggauaugcagccgaccugaagagcacacagaaugccauugacgagauuacuaacaaaguaaauucuguuauugaaaagaugaauacacaguucacagcaguagguaaagaguucaaucaccuggaaaaaagaauagagaauuuaaauaaaaaaguugaugaugguuuccuggacauuuggacuuacaaugccgaacuguugguucuauuggaaaaugaaagaacuuuggacuaccacgauucaaaugugaagaacuuauaugaaaagguaagaagccaguuaaaaaacaaugccaaggaaauuggaaacggcugcuuugaauuuuaccacaaaugcgauaacacgugcauggaaagugucaaaaaugggacuuaugacuacccaaaauacucagaggaagcaaaauuaaacagagaagaaauagaugggguaaaacuggaaucaacaaggauuuaccagauuuuggcgaucuauucaacugucgccaguucauugguacugguagucucccugggggcaaucaguuucuggaugugcucuaaugggucucuacaguguagaauauguauuuaa

SEQ ID NO: 35947 - RNA, 1701 nt, Artificial Sequence
  derived and/or modified CDS sequence (wt) from hemagglutinin__InfluenzaA__ACZ98567
augaaggcaauacuaguaguucugcuauauacauuugcaaccgcaaaugcagacacauuauguauagguuaucaugcgaacaauucaacagacacuguagacacaguacuagaaaagaauguaacaguaacacacucuguuaaccuucuagaagacaagcauaacgggaaacuaugcaaacuaagagggguagccccauugcauuuggguaaauguaacauugcuggcuggauccugggaaauccagagugugaaucacucuccacagcaagcucaugguccuacauuguggaaacaucuaguucagacaauggaacguguuacccaggagauuucaucgauuaugaggagcuaagagagcaauugagcucagugucaucauuugaaagguuugagauauuccccaagacaaguucauggcccaaucaugacccgaacaaagguguaacggcagcauguccucaugcuggagcaaaaagcuucuacaaaaauuuaauauggcuaguuaaaaaaggaaauucauacccaaagcucagcaaauccuacauuaaugauaaagggaaagaaguccucgugcuauggggcauucaccauccaucuacuagugcugaccaacaaagucucuaucagaaugcagaugcauauguuuuuguggggacaucaagauacagcaagaaguucaagccggaaauagcaauaagacccaaagugagggaucaagaagggagaaugaacuauuacuggacacuaguagagccgggagacaaaauaacauucgaagcaacuggaaaucuagugguaccgagauaugcauucgcaauggaaagaaaugcuggaucugguauuaucauuucagauacaccaguccacgauugcaauacaacuugucagacacccaagggugcuauaaacaccagccucccauuucagaauauacauccgaucacaauuggaaaauguccaaaauauguaaaaagcccaaaauugagacuggccucaggcaugaggaauguaccguuuauucaaucuagaggccuauuuggggccaucaccgguuucauugaagagggguggacagggaugguagauggaugguacgguuuucaccaucaaaaugagcaggggucaggauaugcagccgaccugaagagcacacagaaugccauugacgagauuacuaacaaaguaaauucuguuauugaaaagaugaauacacaguucacagcaguagguaaagaguucaaucaccuggaaaaaagaauagagaauuuaaauaaaaaaguugaugaugguuuccuggacauuuggacuuacaaugccgaacuguugguucuauuggaaaaugaaagaacuuuggacuaccacgauucaaaugugaagaacuuauaugaaaagguaagaagccaguuaaaaaacaaugccaaggaaauuggaaacggcugcuuugaauuuuaccacaaaugcgauaacacgugcauggaaagugucaaaaaugggacuuaugacuacccaaaauacucagaggaagcaaaauuaaacagagaagaaauagaugggguaaaacuggaaucaacaaggauuuaccagauuuuggcgaucuauucaacugucgccaguucauugguacugguagucucccugggggcaaucaguuucuggaugugcucuaaugggucucuacaguguagaauauguauuuaa

SEQ ID NO: 35948 - RNA, 1701 nt, Artificial Sequence; identical to SEQ ID NO: 35899
  derived and/or modified CDS sequence (wt) from hemagglutinin__InfluenzaA__ACZ98671

SEQ ID NO: 35949 - RNA, 1701 nt, Artificial Sequence; identical to SEQ ID NO: 34705
  derived and/or modified CDS sequence (wt) from hemagglutinin__InfluenzaA__ACZ98681

SEQ ID NO: 35950 - RNA, 1701 nt, Artificial Sequence; identical to SEQ ID NO: 34980
  derived and/or modified CDS sequence (wt) from hemagglutinin__InfluenzaA__ACZ98691

SEQ ID NO: 35951 - RNA, 1701 nt, Artificial Sequence
  derived and/or modified CDS sequence (wt) from hemagglutinin__InfluenzaA__ADA60799
augaaggcaauacuaguaguucugcuauauacauuugcaaccgcaaaugcagacacauuauguauagguuaucaugcgaacaauucaacagacacuguagacacaguacuagaaaggaauguaacaguaacacacucuguuaaccuucuagaagacaagcauaacgggaaacuaugcaaacuaagagggguagccccauugcauuuggguaaauguaacauugcuggcuggauccugggaaauccagagugugagucacucuccacagcaagcucaugguccuacauuguggaaacaucuaguucagacaauggaacguguuacccaggagauuucaucgauuaugaggagcuaagagagcaauugaguucagugucaucauuugaaagguuugagauauuccccaagacaaguucauggcccaaucaugacucgaacaaagguguaacggcagcauguccucaugcuggagcaaaaagcuucuacaaaaauuuaauauggcuaguuaaaaaaggaaauucauacccaaagcucagcaaauccuacauuaaugauaaagggaaagaaguccuagugcuauggggcauucaccauccaucuacuagugcugaccaacaaagucucuaucagaaugcagaugcauauguuuuuguggggacaucaagauacagcaagaaguucaagccggaaauagcaauaagacccaaagugagggaucaagaagggagaaugaacuauuacuggacacuaguagagccgggagacaaaauaacauucgaagcaacuggaaaucuagugguaccgagauaugcauucgcaauggaaagaaaugcuggaucugguauuaucauuucagauacaccaguccacgauugcaauacaacuugucagacacccaagggugcuauaaacaccagccucccauuucagaauauacauccgaucacaauuggaaaauguccaaaauauguaaaaagcacaaaauugagacuggccacaggauugaggaauaucccgucuauucaaucuagaggccuauuuggggccauugccgguuucauugaagggggguggacagggaugguagauggaugguacgguuaucaucaucaaaaugagcaggggucaggauaugcagccgaccugaagagcacacagaaugccauugacgagauuacuaacaaaguaaauucuguuauugaaaagaugaauacacaguucacagcaguagguaaagaguucaaccaccuggaaaaaagaauagagaauuuaaauaaaaagguugaugaugguuuccuggacauuuggacuuacaaugccgaacuguugguucuauuggaaaaugaaagaacuuuggacuaccacgauucaaaugugaagaacuuauaugaaaagguaagaagccaguuaaaaaacaaugccaaggaaauuggaaacggcugcuuugaauuuuaccacaaaugcgauaacacgugcauggaaagugucaaaaaugggacuuaugacuacccaaaauacucagaggaagcaaaauuaaacagagaagaaauagaugggguaaagcuggaaucaacaaggauuuaccagauuuuggcgaucuauucaacugucgccaguucauugguacugguagucucccugggggcaaucaguuucuggaugugcucuaaugggucucuacaguguagaauauguauuuaa

SEQ ID NO: 35952 - RNA, 1701 nt, Artificial Sequence
  derived and/or modified CDS sequence (wt) from hemagglutinin__InfluenzaA__ADA69302
augaaggcaauacuaguaguucugcuauauacauuugcaaccgcaaaugcagacacauuauguauagguuaucaugcgaacaauucaacagacacuguagacacaguacuagaaaagaauguaacaguaacacacucuguuaaccuucuagaagacaagcauaacgggaaacuaugcaaacuaagagggguagccccauugcauuuggguaaauguaacauugcuggcuggauccugggaaauccagagugugaaucacucuccacagcaagcucaugguccuacauuguggaaacaucuaguucagacaauggaacguguuacccaggagauuucaucgauuaugaggagcuaagagagcaauugagcucagugucaucauuugaaagguuugagauauuccccaagacaaguucauggcccaaucaugacucgaacaaagguguaacggcagcauguccucaugcuggagcaaaaagcuucuacaaaaauuuaauauggcuaguuaaaaaaggaaauucauacccaaagcucagcaaauccuacauuaaugauaaagggaaagaaguccucgugcuauggggcauucaccauccaucuacuagugcugaccaacaaagucucuaucagaaugcagaugcauauguuuuuguggggacaucaagauacagcaagaaguucaagccggaaauagcaauaagacccaaagugagggaucaagaagggagaaugaacuauuacuggacacuaguagagccgggagacaaaauaacauucgaagcaacuggaaaucuagugguaccgagauaugcauucgcaauggaaagaaaugcuggaucugguauuaucauuucagauacaccaguccacgauugcaauacaacuugucagacacccaagggugcuauaaacaccagccucccauuucagaauauacauccgaucacaauuggaaaauguccaaaauauguaaaaagcacaaaauugagacuggccacaggauugaggaaugucccgucuauucaaucuagaggccuauuuggggccauugccgguuucauugaagggggguggacagggaugguagauggaugguacgguuaucaccaucaaaaugagcaggggucaggauaugcagccgaccugaagagcacacagaaugccauugacaagauuacuaacaaaguaaauucuguuauugaaaaaaugaauacacaguucacagcaguagguaaagaguucaaccaccuggaaaaaagaauagagaauuuaaauaaaaaaguugaugaugguuuccuggacauuuggacuuacaaugccgaacuguugguucuauuggaaaaugaaagaacuuuggacuaccacgauucaaaugugaagaacuuauaugaaaagguaagaagccaguuaaaaaacaaugccaaggaaauuggaaacggcugcuuugaauuuuaccacaaaugcgauaacacgugcauggaaagugucaaaaaugggacuuaugacuacccaaaauacucagaggaagcaaaauuaaacagagaagaaauagaugggguaaagcuggaaucaacaaggauuuaccagauuuuggcgaucuauucaacugucgccaguucauugguacugguagucucccugggggcaaucaguuucuggaugugcucuaaugggucucuacaguguagaauauguauuuaa

SEQ ID NO: 35953 - RNA, 1701 nt, Artificial Sequence; identical to SEQ ID NO: 35952
  derived and/or modified CDS sequence (wt) from hemagglutinin__InfluenzaA__ADA69312

SEQ ID NO: 35954 - RNA, 1701 nt, Artificial Sequence; identical to SEQ ID NO: 35952
  derived and/or modified CDS sequence (wt) from hemagglutinin__InfluenzaA__ADA69322

SEQ ID NO: 35955 - RNA, 1701 nt, Artificial Sequence; identical to SEQ ID NO: 35952
  derived and/or modified CDS sequence (wt) from hemagglutinin__InfluenzaA__ADA69332

SEQ ID NO: 35956 - RNA, 1701 nt, Artificial Sequence; identical to SEQ ID NO: 35782
  derived and/or modified CDS sequence (wt) from hemagglutinin__InfluenzaA__ADA70329

SEQ ID NO: 35957 - RNA, 1698 nt, Artificial Sequence
  derived and/or modified CDS sequence (wt) from hemagglutinin__InfluenzaA__ADA71150
augaaaguaaaacuacugguccuguuaugcacauuuacagcuacauaugcagacacaauauguauaggcuaccaugcuaacaacucgaccgacacuguugacacaguacuugaaaagaaugugacagugacccacucugucaaccugguugagaacagucacaauggaaaacuaugucuauuaaaaggaauagccccacuacaauuggguaacugcagcguugccggguggaucuuaggaaacccagaaugcgaauuacugauuuccaaggagucaugguccuacauuguagaaaaaccaaauccugagaauggaacauguuacccagggcauuucgcugacuaugaggaacugagggagcaauugaguucaguaucuucauuugagagguucgaaauauuccccaaagaaagcucauggcccaaccacaccguaaccggagugucagcaucaugcucccauaauggggaaagcaguuuuuacagaaauuugcuauggcugacggggaagaaugguuuguacccaaaccugagcaaguccuaugcaaacaacaaagaaaaagaaguccuuguacuaugggguguucaucacccgccaagcauaaguaaccaaaagacccucuaucauacagaaaaugcuuauguuucuguagugucuucacauuauagcagaaaauucaccccagaaauagccaaaagacccaaaguaagagaucaagaaggaagaaucaacuacuacuggacucugcuugaacccggggauacaauaauauuugaggcaaauggaaaucuaauagcgccaagauaugcuuucgcacugaguagaggcuuuggaucaggaaucaucaacucaaaugcaccaauggauaaaugugaugcgaagugccaaacaccucagggagcuauaaacagcagucuuccuuuccagaacguacacccagucacaauaggagaguguccaaaguaugucaggagugcaaaauuaaggaugguuacaggacuaaggaacaucccauccauucaauccagagguuuguuuggagccauugccgguuucauugaagggggguggacuggaaugguagaugguugguaugguuaucaucaucagaaugagcaaggaucuggcuaugcugcagaucaaaaaagcacacaaaaugccauuaaugggauuacaaaaaaggugaauucuguaauugagaaaaugaacacucaauucacagcagugggcaaagaauucaacaaauuggaaagaaggauggaaaacuugaauaaaaaaguugaugauggguuuauagacauuuggacauauaaugcagaacuguugguucuacuggaaaaugaaaggacuuuggauuuccaugacuccaaugugaagaaucuguaugagaaaguaaaaagccagcuaaagaauaaugcuaaagaaauaggaaauggguguuuugaauucuaucacaaguguaacgaugaaugcauggagaguguaaagaauggaacuuaugacuauccaaaauacuccgaagaaucaaaguuaaacagggagaaaauugauggagugaaauuggaaucaaugggagucuaucagauucuggcgaucuacucaacagucgccaguucucugguucuuuuggucucccugggggcaaucaguuucuggauguguuccaaugggucuuugcaguguagaauaugcaucuaa

SEQ ID NO: 35958 - RNA, 1701 nt, Artificial Sequence
  derived and/or modified CDS sequence (wt) from hemagglutinin__InfluenzaA__ADA71152
augaagacuaucauugcuuugagcuacauucuaugucugguuuucgcucaaaaacuuccuggaaaugacaacagcacggcaacgcugugccuugggcaccaugcaguaccaaacggaacgauagugaaaacaaucacgaaugaccaaauugaaguuacuaaugcuacugagcugguucagaguuccucaacaggugaaauaugcgacaguccucaucagauccuugauggaggaaacugcacacuaauagaugcucuauugggagacccucagugugauggcuuccaaaauaagaaaugggaccuuuuuguugaacgaagcaaagccuacagcaacuguuacccuuaugaugugccggauuaugccucccuuaggucacuaguugccucauccggcacacuggaguuuaacaaugaaagcuucaauuggacuggagucacucaaaacggaacaagcucugcuugcauaaggagaucuaauaacaguuucuuuaguagauugaauugguugacccacuuaaaauucaaauacccagcauugaacgugacuaugccaaacaaugaacaauuugacaaauuguacauuugggggguucaccacccggguacggacaaugaccaaaucuuccuguaugcucaagcaucaggaagaaucacaguaucuaccaaaagaagccaacaaacuguaaucccgaauaucggaucuagacccagaguaaggaauaucccuagcagaauaagcaucuauuggacaauaguaaaaccgggagacauacuuuugauuaacagcacagggaaucuaauugcuccuagggguuacuucaaaauacgaagugggaaaagcucaauaaugagaucagaugcacccauuggcaaaugcaauucugaaugcaucacuccaaauggaagcauucccaaugacaaaccauuccaaaauguaaacaggaucacauacggggccugucccagauauguuaagcaaaacacucugaaauuggcaacaggaaugcgaaauguaccagagaaacaaacuagaggcauauuuggcgcaaucgcggguuucauagaaaaugguugggagggaaugguggaugguugguacgguuucaggcaucaaaauucugagggaagaggacaagcagcagaucucaaaagcacucaagcagcaaucgaucaaaucaaugggaagcugaauagauugaucgggaaaaccaacgagaaauuccaucagauugaaaaagaauucucagaagucgaagggagaauucaggaccuugagaaauauguugaggacacuaaaauagaucucuggucauacaacgcggagcuucuuguugcccuggagaaccaacauacaauugaucuaacugacucagaaaugaacaaacuguuugaaaaaacaaagaagcaacugagggaaaaugcugaggauaugggcaaugguuguuucaaaauauaccacaaaugugacaaugccugcauaggaucaaucagaaauggaacuuaugaccacgauguauacagagaugaagcauuaaacaaccgguuccagaucaagggaguugagcugaagucaggguacaaagauuggauccuauggauuuccuuugccauaucauguuuuuugcuuuguguugcuuuguugggguucaucaugugggccugccaaaaaggcaacauuaggugcaacauuugcauuuga

SEQ ID NO: 35959 - RNA, 1698 nt, Artificial Sequence
  derived and/or modified CDS sequence (wt) from hemagglutinin__InfluenzaA__ADA71154
augaaaguaaaacuacugguccuguuaugcacauuuacagcuacauaugcagacacaauauguauaggcuaccaugcuaacaacucgaccgacacuguugacacaguacuugaaaagaaugugacagugacacacucugucaaccugcuugagaacagucacaauggaaaacuaugucuauuaaaaggaauagccccacuacaauuggguaacugcagcguugccggguggaucuuaggaaauucagaaugcgaauuacugauuuccaaggagucaugguccuacauuguagaaaaaccaaauccugagaauggaacauguuacuucgggcauuucgcugacuaugaggaacugagggagcaauuugguucaguaucuucauuugagagguucgaaauauuccccaaagaaagcucauggcccaaccacaccguaaccggagugucagcaucaugcucccauaauggggaaagcaguuuuuacagaaauuugcuauggcugacggggaagaaugguuuguacccaaaccugagcaaguccuaugcaaacaacaaagaaaaagaaguccuuguacuaugggguguucaucacccgccaagcauaaaugaucaaaagacccucuaucauacagaaaaugcuuauguuucuguagugucuucacauuauagcagaaaauucaccccagaaauagccaaaagacccaaaguaagagaucaagaaggaagaaucaacuacuacuggacucugcuugaacccagggauacaauaauauuugaggcaaauggaaaucuaauagcgccaagauaugcuuucgcacugaguagaggcuuuggaucaggaaucaucaacucaaaugcaccaauggauaaaugugaugcgaagugccaaacaccucagggagcuauaaacagcagucuuccuuuccagaacguacacccagucacaauaggagaguguccaaaguaugucaggagugcaaaauuaaggaugguuacaggacuaaggaacaucccauccauucaauccagagguuuguuuggagccauugccgguuucauugaagggggguggacuggaaugguagaugguugguaugguuaucaucaucagaaugagcaaggaucuggcuaugcugcagaucaaaaaagcacacaaaaugccauuaaugggauuacaaacaaggugaauucuguaauugagaaaaugaacacucaauucacagcagugggcaaagaauucaacaaauuggaaagaaggauggaaaacuugaauaaaaaaguugaugauggguuuauagacauuuggacauauaaugcagaacuguugguucuacuggaaaaugaaaggacuuuggauuuccaugacuccaaugugaagaaucuguaugagaaaguaaaaagccaguuaaagaauaaugcuaaagaaauaggaaauggguguuuugaauucuaucacaaguguaacgaugaaugcauggagaguguaaagaauggaacuuaugacuauccaaaauauucugaagaaucaaaguuaaacagggagaaaauugauggagugaaauuggaaucaaugggagucuaucagauucuggcgaucuacucaacagucgccaguucucugguucuuuuggucucccugggggcaaucagcuucuggauguguuccaaugggucuuugcaguguagaauaugcaucuaa

SEQ ID NO: 35960 - RNA, 1698 nt, Artificial Sequence
  derived and/or modified CDS sequence (wt) from hemagglutinin__InfluenzaA__ADA71158
augaaaguaaaacuacugguccuguuaugcacauuuacagcuacauaugcagacacaauauguauaggcuaccaugcuaacaacucgaccgacacuguugacacaguacuugaaaagaaugugacagugacacacucugucaaccugcuugagaacagucacaauggaaaacuaugucuauuaaaaggaauagccccacuacaauuggguaacugcagcguugccggguggaucuuaggaaacccagaaugcgaauuacugauuuccaaggagacaugguccuacauuguagaaaaaccaaauccugagaauggaacauguuacccagggcauuucgcugacuaugaggaacugagggagcaauugaguucaguaucuucauuugagagguucgaaauauuccccaaagaaagcucauggcccaaccacaccguaaccggagugucagcaucaugcucccauaauggggaaagcaguuuuuacagaaauuugcuauggcugacggggaagaaugguuuguacccaaaccugagcaaguccuaugcaaacaacaaagaaaaagaaguccuuguacuaugggguguucaucacccgccaagcauaaaugaucaaaggacccucuaucauacagaaaaugcuuauguuucuguagugucuucacauuauagcagaaaauucaccccagaaauagccaaaagacccaaaguaagagaucaagaaggaagaaucaacuacuacuggacucugcuugaacccagggauacaauaauauuugaggcaaauggaaaucuaauagcgccaagauaugcuuucgcacugaguagaggcuuuggaucaggaaucaucaacucaaaugcaccaauggauaaaugugaugcgaagugccaaacaccucagggagcuauaaacagcagucuuccuuuccagaacguacacccagucacaauaggagaguguccaaaguaugucaggagugcaaaauuaaggaugguuacaggacuaaggaacaccccauccauucaauccagagguuuguuuggagccauugccgguuucauugaagggggguggacuggaaugguagaugguugguaugguuaucaucaucagaaugagcaaggaucuggcuaugcugcagaucaaaaaagcacacaaaaugccauuaaugggauuacaaacaaggugaauucuguaauugagaaaaugaacacucaauucacagcagugggcaaagaauucaacaaauuggaaaguuugauggauaucuugaauaaaaaaguugaugauggguuuauagacauuuggacauauaaugcagaacuguugguucuacuggaaaaugaaaggacuuuggauuuccaugacuccaaugugaagaaucuguaugagaaaguaaaaagccaguuaaagaauaaugcuaaagaaauaggaaauggguguuuugaauucuaucacaaguguaacgaugaaugcauggagaguguaaagaauggaacuuaugacuauccaaaauauuccgaagaaucaaaguuaaacagggagaaaauugauggagugaaauuggaaucaaugggagucuaucagauucuggcgaucuacucaacagucgccaguucucugguucuuuuggucucccugggggcaaucagcuucuggauguguuccaaugggucuuugcaguguagaauaugcaucuaa

SEQ ID NO: 35961 - RNA, 1701 nt, Artificial Sequence
  derived and/or modified CDS sequence (wt) from hemagglutinin__InfluenzaA__ADA71162
augaagacuaucauugcuuugagcuacauucuaugucugguuuucgcucaaaaacuuccuggaaaugacaacagcacggcaacgcugugccuugggcaccaugcaguaccaaacggaacgauagugaaaacaaucacgaaugaccaaauugaaguuacuaaugcuacugagcugguucagaguuccucaacaggugaaauaugcgacaguccucaucagauccuugauggagaaaacugcacacuaauagaugcucuauugggagacccucagugugauggcuuccaaaauaagaaaugggaccuuuuuguugaacgcagcaaagccuacagcaacuguuacccuuaugaugugccggauuaugccucccuuaggucacuaguugccucauccggcacacuggaguuuaacaaugaaagcuucaauuggacuggagucacucaaaacggaacaagcucugcuugcauaaggagaucuaauaacaguuucuuuaguagauugaauugguugacccacuuaaaauucaaauacccagcauuaaacgugacuaugccaaacaaugaacaauuugacaaauuguacauuugggggguucaccacccggguacggacaaugaccaaaucuuccuguaugcucaagcaucaggaagaaucacagucucuaccaaaagaagccaacaaacuguaaucccgaauaucggaucuagacccagaguaaggaauaucccuagcagaauaagcaucuauuggacaauaguaaaaccgggagacauacuuuugauuaacagcacagggaaucuaauugcuccuagggguuacuucaaaauacgaagugggaaaagcucaauaaugagaucagaugcacccauuggcaaaugcaauucugaaugcaucacuccaaauggaagcauucccaaugacaaaccauuccaaaauguaaacaggaucacauacggggccugucccagauauguuaagcaaaacacucugaaauuggcaacagggaugcgaaauguaccagagaaacaaacuagaggcauauuuggcgcaaucgcggguuucauagaaaaugguugggagggaaugguggaugguugguacgguuucaggcaucaaaauucugagggaagaggacaagcagcagaucucaaaagcacucaagcagcaaucgaucaaaucaaugggaagcugaauagauugaucgggaaaaccaacgagaaauuccaucagauugaaaaagaauucucagaagucgaagggagaauucaggaccuugagaaauauguugaggacaccaaaauagaucucuggucauacaacgcggagcuucuuguugcccuggagaaccaacauacaauugaucuaacugacucagaaaugaacaaacuguuugaaaaaacaaagaagcaacugagggaaaaugcugaggauaugggcaaugguuguuucaaaauauaccacaaaugugacaaugccugcauaggaucaaucagaaauggaacuuaugaccacgauguauacagagaugaagcauuaaacaaccgguuccagaucaagggaguugagcugaagucaggguacaaagauuggauccuauggauuuccuuugccauaucauguuuuuugcuuuguguugcuuuguugggguucaucaugugggccugccaaaaaggcaacauuaggugcaacauuugcauuuga

SEQ ID NO: 35962 - RNA, 1698 nt, Artificial Sequence
  derived and/or modified CDS sequence (wt) from hemagglutinin__InfluenzaA__ADA71164
augaaaguaaaacuacugguccuguuaugcacauuuacagcuacauaugcagacacaauauguauaggcuaccaugcuaacaacucgaccgacacuguugacacaguacuugaaaagaaugugacagugacacacucugucaaccugcuugagaacagucacaauggaaaacuaugucuauuaaaaggaauagccccauuacaauuggguaacugcagcguugccggguggaucuuaggaaacccagaaugcgaauuacugguuuccaaggagucaugguccuacauuguagaaaaaccaaauccugagaauggaacauguuacccagggcauuucgcugacuaugaggaacugagggagcaauugaguucaguaucuucauuugagagguucgaaauauuccccaaagaaagcucauggcccaaccacaccguaaccggagcgucagcaucaugcucccauaauggggaaaacaguuuuuacagaaauuugcuauggcugacggggaagaaugguuuguacccaaaccugagcaaguccuaugcaaacaacaaagaaaaagaaguccuuguacuaugggguguucaucacccgccaagcauagcugaucaaaagacccucuaucauacagaaaaugcuuauguuucuguagugucuucacauuauagcagaaaauucaccccagaaauagccaaaagacccaaaguaagagaucaagaaggaagaauccacuacuacuggacucugcuugaacccggggauacaauaauauuugaggcaaauggaaaucuaauagcgccaagauaugcuuucgcacugaguaggggcuuuggaucaggaaucaucaacucaaaugcaccaauggauaaaugugaugcgacgugccaaacaccucagggagcuauaaacagcagucuuccuuuccagaacguacacccagucacaauaggagaguguccaaaguaugucaggagugcaaaauuaaggaugguuacaggacuaaggaacaucccauccauucaauccagagguuuguuuggagccauugccgguuucauugaagggggguggacuggaaugguagaugguugguaugguuaucaucaucagaaugagcaaggaucuggcuaugcugcagaucaaaaaagcacacaaaaugccauuaaugggauuacaaacaaggugaauucuguaauugagaaaaugaacacucaauucacagcagugggcaaagaauucaacaaauuggaaagaaggauggaaaacuugaauaaaaaaguugaugauggguuuauagacauuuggacauauaaugcagaacuguugguucuacuggaaaaugaaaggacuuuggauuuccaugacuccaaugugaagaaucuguaugagaaaguaauaagccaguuaaagauuaaugcuaaagauuuaggauauggguguuuugaauucuaucacaaguguaacgaugaaugcauggagaguguaaagaauggaacuuaugacuauccaaaauauuccgaagaaucaaaguuaaacagggagaaaauugauggagugaaauuggaaucaaugggagucuaucagauucuggcgaucuacucaacagucgccaguucucugguucuuuuggucucccugggggcaaucagcuucuggauguguuccaaugggucuuugcaguguagaauaugcaucuaa

SEQ ID NO: 35963 - RNA, 1698 nt, Artificial Sequence
  derived and/or modified CDS sequence (wt) from hemagglutinin__InfluenzaA__ADA71168
augaaaguaaaacuacugguccuguuaugcacauuuacagcuacauaugcagacacaauauguaucggcuaccaugccaacaacucaaccgacacuguugacacaguacuugaaaagaaugugacagugacacacucugucaaccugcuugaggacaaccacaauggaaaacuaugucuauuaaaaggaaaagccccauuacaauuggguaacugcagcguugccggguggaucuuaggaaacccagaaugcggauuacugauuuccaaggagucaugguccuacauuguagaaagaccaaauccugagaauggaacauguuacccagggcauuucgccgacuaugaggaacugagggagcaauugaguucaguaucuucauuugagagguucgaaauauuccccaaagaaagcucauggcccaaccacaccguaaccggaguaucagcaucaugcucccauaacggggaaagcagcuuuuacaaaaauuugcuauggcugacgggaaagaaugguuuguacccaaaccugagcaaguccuaugcaaacaacaaagagaaagaaguccucguacuaugggguguucaucacccgccaaacauagguguccaaaugacccucuaucauaaagaaaaugcuuaugucucuguagugucuucacauuauagcagaaaauucaccccagaaauagucaaaagacccaaaguaagagaucaagaaggaagaaucaacuacuacuggacucugcuugaacccggggauacaauaauauuugaggcaaaugggaaucuaauagcgccaagauaugcuuucgcacugaguagaggcuuuggaucaggaaucaucaacucaaaugcaccaauggaugaaugugaugcgaagugccaaacaccucagggagcuauaaacagcagucuuccuuuccagaauguacacccagucacaauaggagaauguccaaaguaugucaggagugcaaaauuaaggaugguuacaggacuaaggaacaucccauccauucaauccagagguuuguuuggagccauugccgguuucauugaagggggguggacuggaaugguagaugguugguaugguuaucaucaucagaaugagcaaggaucuggcuaugcugcagaucaaaaaagcacacaaaaugccauuaaugggauuacaaacaaggugaauucuguaauugagaaaaugaacacucaauucacagcagugggcaaagaauucaacaaauuggaaagaaggauggaaaacuugaauaaaaaaguugaugauggguuuauagacauuuggacauauaaugcagaacuguugguucuacuggaaaaugaaaggacuuuggauuuccaugacuccaaugugaagaaucuguaugagaaaguaaaaagccaguuaaagaauaaugcuaaagaaauaggaaauggguguuuugaauucuaucacaaguguaacgaugaaugcauggagaguguaaagaauggaacuuaugacuauccaaaauauuccgaagaaucaaaguuaaacagggagaaaauugauggagugaaauuggaaucaaugggagucuaucagauucuggcgaucuacucaacagucgccaguucucugguucuuuuggucucccugggggcaaucagcuucuggauguguuccaaugggucuuugcaguguagaauaugcaucuaa

SEQ ID NO: 35964 - RNA, 1698 nt, Artificial Sequence
  derived and/or modified CDS sequence (wt) from hemagglutinin__InfluenzaA__ADA71170
augaaaguaaaacuacugguccuguuaugcacauuuacagcuacauaugcagacacaauauguauaggcuaccaugcuaacaacucgaccgacacuguugacacaguacuugaaaagaaugggacagugacccccucuggcaaccugguugaaaacagucccaauggaaaacuuugucuauuaaaaggaauaaccccauuacaauuggguaaaugcagcguugccggguggaucuuaggaaacccaaaaugggaauuacugguuuccaaggagucaugguccuacauuggaaaaaaaccaaauccugaaaauggaacauguuacccagggcauuucccuuacuaugaagaacugagggagcaauugaguucaguaucuucauuugagagguucgaaauauuccccaaagaaagcucauggcccaaccacaccguaaccggagcgucagcaucaugcucccauaauggggaaaacaguuuuuacagaaauuugcuauggcugacggggaagaaugguuuguacccaaaccugagcaaguccuaugcaaacaacaaagaaaaagaaguccuuguacuaugggguguucaucacccgccaaacauagcugaccaaaagacccucuaucauacagaaaaugcuuauguuucuguagugucuucacauuauagcagaaaauucaccccagaaauagccaaaagacccaaaguaagagaucaagaaggaagaaucaacuacuacuggacucugcuugaacccggggauacaauaauauuugaggcaaauggaaaucuaauagcgccaagauaugcuuucgcacugaguagaggcuuuggaucaggaaucaucaacucaaaugcaccaauggauaaaugugaugcgaagugccaaacaccucagggagcuauaaacagcagucuuccuuuccagaacguacacccagucacaauaggagaguguccaaaguaugucaggagugcaaaauuaaggaugguuacaggacuaaggaacaucccauccauucaauccagagguuuguuuggagccauugccgguuucauugaagggggguggacuggaaugguagaugguugguaugguuaucaucaucagaaugagcaaggaucuggcuaugcugcagaucaaaaaagcacacaaaaugccauuaaugggauuacaaacaaggugaauucuguaauugagaaaaugaacacucaauucacagcagugggcaaagaauucaacaaauuggaaagaaggauggaaaacuugaauaaaaaaguugaugauggguuuauagacauuuggacauauaaugcagaacuguugguucuacuggaaaaugaaaggacuuuggauuuccaugacuccaaugugaagaaucuguaugagaaaguaaaaagccaguuaaagaauaaugcuaaagaaauaggaaauggguguuuugaauucuaucacaaguguaacgaugaaugcauggagaguguaaagaauggaacuuaugacuauccaaaauauuccgaagaaucaaaguuaaacagggagaaaauugauggagugaaauuggaaucaaugggagucuaucagauucuggcgaucuacucaacagucgccaguucucugguucuuuuggucucccugggggcaaucagcuucuggauguguuccaaugggucuuugcaguguagaauaugcaucuaa

SEQ ID NO: 35965 - RNA, 1701 nt, Artificial Sequence
  derived and/or modified CDS sequence (wt) from hemagglutinin__InfluenzaA__ADA71172
augaagacuaucauugcuuugagcuacauucuaugucugguuuucacucaaaaacuuccuggaaaugacaacagcacggcaacgcugugccuugggcaccaugcaguaccaaacggaacgauagugaaaacaaucacgaaugaccaaauugaaguuacuaacgcuacugagcugguucagaguuccucaacaggugaaauaugcgacaguccucaucagauccuugauggagaaaacugcacacuaauagaugcucuauugggagacccucagugugauggcuuccaaaauaagaaaugggaccuuuuuguugaacgaagcaaagccuacagcaacuguuacccuuaugaugugccggauuaugccucccuuaggucacuaguugccucauccggcacacuggaguuuaacaaugaaagcuucaauuggacuggagucacucaaaacggaacaagcucugcuugcauaaggagaucuaauaacaguuucuuuaguagauugaauugguugacccacuuaaaauucaaauacccagcauugaaugugacuaugccaaacaaugaacaauuugacaaauuguacauuugggggguucaccacccggguacggacaaugaccaaaucuuccuguaugcucaagcaucaggaagaaucacaguaucuaccaaaagaagccaacaaacuguaaucccgaauaucggaucuagacccagaguaaggaauaucccuagcagaauaagcaucuauuggacaauaguaaaaccgggagacauacuuuugauuaacagcacaggaaaucuaauugcuccuagggguuacuucaaaauacgaagugggaaaagcucaauaaugagaucagaugcacccauuggcaaaugcaauucugaaugcaucacuccaaauggaagcauucccaaugacaaaccauuccaaaauguaaacaggaucacauacggggccugucccagauauguuaagcaaaacacucugaaauuggcaacaggaaugcgaaauguaccagagaaacaaacuagaggcauauuuggcgcaauagcggguuucauagaaaaugguugggagggaaugguggaugguugguacgguuucaggcaucaaaauucugagggaagaggacaagcagcagaucucaaaagcacucaagcagcaaucgaucaaaucaaugggaagcugaauagauugaucgggaaaaccaacgagaaauuccaucagauugaaaaagaauucucagaagucgaagggagaauucaggaccuugagaaauauguugaggacacuaaaauagaucucuggucauacaacgcggagcuucuuguugcccuggagaaccaacauacaauugaucuaacugacucagaaaugaacaaacuguuugaaaaaacaaagaagcaacugagggaaaaugcugaggauaugggcaaugguuguuucaaaauauaccacaaaugugacaaugccugcauaggaucaaucagaaauggaacuuaugaccacgauguauacagagaugaagcauuaaacaaccgguuccagaucaagggaguugagcugaagucaggguacaaagauuggauccuauggauuuccuuugccauaucauguuuuuugcuuuguguugcuuuguugggguucaucaugugggccugccaaaaaggcaacauuaggugcaacauuugcauuuga

SEQ ID NO: 35966 - RNA, 1698 nt, Artificial Sequence
  derived and/or modified CDS sequence (wt) from hemagglutinin__InfluenzaA__ADA71176
augaaaguaaaacuacugguccuguuaugcacauuuacagcuacauaugcagacacaauauguauaggcuaccaugcuaacaacucgaccgacacuguugacacaguacuugaaaagaaugugacagugacacacucugucaaccugcuugagaacagucacaauggaaaacuaugucuauuaaaaggaauagccccauuacaauuggguaacugcagcguugccggguggaucuuaggaaacccagaaugcgaauuacugauuuccaaggagucaugguccuacauuguagaaaaaccaaauccugagaauggaacauguuacccagggcauuucgcugacuaugaggaacugagggagcaauugaguucaguaucuucauuugagagguucgaaauauuccccaaagaaagcucauggcccaaccacaccguaaccggagcgucagcaucaugcucccauaauggggaaaacaguuuuuacagaaauuugcuauggcugacggggaagaaugguuuguacccaaaccugagcaaguccuaugcaaacaacaaagaaaaagaaguccuuguacuaugggguguucaucacccgccaaacauagcuaaccaaaagacccucuaucauacagaaaaugcuuauguuucuguagugucuucacauuauagcagaaaauucaccccagaaauagccaaaagacccaaaguaagagaucaagaaggaagaaucaacuacuacuggacucugcuugaacccggggauacaauaauauuugaggcaaauggaaaucuaauagcgccaagauaugcuuucgcacugaguaggggcuuuggaucaggaaucaucaacucaaaugcaccaauggauaaaugugaugcgacgugccaaacaccucaaggagcuauaaacagcagucuuccuuuccagaacguacacccagucacaauaggagaguguccaaaguaugucaggagugcaaaauuaaggaugguuacaggacuaaggaacaucccauccauucaauccagagguuuguuuggagccauugccgguuucauugaagggggguggacuggaaugguagaugguugguaugguuaucaucaucagaaugagcaaggaucuggcuaugcugcagaucaaaaaagcacacaaaaugccauuaaugggauuacaaacaaggugaauucuguaauugagaaaaugaacacucaauucacagcagugggcaaagaauucaacaaauuggaaagaaggauggaaaacuugaauaaaaaaguugaugauggguuuauagacauuuggacauauaaugcagaacuguugguucuacuggaaaaugaaaggacuuuggauuuccaugacuccaaugugaagaaucuguaugagaaaguaaaaagccaguuaaagaauaaugcuaaagaaauaggaaauggguguuuugaauucuaucacaaguguaacgaugaaugcauggagaguguaaagaauggaacuuaugacuauccaaaauauuccgaagaaucaaaguuaaacagggagaaaauugauggagugaaauuggaaucaaugggagucuaucagauucuggcgaucuacucaacagucgccaguucucugguucuuuuggucucccugggggcaaucagcuucuggauguguuccaaugggucuuugcaguguagaauaugcaucuaa

SEQ ID NO: 35967 - RNA, 1701 nt, Artificial Sequence
  derived and/or modified CDS sequence (wt) from hemagglutinin__InfluenzaA__ADA71181
augaaggcaauacuaguaguucugcuauauacauuugcaaccgcaaaugcagacacauuauguauagguuaucaugcgaacaauucaacagacacuguagacacaguacuagaaaagaauguaacaguaacacacucuguuaaccuucuagaagacaagcauaacgggaaacuaugcaaacuaagagggguagccccauugcauuuggguaaauguaacauugcuggcuggauccugggaaauccagagugugaaucacucuccacagcaagcucaugguccuacauuguggaaacaucuaguucagacaauggaacguguuacccaggagauuucaucgauuaugaggagcuaagagagcaauugagcucagugucaucauuugaaagguuugagauauuccccaagacaaguucauggcccaaucaugacucgaacaaagguguaacggcagcauguccucaugcuggagcaaaaagcuucuacaaaaauuuaauauggcuaguuaaaaaaggaaauucauacccaaagcucagcaaauccuacauuaaugauaaagggaaagaaguccucgugcuauggggcauucaccauccaucuacuagugcugaccaacaaagucucuaucagaaugcagaugcauauguuuuuguggggacaucaagauacagcaagaaguucaagccggaaauagcaauaagacccaaagugagggaucaagaagggagaaugaacuauuacuggacacuaguagaaccgggagacaaaauaacauucgaagcaacuggaaaucuagugguaccgagauaugcauucgcaauggaaagaaaugcuggaucugguauuaucauuucagauacaccaguccacgauugcaauacaacuugucagacacccaagggugcuauaaacaccagccucccauuucagaauauacauccgaucacaauuggaaaauguccaaaauauguaaaaagcacaaaauugagacuggccacaggauugaggaauaucccgucuauucaaucuagaggccuauuuggggccauugccgguuucauugaagggggguggacagggaugguagauggaugguacgguuaucaccaucaaaaugagcaggggucaggauaugcagccgaccugaagagcacacagaaugccauugacgagauuacuaacaaaguaaauucuguuauugaaaagaugaauacacaguucacagcaguagguaaagaguucaaccaccuggaaaaaagaauagagaauuuaaauaaaaagguugaugaugguuuccuggacauuuggacuuacaaugccgaacuguugguucuauuggaaaaugaaagaacuuuggacuaccacgauucaaaugugaagaacuuauaugaaaagguaagaagccaguuaaaaaacaaugccaaggaaauuggaaacggcugcuuugaauuuuaccacaaaugcgauaacacgugcauggaaagugucaaaaacgggacuuaugacuacccaaaauacucagaggaagcaaaauuaaacagagaagaaauagaugggguaaagcuggaaucaacaaggauuuaccagauuuuggcgaucuauucaacugucgccaguucauugguacugguagucucccugggggcaaucaguuucuggaugugcucuaaugggucucuacaguguagaauauguauuuaa

SEQ ID NO: 35968 - RNA, 1701 nt, Artificial Sequence
  derived and/or modified CDS sequence (wt) from hemagglutinin__InfluenzaA__ADA71191
augaaggcaauacuaguaguucugcuauauacauuugcaaccgcaaaugcagacacauuauguauagguuaucaugcgaacaauucaacagacacuguagacacaguacuagaaaagaauguaacaguaacacacucuguuaaccuucuagaagacaagcauaacgggaaacuaugcaaacuaagagggguagccccauugcauuuggguaaauguaacauugcuggcuggauccugggaaauccagagugugaaucacucuccacagcaagcucaugguccuacauuguggaaacaucuaguucagacaauggaacguguuacccaggagauuucaucgauuaugaggaacuaagagagcaauugagcucagugucaucauuugaaagguuugagauauuccccaagacaaguucauggcccaaucaugacucgaacaaagguguaacggcagcauguccucaugcuggagcaaaaagcuucuacaaaaauuuaauauggcuaguuaaaaaaggaaauucauacccaaagcucagcaaauccuacauuaaugauaaagggaaagaaguccucgugcuauggggcauucaccauccaucuacuagugcugaccaacaaagucucuaucagaaugcagaugcauauguuuuuguggggacaucaagauacagcaagaaguucaagccggaaauagcaauaagacccaaagugagggaucaagaagggagaaugaacuauuacuggacacuaguagaaccgggagacaaaauaacauucgaagcaacuggaaaucuagugguaccgagauaugcauucgcaauggaaagaaaugcuggaucugguauuaucauuucagauacaccaguccacgauugcaauacaacuugucagacacccaagggugcuauaaacaccagccucccauuucagaauauacauccgaucacaauuggaaaauguccaaaauauguaaaaagcacaaaauugagacuggccacaggauugaggaauaucccgucuauucaaucuagaggccuauuuggggccauugccgguuucauugaagggggguggacagggaugguagauggaugguacgguuaucaccaucaaaaugagcaggggucaggauaugcagccgaccugaagagcacacagaaugccauugacgagauuacuaacaaaguaaauucuguuauugaaaagaugaauacacaguucacagcaguagguaaagaguucaaccaccuggaaaaaagaauagagaauuuaaauaaaaagguugaugaugguuuccuggacauuuggacuuacaaugccgaacuguugguucuauuggaaaaugaaagaacuuuggacuaccacgauucaaaugugaagaacuuauaugaaaagguaagaagccaguuaaaaaacaaugccaaggaaauuggaaacggcugcuuugaauuuuaccacaaaugcgauaacacgugcauggaaagugucaaaaacgggacuuaugacuacccaaaauacucagaggaagcaaaauuaaacagagaagaaauagaugggguaaagcuggaaucaacaaggauuuaccagauuuuggcgaucuauucaacugucgccaguucauugguacugguagucucccugggggcaaucaguuucuggaugugcucuaaugggucucuacaguguagaauauguauuuaa

SEQ ID NO: 35969 - RNA, 1701 nt, Artificial Sequence
  derived and/or modified CDS sequence (wt) from hemagglutinin__InfluenzaA__ADA79587
augaaggcaauacuaguaguucugcuauauacauuugcaaccgcaaaugcagacacauuauguauagguuaucaugcgaacaauucaacagacacuguagacacaguacuagaaaagaauguaacaguaacacacucuguuaaccuucuagaagacaagcauaacgggaaacuaugcaaacuaagagggguagccccauugcauuuggguaaauguaacauugcuggcuggauccugggaaauccagagugugaaucacucuccacagcaaacucaugguccuacauuguggaaacaucuaguucagacaauggaacguguuacccaggagauuucaucgauuaugaggagcuaagagagcaauugagcucagugucaucauuugaaagguuugagauauuccccaagacaaguucauggcccaaucaugacucgaacaaagguguaacggcagcauguccucaugcuggagcaaaaagcuucuacaaaaauuuaauauggcuaguuaaaaaaggaaauucauacccaaagcucagcaaauccuacauuaaugauaaagggaaagaaguccuagugcuauggggcauucaccauccaucuacuagugcugaccaacaaagucucuaucagaaugcagaugcauauguuuuuguggggacaucaagauacagcaagaaguucaagccggaaauagcaauaagacccaaagugagggaucaagaagggagaaugaacuauuacuggacacuaguagagccgggagacaaaauaacauucgaagcaacuggaaaucuagugguaccgagauaugcauucgcaauggaaagaaaugcuggaucugguauuaucauuucagauacaccaguccacgauugcaauacaacuugucagacacccaagggugcuauaaacaccagccucccauuucagaauauacauccgaucacaauuggaaaauguccaaaauaugugaaaagcacaaaauugagacuggccacaggauugaggaauaucccgucuauucaaucuagaggccuauuuggggccauugccgguuucauugaagggggguggacagggaugguagauggaugguacgguuaucaccaucaaaaugagcaggggucaggauaugcagccgaccugaagagcacacagaaugccauugacgagauuacuaacaaaguaaauucuguuauugaaaagaugaauacacaguucacagcaguagguaaagaguucaaccaccuggaaaaaagaauagagaauuuaaauaaaaagguugaugaugguuuccuggacauuuggacuuacaaugccgaacuguugguucuauuggaaaaugaaagaacuuuggacuaccacgauucaaaugugaagaacuuauaugaaaagguaagaagccaguuaaaaaacaaugccaaggaaauuggaaacggcugcuuugaauuuuaccacaaaugcgauaacacgugcauggaaagugucaaaaaugggacuuaugacuacccaaaauacucagaggaagcaaaauuaaacagagaagaaauagaugggguaaagcuggaaucaacaaggauuuaccagauuuuggcgaucuauucaacugucgccaguucauugguacugguagucucccugggggcaaucaguuucuggaugugcucuaaugggucucuacaguguagaauauguauuuaa

SEQ ID NO: 35970 - RNA, 1701 nt, Artificial Sequence
  derived and/or modified CDS sequence (wt) from hemagglutinin__InfluenzaA__ADA79607
augaaggcaauacuaguaguucugcuauauacauuugcaaccgcaaaugcagacacauuauguauagguuaucaugcgaacaauucaacagacacuguagacacaguacuagaaaagaauguaacaguaacacacucuguuaaucuucuagaagacaagcauaacgggaaacuaugcaaacuaagagggguagccccauugcauuuggguaaauguaacauugcuggcuggauccugggaaauccagagugugaaucacucuccacagcaagcucaugguccuacauuguggaaacaucuaguucagacaauggaacguguuacccaggagauuucaucgauuaugaggagcuaagagagcaauugagcucagugucaucauuugaaagguuugagauauuccccaagacaaguucauggcccaaucaugacucgaacaaagguguaacggcagcauguccucaugcuggagcaaaaggcuucuacaaaaauuuaauauggcuaguuaaaaaaggaaauucauacccaaagcucagcaaauccuauauuaaugauaaagggaaagaaguccucgugcuauggggcauucaccauccaucuacuagugcugaccaacaaagucucuaucagaaugcagaugcauauguuuuuguggggacaucaagauacagcaagaaguucaagccggaaauagcaauaagacccaaagugagggaucaagaagggagaaugaacuauuacuggacacuaguagagccgggagacaaaauaacauucgaagcaacuggaaaucuagugguaccgagauaugcauucgcaauggaaagaaaugcuggaucugguauuaucauuucagauacaccaguccacgauugcaauacaacuugucagacaccaaagggugcuauaaacaccagccucccauuucagaauauacauccgaucacaauuggaaaauguccaaaauauguaaaaagcacaaaauugagacuggccacaggauugaggaaugucccgucuauucaaucuagaggccuauuuggggccauugccgguuucauugaagggggguggacagggaugguagauggaugguacgguuaucaccaucaaaaugagcaggggucaggauaugcagccgaccugaagagcacacagaaugccauugacgagauuacuaacaaaguaaauucuguuauugaaaagaugaauacacaguucacagcaguagguaaagaguucaaccaccuggaaaaaagaauagagaauuuaaauaaaaagguugaugaugguuuccuggacauuuggacuuacaaugccgaacuguugguucuauuggaaaaugaaagaacuuuggacuaccacgauucaaaugugaagaacuuauaugaaaagguaagaagccaguuaaaaaacaaugccaaggaaauuggaaacggcugcuuugaauuuuaccacaaaugcgauaacacgugcauggaaagugucaaaaaugggacuuaugacuacccaaaauacucagaggaagcaaaauuaaacagagaagaaauagaugggguaaagcuggaaucaacaaggauuuaccagauuuuggcgaucuauucaacugucgccaguucauugguacugguagucucccugggggcaaucaguuucuggaugugcucuaaugggucucuacaguguagaauauguauuuaa

SEQ ID NO: 35971 - RNA, 1701 nt, Artificial Sequence
  derived and/or modified CDS sequence (wt) from hemagglutinin__InfluenzaA__ADA83043
augaaggcaauacuaguaguucugcuauauacauuugcaaccgcaaaugcagacacauuauguauagguuaucaugcgaacaauucaacagacacuguagacacaguacuagaaaagaauguaacaguaacacacucuguuaaccuucuagaagacaagcauaacgggaaacuaugcaaacuaagagggguagccccauugcauuuggguaaauguaacauugcuggcuggauccugggaaauccagagugugaaucacucuccacagcaagcucaugguccuacauuguggaaacaucuaguucagacaauggaacguguuacccaggagauuucaucgauuaugaggagcuaagagagcaauugagcucagugucaucauuugaaagguuugagauauuccccaagacaaguucauggcccaaucaugacucgaacaaagguguaacggcagcauguccucaugcuggagcaaaaagcuucuacaaaaauuuaauauggcuaguuaaaaaaggaaauucauacccaaagcucagcaaauccuacauuaaugauaaagggaaagaaguccucgugcuauggggcauucaccauccaucuacuagugcugaccaacaaagucucuaucagaaugcagaugcauauguuuuuguggggacaucaagauacagcaagaaguucaagccggaaauagcaauaagacccaaagugagggaacgagaagggagaaugaacuauuacuggacacuaguagagccgggagacaaaauaacauucgaagcaacuggaaaucuagugguaccgagauaugcauucgcaauggaaagaaaugcuggaucugguauuaucauuucagauacaccaguccacgauugcaauacaacuugucagacacccaagggugcuauaaacaccagccucccauuucagaauauacauccgaucacaauuggaaaauguccaaaauauguaaaaagcacaaaauugagacuggccacaggauugaggaaugucccgucuauucaaucuagaggccuauuuggggccauugccgguuucauugaagggggguggacagggaugguagauggaugguacgguuaucaccaucaaaaugagcaggggucaggauaugcagccgaccugaagagcacacagaaugccauugacgagauuacuaacaaaguaaauucuguuauugaaaagaugaauacacaguucacagcaguagguaaagaguucaaccaccuggaaaaaagaauagagaauuuaaauaaaaaaguugaugaugguuuccuggacauuuggacuuacaaugccgaacuguugguucuauuggaaaaugaaagaacuuuggacuaccacgauucaaaugugaagaacuuauaugaaaagguaagaagccaguuaaaaaacaaugccaaggaaauuggaaacggcugcuuugaauuuuaccacaaaugcgauaacacgugcauggaaagugucaaaaaugggacuuaugacuacccaaaauacucagaggaagcaaaauuaaacagagaagaaauagaugggguaaagcuggaaucaacaaggauuuaccagauuuuggcgaucuauucaacugucgccaguucauugguacugguagucucccugggggcaaucaguuucuggaugugcucuaaugggucucuacaguguagaauauguauuuaa

SEQ ID NO: 35972 - RNA, 1701 nt, Artificial Sequence
  derived and/or modified CDS sequence (wt) from hemagglutinin__InfluenzaA__ADA83044
augaaggcaauacuaguaguucugcuauauacauuugcaaccgcaaaugcagacacauuauguauagguuaucaugcgaacaauucaacagacacuguagacacaguacuagaaaagaauguaacaguaacacacucuguuaaccuucuagaagacaagcauaacgggaaacuaugcaaacuaagagggguagccccauugcauuuggguaaauguaacauugcuggcuggauccugggaaauccagagugugaaucacucuccacagcaagcucaugguccuacauuguggaaacaucuaguucaaacaauggaacguguuacccaggagauuucaucgauuaugaggagcuaagagagcaauugagcucagugucaucauuugaaagguuugagauauuccccaagacaaguucauggcccaaucaugacucgaacaaagguguaacggcagcauguccucaugcuggagcaaaaagcuucuacaaaaauuuaauauggcuaguuaaaaaagaaaauucauacccaaagcucaacaaauccuauauuaaugauaaagggaaagaaguccucgugcuauggggcauucaccauccaucuacuagugcugaccaacaaagucucuaucagaaugcagaugcauauguuuuuguggggacaucaagauacagcaagaaguucaagccggaaauagcaauaagacccaaagugaggggucaagaagggagaaugaacuauuacuggacacuaguagagccgggagacaaaauaacauucgaagcaacuggaaaucuagugguaccgagauaugcauucgcaauggaaagaaaugcuggaucugguauuaucauuucagauacaccaguccacgauugcaauacaacuugucagacacccaagggugcuauaaacaccagccucccauuucagaauauacauccgaucacaauuggaaaauguccaaaauauguaaaaagcacaaaauugagacuggccacaggauugaggaaugucccgucuauucaaucuagaggccuauuuggggccauugccgguuucauugaagggggguggacagggaugguagauggaugguacgguuaucaccaucaaaaugagcaggggucaggauaugcagccgaccugaagagcacacagaaugccauugacgagauuacuaacaaaguaaauucuguuauugaaaagaugaauacacaguucacagcaguagguaaagaguucaaccaccuggaaaaaagaauagagaauuuaaauaaaaagguugaugaugguuuccuggacauuuggacuuacaaugccgaacuguugguucuauuggaaaaugaaagaacuuuggacuaccacgauucagaugugaagaacuuauaugaaaagguaagaagccaguuaaaaaacaaugccaaggaaauuggaaacggcugcuuugaauuuuaccacaaaugcgauaacacgugcauggaaagugucaaaaaugggacuuaugacuacccaaaauacucagaggaagcaaaauuaaacagagaagaaauagaugggguaaagcuggaaucaacaaggauuuaccagauuuuggcgaucuauucaacugucgccaguucauugguacugguagucucccugggggcaaucaguuucuggaugugcucuaaugggucucuacaguguagaauauguauuuaa

SEQ ID NO: 35973 - RNA, 1701 nt, Artificial Sequence; identical to SEQ ID NO: 34681
  derived and/or modified CDS sequence (wt) from hemagglutinin__InfluenzaA__ADA83580

SEQ ID NO: 35974 - RNA, 1701 nt, Artificial Sequence; identical to SEQ ID NO: 34681
  derived and/or modified CDS sequence (wt) from hemagglutinin__InfluenzaA__ADA83587

SEQ ID NO: 35975 - RNA, 1701 nt, Artificial Sequence
  derived and/or modified CDS sequence (wt) from hemagglutinin__InfluenzaA__ADA83591
augaaggcaauacuaguaguucugcuauauacauuugcaaccgcaaaugcagacacauuauguauagguuaucaugcgaacaauucaacagacacuguagacacaguacuagaaaagaauguaacaguaacacacucuguuaaccuucuagaagacaagcauaacgggaaacuaugcaaacuaagagggguagccccauugcauuuggguaaauguaacauugcuggcuggauccugggaaauccagagugugaaucacucuccacagcaagcucaugguccuacauuguggaaacaucuaguucagacaauggaacguguuacccaggagauuucaucgauuaugaggagcuaagagagcaauugagcucagugucaucauuugaaagguuugagauauuccccaagacaaguucauggcccaaucaugauucgaacaaagguguaacggcagcauguccucaugcuggagcaaaaagcuucuacaaaaauuuaauauggcuaguuaaaaaaggaaauucauacccaaagcucagcaaauccuacauuaaugauaaagggaaagaaguccucgugcuauggggcauucaccauccaucuacuagugcugaccaacaaagucucuaucagaaugcagaugcauauguuuuuguggggacaucaagauacagcaagaaguucaagccggaaauaucaauaagacccaaagugagggaucaagaagguagaaugaacuauuacuggacacuaguagagccgggagacaaaauaacauucgaagcaacuggaaaucuagugguaccgagauaugcauucgcaauggaaagaaaugcuggaucugguauuaucauuucagauacaccaguccacgauugcaauacaacuugucagacacccaagggugcuauaaacaccagccucccauuucagaauauacauccgaucacaauuggaaaauguccaaaauauguaaaaagcacaaaauugagacuggccacaggauugaggaaugucccgucuauucaaucuagaggccuauuuggggccauugccgguuucauugaagggggguggacagggaugguagauggaugguacgguuaucaccaucaaaaugagcaggggucaggauaugcagccgaccugaagagcacacagaaugccauugacgagauuacuaacaaaguaaauucuguuauugaaaagaugaauacacaguucacagcaguagguaaagaguucaaccaccuggaaaaaagaauagagaauuuaaauaaaaaaguugaugaugguuuccuggacauuuggacuuacaaugccgaacuguugguucuauuggaaaaugaaagaacuuuggacuaccacgauucaaaugugaagaacuuauaugaaaagguaagaagccaguuaaaaaacaaugccaaggaaauuggaaacggcugcuuugaauuuuaccacaaaugcgauaacacgugcauggaaagugucaaaaaugggacuuaugacuacccaaaauacucagaggaagcaaaauuaaacagagaagaaauagaugggguaaagcuggaaucaacaaggauuuaccagauuuuggcgaucuauucaacugucgccaguucauugguacugguagucucccugggggcaaucaguuucuggaugugcucuaaugggucucuacaguguagaauauguauuuaa

SEQ ID NO: 35976 - RNA, 1701 nt, Artificial Sequence
  derived and/or modified CDS sequence (wt) from hemagglutinin__InfluenzaA__ADA83595
augaaggcaauacuaguaguucugcuauauacauuugcaaccgcaaaugcagacacauuauguauagguuaucaugcgaacaauucaacagacacuguagacacaguacuagaaaagaauguaacaguaacacacucuguuaaccuucuagaagacaagcauaacgggaaacuaugcaaacuaagagggguagccccauugcauuuggguaaauguaacauugcuggcuggauccugggaaauccagagugugaaucacucuccacagcaagcucaugguccuacauuguggaaacaucuaguucagacaauggaacguguuacccaggagauuucaucgauuaugaggagcuaagagagcaauugagcucagugucaucauuugaaagguuugagauauuccccaagacaaguucauggcccaaucaugacucgaacaaagguguaacggcagcauguccucaugcuggagcaaaaagcuucuacaaaaauuuaauauggcuaguuaaaaaaggaaauucauacccaaagcucagcaaauccuacauuaaugauaaagggaaagaaguccucgugcuauggggcauucaccauccaucuacuagugcugaccaacaaagucucuaucagaaugcagaugcauauguuuuuguggggacaucaagauacagcaagaaguucaagccggaaauagcaauaagacccaaagugaggggucaagaagggagaaugaacuauuacuggacacuaguagagccgggagacaaaauaacauucgaagcaacuggaaaucuagugguaccgagauaugcauucgcaauggaaagaaaugcuggaucugguauuaucauuucagauacaccaguccacgauugcaauacaacuugucagacacccaagggugcuauaaacaccagccucccauuucagaauauacauccgaucacaauuggaaaauguccaaaauauguaaaaagcacaaaauugagacuggccacaggauugaggaaugucccgucuauucaaucuagaggccuauuuggggccauugccgguuucauugaagggggguggacagggaugguagauggaugguacgguuaucaccaucaaaaugagcaggggucaggauaugcagccgaccugaagagcacacagaaugccauugacgagauuacuaacaaaguaaauucuguuauugaaaagaugaauacacaguucacagcaguagguaaagaguucaaccaccuggaaaaaagaauagagaauuuaaauaaaaaaguugaugaugguuuucuggacauuuggacuuacaaugccgaacuguugguucuauuggaaaaugaaagaacuuuggacuaccacgauucaaaugugaagaacuuauaugaaaagguaagaagccaguuaaaaaacaaugccaaggaaauuggaaacggcugcuuugaauuuuaccacaaaugcgauaacacgugcauggaaagugucaaaaaugggacuuaugacuacccaaaauacucagaggaagcaaaauuaaacagagaagaaauagaugggguaaagcuggaaucaacaaggauuuaccagauuuuggcgaucuauucaacugucgccaguucauugguacugguagucucccugggggcaaucaguuucuggaugugcucuaaugggucucuacaguguagaauauguauuuaa

SEQ ID NO: 35977 - RNA, 1701 nt, Artificial Sequence; identical to SEQ ID NO: 34681
  derived and/or modified CDS sequence (wt) from hemagglutinin__InfluenzaA__ADA83599

SEQ ID NO: 35978 - RNA, 1701 nt, Artificial Sequence; identical to SEQ ID NO: 34681
  derived and/or modified CDS sequence (wt) from hemagglutinin__InfluenzaA__ADA83603

SEQ ID NO: 35979 - RNA, 1701 nt, Artificial Sequence
  derived and/or modified CDS sequence (wt) from hemagglutinin__InfluenzaA__ADA83611
augaaggcaauacuaguaguucugcuauauacauuugcaaccgcaaaugcagacacauuauguauagguuaucaugcgaacaauucaacagacacuguagacacaguacuagaaaagaauguaacaguaacacacucuguuaaccuucuagaagacaagcauaacgggaaacuaugcaaacuaagagggguagccccauugcauuuggguaaauguaacauugcuggcuggauccugggaaauccagagugugaaucacucuccacagcaagcucaugguccuacauuguggaaacaucuaguucagacaauggaacguguuacccaggagauuucaucgauuaugaggagcuaagagagcaauugagcucagugucaucauuugaaagguuugagauauuccccaagacaaguucauggcccaaucaugacucgaacaaagguguaacggcagcauguccucaugcuggagcaaaaagcuucuacaaaaauuuaauauggcuaguuaaaaaaggaaauucauacccaaagcucagcaaauccuacauuaaugauaaagggaaagaaguccucgugcuauggggcauucaccauccaucuacuagugcugaccaacaaagucucuaucagaaugcagaugcauauguuuuuguggggacaucaagauacagcaagaaguucaagccggaaauagcaauaagacccaaagugagggaucaagaagggagaaugaacuauuacuggacacuaguagagccgggagacaaaauaacauucgaagcaacuggaaaucuaguaguaccgagauaugcauucgcaauggaaagaaaugcuggaucugguauuaucauuucagauacaccaguccacgauugcaauacaacuugucagacacccaagggugcuauaaacaccagccucccauuucagaauauacauccgaucacaauuggaaaauguccaaaauauguaaaaagcacaaaauugagacuggccacaggauugaggaaugucccgucuauucaaucuagaggccuauuuggggccauugccgguuucauugaagggggguggacagggaugguagauggaugguacgguuaucaccaucaaaaugagcaggggucaggauaugcagccgaccugaagagcacacagaaugccauugacgagauuacuaacaaaguaaauucuguuauugaaaagaugaauacacaguucacagcaguagguaaagaguucaaccaccuggaaaaaagaauagagaauuuaaauaaaaaaguugaugaugguuuccuggacauuuggacuuacaaugccgaacuguugguucuauuggaaaaugaaagaacuuuggacuaccacgauucaaaugugaagaacuuauaugaaaagguaagaagccaguuaaaaaacaaugccaaggaaauuggaaacggcugcuuugaauuuuaccacaaaugcgauaacacgugcauggaaagugucaaaaaugggacuuaugacuacccaaaauacucagaggaagcaaaauuaaacagagaagaaauagaugggguaaagcuggaaucaacaaggauuuaccagauuuuggcgaucuauucaacugucgccaguucauugguacugguagucucccugggggcaaucaguuucuggaugugcucuaaugggucucuacaguguagaauauguauuuaa

SEQ ID NO: 35980 - RNA, 1701 nt, Artificial Sequence
  derived and/or modified CDS sequence (wt) from hemagglutinin__InfluenzaA__ADA83615
augaaggcaauacuaguaguucugcuauauacauuugcaaccgcaaaugcagacacauuauguauagguuaucaugcgaacaauucaacagacacuguagacacaguacuagaaaagaauguaacaguaacacacucuguuaaccuucuagaagacaagcauaacgggaaacuaugcaaacuaagagggguagccccauugcauuuggguaaauguaacauugcuggcuggauccugggaaauccagagugugaaucacucuccacagcaagcucaugguccuacauuguggaaacaucuaguucagacaauggaacguguuacccaggagauuucaucgauuaugaggagcuaagagagcaauugagcucagugucaucauuugaaagguuugagauauuccccaagacaaguucauggcccaaucaugauucgaacaaagguguaacggcagcauguccucaugcuggagcaaaaagcuucuacaaaaauuuaauauggcuaguuaaaaaaggaaauucauacccaaagcucagcaaauccuacauuaaugauaaagggaaagaaguccucgugcuauggggcauucaccauccaucuacuagugcugaccaacaaagucucuaucagaaugcagaugcauauguuuuuguggggacaucaagauacagcaagaaguucaagccggaaauagcaauaagacccaaagugagggaucaagaagggagaaugaacuauuacuggacacuaguagagccgggagacaaaauaacauucgaagcaacuggaaaucuagugguaccgagauaugcauucgcaauggaaagaaaugcuggaucugguauuaucauuucagauacaccaguccacgauugcaauacaacuugucagacacccaagggugcuauaaacaccagccucccauuucagaauauacauccgaucacaauuggaaaauguccaaaauauguaaaaagcacaaaauugagacuggccacaggauugaggaaugucccgucuauucaaucuagaggccuauuuggggccauugccgguuucauugaagggggguggacagggaugguagauggaugguacgguuaucaccaucaaaaugagcaggggucaggauaugcagccgaccugaagagcacacagaaugccauugacgagauuacuaacaaaguaaauucuguuauugaaaagaugaauacacaguucacagcaguagguaaagaguucaaccaccuggaaaaaagaauagagaauuuaaauaaaaaaguugaugaugguuuccuggacauuuggacuuacaaugccgaacuguugguucuauuggaaaaugaaagaacuuuggacuaccacgauuuaaaugugaagaacuuauaugaaaagguaagaagccaguuaaaaaacaaugccaaggaaauuggaaacggcugcuuugaauuuuaccacaaaugcgauaacacgugcauggaaagugucaaaaaugggacuuaugacuacccaaaauacucagaggaagcaaaauuaaacagagaagaaauagaugggguaaagcuggaaucaacaaggauuuaccagauuuuggcgaucuauucaacugucgccaguucauugguacugguagucucccugggggcaaucaguuucuggaugugcucuaaugggucucuacaguguagaauauguauuuaa

SEQ ID NO: 35981 - RNA, 1701 nt, Artificial Sequence
  derived and/or modified CDS sequence (wt) from hemagglutinin__InfluenzaA__ADA83622
augaaggcaauacuaguaguucugcuauauacauuugcaaccgcaaaugcagacacauuauguauagguuaucaugcgaacaauucaacagacacuguagacacaguacuagaaaagaauguaacaguaacacacucuguuaaccuucuagaagacaagcauaacgggaaacuaugcaaacuaagagggguagccccauugcauuuggguaaauguaacauugcuggcuggauccugggaaauccagagugugaaucacucuccacagcaagcucaugguccuacauuguggaaacaucuaguucagacaauggaacguguuacccaggagauuucaucgauuaugaggagcuaagagagcaauugagcucagugucaucauuugaaagguuugagauauuccccaagacaaguucauggcccaaucaugacucgaacaaagguguaacggcagcauguccucaugcuggagcaaaaagcuucuacaaaaauuuaauauggcuaguuaaaaaaggaaauucauacccaaagcucagcaaauccuacauuaaugauaaagggaaagaaguccucgugcuauggggcauucaccauccaucuacuagugcugaccaacaacgucucuaucagaaugcagaugcauauguuuuuguggggacaucaagauacagcaagaagcucaagccggaaauagcaauaagacccaaagugagggaucaagaagggagaaugaacuauuacuggacacuaguagagccgggagacaaaauaacauucgaagcaacuggaaaucuagugguaccgagauaugcauucgcaauggaaagaaaugcuggaucugguauuaucauuucagauacaccaguccacgauugcaauacaacuugucagacacccaagggugcuauaaacaccagccucccauuucagaauauacauccgaucacaauuggaaaauguccaaaauauguaaaaagcacaaaauugagacuggccacaggauugaggaaugucccgucuauucaaucuagaggccuauuuggggccauugccgguuucauugaagggggguggacagggaugguagauggaugguacgguuaucaccaucaaaaugagcaggggucaggauaugcagccgaccugaagagcacacagaaugccauugacgagauuacuaacaaaguaaauucuguuauugaaaagaugaauacacaguucacagcaguagguaaagaguucaaccaccuggaaaaaagaauagagaauuuaaauaaaaaaguugaugaugguuuccuggacauuuggacuuacaaugccgaacuguugguucuauuggaaaaugaaagaacuuuggacuaccacgauucaaaugugaagaacuuauaugaaaagguaagaagccaguuaaaaaacaaugccaaggaaauuggaaacggcugcuuugaauuuuaccacaaaugcgauaacacgugcauggaaagugucaaaaaugggacuuaugacuacccaaaauacucagaggaagcaaaauuaaacagagaagaaauagaugggguaaagcuggaaucaacaaggauuuaccagauuuuggcgaucuauucaacugucgccaguucauugguacugguagucucccugggggcaaucaguuucuggaugugcucuaaugggucucuacaguguagaauauguauuuaa

SEQ ID NO: 35982 - RNA, 1701 nt, Artificial Sequence; identical to SEQ ID NO: 34681
  derived and/or modified CDS sequence (wt) from hemagglutinin__InfluenzaA__ADA83633

SEQ ID NO: 35983 - RNA, 1701 nt, Artificial Sequence
  derived and/or modified CDS sequence (wt) from hemagglutinin__InfluenzaA__ADA83637
augaaggcaauacuaguaguucugcuauauacauuugcaaccgcaaaugcagacacauuauguauagguuaucaugcgaacaauucaacagacacuguagacacaguacuagaaaagaauguaacaguaacacacucuguuaaccuucuagaagacaagcauaacgggaaacuaugcaaacuaagagggguagccccauugcauuuggguaaauguaacauugcuggcuggauccugggaaauccagagugugaaucacucuccacagcaagcucaugguccuacauuguggaaacaucuaguucagacaauggaacguguuacccaggagauuucaucgauuaugaggagcuaagagagcaauugagcucagugucaucauuugaaagguuugagauauuccccaagacaaguucauggcccaaucaugacucgaacaaagguguaacggcagcauguccucaugcuggagcaaaaagcuucuacaaaaauuuaauauggcuaguuaaaaaaggaaauucauacccaaagcucagcaaauccuacauuaaugauaaagggaaagaaguccucgugcuauggggcauucaccauccaucuacuagugcugaccaacaaagucucuaucagaaugcagaugcauauguuuuuguggggacaucaagauacagcaagaaguucaagccggaaauagcaauaagacccaaagugagggaucaagaagggagaaugaacuauuacuggacacuaguagagccgggagacaaaauaacauucgaagcaacuggaaaucuagugguaccgagauaugcauucgcaauggaaagaaaugcuggaucugguauuaucauuucagauacaccaguccacgauugcaauacaacuugucagacacccaagggugcuauaaacaccagccucccauuucagaauauacauccgaucacaauuggaaaauguccaaaauauguaaaaagcacaaaauugagacuggccacaggauugaggaaugucccgucuauucaaucuagaggccuauuuggggccauugccgguuucauugaagggggguggacagggaugguagauggaugguacgguuaucaccaucaaaaugagcaggggucaggauaugcagccgaccugaagagcacacagaaugccauugacgagauuacuaacaaaguaaauucuguuauugaaaagaugaauacacaguucacagcaguagguaaagaguucaaccaccuggaaaaaagaauagagaauuuaaauaaaaaaguugaugaugguuuccuggacauuuggacuuacaaugccgaacuguugguucuauuggaaaaugaaagaacuuuggacuaccacgauucaaaugugaagaacuuauaugaaaagguaagaagccaguuaaaaaacaaugccaaggaaauuggaaacggcugcuuugaauuuuaccacaaaugcgauaacacgugcauggaaagugucaaaaaugggacuuaugacuacccaaaauacucagaggaagcaaaauuaaacagagaagaaauagaugggguaaagcuggaaucgacaaggauuuaccagauuuuggcgaucuauucaacugucgccaguucauugguacugguagucucccugggggcaaucaguuucuggaugugcucuaaugggucucuacaguguagaauauguauuuaa

SEQ ID NO: 35984 - RNA, 1701 nt, Artificial Sequence; identical to SEQ ID NO: 34681
  derived and/or modified CDS sequence (wt) from hemagglutinin__InfluenzaA__ADA83641

SEQ ID NO: 35985 - RNA, 1701 nt, Artificial Sequence
  derived and/or modified CDS sequence (wt) from hemagglutinin__InfluenzaA__ADA83645
augaaggcaauacuaguaguucugcuauauacauuugcaaccgcaaaugcagacacauuauguauagguuaucaugcgaacaauucaacagacacuguagacacaguacuagaaaagaauguaacaguaacacacucuguuaaccuucuagaagacaagcauaacgggaaacuaugcaaacuaagagggguagccccauugcauuuggguaaauguaacauugcuggcuggauccugggaaauccagagugugaaucacucuccacagcaagcucaugguccuacauuguggaaacaucuaguucagacaauggaacguguuacccaggagauuucaucgauuaugaggagcuaagagagcaauugagcucagugucaucauuugaaagguuugagauauuccccaagacaaguucauggcccaaucaugacucgaacaaagguguaacggcagcauguccucaugcuggagcaaaaagcuucuacaaaaauuuaauauggcuaguuaaaaaaggaaauucauacccaaagcucagcaaauccuacauuaaugauaaagggaaagaaguccucgugcuauggggcauucaccauccaucuacuagugcugaccaacaaagucucuaucagaaugcagaugcauauguuuuuguggggacaucaagauacagcaagaaguucaagccggaaauagcaauaagacccaaagugagggaucaagaagggagaaugaacuauuacuggacacuaguagagccgggagacaaaauaacauucgaagcaacuggaaaucuagugguaccgagauaugcauucgcaauggaaagaaaugcuggaucugguauuaucauuucagauacaccaguccacgauugcaauacaacuugucagacacccaagggugcuauaaacaccagccucccauuucagaauauacauccgaucacaauuggaaaauguccaaaauauguaaaaagcacaaaauugagacuggccacaggauugaggaaugucccgucuauucaaucuagaggccuauuuggggccauugccgguuucauugaagggggguggacagggaugguagauggaugguacgguuaucaccaucaaaaugagcaggggucaggauaugcagccgaccugaagagcacacagaaugccauugacgagauuacuaacaaaguaaauucuguuauugaaaagaugaauacacaguucacagcaguagguaaagaguucaaccaccuggaaaaaagaauagagaauuuaaauaaaaaaguugaugaugguuuccuggacauuuggacuuacaaugccgaacuguugguucuauuggaaaaugaaagaacuuuggacuaccacgauucaaaugugaagaacuuauaugaaaagguaagaagccaguuaaaaaacaaugccaaggagauuggaaacggcugcuuugaauuuuaccacaaaugcgauaacacgugcauggaaagugucaaaaaugggacuuaugacuacccaaaauacucagaggaagcaaaauuaaacagagaagaaauagaugggguaaagcuggaaucaacaaggauuuaccagauuuuggcgaucuauucaacugucgccaguucauugguacugguagucucccugggggcaaucagcuucuggaugugcucuaaugggucucuacaguguagaauauguauuuaa

SEQ ID NO: 35986 - RNA, 1701 nt, Artificial Sequence
  derived and/or modified CDS sequence (wt) from hemagglutinin__InfluenzaA__ADA83648
augaaggcaauacuaguaguucugcuauauacauuugcaaccgcaaaugcagacacauuauguauagguuaucaugcgaacaauucaacagacacuguagacacaguacuagaaaagaauguaacaguaacacacucuguuaaccuucuagaagacaagcauaacgggaaacuaugcaaacuaagagggguagccccauugcauuuggguaaauguaacauugcuggcuggauccugggaaauccagagugugaaucacucuccacagcaagcucaugguccuacauuguggaaacaucuaguucagacaauggaacguguuacccaggagauuucaucgauuaugaggagcuaagagagcaauugagcucagugucaucauuugaaagguuugagauauuccccaagacaaguucauggcccaaucaugacucgaacaaagguguaacggcagcauguccucaugcuggagcaaaaagcuucuacaaaaauuuaauauggcuaguuaaaaaaggaaauucauacccaaagcucagcaaauccuacauuaaugauaaagggaaagaaguccucgugcuauggggcauucaccauccaucuacuagugcugaccaacaaagucucuaucagaaugcagaugcauauguuuuuguggggacaucaagauacagcaagaaguucaagccggaaauagcaauaagacccaaagugagggaucaagaagggagaaugaacuauuacuggacacuaguagagccgggagacaaaauaacauucgaagcaacuggaaaucuagugguaccgagauaugcauucgcaauggaaagaaaugcuggaucugguauuaucauuucagauacaccaguccacgauugcaauacaacuugucagacacccaagggugcuauaaacaccagccucccauuucagaauauacauccgaucacaauuggaaaauguccaaaauauguaaaaagcacaaaauugagacuggccacaggauugaggaaugucccgucuauucaaucuagaggccuauuuggggccauugccggauucauugaagggggguggacagggaugguagauggaugguacgguuaucaccaucaaaaugagcaggggucaggauaugcagccgaccugaagagcacacagaaugccauugacgagauuacuaacaaaguaaauucuguuauugaaaagaugaauacacaguucacagcaguagguaaagaguucaaccaccuggaaaaaagaauagagaauuuaaauaaaaaaguugaugaugguuuccuggacauuuggacuuacaaugccgaacuguugguucuauuggaaaaugaaagaacuuuggacuaccacgauucaaaugugaagaacuuauaugaaaagguaagaagccaguuaaaaaacaaugccaaggaaauuggaaacggcugcuuugaauuuuaccacaaaugcgauaacacgugcauggaaagugucaaaaaugggacuuaugacuacccaaaauacucagaggaagcaaaauuaaacagagaagaaauagaugggguaaagcuggaaucaacaaggauuuaccagauuuuggcgaucuauucaacugucgccaguucauugguacugguagucucccugggggcaaucaguuucuggaugugcucuaaugggucucuacaguguagaauauguauuuaa

SEQ ID NO: 35987 - RNA, 1701 nt, Artificial Sequence
  derived and/or modified CDS sequence (wt) from hemagglutinin__InfluenzaA__ADA83656
augaaggcaauacuaguaguucugcuauauacauuugcaaccgcaaaugcagacacauuauguauagguuaucaugcgaacaauucaacagacacuguagacacaguacuagaaaagaauguaacaguaacacacucuguuaaccuucuagaagacaagcauaacgggaaacuaugcaaacuaagagggguagccccauugcauuuggguaaauguaacauugcuggcuggauccugggaaauccagagugugaaucacucuccacagcaagcucaugguccuacauuguggaaacaucuaguucagacaauggaacguguuacccaggagauuucaucgauuaugaggagcuaagagagcaauugagcucagugucaucauuugaaagguuugagauauuccccaagacaaguucauggcccaaucaugacucgaacaaagguguaacggcagcauguccucaugcuggagcaaaaagcuucuacaaaaauuuaauauggcuaguuaaaaaaggaaauucauacccaaagcucagcaaauccuacauuaaugauaaagggaaagaaguccucgugcuauggggcauucaccauccaucuacuagugcugaccaacaaagucucuaucagaaugcagaugcauauguuuuuguggggacaucaagauacagcaagaaguucaagccggaaauagcaauaagacccaaagugagggaucaagaagggagaaugaacuauuacuggacacuaguagagccgggagacaaaauaacauucgaagcaacuggaaaucuagugguaccgagauaugcauucgcaauggaaagaaaugcuggaucugguauuaucauuucagauacaccaguucacgauugcaauacaacuugucagacacccaagggugcuauaaacaccagccucccauuucagaauauacauccgaucacaauuggaaaauguccaaaauauguaaaaagcacaaaauugagacuggccacaggauugaggaaugucccgucuauucaaucuagaggccuauuuggggccauugccgguuucauugaagggggguggacagggaugguagauggaugguacgguuaucaccaucaaaaugagcaggggucaggauaugcagccgaccugaagagcacacagaaugccauugacgagauuacuaacaaaguaaauucuguuauugaaaagaugaauacacaguucacagcaguagguaaagaguucaaccaccuggaaaaaagaauagagaauuuaaauaaaaaaguugaugaugguuuccuggacauuuggacuuacaaugccgaacuguugguucuauuggaaaaugaaagaacuuuggacuaccacgauucaaaugugaagaacuuauaugaaaagguaagaagccaguuaaaaaacaaugccaaggaaauuggaaacggcugcuuugaauuuuaccacaaaugcgauaacacgugcauggaaagugucaaaaaugggacuuaugacuacccaaaauacucagaggaagcaaaauuaaacagagaagaaauagaugggguaaagcuggaaucaacaaggauuuaccagauuuuggcgaucuauucaacugucgccaguucauugguacugguagucucccugggggcaaucaguuucuggaugugcucuaaugggucucuacaguguagaauauguauuuaa

SEQ ID NO: 35988 - RNA, 1701 nt, Artificial Sequence; identical to SEQ ID NO: 34681
  derived and/or modified CDS sequence (wt) from hemagglutinin__InfluenzaA__ADA83660

SEQ ID NO: 35989 - RNA, 1701 nt, Artificial Sequence
  derived and/or modified CDS sequence (wt) from hemagglutinin__InfluenzaA__ADA83664
augaaggcaauacuaguaguucugcuauauacauuugcaaccgcaaaugcagacacauuauguauagguuaucaugcgaacaauucaacagacacuguagacacaguacuagaaaagaauguaacaguaacacacucuguuaaccuucuagaagacaagcauaacgggaaacuaugcaaacuaagagggguagccccauugcauuuggguaaauguaacauugcuggcuggauccugggaaauccagagugugaaucacucuccacagcaagcucaugguccuacauuguggaaacaucuaguucagacaauggaacguguuacccaggagauuucaucgauuaugaggagcuaagagagcaauugagcucagugucaucauuugaaagguuugagauauuccccaagacaaguucauggcccaaucaugacucgaacaaagguguaacggcagcauguccucaugcuggagcaaaaagcuucuacaaaaauuuaauauggcuaguuaaaaaaggaaauucauacccaaagcucagcaaauccuacauuaaugauaaagggaaagaaguccucgugcuauggggcauucaccauccaucuacuagugcugaccaacaaagucucuaucagaaugcagaugcauauguuuuuguggggacaucaagauacagcaagaaguucaagccggaaacagcaauaagacccaaagugagggaucaagaagggagaaugaacuauuacuggacacuaguagagccgggagacaaaauaacauucgaagcaacuggaaaucuagugguaccgagauaugcauucgcaauggaaagaaaugcuggaucugguauuaucauuucagauacaccaguccacgauugcaauacaacuugucagacacccaagggugcuauaaacaccagccucccauuucagaauauacauccgaucacaauuggaaaauguccaaaauauguaaaaagcacaaaauugagacuggccacaggauugaggaaugucccgucuauucaaucuagaggccuauuuggggccauugccgguuucauugaagggggguggacagggaugguagauggaugguacgguuaucaucaucaaaaugagcaggggucaggauaugcagccgaccugaagagcacacagaaugccauugacgagauuacuaacaaaguaaauucuguuauugaaaagaugaauacacaguucacagcaguagguaaagaguucaaccaccuggaaaaaagaauagagaauuuaaauaaaaaaguugaugaugguuuccuggacauuuggacuuacaaugccgaacuguugguucuauuggaaaaugaaagaacuuuggacuaccacgauucaaaugugaagaacuuauaugaaaagguaagaagccaguuaaaaaacaaugccaaggagauuggaaacggcugcuuugaauuuuaccacaaaugcgauaacacgugcauggaaagugucaaaaaugggacuuaugacuacccaaaauacucagaggaagcaaaauuaaacagagaagaaauagaugggguaaagcuggaaucaacaaggauuuaccagauuuuggcgaucuauucaacugucgccaguucauugguacugguagucucccugggggcaaucaguuucuggaugugcucuaaugggucucuacaguguagaauauguauuuaa

SEQ ID NO: 35990 - RNA, 1701 nt, Artificial Sequence
  derived and/or modified CDS sequence (wt) from hemagglutinin__InfluenzaA__ADA83668
augaaggcaauacuaguaguucugcuauauacauuugcaaccgcaaaugcagacacauuauguauagguuaucaugcgaacaauucaacagacacuguagacacaguacuagaaaagaauguaacaguaacacacucuguuaaccuucuagaagacaagcauaacgggaaacuaugcaaacuaagagggguagccccauugcauuuggguaaauguaacauugcuggcuggauccugggaaauccagaguguggaucacucuccacagcaagcucaugguccuacauuguggaaacaucuaguucagacaauggaacguguuacccaggagauuucaucgauuaugaggagcuaagagagcaauugagcucagugucaucauuugaaagguuugagauauuccccaagacaaguucauggcccaaucaugacucgaacaaagguguaacggcagcauguccucaugcuggagcaaaaagcuucuacaaaaauuuaauauggcuaguuaaaaaaggaaauucauacccaaagcucagcaaauccuacauuaaugauaaagggaaagaaguccucgugcuauggggcauucaccauccaucuacuagugcugaccaacaaagucucuaucagaaugcagaugcauauguuuuuguggggacaucaagauacagcaagaaguucaagccggaaauagcaauaagacccaaagugagggaucaagaagggagaaugaacuauuacuggacacuaguagagccgggagacaaaauaacauucgaagcaacuggaaaucuagugguaccgagauaugcauucgcaauggaaagaaaugcuggaucugguauuaucauuucagauacaccaguccacgauugcaauacaacuugucagacacccaagggugcuauaaacaccagccucccauuucagaauauacauccgaucacaauuggaaaauguccaaaauauguaaaaagcacaaaauugagacuggccacaggauugaggaaugucccgucuauucaaucuagaggccuauuuggggccauugccgguuucauugaagggggguggacagggaugguagauggaugguacgguuaucaucaucaaaaugagcaggggucaggauaugcagccgaccugaagagcacacagaaugccauugacgagauuacuaacaaaguaaauucuguuauugaaaagaugaauacacaguucacagcaguagguaaagaguucaaccaccuggaaaaaagaauagagaauuuaaauaaaaaaguugaugaugguuuccuggacauuuggacuuacaaugccgaacuguugguucuauuggaaaaugaaagaacuuuggacuaccacgauucaaaugugaagaacuuauaugaaaagguaagaagccaguuaaaaaacaaugccaaggaaauuggaaacggcugcuuugaauuuuaccacaaaugcgauaacacgugcauggaaagugucaaaaaugggacuuaugacuacccaaaauacucagaggaagcaaaauuaaacagagaagaaauagaugggguaaagcuggaaucaacaaggauuuaccagauuuuggcgaucuauucaacugucgccaguucauugguacugguagucucccugggggcaaucaguuucuggaugugcucuaaugggucucuacaguguagaauauguauuuaa

SEQ ID NO: 35991 - RNA, 1701 nt, Artificial Sequence; identical to SEQ ID NO: 34681
  derived and/or modified CDS sequence (wt) from hemagglutinin__InfluenzaA__ADA83672

SEQ ID NO: 35992 - RNA, 1701 nt, Artificial Sequence; identical to SEQ ID NO: 34681
  derived and/or modified CDS sequence (wt) from hemagglutinin__InfluenzaA__ADA83676

SEQ ID NO: 35993 - RNA, 1701 nt, Artificial Sequence
  derived and/or modified CDS sequence (wt) from hemagglutinin__InfluenzaA__ADA83680
augaaggcaauacuaguaguucugcuauauacauuugcaaccgcaaaugcagacacauuauguauagguuaucaugcgaacaauucaacagacacuguagacacaguacuagaaaagaauguaacaguaacacacucuguuaaccuucuagaagacaagcauaacgggaaacuaugcaaacuaagagggguagccccauugcauuuggguaaauguaacauugcuggcuggauccugggaaauccagagugugaaucacucuccacagcaagcucaugguccuacauuguggaaacaucuaguucagacaauggaacguguuacccaggagauuucaucgauuaugaggagcuaagagagcaauugagcucagugucaucauuugaaagguuugagauauuccccaagacaaguucauggcccaaucaugacucgaacaaagguguaacggcagcauguccucaugcuggagcaaaaagcuucuacaaaaauuuaauauggcuaguuaaaaaaggaaauucauacccaaagcucagcaaauccuacauuaaugauaaagggaaagaaguccucgugcuauggggcauucaccauccaucuacuagugcugaccaacaaagucucuaucagaaugcagaugcauauguuuuuguggggacaucaagauacagcaagaaguucaagccggaaauagcaauaagacccaaagugagggaucaagaagggagaaugaacuauuacuggacacuaguagagccgggagacaaaauaacauucgaagcaacuggaaaucuagugguaccgagauaugcauucgcaauggaaagaaaugcuggaucugguauuaucauuucagauacaccaguccacgauugcaauacaacuugucagacacccaagggugcuauaaacaccagccucccauuucagaauauacauccgaucacaauuggaaaauguccaaaauauguaaaaagcacaaaauugagacuggccacaggauugaggaaugucccgucuauucaaucuagaggccuauuuggggccauugccgguuucauugaagggggguggacagggaugguagauggaugguacgguuaucaccaucaaaaugagcaggggucaggauaugcagccgaccugaagagcacacagaaugccauugacgagauuacuaacaaaguaaauucuguuauugaaaagaugaauacacaguucacagcaguagguaaagaguucaaccaccuggaaaaaagaauagagaauuuaaauaaaaaaguugaugaugguuuccuggacauuuggacuuacaaugccgaacuguugguucuauuggaaaaugaaagaacuuuggacuaccacgauucaaaugugaagaacuuauaugaaaagguaagaagccaguuaaaaaacaaugccaaggaaauugggaacggcugcuuugaauuuuaccacaaaugcgauaacacgugcauggaaagugucaaaaaugggacuuaugacuacccaaaauacucagaggaagcaaaauuaaacagagaagaaauagaugggguaaagcuggaaucaacaaggauuuaccagauuuuggcgaucuauucaacugucgccaguucauugguacugguagucucccugggggcaaucaguuucuggaugugcucuaaugggucucuacaguguagaauauguauuuaa

SEQ ID NO: 35994 - RNA, 1701 nt, Artificial Sequence
  derived and/or modified CDS sequence (wt) from hemagglutinin__InfluenzaA__ADA86068
augaaggcaauacuaguaguucugcuauauacauuugcaaccgcaaaugcagacacauuauguauagguuaucaugcgaacaauucaacagacacuguagacacaguacuagaaaagaauguaacaguaacacacucuguugaccuucuagaagacaagcauaacgggaaacuaugcaaacuaagagggguagccccauugcauuuggguaaauguaacauugcuggcuggauccugggaaauccagagugugaaucacucuccacagcaagcucaugguccuacauuguggaaacaucuaguucagacaauggaacguguuacccaggagauuucaucgauuaugaggagcuaagagagcaauugagcucagugucaucauuugaaagguuugagauauuccccaagacaaguucauggcccaaucaugacucgaacaaagguguaacggcagcauguccucaugcuggagcaaaaagcuucuacaaaaauuuaauauggcuaguuaaaaaaggaaacucauacccaaagcucagcaaauccuacauuaaugauaaagggaaagaaguccucgugcuauggggcauucaccauccaucuacuagugcugaccaacaaagucucuaucagaaugcagaugcauauguuuuuguggggacaucaagauacagcaagaaguucaagccggaaauagcaauaagacccaaagugaggaaucaagaagggagaaugaacuauuacuggacacuaguagagccgggagacaaaauaacauucgaagcaacuggaaaucuagugguaccgagauaugcauucgcaauggaaagaaaugcuggaucugguauuaucauuucagauacaccaguccacgauugcaauacaacuugucagacacccaagggugcuauaaacaccagccucccauuucagaauauacauccgaucacaauuggaaaauguccaaaauauguaaaaagcauaaaauugagacuggccacaggauugaggaaugucccgucuauucaaucuagaggccuauuuggggccauugccgguuucauugaagggggguggacagggaugguagauggaugguacgguuaucaccaucaaaaugagcaggggucaggauaugcagccgaccugaagagcacacaaaaugccauugacgagauuacuaacaaaguaaauucuguuauugaaaagaugaauacacaguucacagcaguagguaaagaguucaaccaccuggaaaaaagaauagagaauuuaaauaaaaagguugaugaugguuuccuggacauuuggacuuacaaugccgaacuguugguucuauuggaaaaugaaagaacuuuggacuaccacgauucaaaugugaagaacuuauaugaaaagguaagaagccaguuaaaaaacaaugccaaggaaauuggaaacggcugcuuugaauuuuaccacaaaugcgauaacacgugcauggaaagugucaaaaauggaacuuaugacuacccaaaauacucagaggaagcaaaauuaaacagagaagaaauagaugggguaaagcuggaaucaacaaggaucuaccagauuuuggcgaucuauucaacugucgccaguucauugguacugguagucucccugggggcaaucaguuucuggaugugcucuaaugggucucuacaguguagaauauguauuuaa

SEQ ID NO: 35995 - RNA, 1701 nt, Artificial Sequence
  derived and/or modified CDS sequence (wt) from hemagglutinin__InfluenzaA__ADA86086
augaaggcaauacuaguaguucugcuauauacauuugcaaccgcaaaugcagacacauuauguauagguuaucaugcgaacaauucaacagacacuguagacacaguacuagaaaagaauguaacaguaacacacucuguuaaccuucuagaagacaagcauaacgggaaacuaugcaaacuaagagggguagccccauugcauuuggguaaauguaacauugcuggcuggauccugggaaauccagagugugaaucacucuccacagcaagcucaugguccuacauuguggaaacaucuaguucagacaauggaacguguuacccaggagauuucaucgauuaugaggagcuaagagagcaauugagcucagugucaucauuugaaagguuugagauauuccccaagacaaguucauggcccaaucaugacucgaacaaagguguaacggcagcauguccucaugcuggagcaaaaagcuucuacaaaaauuuaauauggcuaguuaaaaaaggaaauucauacccaaagcucagcaaauccuacauuaaugauaaagggaaagaaguccucgugcuauggggcauccaccauccaucuacuaaugcugaccaacaaagucucuaucagaaugcagaugcauauguuuuuguggggacaucaagauacagcaagaaguucaagccggaaauagcaauaagacccaaagugagggaccaagaagggagaaugaacuauuacuggacacuaguagagccgggagacaaaauaacauucgaagcaacuggaaaucuagugguaccgagauaugcauucgcaauggaaagaaaugcuggaucugguauuaucauuucagauacaccaguccacgauugcaauacaacuugucagacacccaagggugcuauaaacaccagccucccauuucagaauauacauccgaucacaauuggaaaauguccaaaauauguaaaaagcacaaaauugagacuggccacaggauugaggaaugucccgucuauucaaucuagaggccuauuuggggccauugccgguuucauugaagggggguggacagggaugguagauggaugguacgguuaucaccaucaaaaugagcaggggucaggauaugcagccgaccugaagagcacacagaaugccauugacgagauuacuaacaaaguaaauucuguuauugaaaagaugaauacacaguucacagcaguagguaaagaguucaaccaccuggaaaaaagaauagagaauuuaaauaaaaaaguugaugaugguuuccuggacauuuggacuuacaaugccgaacuguugguucuauuggaaaaugaaagaacuuuggacuaccacgauucaaaugugaagaacuuauaugaaaagguaagaagccaguuaaaaaacaaugccaaggaaauuggaaacggcugcuuugaauuuuaccacaaaugcgauaacacgugcauggaaagugucaaaaaugggacuuaugacuacccaaaauacucagaggaagcaaaauuaaacagagaagaaauagaugggguaaagcuggaaucaacaaggauuuaccagauuuuggcgaucuauucaacugucgccaguucauugguacugguagucucccugggggcaaucaguuucuggaugugcucuaaugggucucuacaguguagaauauguauuuaa

SEQ ID NO: 35996 - RNA, 1701 nt, Artificial Sequence
  derived and/or modified CDS sequence (wt) from hemagglutinin__InfluenzaA__ADA86087
augaaggcaauacuaguaguucugcuauauacauuugcaaccgcaaaugcagacacauuauguauagguuaucaugcgaacaauucaacagacacuguagacacaguacuagaaaagaauguaacaguaacacacucuguuaaccuucuagaagacaagcauaacgggaaacuaugcaaacuaagagggguagccccauugcauuuggguaaauguaacauugcuggcuggauccugggaaauccagagugugaaucacucuccacagcaagcucaugguccuacauuguggaaacauuuaguucagacaauggaacguguuacccaggagauuucaucgauuaugaggagcuaagagagcaauugagcucagugucaucauuugaaagguuugagauauuccccaagacaaguucauggcccaaucaugacucgaacaaagguguaacggcagcauguccucaugcuggagcaaaaagcuucuacaaaaauuuaauauggcuaguuaaaaaaggaaauucauacccaaagcucagcaaauccuacauuaaugauaaagggaaagaaguccucgugcuauggggcauucaccauccaucuacuagugcugaccaacaaagucucuaucagaaugcagaugcauauguuuuuguggggacaucaagauacagcaagaaguucaagccggaaauagcaauaagacccaaagugagggaucaagaagggagaaugaacuauuacuggacacuaguagagccgggagacaaaauaacauucgaagcaacuggaaaucuagugguaccgagauaugcauucgcaauggaaagaaaugcuggaucugguauuaucauuucagauacaccaguccacgauugcaauacaacuugccagacacccaagggugcuuuaaacaccagccucccauuucagaauauacauccgaucacaauuggaaaauguccaaaauauguaaaaagcacaaaauugagacuggccacaggauugaggaaugucccgucuauucaaucuagaggccuauuuggggccauugccgguuucauugaagggggguggacagggaugguagauggaugguacgguuaucaccaucaaaaugagcaggggucaggauaugcagccgaccugaagagcacacagaaugccauugacgagauuacuaacaaaguaaauucuguuauugaaaagaugaauacacaguucacagcaguagguaaagaguucaaccaccuggaaaaaagaauagagaauuuaaauaaaaaaguugaugaugguuuccuggacauuuggacuuacaaugccgaacuguugguucuauuggaaaaugaaagaacuuuggacuaccacgauucaaaugugaagaacuuauaugaaaagguaagaaaccagcuaaaaaacaaugccaaggaaauuggaaacggcugcuuugaauuuuaccacaaaugcgauaacacgugcauggaaagugucaaaaaugggacuuaugacuacccaaaauacucagaggaagcaaaauuaaacagagaagaaauagaugggguaaagcuggaaucaacaaggauuuaccagauuuuggcgaucuauucaacugucgccaguucauugguacugguagucucccugggggcaaucaguuucuggauguguucuaaugggucucuacaguguagaauauguauuuaa

SEQ ID NO: 35997 - RNA, 1701 nt, Artificial Sequence
  derived and/or modified CDS sequence (wt) from hemagglutinin__InfluenzaA__ADA86088
augaaggcaauacuaguaguucugcuauauacauuugcaaccgcaaaugcagacacauuauguauagguuaucaugcgaacaauucaacagacacuguagacacaguacuagaaaagaauguaacaguaacacacucuguuaaccuucuagaagacaagcauaacgggaaacuaugcaaacuaagagggguagccccauugcauuuggguaaauguaacauugcuggcuggauccugggaaauccagagugugaaucacucuccacagcaagcucaugguccuacauuguggaaacaucuaguucagacaauggaacguguuacccaggagauuucaucgauuaugaggagcuaagagagcaauugagcucagugucaucauuugaaagguuugagauauuccccaagacaaguucauggcccaaucaugacccgaacaaagguguaacggcagcauguccucaugcuggagcaaaaagcuucuacaaaaauuuaauauggcuaguuaaaaaaggaaauucauacccaaagcucagcaaauccuacauuaaugauaaagggaaagaaguccucgugcuauggggcauucaccauccaucuacuagugcugaccaacaaagucucuaucagaaugcagaugcauauguuuuuguggggacaucaagauacagcaagaaguucaagccggaaauagcaauaagacccaaagugagggaucaagaagggagaaugaacuauuacuggacacuaguagagccgggagacaaaauaacauucgaagcaacuggaaaucuagugguaccgagauaugcauucgcaauggaaagaaaugcuggaucugguauuaucauuucagauacaccaguccacgauugcaauacaacuugucagacacccaagggugcuauaaacaccagccucccauuucagaauauacauccgaucacaauugggaaauguccaaaauauguaaaaagcacaaaauugagacuggccacaggauugaggaaugucccgucuauucaaucuagaggccuauuuggggccauugccgguuucauugaagggggguggacagggaugguagauggaugguacgguuaucaccaucaaaaugagcaggggucaggauaugcagccgaccugaagagcacacagaaugccauugacgagauuacuaacaaaguaaauucuguuauugaaaagaugaauacacaguucacagcaguagguaaagaguucaaccaccuggaaaaaagaauagagaauuuaaauaaaaaaguugaugaugguuuccuggacauuuggacuuacaaugccgaauuguugguucuauuggaaaaugaaagaacuuuggacuaccacgauucaaaugugaagaacuuauaugaaaagguaagaagccaguuaaaaaacaaugccaaggaaauuggaaacggcugcuuugaauuuuaccacaaaugcgauaacacgugcauggaaagugucaaaaaugggacuuaugacuacccaaaauacucagaggaagcaaaauuaaacagagaagaaauagaugggguaaagcuggaaucaacaaggauuuaccagauuuuggcgaucuauucaacugucgccaguucauugguacugguagucucccugggggcaaucaguuucuggaugugcucuaaugggucucuacaguguagaauauguauuuaa

SEQ ID NO: 35998 - RNA, 1701 nt, Artificial Sequence
  derived and/or modified CDS sequence (wt) from hemagglutinin__InfluenzaA__ADB03603
augaaggcaauacuaauaguucugcuauauacauuugcaaccgcacaugcagacacauuauguauagguuaucaugcaaacaauucaacagacacuguagacacaguacuagaaaagaauguaacaguaacacacucuguuaaccuucuagaagacaagcauaacgggaaacuaugcaaacuaagagggguagccccauugcauuuggguaaauguaacauugcuggcuggauccugggaaauccagagugugaaucacucuccacagcaagcucaugguccuacauuguggaaacaucuaguucagacaauggaacguguuacccaggagauuucaucgauuaugaggagcuaagagagcaauugagcucagugucaucauuugaaagguuugagauauuccccaagacaaguucauggcccaaucaugacucgaacaaagguguaacagcagcauguccucaugcuggagcaaaaagcuucuacaaaaauuuaauauggcuaguuaaaaaaggaaauucauacccaaagcucagcaaauccuacauuaaugauaaagggaaagaaguccucgugcuauggggcauucaccauccaucuacuagugcugaccaacaaagucucuaucagaaugcagaugcauauguuuuuguggggacaucaagauacagcaagaaguucaagccggaaauagcaauaagacccaaagugagggaucaagaagggagaauggacuauuacuggacacuaguagagccgggagacaaaauaacauucgaagcaacuggaaaucuagugguaccgagauaugcauucgcaauggaaagaaaugcuggaucugguauuaucauuucagauacaccaguccacgauugcaauacaacuugucagacacccaagggugcuauaaacaccagccucccauuucagaauauacauccgaucacaauuggaaaauguccaaaauauguaaaaagcacaaaauugagacuggccacaggauugaggaaugucccgucuauucaaucuagaggccuauuuggggccauugccgguuucauugaagggggguggacagggaugguagauggaugguacgguuaucaccaucaaaaugagcaggggucaggauaugcagccgaccugaagagcacacagaaugccauugacgagauuacuaacaaaguaaauucuguuauugaaaagaugaauacacaguucacagcaguagguaaagaguucaaccaccuggaaaaaagaauagagaauuuaaauaaaaaaguugaugaugguuuccuggacauuuggacuuacaaugccgaacuguugguucuauuggaaaaugaaagaacuuuggacuaccacgauucaaaugugaagaacuuauaugaaaagguaagaagccaguuaaaaaacaaugccaaggaaauuggaaacggcugcuuugaauuuuaccacaaaugcgauaacacgugcauggaaagugucaaaaaugggacuuaugacuacccaaaauacucagaggaagcaaaauuaaacagagaagaaauagaugggguaaagcuggaaucaacaaggauuuaccagauuuuggcgaucuauucaacugucgccaguucauugguacugguagucucccugggggcaaucaguuucuggaugugcucuaaugggucucuacaguguagaauauguauuuaa

SEQ ID NO: 35999 - RNA, 1701 nt, Artificial Sequence
  derived and/or modified CDS sequence (wt) from hemagglutinin__InfluenzaA__ADB03604
augaaggcaauacuaguaguucugcuauauacauuugcaaccgcaaaugcagacacauuauguauagguuaucaugcgaacaauucaacagacacuguagacacaguacuagaaaagaauguaacaguaacacacucuguuaaccuucuagaagacaagcauaacgggaaacuaugcaaacuaagagggguagccccauugcauuuggguaaauguaacauugcuggcuggauccugggaaauccagagugugaaucacucuccacagcaagcucaugguccuacauuguggaaacaucuaguucagacaauggaacguguuacccaggagauuucaucgauuaugaggagcuaagagagcaauugagcucagugucaucauuugaaagguuugagauauuccccaagacaaguucauggcccaaucaugacucgaacaaagguguaacggcagcauguccucaugcuggagcaaaaagcuucuacaaaaauuuaauauggcuaguuaaaaaaggaaauucauacccaaagcucagcaaauccuacauuaaugauaaagggaaagaaguccucgugcuauggggcauucaccauccaucuacuagugcugaccaacaaagucucuaucagaaugcagaugcauauguuuuuguggggucaucaagauacagcaagaaguucaagccggaaauagcaauaagacccaaagugagggaucaagaagggagaaugaacuauuacuggacacuaguagagccgggagacaaaauaacauucgaagcaacuggaaaucuagugguaccgagauaugcauucgcaauggaaagaaaugcuggaucugguauuaucauuucagauacaccaguccacgauugcaauacaacuugucagacacccaagggugcuauaaacaccagccucccauuucagaauauacauccgaucacaauugggaaauguccaaaauauguaaaaagcacaaaauugagacuggccacaggauugaggaaugucccgucuauucaaucuagaggccuauuuggggccauugccgguuucauugaagggggguggacagggaugguagauggaugguacgguuaucaccaucaaaaugagcaggggucaggauaugcagccgaccugaagagcacacagaaugccauugacgagauuacuaacaaaguaaauucuguuauugaaaagaugaauacacaguucacagcaguagguaaagaguucaaccaccuggaaaaaagaauagagaauuuaaauaaaaaaguugaugaugguuuccuggacauuuggacuuacaaugccgaacuguugguucuauuggaaaaugaaagaacuuuggacuaccacgauucaaaugugaagaacuuauaugaaaagguaagaagccaguuaaaaaacaaugccaaggaaauuggaaacggcugcuuugaauuuuaccacaaaugcgauaacacgugcauggaaagugucaaaaaugggacuuaugacuacccaaaauacucagaggaagcaaaauuaaacagagaagaaauagaugggguaaagcuggaaucaacaaggauuuaccagauuuuggcgaucuauucaacugucgccaguucauugguacugguagucucccugggggcaaucaguuucuggaugugcucuaaugggucucuacaguguagaauauguauuuaa

SEQ ID NO: 36000 - RNA, 1701 nt, Artificial Sequence
  derived and/or modified CDS sequence (wt) from hemagglutinin__InfluenzaA__ADB03605
augaaggcaauacuaguaguucugcuauauacauuugcaaccgcaaaugcagacacauuauguauagguuaucaugcgaacaauucaacagacacuguagacacaguacuagaaaagaauguaacaguaacacacucuguuaaccuucuagaagacaagcauaacgggaaacuaugcaaacuaagagggguagccccauugcauuuggguaaauguaacauugcuggcuggauccugggaaauccagagugugaaucacucuccacagcaagcucaugguccuacauuguggaaacaucuaguucagacaauggaacguguuacccaggagauuucaucgauuaugaggagcuaagagagcaauugagcucagugucaucauuugaaagguuugagauauuccccaagacaaguucauggcccaaucaugacucgaacaaagguguaacggcagcauguccucaugcuggagcaaaaagcuucuacaaaaauuuaauauggcuaguuaaaaaaggaaauucauacccaaagcucagcaaauccuacauuaaugauaaagggaaagaaguccucgugcuauggggcauucaccauccaucuacuagugcugaccaacaaagucucuaucagaaugcagaugcauauguuuuuguggggacaucaagauacagcaagaaguucaagccggaaauagcaauaagacccaaagugagggaacaagaagggagaauggacuauuacuggacacuaguagagccgggagacaaaauaacauucgaagcaacuggaaaucuagugguaccgagauaugcauucgcaauggaaagaaaugcuggaucugguauuaucauuucagauacaccaguccacgauugcaauacaacuugucagacacccaagggugcuauaaacaccagccucccauuucagaauauacauccgaucacaauuggaaaauguccaaaauauguaaaaagcacaaaauugagacuggccacaggauugaggaaugucccgucuauucaaucuagaggccuauuuggggccauugccgguuucauugaagggggguggacagggaugguagauggaugguacgguuaucaccaucaaaaugagcaggggucaggauaugcagccgaccugaagagcacacagaaugccauugacgagauuacuaacaaaguaaauucuguuauugaaaagaugaauacacaguucacagcaguagguaaagaguucaaccaccuggaaaaaagaauagagaauuuaaauaaaaaaguugaugaugguuuccuggacauuuggacuuacaaugccgaacuguugguucuauuggaaaaugaaagaacuuuggacuaccacgauucaaaugugaagaacuuauaugaaaagguaagaagccaguuaaaaaacaaugccaaggaaauuggaaacggcugcuuugaauuuuaccacaaaugcgauaacacgugcauggaaagugucaaaaaugggacuuaugacuacccaaaauacucagaggaagcaaaauuaaacagagaagaaauagaugggguaaagcuggaaucaacaaggauuuaccagauuuuggcgaucuauucaacugucgccaguucauugguacugguagucucccugggggcaaucaguuucuggaugugcucuaaugggucucuacaguguagaauauguauuuaa

SEQ ID NO: 36001 - RNA, 1701 nt, Artificial Sequence
  derived and/or modified CDS sequence (wt) from hemagglutinin__InfluenzaA__ADB03607
augaaggcaauacuaguaguucugcuauauacauuugcaaccgcaaaugcagacacauuauguauagguuaucaugcaaacaauucaacagacacuguagacacaguacuagaaaagaauguaacaguaacacacucuguuaaccuucuagaagacaagcauaacgggaaacuaugcaaacuaagagggguagccccauugcauuuggguaaauguaacauugcuggcuggauccugggaaauccagagugugaaucacucuccacagcaagcucaugguccuacauuguggaaacaucuaguucagacaauggaacguguuacccaggagauuucaucgauuaugaggagcuaagagagcaauugagcucagugucaucauuugaaagguuugagauauuccccaagacaaguucauggcccaaucaugacucgaacaaagguguaacggcagcauguccucaugcuggagcaaaaagcuucuacaaaaauuuaauauggcuaguuaaaaaaggaaauucauacccaaagcucagcaaauccuacauuaaugauaaagggaaagaaguccucgugcuauggggcauucaccauccaucuacuagugcugaccaacaaagucucuaucagaaugcagaugcauauguuuuuguggggacaucaagauacagcaagaaguucaagccggaaauagcaauaagacccaaagugagggaucaagaagggagaaugaacuauuacuggacacuaguagagccgggagacaaaauaacauucgaagcaacuggaaaucuagugguaccgagauaugcauucgcaauggaaagaaaugcuggaucugguauuaucauuucagauacaccaguccacgauugcaauacaacuugucagacacccaagggugcuauaaacaccagccucccauuucagaauauacauccgaucacaauuggaaaauguccaaaauauguaaaaagcacaaaauugagacuggccacaggauugaggaaugucccgucuauucaaucuagaggccuauuuggggccauugccgguuucauugaagggggguggacagggaugguagauggaugguacgguuaucaccaucaaaaugagcaggggucaggauaugcagccgaccugaagagcacacagaaugccauugacgagauuacuaacaaaguaaauucuguuauugaaaagaugaauacacaguucacagcaguagguaaagaguucaaccaccuggaaaaaagaauagagaauuuaaauaaaaaaguugaugaugguuuccuggacauuuggacuuacaaugccgaacuguugguucuauuggaaaaugaaagaacuuuggacuaccacgauucaaaugugaagaacuuauaugaaaagguaagaagccaguuaaaaaacaaugccaaggaaauuggaaacggcugcuuugaauuuuaccacaaaugcgauaacacgugcauggaaagugucaaaaaugggacuuaugacuacccaaaauacucagaggaagcaaaauuaaacagagaagaaauagaugggguaaagcuggaaucaacaaggauuuaccagauuuuggcgaucuauucaacugucgccaguucauugguacugguagucucccugggggcaaucaguuucuggaugugcucuaaugggucucuacaguguagaauauguauuuaa

SEQ ID NO: 36002 - RNA, 1701 nt, Artificial Sequence; identical to SEQ ID NO: 35772
  derived and/or modified CDS sequence (wt) from hemagglutinin__InfluenzaA__ADB03609

SEQ ID NO: 36003 - RNA, 1701 nt, Artificial Sequence
  derived and/or modified CDS sequence (wt) from hemagglutinin__InfluenzaA__ADB03611
augaaggcaauacuaguaguucugcuauauacauuugcaaccgcaaaugcagacacauuauguauagguuaucaugcgaacaauucaacagacacuguagacacaguacuagaaaagaauguaacaguaacacacucuguuaaccuucuagaagacaagcauaacgggaaacuaugcaaacuaagagggguagccccauugcauuuggguaaauguaacauugcuggcuggauccugggaaauccagagugugaaucacucuccacagcaagcucaugguccuacauuguggaaacaucuaguucagacaauggaacguguuacccaggagauuucaucgauuaugaggagcuaagagagcaauugagcucagugucaucauuugaaagguuugagauauuccccaagacaaguucauggcccaaucaugacucgaacaaagguguaacggcagcauguccucaugcuggagcaaaaagcuucuacaaaaauuuaauauggcuaguuaaaaaaggaaauucauacccaaagcucagcaaauccuacauuaaugauaaagggaaagaaguccucgugcuauggggcauucaccauccaucuacuagugcugaccaacaaagucucuaucagaaugcagaugcauauguuuuuguggggacaucaagauacagcaagaaguucaagccggaaauagcaauaagacccaaagugagggaucaagaagggagaaugaacuauuacuggacacuaguagagccgggagacaaaauaacauucgaagcaacuggaaaucuagugguaccgagauaugcauucgcaauggaaagaaaugcuggaucugguauuaucauuucagauacaccaguccacgauugcaauacaacuugucagacacccaagggugcuauaaacaccagccucccauuucagaauauacauccgaucacaauuggaaaauguccaaaauauguaaaaagcacaaaauugagacuggccacaggauugaggaaugucccgucuauucaaucuagaggccuauuuggggccauugccgguuucauugaagggggguggacagggaugguagauggaugguacgguuaucaccaucaaaaugagcaggggucaggauaugcagccgaccugaagagcacacagaaugccauugacgagauuacuaacaaaguaaauucuguuauugaaaagaugaauacacaguucacagcaguagguaaagaguucaaccaccuggaaaaaagaauagagaauuuaaauaaaaagguugaugaugguuuccuggacauuuggacuuacaaugccgaacuguugguucuauuggaaaaugaaagaacuuuggacuaccacgauucaaaugugaagaacuuauaugaaaagguaagaagccaguuaaaaaacaaugccaaggaaauuggaaacggcugcuuugaauuuuaccacaaaugcgauaacacgugcauggaaagugucaaaaaugggacuuaugacuacccaaaauacucagaggaagcaaaauuaaacagagaagaaauagaugggguaaagcuggaaucaacaaggauuuaccagauuuuggcgaucuauucaacugucgccaguucauugguacugguagucucccugggggcaaucaguuucuggaugugcucuaaugggucucuacaguguagaauauguauuuga

SEQ ID NO: 36004 - RNA, 1701 nt, Artificial Sequence
  derived and/or modified CDS sequence (wt) from hemagglutinin__InfluenzaA__ADB03612
augaaggcaauacuaguaguucugcuauauacauuugcaaccgcaaaugcagacacauuauguauagguuaucaugcgaacaauucaacagacacuguagacacaguacuagaaaagaauguaacaguaacacacucuguuaaccuucuagaagacaagcauaacgggaaacuaugcaaacuaagagggguagccccauugcauuuggguaaauguaacauugcuggcuggauccugggaaauccagagugugaaucacucuccacagcaagcucaugguccuacauuguggaaacaucuaguucagacaauggaacguguuacccaggagauuucaucgauuaugaggagcuaagagagcaauugagcucagugucaucauuugaaagguuugagauauuccccaagacaaguucauggcccaaucaugacucgaacaaagguguaacggcagcauguccucaugcuggagcaaaaagcuucuacaaaaauuuaauauggcuaguuaaaaaaggaaauucauacccaaagcucagcaaauccuacauuaaugauaaagggaaagaaguccucgugcuauggggcauucaccauccaucuacuagugcugaccaacaaagucucuaucagaaugcagaugcauauguuuuuguggggacaucaagauacagcaagaaguucaagccggaaauagcaauaagacccaaagugagggaucaagaagggagaaugaacuauuacuggacacuaguagagccgggagacaaaauaacauucgaagcaacuggaaaucuagugguaccgagauaugcauucgcaauggaaagaaaugcuggaucugguauuaucauuucagauacaccaguccacgauugcaauacaacuugucagacacccaagggugcuauaaacaccagccucccauuucagaauauacauccgaucacaauuggaaaauguccaaaauauguaaaaagcacaaaauugagacuggccacaggauugaggaaugucccguuuauucaaucuagaggccuauuuggggccauugccgguuucauugaagggggguggacagggaugguagauggaugguacgguuaucaccaucaaaaugagcaggggucaggauaugcagccgaccugaagagcacacagaaugccauugacgagauuacuaacaaaguaaauucuguuauugaaaagaugaauacacaguucacagcaguagguaaagaguucaaccaccuggaaaaaagaauagagaauuuaaauaaaaagguugaugaugguuuccuggacauuuggacuuacaaugccgaacuguugguucuauuggaaaaugaaagaacuuuggacuaccacgauucaaaugugaagaacuuauaugaaaagguaagaagccaguuaaaaaacaaugccaaggaaauuggaaacggcugcuuugaauuuuaccacaaaugcgauaacacgugcauggaaagugucaaaaaugggacuuaugacuacccaaaauacucagaggaagcaaaauuaaacagagaagaaauagaugggguaaagcuggaaucaacaaggauuuaccagauuuuggcgaucuauucaacugucgccaguucauugguacugguagucucccugggggcaaucaguuucuggaugugcucuaaugggucucuacaguguagaauauguauuuaa

SEQ ID NO: 36005 - RNA, 1701 nt, Artificial Sequence; identical to SEQ ID NO: 35521
  derived and/or modified CDS sequence (wt) from hemagglutinin__InfluenzaA__ADB03614

SEQ ID NO: 36006 - RNA, 1701 nt, Artificial Sequence
  derived and/or modified CDS sequence (wt) from hemagglutinin__InfluenzaA__ADB03617
augaaggcaauacuaguaguucugcuauauacauuugcaaccgcaaaugcagacacauuauguauagguuaucaugcgaacaauucaacagacacuguagacacaguacuagaaaagaauguaacaguaacacacucuguuaaccuucuagaagacaagcauaacgggaaacuaugcaaacuaagagggguagccccauugcauuuggguaaauguaacauugcuggcuggauccugggaaauccagagugugaaucacucuccacagcaagcucaugguccuacauuguggaaacaucuaguucagacaauggaacguguuacccaggagauuucaucgauuaugaggagcuaagagagcaauugagcucagugucaucauuugaaagguuugagauauuccccaagacaaguucauggcccaaucaugacucgaacaaagguguaacggcagcauguccucaugcuggagcaaaaagcuucuacaaaaauuuaauauggcuaguuaaaaaaggaaauucauacccaaagcucagcaaauccuacauuaaugauaaagggaaagaaguccucgugcuauggggcauucaccauccaucuacuagugcugaccaacaaagucucuaucagaaugcagaugcauauguuuuuguggggacaucaagauacagcaagaaguucaagccggaaauagcaauaagacccaaagugagggaacaagaagggagaaugaacuauuacuggacacuaguagagccgggagacaaaauaacauucgaagcaacuggaaaucuagugguaccgagauaugcauucgcaauggaaagaaaugcuggaucugguauuaucauuucagauacaccaguccacgauugcaauacaacuugucagacacccaagggugcuauaaacaccagccucccauuucagaauauacauccgaucacaauuggaaaauguccaaaauauguaaaaagcacaaaauugagacuggccacaggauugaggaaugucccgucuauucaaucuagaggccuauuuggggccauugccgguuucauugaagggggguggacagggaugguagauggaugguacgguuaucaccaucaaaaugagcaggggucaggauaugcagccgaccugaagagcacacagaaugccauugacgagauuacuaacaaaguaaauucuguuauugaaaagaugaauacacaguucacagcaguagguaaagaguucaaccaccuggaaaaaagaauagagaauuuaaauaaaaaaguugaugaugguuuccuggacauuuggacuuacaaugccgaacuguugguucuauuggaaaaugaaagaacuuuggacuaccacgauucaaaugugaagaacuuauaugaaaagguaagaagccaguuaaaaaacaaugccaaggaaauuggaaacggcugcuuugaauuuuaccacaaaugcgauaacacgugcauggaaagugucaaaaaugggacuuaugacuacccaaaauacucaaaggaagcaaaauuaaacagagaagaaauagaugggguaaagcuggaaucaacaaggauuuaccagauuuuggcgaucuauucaacugucgccaguucauugguacugguagucucccugggggcaaucaguuucuggaugugcucuaaugggucucuacaguguagaauauguauuuaa

SEQ ID NO: 36007 - RNA, 1701 nt, Artificial Sequence
  derived and/or modified CDS sequence (wt) from hemagglutinin__InfluenzaA__ADB03619
augaaggcaauacuaguaguucugcuauauacauuugcaaccgcaaaugcagacacauuauguauagguuaucaugcgaacaauucaacagacacuguagacacaguacuagaaaagaauguaacaguaacacacucuguuaaccuucuagaagacaagcauaacgggaaacuaugcaaacuaagagggguagccccauugcauuuggguaaauguaacauugcuggcuggauccugggaaauccagagugugaaucacucuccacagcaagcucaugguccuacauuguggaaacaucuaguucagacaauggaacguguuacccaggagauuucaucgauuaugaggagcuaagagagcaauugagcucagugucaucauuugaaagguuugagauauuccccaagacaaguucauggcccaaucaugacucgaacaaagguguaacggcagcauguccucaugcuggagcaaaaagcuucuacaaaaauuuaauaugguuaguuaaaaaaggaaauucauacccaaagcucagcaaauccuacauuaaugauaaagggaaagaaguccucgugcuauggggcauucaccauccaucuacuagugcugaccaacaaagucucuaucaaaaugcagaugcauauguuuuuguggggacaucaagauacagcaagaaguucaagccggaaauagcaauaagacccaaagugagggaacaagaagggagaaugaacuauuacuggacacuaguagagccgggagacaaaauaacauucgaagcaacuggaaaucuagugguaccgagauaugcauuugcaauggaaagaaaugcuggaucugguauuaucauuucagauacaccaguccacgauugcaauacaacuugucagacacccaagggugcuauaaacaccagccucccauuucagaauauacauccgaucacaauuggaaaauguccaaaauauguaaaaagcacaaaauugagacuggccacaggauugaggaaugucccgucuauucaaucuagaggccuauuuggggccauugccgguuucauugaagggggguggacagggaugguagauggaugguacgguuaucaccaucaaaaugagcaggggucaggauaugcagccgaccugaagagcacacagaaugccauugacgagauuacuaacaaaguaaauucuguuauugaaaagaugaauacacaguucacagcaguagguaaagaguucaaccaccuggaaaaaagaauagagaauuuaaauaaaaaaguugaugaugguuuccuggacauuuggacuuacaaugccgaacuguugguucuauuggaaaaugaaagaacuuuggacuaccacgauucaaaugugaagaacuuauaugaaaagguaagaagccaguuaaaaaacaaugccaaggaaauuggaaacggcugcuuugaauuuuaccacaaaugcgauaacacgugcauggaaagugucaaaaaugggacuuaugacuacccaaaauacucagaggaagcaaaauuaaacagagaagaaauagaugggguaaagcuggaaucaacaaggauuuaccagauuuuggcgaucuauucaacugucgccaguucauugguacugguagucucccugggggcaaucaguuucuggaugugcucuaaugggucucuacaguguagaauauguauuuaa

SEQ ID NO: 36008 - RNA, 1701 nt, Artificial Sequence
  derived and/or modified CDS sequence (wt) from hemagglutinin__InfluenzaA__ADB03620
augaaggcaauacuaguaguucugcuauauacauuugcaaccgcaaaugcagacacauuauguauagguuaucaugcgaacaauucaacagacacuguagacacaguacuagaaaagaauguaacaguaacacacucuguuaaccuucuagaaggcaagcauaacgggaaacuaugcaaacuaagagggguagccccauugcauuuggguaaauguaacauugcuggcuggauccugggaaauccagagugugaaucacucuccacagcaagcucaugguccuacauuguggaaacaucuaguucagacaauggaacguguuacccaggagauuucaucgauuaugaggagcuaagagagcaauugagcucagugucaucauuugaaagguuugagauaguccccaagacaaguucauggcccaaucaugacucgaacaaagguguaacggcagcauguccucaugcuggagcaaaaagcuucuacaaaaauuuaauauggcuaguuaaaaaaggaaauucauacccaaagcucagcaaauccuacauuaaugauaaagggaaagaaguccucgugcuauggggcauucaccauccaucuacuagugcugaccaacaaagucucuaucagaaugcagaugcauauguuuuuguggggacaucaagauacagcaagaaguucaagccggaaauagcaauaagacccaaagugagggaucaagaagggagaaugaacuauuacuggacacuaguagagccgggagacaaaauaacauucgaagcaacuggaaaucuagugguaccgagauaugcauucgcaauggaaagaaaugcuggaucugguauuaucauuucagauacaccaguccacgauugcaauacaacuugucagacacccaagggugcuauaaacaccagccucccauuucagaauauacauccgaucacaauuggaaaauguccaaaauauguaaaaagcacaaaauugagacuggccacaggauugaggaaugucccgucuauucaaucuagaggccuauuuggggccauugccgguuucauugaagggggguggacagggaugguagauggaugguacgguuaucaccaucaaaaugagcaggggucaggauaugcagccgaccugaagagcacacagaaugccauugacgagauuacuaacaaaguaaauucuguuauugaaaagaugaauacacaguucacagcaguagguaaagaguucaaccaccuggaaaaaagaauagagaauuuaaauaaaaaaguugaugaugguuuccuggacauuuggacuuacaaugccgaacuguugguucuauuggaaaaugaaagaacuuuggacuaccacgauucaaaugugaagaacuuauaugaaaagguaagaagccaguuaaaaaacaaugccaaggaaauuggaaacggcugcuuugaauuuuaccacaaaugcgauaacacgugcauggaaagugucaaaaaugggacuuaugacuacccaaaauacucagaggaagcaaaauuaaacagagaagaaauagaugggguaaagcuggaaucaacaaggauuuaccagauuuuggcgaucuauucaacugucgccaguucauugguacugguagucucccugggggcaaucaguuucuggaugugcucuaaugggucucuacaguguagaauauguauuuaa

SEQ ID NO: 36009 - RNA, 1701 nt, Artificial Sequence
  derived and/or modified CDS sequence (wt) from hemagglutinin__InfluenzaA__ADB03622
augaaggcaauacuaguaguucugcuauauacauuugcaaccgcaaaugcagacacauuauguauagguuaucaugcgaacaauucaacagacacuguagacacaguacuagaaaagaauguaacaguaacacacucuguuaaccuucuagaagacaagcauaacgggaaacuaugcaaacuaagagggguagccccauugcauuuggguaaauguaacauugcuggcuggauccugggaaauccagagugugaaucacucuccacagcaagcucaugguccuacauuguggaaacaucuaguucagacaauggaacguguuacccaggagauuucaucaauuaugaggagcuaagagagcaauugagcucagugucaucauuugaaagguuugagauauuccccaagacaaguucauggcccaaucaugacucgaacaaagguguaacggcagcauguccucaugcuggagcaaaaagcuucuacaaaaauuuaauauggcuaguuaaaaaaggaaauucauacccaaagcucagcaaauccuacauuaaugauaaagggaaagaaguccucgugcuauggggcauucaccauccaucuacuagugcugaccaacaaagucucuaucagaaugcagaugcauauguuuuuguggggacaucaagauacagcaagaaguucaagccggaaauagcaauaagacccaaagugagggaucaagaagggagaaugaacuauuacuggacacuaguagagccgggagacaaaauaacauucgaagcaacuggaaaucuagugguaccgagauaugcauucgcaauggaaagaaaugcuggaucugguauuaucaucucagauacaccaguccacgauugcaauacaacuugucagacacccaauggugcuauaaacaccagccucccauuucagaauauacauccgaucacaauuggaaaauguccaaaauauguaaaaagcacaaaauugagacuggccacaggauugaggaaugucccgucuauucaaucuagaggccuauuuggggccauugccgguuucauugaagggggguggacagggaugguagauggaugguacgguuaucaccaucaaaaugagcaggggucaggauaugcagccgaccugaagagcacacagaaugccauugacaagauuacuaacaaaguaaauucuguuauugaaaagaugaauacacaguucacagcaguagguaaagaguucaaccaccuggaaaaaagaauagagaauuuaaauaaaaaaguugaugaugguuuccuggacauuuggacuuacaaugccgaacuguugguucuauuggaaaaugaaagaacuuuggacuaccacgauucaaaugugaagaacuuauaugaaaagguaagaagccaguuaaaaaacaaugccaaggaaauuggaaacggcugcuuugaauuuuaccacaaaugcgauaacacgugcauggaaagugucaaaaaugggacuuaugacuacccaaaauacucagaggaagcaaaauuaaacagagaagaaauagaugggguaaagcuggaaucaacaaggauuuaccagauuuuggcgaucuauucaacugucgccaguucauugguacugguagucucccugggggcaaucaguuucuggaugugcucuaaugggucucuacaguguagaauauguauuuaa

SEQ ID NO: 36010 - RNA, 1701 nt, Artificial Sequence; identical to SEQ ID NO: 36009
  derived and/or modified CDS sequence (wt) from hemagglutinin__InfluenzaA__ADB03623

SEQ ID NO: 36011 - RNA, 1701 nt, Artificial Sequence
  derived and/or modified CDS sequence (wt) from hemagglutinin__InfluenzaA__ADB03628
auggaggcaauacuaguaguucugcuauauacauuugcaaccgcaaaugcagacacauuauguauagguuaucaugcgaacaauucaacagacacuguagacacaguacuagaaaagaauguaacaguaacacacucuguuaaccuucuagaagacaagcauaacgggaaacuaugcaaacuaagagggguagccccauugcauuuggguaaauguaacauugcuggcuggauccugggaaauccagagugugaaucacucuccacagcaagcucaugguccuacauuguggaaacaucuaguucagacaauggaacguguuacccaggagauuucaucgauuaugaggagcuaagagagcaauugagcucagugucaucauuugaaagguuugagauauuccccaagacaaguucauggcccaaucaugacucgaacaaagguguaacggcagcauguccucaugcuggagcaaaaagcuucuacaaaaauuuaauauggcuaguuaaaaaaggaaauucauacccaaagcucagcaaauccuacauuaaugauaaagggaaagaaguccuagugcuauggggcauucaccauccaucuacuagugcugaccaacaaagucucuaucagaaugcagaugcauauguuuuuguggggacaucaagauacagcaagaaguucaagccggaaauagcaauaagacccaaagugagggaucaagaagggagaaugaacuauuacuggacacuaguagagccgggagacaaaauaacauucgaagcaacuggaaaucuagugguaccgagauaugcauucgcaauggaaagaaaugcuggaucugguauuaucauuucagauacaccaguccacgauugcaauacaacuugucagacacccaagggugcuauaaacaccagccucccauuucauaauauacauccgaucacaauuggaaaauguccaaaauauguaaaaagcacaaaauugagacuggccacaggauugaggaaugucccgucuauucaaucuagaggccuauuuggggccauugccgguuucauugaagggggguggacagggaugguggauggaugguacgguuaucaccaucaaaaugagcaggggucaggauaugcagccgaccugaagagcacacagaaugccauugacgagauuacuaacaaaguaaauucuguuauugaaaagaugaauacacaguucacagcaguagguaaagaguucaaccaccuggaaaaaagaauagagaauuuaaauaaaaagguugaugaugguuuccuggacauuuggacuuacaaugccgaacuguugguucuauuggaaaaugaaagaacuuuggacuaccacgauucaaaugugaagaacuuauaugaaaagguaagaagccaguuaaaaaacaaugccaaggaaauuggaaacggcugcuuugaauuuuaccacaaaugcgauaacacgugcauggaaagugucaaaaaugggacuuaugacuacccaaaauacucagaggaagcaaaauuaaacagagaagaaauagaugggguaaagcuggaaucaacaaggauuuaccagauuuuggcgaucuauucaacugucgccaguucauugguacugguagucucccugggggcaaucaguuucuggaugugcucuaaugggucucuacaguguagaauauguauuuaa

SEQ ID NO: 36012 - RNA, 1701 nt, Artificial Sequence
  derived and/or modified CDS sequence (wt) from hemagglutinin__InfluenzaA__ADB03629
augaaggcaauacuaguaguucugcuauauacauuuacaaccgcaaaugcagacacauuauguauagguuaucaugcgaacaauucaacagacacuguagacacaguauuagaaaagaauguaacaguaacacacucuguuaaccuucuagaagacaagcauaacgggaaacuaugcaaacuaagagggguagccccauugcauuuggguaaauguaacauugcuggcuggauccuggguaauccagagugugaaucacucuccacagcaagcucaugguccuacauuguggaaacaucuaguucagacaauggaacguguuacccaggagauuucaucgauuaugaggagcuaagagagcaauugagcucagugucaucauuugaaagguuugagauauuccccaagacaaguucauggcccaaucaugacucgaacaaagguguaacggcagcauguccucaugcuggagcaaaaagcuucuacaaaaauuuaauauggcuaguuaaaaaaggaaauucauacccaaagcucagcaaauccuacauuaaugauaaagggaaagaaguccucgugcuauggggcauucaccauccaucuacuagugcugaccaacaaagucucuaucagaaugcagaugcauauguuuuuguggggacaucaagauacagcaagaaguucaagccggaaauagcaauaagacccaaagugagggaacaagaagggagaaugaacuauuacuggacacuaguagagccgggagacaaaauaacauucgaagcaacuggaaaucuagugguaccgagauaugcauucgcaauggaaagaaaugcuggaucugguauuaucauuucagauacaccaguccacgauugcaauacaacuugucagacacccaagggugcuauaaacaccagccucccauuucagaauauacauucgaucacaauuggaaaauguccaaaauauguaaaaagcacaaaauugagacuggccacaggauugaggaaugucccgucuauucaaucuagaggccuauuuggggccauugccgguuucauugaagggggguggacagggaugguagauggaugguacgguuuucaccaucaaaaugagcaggggucaggauaugcagccgaccugaagagcacacagaaugccauugacgagauuacuaacaaaguaaauucuguuauugaaaagaugaauacacaguucacagcaguagguaaagaguucaaccaccuggaaaaaagaauagagaauuuaaauaaaaaaguugaugaugguuuccuggacauuuggacuuacaaugccgaacuguugguucuauuggaaaaugaaagaacuuuggacuaccacgauucaaaugugaagaacuuauaugaaaagguaagaagccaguuaaaaaacaaugccaaggaaauuggaaacggcugcuuugaauuuuaccacaaaugcgauaacacgugcauggaaagugucaaaaaugggacuuaugacuacccaaaauacucagaggaagcaaaauuaaacagagaagaaauagaugggguaaagcuggaaucaacaaggauuuaccagauuuuggcgaucuauucaacugucgccaguucauugguacugguagucucccugggggcaaucaguuucuggaugugcucuaaugggucucuacaguguagaauauguauuuaa

SEQ ID NO: 36013 - RNA, 1701 nt, Artificial Sequence
  derived and/or modified CDS sequence (wt) from hemagglutinin__InfluenzaA__ADB03630
augaaggcaauacuaguaguucugcuauauacauuugcaaccgcaaaugcagacacauuauguauagguuaucaugcgaacaauucaacagacacuguagacacgguacuagaaaagaauguaacaguaacacacucuguuaaccuucuagaagacaagcauaacgggaaacuaugcaaacuaagagggguagccccauugcauuuggguaaauguaacauugcuggcuggauccugggaaauccagagugugaaucacucuccacagcaagcucaugguccuacauuguggaaacaucuaguucagacaauggaacguguuacccaggagauuucaucgauuaugaggagcuaagagagcaauugagcucagugucaucauuugaaagguuugagauauuccccaagacaaguucauggcccaaucaugacucgaacaaagguguaacggcagcauguccucaugcuggagcaaaaagcuucuacaaaaauuuaauauggcuaguuaaaaaaggaaauucauacccaaagcucagcaaauccuacauuaaugauaaagggaaagaaguccucgugcuauggggcauucaccauccaucuacuagugcugaccaacaaagucucuaucagaaugcagaugcauauguuuuugugggaacaucaagauacagcaagaaguucaagccggaaauagcaauaagacccaaagugagggaucaagaagggagaaugaacuaucacuggacacuaguagagccgggagacaaaauaacauucgaagcaacuggaaaucuagugguaccgagauaugcauucgcaauggaaagaaaugcuggaucugguauuaucauuucagauacaccaguccacgauugcaauacaacuugucagacacccaagggugcuauaaacaccagccucccauuucagaauauacauccgaucacaauuggaaaauguccaaaauauguaaaaagcacaaaauugagacuggccacaggauugaggaaugucccgucuauucaaucuagaggccuauuuggggccauugccgguuucauugaagggggguggacagggaugguagauggaugguacgguuaucaccaucaaaaugagcaggggucaggauaugcagccgaccugaagagcacacagaaugccauugacgagauuacuaacaaaguaaauucuguuauugaaaagaugaauacacaguucacagcaguagguaaagaguucaaccaccuggaaaaaagaauagagaauuuaaauaaaaaaguugaugaugguuuccuggacauuuggacuuacaaugccgaacuguugguucuauuggaaaaugaaagaacuuuggacuaccacgauucaaaugugaagaacuuauaugaaaagguaagaagccaguuaaaaaacaaugccaaggaaauuggaaacggcugcuuugaauuuuaccacaaaugcgauaacacgugcauggaaagugucaaaaaugggacuuaugacuacccaaaauacucaaaggaagcaaaauuaaacagagaagaaauagaugggguaaagcuggaaucaacaaggauuuaccagauuuuggcgaucuauucaacugucgccaguucauugguacugguagucucccugggggcaaucaguuucuggaugugcucuaaugggucucuacaguguagaauauguauuuaa

SEQ ID NO: 36014 - RNA, 1701 nt, Artificial Sequence
  derived and/or modified CDS sequence (wt) from hemagglutinin__InfluenzaA__ADB25319
augaaggcaauacuaguaguucugcuauauacauuugcaaccgcaaaugcagacacauuauguauagguuaucaugcgaacaauucaacagacacuguagacacaguacuagaaaagaauguaacaguaacacacucuguuaaccuucuagaagacaagcauaacgggaaacuaugcaaacuaagagggguagccccauugcauuuggguaaauguaacauugcuggcuggauccugggaaauccagagugugaaucacucuccacagcaagcucaugguccuacauuguggaaacaucuaguucagacaauggaacguguuacccaggagauuucaucgauuaugaggagcuaagagagcaauugagcucagugucaucauuugaaagguuugagauauuccccaagacaaguucauggcccaaucaugacucgaacaaagguguaacggcagcauguccucaugcuggagcaaaaagcuucuacaaaaauuuaauauggcuaguuaaaaaaggaaauucauacccaaagcucagcaaauccuacauuaaugauaaagggaaagaaguccucgugcuauggggcauucaccauccaucuacuagugcugaccaacaaagucucuaucagaaugcagaugcauauguuuuuguggggacaucaagauacagcaagaaguucaagccggaaauagcaauaagacccaaagugaggggucaagaagggagaaugaacuauuacuggacacuaguagagccgggagacaaaauaacauucgaagcaacuggaaaucuagugguaccgagauaugcauucgcaauggaaagaaaugcuggaucugguauuaucauuucagauacaccaguccacgauugcaauacaacuugucagacacccaagggugcuauaaacaccagccucccauuucagaauauacauccgaucacaauuggaaaauguccaaaauauguaaaaagcacaaaauugagacuggccacaggauugaggaaugucccgucuauucaaucuagaggccuauuuggggccauugccgguuucauugaagggggguggacagggaugguagauggaugguacgguuaucaccaucaaaaugagcaggggucaggauaugcagccgaccugaagagcacacagaaugccauugacgagauuacuaacaaaguaaauucuguuauugaaaagaugaauacacaguucacagcaguagguaaagaguucaaccaccuggaaaaaagaauagagaauuuaaauaaaaagguugaugaugguuuccuggacauuuggacuuacaaugccgaacuguugguucuauuggaaaaugaaagaacuuuggacuaccacgauucaaaugugaagaacuuauaugaaaagguaagaagccaguuaaaaaacaaugccaaggaaauuggaaacggcugcuuugaauuuuaccacaaaugcgauaacacgugcauggaaagugucaaaaaugggacuuaugacuacccaaaauacucagaggaagcaaaauuaaacagagaagaaauagaugggguaaagcuggaaucaacaaggauuuaccagauuuuggcgaucuauucaacugucgccaguucauugguacugguagucucccugggggcaaucaguuucuggaugugcucuaaugggucucuacaguguagaauauguauuuaa

SEQ ID NO: 36015 - RNA, 1701 nt, Artificial Sequence; identical to SEQ ID NO: 34681
  derived and/or modified CDS sequence (wt) from hemagglutinin__InfluenzaA__ADB25321

SEQ ID NO: 36016 - RNA, 1701 nt, Artificial Sequence
  derived and/or modified CDS sequence (wt) from hemagglutinin__InfluenzaA__ADB27970
augaaggcaauacuaguaguucugcuauauacauuugcaaccgcaaaugcagacacauuauguauagguuaucaugcgaacaauucaacagacacuguagacacaguacuagaaaagaauguaacaguaacacacucuguuaaccuucuagaagacaagcauaacgggaaacuaugcaaacuaagagggguagccccauugcauuuggguaaauguaacauugcuggcuggauccugggaaauccagagugcgaaucacucuccacagcaagcucaugguccuacauuguggaaacaucuaguucagacaauggaacguguuacccaggagauuucaucgauuaugaggagcuaagagagcaauugagcucagugucaucauuugaaagguuugagauauuccccaagacaaguucauggcccaaucaugacucgaacaaagguguaacggcagcauguccucaugcuggagcaaaaagcuucuacaaaaauuuaauauggcuaguuaaaaaagggaauucauacccaaagcucagcaaauccuacauuaaugauaaagggaaagaaguccucgugcuauggggcauucaccauccaucuacuagugcugaccaacaaagucucuaucagaaugcagaugcauauguuuuuguggggacaucaagauacagcaagaaguucaagccggaaauagcaauaagacccaaagugagggaucaagaagggagaaugaacuauuacuggacacuaguagagccgggagacaaaauaacauucgaagcaacuggaaaucuagugguaccgagauaugcauucgcaauggaaagagaugcuggaucugguauuaucauuucagauacaccaguccacgauugcaauacaacuugucagacacccaagggugcuauaaacaccagccucccauuucagaauauacauccgaucacaauuggaaaauguccaaaauauguaaaaagcacaaaauugagacuggccacaggauugaggaaugucccgucuauucaaucuagaggccuauuuggggccauugccgguuucauugaagggggguggacagggaugguagauggaugguacgguuaucaccaucaaaaugagcaggggucaggauaugcagccgaccugaagagcacacagaaugccauugacgagauuacuaacaaaguaaauucuguuauugaaaagaugaauacacaguucacagcaguagguaaagaguucaaccaccuggaaaaaagaauagagaauuuaaauaaaaaaguugaugaugguuuccuggacauuuggacuuacaaugccgaacuguugguucuauuggaaaaugaaagaacuuuggacuaccacgauucaaaugugaagaacuuauaugaaaagguaagaagccaguuaaaaaacaaugccaaggaaauuggaaacggcugcuuugaauuuuaccacaaaugcgauaacacgugcauggaaagugucaaaaaugggacuuaugacuacccaaaauacucagaggaagcaaaauuaaacagagaagaaauagaugggguaaagcuggaaucaacaaggauuuaccagauuuuggcgaucuauucaacugucgccaguucauugguacugguagucucccugggggcaaucaguuucuggaugugcucuaaugggucucuacaguguagaauauguauuuaa

SEQ ID NO: 36017 - RNA, 1701 nt, Artificial Sequence; identical to SEQ ID NO: 34681
  derived and/or modified CDS sequence (wt) from hemagglutinin__InfluenzaA__ADB27980

SEQ ID NO: 36018 - RNA, 1701 nt, Artificial Sequence; identical to SEQ ID NO: 35767
  derived and/or modified CDS sequence (wt) from hemagglutinin__InfluenzaA__ADB54352

SEQ ID NO: 36019 - RNA, 1701 nt, Artificial Sequence
  derived and/or modified CDS sequence (wt) from hemagglutinin__InfluenzaA__ADB54355
augaaggcaauacuaguaguucugcuauauacauuugcaaccgcaaaugcagacacauuauguauagguuaucaugcgaacaauucaacagacacuguagacacaguacuagaaaagaauguaacaguaacacacucuguuaaccuucuagaagacaagcauaacgggaaacuaugcaaacuaagagggguagccccauugcauuuggguaaauguaacauugcuggcuggauccugggaaauccagagugugaaucacucuccacagcaagcucaugguccuacauuguggaaacaucuaguucagacaauggaacguguuacccaggagauuucaucgauuaugaggagcuaagagagcaauugagcucagugucaucauuugaaagguuugagauauuccccaagacaaguucauggcccaaucaugacucgaacaaaggcguaacggcagcauguccucaugcuggagcaaaaagcuucuacaaaaauuuaauauggcuaguuaaaaaaggaaauucauacccaaagcucagcaaauccuacauuaaugauaaagggaaagaaguccucgugcuauggggcauucaccauccaucuacuagugcugaccaacaaagucucuaucagaaugcagaugcauauguuuuuguggggacaucaagauacagcaagaaguucaagccggaaauagcaauaagacccaaagugagggaucaagaagggagaaugaacuauuacuggacacuaguagagccgggagacaaaauaacauucgaagcaacuggaaaucuagugguaccgagauaugcauucgcaauggaaagaaaugcuggaucugguauuaucauuucagauacaccaguccacgauugcaauacaacuugucagacacccaagggugcuauaaacaccagccucccauuucagaauauacauccgaucacaauuggaaaauguccaaaauauguaaaaagcacaaaauugagacuggccacaggauugaggaaugucccgucuauucaaucuagaggccuauuuggggccauugccgguuucauugaagggggguggacagggaugguagauggaugguacgguuaucaccaucaaaaugagcaggggucaggauaugcagccgaccugaagagcacacagaaugccauugacgagauuacuaacaaaguaaauucuguuauugaaaagaugaauacacaguucacagcaguagguaaagaguucaaccaccuggaaaaaagaauagagaauuuaaauaaaaagguugaugaugguuuccuggacauuuggacuuacaaugccgaacuguugguucuauuggaaaaugaaagaacuuuggacuaccacgauucaaaugugaagaacuuauaugaaaagguaagaagccaguuaaaaaacaaugccaaggaaauuggaaacggcugcuuugaauuuuaccacaaaugcgauaacacgugcauggaaaguguaaaaaaugggacuuaugacuacccaaaauacucagaggaagcaaaauugaacagagaagaaauagaugggguaaagcuggaaucaacaaggauuuaccagauuuuggcgaucuauucaacugucgccaguucauugguacugguagucucccugggggcaaucaguuucuggaugugcucuaaugggucucuacaguguagaauauguauuuaa

SEQ ID NO: 36020 - RNA, 1698 nt, Artificial Sequence
  derived and/or modified CDS sequence (wt) from hemagglutinin__InfluenzaA__ADB65926
augaaaguaaaacuacugguccuauuaugcacauuuacagcuacauaugcggacacaauauguaucggcuaccaugccaacaacucaaccgacacuguugacacaguacuugaaaagaaugugacagugacacacucugucaaccugcuugaggacaaacacaauggaaaacuaugucuauuaaaaggaaaagccccauuacaauuagguaacugcagcguugccggguggaucuuaggaaacccagaaugcggauuacugauuuccaaggagucaugguccuacauuguagaaagaccaaauccugagaauggaacauguuacccagggcauuucgccgacuaugaggaacugagggagcaauugaguucaguaucuucauuugagagguucgaaauauuccccaaaggaagcucauggcccaaccacaccguaaccggaguaucagcaucaugcucccauaacggggaaagcagcuuuuacaaaaauuugcuauggcugacgggaaagaaugguuuguacccaaaccugagcaaguccuaugcaaacaacaaagagaaagaaguccucguacuaugggguguucaucacccgccaaacauaggugaccaaaugacccucuaucauaaagaaaaugcuuaugucucuguagugucuucacauuauagcagaaaauucaccccagaaauagccaaaagacccaaaguaagagaucaagaaggaagaaucaauuacuacuggacucugcuugaacccggggauacaauaauauuugaggcaaaugggaaucuaauagcgccaagauaugcuuucgcacugaguagaggcuuuggaucaggaaucaucaacucaaaugcaccaauggaugaaugugaugcgaagugccaaacaccucagggagcuauaaacagcagucuuccuuuccagaauguacacccagucacaauaggagaauguccaaaguaugucaggagugcaaaauuaaggaugguuacaggacuaaggaacauuccauccauucaauccagagguuuguuuggagccauugccgguuucauugaagggggguggacuggaaugguagaugguugguaugguuaucaucaucagaaugagcaaggaucuggcuaugcugcagaucaaaaaagcacacaaaaugccauuaaugggauuacaaacaaggugaacucuguaauugagaagaugaacacucaauucacagcuguaggcaaagaauucaacaaauuggaaagaaggauggaaaacuuaaauaaaaaaguugaugacggguuuauagacguuuggacauacaaugcagaacuguugguucuacuggaaaaugaaaggacuuuggauuuccaugacuccaaugugaagaauuuguaugagaaaguaaaaaaccaauuaaaaaauaaugccaaagaaaugggaaauggguguuuugaauuuuaucacaaguguaacgaugaaugcauggagaguguaaaaaauggaacuuaugauuauccaaaauauuccgaagaaucaaaguuaagcagggagaaaauugauggagugaaauuggaaucaaugggagucuaucagauucuggcgaucuacucaacagucgccaguucucugguucuuuuggucucccugggggcaaucggcuucuggauguguuccaaugggucuuugcaguguagaauaugcaucuaa

SEQ ID NO: 36021 - RNA, 1698 nt, Artificial Sequence
  derived and/or modified CDS sequence (wt) from hemagglutinin__InfluenzaA__ADB80153
augaaaguaaaacuacuggcccuauuaugcacauuuacagcuacauaugcagacacaauauguaucggcuaccaugccaacaacucaaccgacacuguugacacaguacuugaaaagaaugugacagugacacacucugucaaccugcuugaggacaaccacaauggaaaacuaugucuauuaaaaggaauagccccauuacaauuggguaacugcagcguugccggguggaucuuaggaaacccagaaugcgaauuacugauuuccaaggagucaugguccuacauuguagaaaaaccaaauccugagaauggaacauguuacccagggcauuucgccgacuaugaggaacugagggagcaauugaguucaguaucuucauuugagagguucgaaauauuccccaaagaaagcucauggcccaaccacaccguaaccggaguaucagcaucaugcucccauaauggggaaagcagcuuuuacaaaaauuugcuauggcugacgggaaagaaugguuuguacccaaaccugagcaaguccuuugcaaacaacaaagagaaagaaguccucguacuaugggguguucaucacccgccaaacauaggugaccaaaugacccucuaucauaaagaaaaugcuuaugucucuguagugucuucacauuauagcagaaaauucaccccagaaauagccaaaagacccaaaguaagagaucaagaaggaagaaucaacuacuacuggacucugcuugaacccggggauacaauaauauuugaggcaaauggaaaucuaauagcgccaagauaugcuuucgcacugaguagaggcuuuggaucaggaaucaucaacucaaaugcaccaauggaugaaugugaugcgaagugccaaacaccucagggagcuauaaacagcagucuuccuuuccagaauguacacccagucacaauaggagaauguccaaaguaugucaggaguacaaaauuaaggaugguuacaggacuaaggaacaucccauccauucaauccagagguuuguuuggagccauugccgguuucauugaagggggguggacuggaaugguagaugguugguaugguuaucaucaccagaaugagcaaggaucuggcuaugcugcagaucaaaaaagcacacaaaaugccauuaaugggauuacaaacaaggugaauucuguaauugagaagaugaacacucaauucacagcugugggcaaagaauucaacaaauuggaaagaaggauggaaaacuuaaauaaaaaaguugaugacggguuuauagacguuuggacauauaaugcagaacuguugguucuacuggaaaaugaaaggacuuuggauuuccaugacuccaaugugaagaauuuguaugagaaaguaaaaaaccaauuaaagaauaaugccaaagaaauaggaaauggguguuuugaauuuuaucacaaguguaacgaugaaugcauggagaguguaaaaaauggaacuuaugacuauccaaaauauuccgaagaaucaaaguuaagcagggagaaaauugauggagugaaauuggaaucaaugggagucuaucagauucuggcgaucuacucaacagucgccaguucucugguucuuuuggucucccugggggcaaucagcuucuggauguguuccaaugggucuuugcaguguagaauaugcaucuaa

SEQ ID NO: 36022 - RNA, 1701 nt, Artificial Sequence; identical to SEQ ID NO: 35967
  derived and/or modified CDS sequence (wt) from hemagglutinin__InfluenzaA__ADB81399

SEQ ID NO: 36023 - RNA, 1701 nt, Artificial Sequence
  derived and/or modified CDS sequence (wt) from hemagglutinin__InfluenzaA__ADB81409
augaaggcaauacuaguaguucugcuauauacauuugcaaccgcaaaugcagacacauuauguauagguuaucaugcgaacaauucaacagacacuguagacacaguacuagaaaagaauguaacaguaacacacucuguuaaccuucuagaagacaagcauaacgggaaacuaugcaaacuaagagggguagccccauugcauuuggguaaauguaacauugcuggcuggauccugggaaauccagagugugaaucacucuccacagcaagcucaugguccuacauuguggaaacaucuaguucagacaauggaacguguuacccaggagauuucaucgauuaugaggagcuaagagagcaauugagcucagugucaucauuugaaagguuugagauauuccccaagacaaguucauggcccaaucaugacucgaacaaagguguaacggcagcauguccucaugcuggagcaaaaagcuucuacaaaaauuuaauauggcuaguuaaaaaaggaaauucauacccaaagcucagcaaauccuacauuaaugauaaagggaaagaaguccuagugcuauggggcauucaccauccaucuacuagugcugaccaacaaagucucuaucagaaugcagaugcauauguuuuuguggggacaucaagauacagcaagaaguucaagccggaaauagcaauaagacccaaagugagggaucaagaagggagaaugaacuauuacuggacacuaguagagccgggagacaaaauaacauucgaagcaacuggaaaucuagugguaccgagauaugcauucgcaauggaaagaaaugcuggaucugguauuaucauuucagauacaccaguccacgauugcaauacaacuugucagacacccaagggugcuauaaacaccagccucccauuucagaauauacauccgaucacaauuggaaaauguccaaaauauguaaaaagcacaaaauugagacuggccacaggauugaggaauaucccgucuauucaaucuagaggccuauuuggggccauugccgguuucauugaagggggguggacagggaugguagauggaugguacgguuaucaccaucaaaaugagcaggggucaggauaugcagccgaccugaagagcacacagaaugccauugacgagauuacuaacaaaguaaauucuguuauugaaaagaugaauacacaguucacagcaguagguaaagaguucaaccaccuggaaaaaagaauagagaauuuaaauaaaaagguugaugaugguuuccuggacauuuggacuuacaaugccgaacuguugguucuauuggaaaaugaaagaacuuuggacuaccaugauucaaaugugaagaacuuauaugaaaagguaagaagccaguuaaaaaacaaugccaaggaaauuggaaacggcugcuuugaauuuuaccacaaaugcgauaacacgugcauggaaagugucaaaaaugggacuuaugacuacccaaaauacucagaggaagcaaaauuaaacagagaagaaauagaugggguaaagcuggaaucaacaaggauuuaccagauuuuggcgaucuauucaacugucgccaguucauugguacugguagucucccugggggcaaucaguuucuggaugugcucuaaugggucucuacaguguagaauauguauuuaa

SEQ ID NO: 36024 - RNA, 1701 nt, Artificial Sequence
  derived and/or modified CDS sequence (wt) from hemagglutinin__InfluenzaA__ADB81419
augaaggcaauacuaguaguucugcuauauacauuugcaaccgcaaaugcagacacauuauguauagguuaucaugcgaacaauucaacagacacuguagacacaguacuagaaaagaauguaacaguaacacacucuguuaaccuucuagaagacaagcauaacgggaaacuaugcaaacuaagagggguagccccauugcauuuggguaaauguaacauugcuggcuggauccugggaaauccagagugugaaucacucuccacagcaagcucaugguccuacauuguggaaacaucuaguucagacaauggaacguguuacccaggagauuucaucgauuaugaggagcuaagagagcaauugagcucagugucaucauuugaaagguuugagauauuccccaagacaaguucauggcccaaucaugacucgaacaaagguguaacggcagcauguccucaugcuggagcaaaaagcuucuacaaaaauuuaauauggcuaguuaaaaaaggaaauucauacccaaagcucagcaaauccuacauuaaugauaaagggaaagaaguccucgugcuauggggcauucaccauccaucuacuagugcugaccaacaaagucucuaucagaaugcagaugcauauguuuuuguggggacaucaagauacagcaagaaguucaagccggaaauagcaauaagacccaaagugagggaucaagaagggagaaugaacuauuacuggacacuaguagagccgggagacaaaauaacauucgaagcaacuggaaaucuagugguaccgagauaugcauucgcaauggaaagaaaugcuggaucugguauuaucauuucagauacaccaguccacgauugcaauacaacuugucagacacccaagggugcuauaaacaccagccucccauuucagaauauacauccgaucacaauuggaaaauguccaaaauauguaaaaagcacaaaauugagacuggccacaggauugaggaauaucccgucuauucaaucuagaggccuauuuggggccauugccgguuucauugaagggggguggacagggaugguagauggaugguacgguuaucaccaucaaaaugagcaggggucaggauaugcagccgaccugaagagcacacagaaugccauugacgagauuacuaacaaaguaaauucuguuauugaaaagaugaauacacaguucacagcaguagguaaagaguucaaccaccuggaaaaaagaauagagaauuuaaauaaaaagguugaugaugguuuccuggacauuuggacuuacaaugccgaacuguugguucuauuggaaaaugaaagaacuuuggacuaccacgauucaaaugugaagaacuuauaugaaaagguaagaagccaguuaaaaaacaaugccaaggaaauuggaaacggcugcuuugaauuuuaccacaaaugcgauaacacgugcauggaaagugucaaaaaugggacuuaugacuacccagaauacucagaggaagcaaaauuaaacagagaagaaauagaugggguaaagcuggaaucaacaaggauuuaccagauuuuggcgaucuauucaacugucgccaguucauugguacugguagucucccugggggcaaucaguuucuggaugugcucuaaugggucucuacaguguagaauauguauuuaa

SEQ ID NO: 36025 - RNA, 1701 nt, Artificial Sequence
  derived and/or modified CDS sequence (wt) from hemagglutinin__InfluenzaA__ADB81429
augaaggcaauacuaguaguucugcuauauacauuugcaaccgcaaaugcagacacauuauguauagguuaucaugcgaacaauucaacagacacuguagacacaguacuagaaaagaauguaacaguaacacacucuguuaaccuucuagaagacaagcauaacgggaaacuaugcaaacuaagagggguagccccauugcauuuggguaaauguaacauugcuggcuggauccugggaaauccagagugugaaucacucuccacagcaagcucaugguccuacauuguggaaacaucuaguucagacaauggaacauguuacccaggagauuucaucgauuaugaggagcuaagagagcaauugagcucagugucaucauuugaaagguuugagauguuccccaagacaaguucauggcccaaucaugacucgaacaaagguguaacggcagcauguccucaugcuggagcaaaaagcuucuacaaaaauuuaauauggcuaguuaaaaaaggaaauucauacccaaagcucagcaaauccuacauuaaugauaaagggaaagaaguccucgugcuauggggcauucaccauccauccacuagugcugaccaacaaagucucuaucagaaugcagaugcauauguuuuuguggggacaucaagauacagcaagaaguucaagccggaaauagcaauaagacccaaagugagggaucaagaagggagaaugaacuauuacuggacacuaguagagccgggagacaaaauaacauucgaagcaacuggaaaucuagugguaccgagauacgcauucgcaauggaaagaaaugcuggaucugguauuaucauuucagauacaccaguccacgauugcaauacaacuugucagacacccaagggugcuauaaacaccagccucccauuucagaauauacauccgaucacaauuggaaaauguccaaaauauguaaaaagcacaaaauugagacuggccacaggauugaggaaugucccgucuauucaaucuagaggccuauuuggggccauugccgguuucauugaagggggguggacagggaugguagauggaugguacgguuaucaccaucaaaaugagcaggggucaggauaugcagccgaccugaagagcacacagaaugccauugacgagauuacuaacaaaguaaauucuguuauugaaaagaugaauacacaguucacagcaguagguaaagaguucaaccaccuggaaaaaagaauagagaauuuaaauaaaaaaguugaugaugguuuccuggacauuuggacuuacaaugccgaacuguugguucuauuggaaaaugaaagaacuuuggacuaccacgauucaaaugugaagaacuuauaugaaaagguaagaagccaguuaaaaaacaaugccaaggaaauuggaaacggcugcuuugaauuuuaccacaaaugcgauaacacgugcauggaaagugucaaaaaugggacuuaugacuacccaaaauacucagaggaagcaaaauuaaacagagaagaaauagaugggguaaagcuggaaucaacaaggauuuaccagauuuuggcgaucuauucaacugucgccaguucauugguacugguagucucccugggggcaaucaguuucuggaugugcucuaaugggucucuacaguguagaauauguauuuaa

SEQ ID NO: 36026 - RNA, 1701 nt, Artificial Sequence
  derived and/or modified CDS sequence (wt) from hemagglutinin__InfluenzaA__ADB81439
augaaggcaauacuaguaguucugcuauauacauuugcaaccgcaaaugcagacacauuauguauagguuaucaugcgaacaauucaacagacacuguagacacaguacuagaaaagaauguaacaguaacacacucuguuaaccuucuagaagacaagcauaacgggaaacuaugcaaacuaagagggguagccccauugcauuuggguaaauguaacauugcuggcuggauccugggaaauccagagugugaaucacucuccacagcaagcucaugguccuacauuguggaaacaucuaguucagacaauggaacguguuacccaggagauuucaucgauuaugaggagcuaagagagcaauugagcucagugucaucauuugaaagguuugagauauuccccaagacaaguucauggcccaaucaugacccgaacaaagguguaacggcagcauguccucaugcuggagcaaaaagcuucuacaaaaauuuaauauggcuaguuaaaaaaggaaauucauacccaaagcucagcaaauccuacauuaaugauaaagggaaagaaguccucgugcuauggggcauucaccauccaucuacuagugcugaccaacaaagucucuaucagaaugcagaugcauauguuuuuguggggacaucaagauacagcaagaaguucaagccggaaauagcaauaagacccaaagugaggaaucaagaagggagaaugaacuauuacuggacacuaguagagccgggagacaaaauaacauucgaagcaacuggaaaucuagugguaccgagauaugcauucgcaauggaaagaaaugcuggaucugguauuaucauuucagauacaccaguccacgauugcaauacaacuugucagacacccaagggugcuauaaacaccagccucccauuucagaauauacauccgaucacaauuggaaaauguccaaaauauguaaaaagcacaaaauugagacuggccacaggauugaggaaugucccgucuauucaaucuagaggccuauuuggggccauugccgguuucauugaagggggguggacagggaugguagauggaugguacgguuaucaccaucaaaaugaacaggggucaggauaugcagccgaccugaagagcacacagaaugccauugacgagauuacuaacaaaguaaauucuguuauugaaaagaugaauacacaguucacagcaguagguaaagaguucaaccaccuggaaaaaagaauagagaauuuaaauaaaaaaguugaugaugguuuccuggacauuuggacuuacaaugccgaacuguugguucuauuggaaaaugaaagaacuuuggacuaccacgauucaaaugugaagaacuuauaugaaaagguaagaagccaguuaaaaaacaaugcuaaggaaauuggaaacggcugcuuugaauuuuaccacaaaugcgauaacacgugcauggaaagugucaaaaaugggacuuaugacuacccaaaauacucagaggaagcaaaauuaaacagagaagaaauagaugggguaaagcuggaaucaacaaggauuuaccagauuuuggcgaucuauucaacugucgccaguucauugguacugguagucucccugggggcaaucaguuucuggaugugcucuaaugggucucuacaguguagaauauguauuuaa

SEQ ID NO: 36027 - RNA, 1701 nt, Artificial Sequence
  derived and/or modified CDS sequence (wt) from hemagglutinin__InfluenzaA__ADB81449
augaaggcaauacuaguaguucugcuauauacauuugcaaccgcaaaugcagacacauuauguauagguuaucaugcgaacaauucaacagacacuguagacacaguacuagaaaagaauguaacaguaacacacucuguuaaccuucuagaagacaagcauaacgggaaacuaugcaaacuaagagggguagccccauugcauuuggguaaauguaacauugcuggcuggauccugggaaauccagagugugaaucacucuccacagcaagcucaugguccuacauuguggaaacaucuaguucagacaauggaacguguuacccaggagauuucaucgauuaugaggagcuaagagagcaauugagcucagugucaucauuugaaagguuugagauauuccccaagacaaguucauggcccaaucaugacucgaacaaagguguaacggcagcauguccucaugcuggagcaaaaagcuucuacaaaaauuuaauauggcuaguuaaaaaaggaaauucauacccaaagcucaacaaauccuauauuaaugauaaagggaaagaaguccucgugcuauggggcauucaccauccaucuacuagugcugaccaacaaagucucuaucagaaugcagaugcauauguuuuuguggggacaucaagauacagcaagaaguucaagccggaaauagcaauaagacccaaagugagggaucaagaagggagaaugaacuauuacuggacacuaguagagccgggagacaaaauaacauucgaagcaacuggaaaucuagugguaccgagauaugcauucgcaauggaaagaaaugcuggaucugguauuaucauuucagauacaccaguccacgauugcaauacaacuugucagacacccaagggugcuauaaacaccagccucccauuucagaauauacauccgaucacaauuggaaaauguccaaaauauguaaaaagcacaaaauugagacuggccacaggauugaggaaugucccgucuauucaaucuagaggccuauuuggggccauugccgguuucauugaagggggguggacagggaugguagauggaugguacgguuaucaccaucaaaaugagcaggggucaggauaugcagccgaccugaagagcacacagaaugccauugacgagauuacuaacaaaguaaauucuguuauugaaaagaugaauacacaguucacagcaguagguaaagaguucaaccaccuggaaaaaagaauagagaauuuaaauaaaaagguugaugaugguuuccuggacauuuggacuuacaaugccgaacuguugguucuauuggaaaaugaaagaacuuuggacuaccacgauucaaaugugaagaacuuauaugaaaagguaagaagccaguuaaaaaacaaugccaaggaaauuggaaacggcugcuuugaauuuuaccacaaaugcgauaacacgugcauggaaagugucaaaaaugggacuuaugacuacccaaaauacucagaggaagcaaaauuaaacagagaagaaauagaugggguaaagcuggaaucaacaaggauuuaccagauuuuggcgaucuauucaacugucgccaguucauugguacugguagucucccugggggcaaucaguuucuggaugugcucuaaugggucucuacaguguagaauauguauuuaa

SEQ ID NO: 36028 - RNA, 1701 nt, Artificial Sequence
  derived and/or modified CDS sequence (wt) from hemagglutinin__InfluenzaA__ADB81459
augaaggcaauacuaguaguucugcuauauacauuugcaaccgcaaaugcagacacauuauguauagguuaucaugcgaacaauucaacagacacuguagacacaguacuagaaaagaauguaacaguaacacacucuguuaaccuucuagaagacaagcauaacgggaaacuaugcaaacuaagagggguagccccauugcauuuggguaaauguaacauugcuggcuggauccugggaaauccagagugugaaucacucuccacagcaagcucaugguccuacauuguggaaacaucuaguucagacaauggaacguguuacccaggagauuucaucgauuaugaggagcuaagagagcaauugagcucagugucaucauuugaaagguuugagauauuccccaagacaaguucauggcccaaucaugacucgaacaaagguguaacggcagcauguccucaugcuggagcaaaaagcuucuacaaaaauuuaauauggcuaguuaaaaaaggaaauucauacccaaagcucaacaaauccuauauuaaugauaaagggaaagaaguccucgugcuauggggcauucaccauccaucuacuagugcugaccaacaaagucucuaucagaaugcagaugcauauguuuuuguggggacaucaagauacagcaagaaguucaagccggaaauagcaauaagacccaaagugagggaucaagaagggagaaugaacuauuacuggacacuaguagagccaggagacaaaauaacauucgaagcaacuggaaaucuagugguaccgagauaugcauucgcaauggaaagaaaugguggaucugguauuaucauuucagauacaccaguccacgauugcaauacaacuugucagacacccaagggugcuauaaacaccagccucccauuucagaauauacauccgaucacaauuggaaaauguccaaaauauguaaaaagcacaaaauugagacuggccacaggauugaggaaugucccgucuauucaaucuagaggccuauuuggggccauugccgguuucauugaagggggguggacagggaugguagauggaugguacgguuaucaccaucaaaaugagcaggggucaggauaugcagccgaccugaagagcacacagaaugccauugacgagauuacuaacaaaguaaauucuguuauugaaaagaugaauacacaguucacagcaguagguaaagaguucaaccaccuggaaaaaagaauagagaauuuaaauaaaaagguugaugaugguuuccuggacauuuggacuuacaaugccgaacuguugguucuauuggaaaaugaaagaacuuuggacuaccacgauucaaaugugaagaacuuauaugaaaagguaagaagccaguuaaaaaacaaugccaaggaaauuggaaacggcugcuuugaauuuuaccacaaaugcgauaacacgugcauggaaagugucaaaaaugggacuuaugacuacccaaaauacucagaggaagcaaaauuaaacagagaagaaauagaugggguaaagcuggaaucaacaaggauuuaccagauuuuggcgaucuauucaacugucgccaguucauugguacugguagucucccugggggcaaucaguuucuggaugugcucuaaugggucucuacaguguagaauauguauuuaa

SEQ ID NO: 36029 - RNA, 1701 nt, Artificial Sequence
  derived and/or modified CDS sequence (wt) from hemagglutinin__InfluenzaA__ADB82655
augaaggcaauacuauuagucuugcuaugcacacuugcagcagcaaaugcagacacacuguguauagguuaucaugcaaauaauucaacugacacuguugauacaguauuagaaaagaauguuacaguaacacacucuguuaaccuuuuagaagacagacacaauggaaaacuauguaaccuaagggggaaggccccacugcauuuggguaaauguaacauugccggauggcuccuaggaaacccagagugcgaauuacuauuugcaguaaacucauggucuuacauuguggaaacaucgaacucagacaaugggacauguuacccaggagauuucaccaguuaugaagagcuaagagaacaauugagcucagugucaucauuugaaagauucgaaauauuccccaaagcaagcucuuggcccaaccaugaaacaaacagagguguaacggcagcaugcccuuaugcuggaacaaacggcuucuacaggaauuugauauggcuaguaaaaaaggaaaacucauauccaaaacucagaaaauccuauguuaauaauaagaagaaggaaguccuuguacuauggggcauccaccauccacccaccaauacugaucaacaaagucucuaccagaaugcagaugccuauguuuuugugggaucaucaaaauauagcaggaaauucaaaccagaaauagcagaaagacccaaggugaggggucaagcaggaagaaugaacuauuauuggacauuaauagagccuggagacacaauaacauuugaagcaacuggaaaucuaguggcaccaagauaugcuuuugcaaugaauagagguccuguaucggguaucauaacaucggaugcaccaguccaugacuguaaugcgacuugucaaacacccaagggugccauaaacaccagccucccauuucagaauauucauccaaucacuauuggagaaugucccaaauaugucaaaagcacaagacuaagaauggcuacaggauuaagaaauaucccuucuauucaaucuagaggucuguuuggggccauugcugguuucauugaaggaggauggacagggaugauagaugggugguacgguuaucaucaucagaauggacaaggaucaggauaugcagcggaccaaaagagcacacagaaugccaucgauaggauaacuaacaagguaaauucuguuauugaaaagaugaacauacaauucacagcaguggguaaagaauuuaaccacuuagaaagaagaauagaaaacuuaaacaaaaagguugaugauggauuuuuggauguuuggacauacaaugccgaacuguuaguccuauuggaaaaugagagaacuuuggauuuccaugacucaaauguaaaaacccuauaugaaaagguaaaaacccagcuaaggaacaaugccaaagaaauugggaauggcugcuuugaauucuaucacaaaugugaugacacaugcauggagagcaucaaaaaugggacuuacaauuaccccaaauacucggaagaaucaaaacuaaacagagaggaaauagauggaguaaaacuggagucaacaaggauuuaccagauuuuggcgaucuauucaacugccgccaguucacugguacuguuggucucccugggggcaaucgguuucuggaugugcuccaaugggucuuugcagugcagaauauguauuuaa

SEQ ID NO: 36030 - RNA, 1701 nt, Artificial Sequence
  derived and/or modified CDS sequence (wt) from hemagglutinin__InfluenzaA__ADB82656
augaaggcaauacuauuagucuugcaauguauacuuacagccgcaaaugcagacacauuauguauagguuaccaugcaaauaauucaacugacacaguugauacaguauuagaaaagaauguaacaguaacacacucugugaaccuucuggaagacagacacaacgggaaauuauguaagcugaaagggauagccccauugcauuuggguaaauguaacauugcuggauggcuccuggggaacccagaaugugaauuacuauucaaagcaaacucauggucuuacauuguggaaacaucuuacucagacaaugggacauguuauccaggggauuucaccaauuacgaagaguugagagagcaguugagcucagugucaucauuugaaagguuugagauguuccccaaagcaaauucauggccuaaucaugaaacaaacaaaggugugacggcagcaugcccuuaugcuggagcaaacagcuucuacagaaacuuaauauggcugguaaaaaaaggaaauucauauccaaggcucagcaaauccuaugucaacaauaagaaaaaagagguccuugugcuauggggcauucaccacccaucuaccaguacugaucaacaaagucucuaccagaaugcagaugccuauguuuuugugagcucaucaacauacaacaagagauucaagccagaaauaggaacaagaccaaaggugagagaucaaucagggagaaugaauuauuacuggacaauaguagagccuggagacacaauaacauuugaagcaacuggaaaucuaguggcaccaagauacgcauucgcaaugaaaagagauucuggaucugguauuaucaugucagacacaccaguccacgauuguaacacaacuugucaaacaccuaaaggugcuauaaacaccagccucccauuucaaaauguacauccagucacaauuggggaauguccaaaauaugucaaaagcacaaaauuaagaauggcuacaggacuaaggaacaucccgucuauucaauccagaggucuguuuggagccauugcuggcuuuauugaagggggauggacaggaaugauagauggaugguacgguuaucaccaucagaaugagcaaggaucaggauaugcagcugaccgaaagagcacacagaaugccauugacgggaucacuaacaaagugaacucaauuauugaaaaaaugaacauacaauucacagcaguggguaaagaauucagccaucuggaaaaaaggguagagaauuuaaacaaaaagguugaugaugguuuucuagauguuuggacuuacaaugccgaacuguugguucuauuggaaaaugaaagaacuuuggauuaucaugacucaaaugugaaaaaccuauaugagaaaguaagaagccagcugaaaaacaaugccaaagaaauuggaaauggauguuuugaauuuuaccacaaaugugaugacucaugcauggagagcauuaaaaaugagacuuaugacuauucgaaguauucagaagaaucaagauuaaacagagagaaaauagauggagugaaauuggaaucaacacaaauuuaucagauuuuggcgaucuauucaacugucgccaguucauugguauuguuagucucccugggggcaaucaguuucuggaugugcuccaaugggucuuuacagugcagaauauguauuuaa

SEQ ID NO: 36031 - RNA, 1701 nt, Artificial Sequence
  derived and/or modified CDS sequence (wt) from hemagglutinin__InfluenzaA__ADB82944
augaaggcaauacuaguaguucugcuauauacauuugcaaccgcaaaugcagacacauuauguauagguuaucaugcgaacaauucaacagacacuguagacacaguacuagaaaagaauguaacaguaacacacucuguuaaccuucuagaagacaagcauaacgggaaacuaugcaaacuaagagggguagccccauugcauuuggguaaauguaacauugcuggcuggauccugggaaauccagagugugaaucacucuccacagcaagcucaugguccuacauuguggaaacaucuaguucagacaauggaacguguuacccaggagauuucaucgauuaugaggagcuaagagagcaauugagcucagugucaucauuugaaagguuugagauauuccccaagacaaguucauggcccaaucaugacccgaacaaagguguaacggcagcauguccucaugcuggagcaaaaagcuucuacaaaaauuuaauauggcuaguuaaaaaaggaaauucauacccaaagcucagcaaauccuacauuaaugauaaagggaaagaaguccucgugcuauggggcauucaccauccaucuacuagugcugaccaacaaagucucuaucagaaugcagaugcauauguuuuuguggggacaucaagauacagcaagaaguucaagccggaaauagcaauaagacccaaagugagggaucaagaagggagaaugaacuauuacuggacacuaguagagccgggagacaaaauaacauucgaagcaacuggaaaucuagugguaccgagauaugcauucgcaauggaaagaaaugcuggaucugguauuaucauuucagauacaccaguccacgauugcaauacaacuugucagacacccaagggugcuauaaacaccagccucccauuucagaauauacauccgaucacaauuggaaaauguccaaaauauguaaaaagcacaaaauugagacuggccacaggauugaggaauaucccgucuauucaaucuagaggccuauuuggggccauugccgguuucauugaagggggguggacagggaugguagauggaugguacgguuaucaccaucaaaaugagcaggggucaggauaugcagccgaccugaagagcacacagaaugccauugacgagauuacuaacaaaguaaauucuguuauugaaaagaugaauacacaguucacagcaguagguaaagaguucaaccaccuggaaaaaagaauagagaauuuaaauaaaaaaguugaugaugguuuccuggacauuuggacuuacaaugccgaacuguugguucuauuggaaaaugaaagaacuuuggacuaccacgauucaaaugugaagaacuuauaugaaaagguaagaagccaguuaaaaaacaaugccaaggaaauuggaaacggcugcuuugaauuuuaccacaaaugcgauaacacgugcauggaaagugucaaaaaugggacuuaugacuacccaaaauacucagaggaagcaaaauuaaacagagaagaaauagaugggguaaagcuggaaucaacaaggauuuaccagauuuuggcgaucuauucaacugucgccaguucauugguacugguagucucccugggggcaaucaguuucuggaugugcucuaaugggucucuacaguguagaauauguauuuaa

SEQ ID NO: 36032 - RNA, 1701 nt, Artificial Sequence
  derived and/or modified CDS sequence (wt) from hemagglutinin__InfluenzaA__ADB82950
augaaggcaauacuaguaguucugcuauauacauuugcaaccgcaaaugcagacacauuauguauagguuaucaugcgaacaauucaacagacacuguagacacaguacuagaaaagaauguaacaguaacacacucuguuaaccuucuagaagacaagcauaacgggaaacuaugcaaacuaagagggguagccccauugcauuuggguaaauguaacauugcuggcuggauccugggaaauccagagugugaaucacucuccacagcaagcucaugguccuacauuguggaaacaucuaguucagacaauggaacguguuacccaggagauuucaucgauuaugaggagcuaagagagcaauugagcucagugucaucauuugaaagguuugagauauuccccaagacaaguucauggcccaaucaugacucgaacaaagguguaacggcagcauguccucaugcuggagcaaaaagcuucuacaaaaauuuaauauggcuaguuaaaaaaggaaauucauacccaaagcucagcaaauccuacauuaaugauaaagggaaagaaguccucgugcuauggggcauucaccauccaucuacuagugcugaccaacaaagucucuaucagaaugcagaugcauauguuuuuguggggacaucaagauacagcaagaaguucgagccggaaauagcaauaagacccaaagugagggaucaagaagggagaaugaacuauuacuggacacuaguagagccgggagacaaaauaacauucgaagcaacuggaaaucuagugguaccgagauaugcauucgcaauggaaagaaaugcuggaucugguauuaucauuucagauacaccaguccacgauugcaauacaacuugucagacacccaagggugcuauaaacaccagccucccauuucagaauauacauccgaucacaauuggaaaauguccaaaauauguaaaaagcacaaaauugagacuggccacaggauugaggaaugucccgucuauucaaucuagaggccuauuuggggccauugccgguuucauugaagggggguggacagggaugguagauggaugguacgguuaucaccaucaaaaugagcaggggucaggauaugcagccgaccugaagagcacacagaaugccauugacgagauuacuaacaaaguaaauucuguuauugaaaagaugaauacacaguucacagcaguagguaaagaguucaaccaccuggaaaaaagaauagagaauuuaaauaaaaagguugaugaugguuuccuggacauuuggacuuacaaugccgaacuguugguucuauuggaaaaugaaagaacuuuggacuaccacgauucaaaugugaagaacuuauaugaaaagguaagaagccaguuaaaaaacaaugccaaggaaauuggaaacggcugcuuugaauuuuaccacaaaugcgauaacacgugcauggaaagugucaaaaaugggacuuaugacuacccaaaauacucagaggaagcaaaauuaaacagagaagaaauagaugggguaaagcuggaaucaacaaggauuuaccagauuuuggcgaucuauucaacugucgccaguucauugguacugguagucucccugggggcaaucaguuucuggaugugcucuaaugggucucuacaguguagaauauguauuuaa

SEQ ID NO: 36033 - RNA, 1701 nt, Artificial Sequence
  derived and/or modified CDS sequence (wt) from hemagglutinin__InfluenzaA__ADB89129
augaaggcaauacuaguaguucugcuauauacauuugcaaccgcaaaugcagacacauuauguauagguuaucaugcgaacaauucaacagacacuguagacacaguacuagaaaagaauguaacaguaacacacucuguuaaccuucuagaagacaagcauaacgggaaacuaugcaaacuaagagggguagccccauugcauuuggguaaauguaacauugcuggcuggauccugggaaauccagagugugaaucacucuccacagcaagcucaugguccuacauuguggaaacaucuaguucagacaauggaacguguuacccaggagauuucaucgauuaugaggagcuaagagagcaauugagcucagugucaucauuugaaagguuugagauauuccccaagacaaguucauggcccaaucaugacccgaacaaagguguaacggcagcauguccucaugcuggagcaaaaagcuucuacaaaaauuuaauauggcuaguuaaaaaaggaaauucauacccaaagcucagcaaauccuacauuaaugauaaagggaaagaaguccucgugcuauggggcauucaccauccaucuacuagugcugaccaacaaagucucuaucagaaugcagaugcauauguuuuuguggggacaucaagauacagcaagaaguucaagccggaaauagcaauaagacccaaagugagggaucaagaagggagaaugaacuauuacuggacacuaguagagccgggagacaaaauaacauucgaagcaacuggaaaucuagugguaccgagauaugcauucgcaauggaaagaaaugcuggaucugguauuaucauuucagauacaccaguccacgauugcaauacaacuugucagacacccaagggugcuauaaacaccagccucccauuucagaauauacauccgaucacaauuggaaaauguccaaaauauguaaaaagcacaaaauugagacuggccacaggauugaggaaugucccgucuauucaaucuagaggccuauuuggggccauugccgguuucauugaagggggguggacagggaugguagauggaugguacgguuaucaccaucaaaaugaacaggggucaggauaugcagccgaccugaagagcacacagaaugccauugacgagauuacuaacaaaguaaauucuguuauugaaaagaugaauacacaguucacagcaguagguaaagaguucaaccaccuggaaaaaagaauagagaauuuaaauaaaaaaguugaugaugguuuccuggacauuuggacuuacaaugccgaacuguugguucuauuggaaaaugaaagaacuuuggacuaccacgauucaaaugugaagaacuuauaugaaaagguaagaagccaguuaaaaaacaaugccaaggaaauuggaaacggcugcuuugaauuuuaccacaaaugcgauaacacgugcauggaaagugucaaaaaugggacuuaugacuacccaaaauacucagaggaagcaaaauuaaacagagaagaaauagaugggguaaagcuggaaucaacaaggauuuaccagauuuuggcgaucuauucaacugucgccaguucauugguacugguagucucccugggggcaaucaguuucuggaugugcucuaaugggucucuacaguguagaauauguauuuaa

SEQ ID NO: 36034 - RNA, 1701 nt, Artificial Sequence
  derived and/or modified CDS sequence (wt) from hemagglutinin__InfluenzaA__ADB89139
augaaggcaauacuaguaguucugcuauauacauuugcaaccgcaaaugcagacacauuauguauagguuaucaugcgaacaauucaacagacacuguagacacaguacuagaaaagaauguaacaguaacacacucuguuaaccuucuagaagacaagcauaacgggaaacuaugcaaacuaagagggguagccccauugcauuuggguaaauguaacauugcuggcuggauccugggaaauccagagugugaaucacucuccacagcaagcucaugguccuacauuguggaaacaucuaguucagacaauggaacguguuacccaggagauuucaucgauuaugaggagcuaagagagcaauugagcucagugucaucauuugaaagguuugagauauuccccaagacaaguucauggcccaaucaugacucgaacaaaggcguaacggcagcauguccucaugcuggagcaaaaagcuucuacaaaaauuuaauauggcuaguuaaaaaaggaaauucauacccaaagcucagcaaauccuacauuaaugauaaagggaaagaaguccuagugcuauggggcauucaccauccaucuacuagugcugaccaacaaagucucuaucagaaugcagaugcauauguuuuuguggggacaucaagauacagcaagaaguucaagccggaaauagcaauaagacccaaagugagggaucaagaagggagaaugaacuauuacuggacacuaguagagccgggagacaaaauaacauucgaagcaacuggaaaucuagugguaccgagauaugcauucgcaauggaaagaaaugcuggaucugguauuaucauuucagauacaccaguccacgauugcaauacaacuugucagacacccaagggugcuauaaacaccagccucccauuucagaauauacauccgaucacaauuggaaaauguccaaaauauguaaaaagcacaaaauugagacuggccacaggauugaggaaugucccgucuauucaaucuagaggccuauuuggggccauugccgguuucauugaagggggguggacagggaugguagauggaugguacgguuaucaccaucaaaaugagcaggggucaggauaugcagccgaccugaagagcacacagaaugccauugacgagauuacuaacaaaguaaauucuguuauugaaaagaugaacacacaguucacagcaguagguaaagaguucaaccaccuggaaaaaagaauagagaauuuaaauaaaaaaguugaugaugguuuccuggacauuuggacuuacaaugccgaacuguugguucuauuggaaaaugaaagaacuuuggacuaccacgauucaaaugugaagaacuuauaugaaaagguaagaagccaguuaaaaaacaaugccaaggaaauuggaaacggcugcuuugaauuuuaccacaaaugcgauaacacgugcauggaaagugucaaaaaugggacuuaugacuacccaaaauacucagaggaagcaaaauuaaacagagaagaaauagaugggguaaagcuggaaucaacaaggauuuaccagauuuuggcgaucuauucaacugucgccaguucauugguacugguagucucccugggggcaaucaguuucuggaugugcucuaaugggucucuacaguguagaauauguauuuaa

SEQ ID NO: 36035 - RNA, 1701 nt, Artificial Sequence
  derived and/or modified CDS sequence (wt) from hemagglutinin__InfluenzaA__ADB89149
augaaggcaauacuaguaguucugcuauauacauuugcaaccgcaaaugcauacacauuauguauagguuaucaugcgaacaauucaacagacacuguagacacaguacuagaaaagaauguaacaguaacacacucuguuaaccuucuagaagacaagcauaacgggaaacuaugcaaacuaagagggguagccccauugcauuuggguaaauguaacauugcuggcuggauccugggaaauccagagugugaaucacucuccacagcaagcucaugguccuacauuguggaaacaucuaguucagacaauggaacguguuacccaggagauuucaucgauuaugaggagcuaagagagcaauugagcucaguaucaucauuugaaagguuugagauauuccccaagacaaguucauggcccaaucaugacucgaacaaagguguaacggcagcauguccucauguuggagcaaaaagcuucuacaaaaauuuaauauggcuaguuaaaaaaggaaauucauacccaaagcucagcaaauccuacauuaaugauaaagggaaagaaguccucgugcuauggggcauucaccauccaucuacuagugcugaccaacaaagucuuuaucagaaugcagaugcauauguuuuuguggggacaucaagauacagcaagaaguucaagccggaaauagcaauaagacccaaagugaggggucaagaagggagaaugaacuauuacuggacacuaguagagccgggagacaaaauaacauucgaagcaacuggaaaucuagugguaccgagauaugcauucgcaauggaaagaaaugcuggaucugguauuaucauuucagauacaccaguccacgauugcaauacaacuugucagacacccaagggugcuauaaacaccagccucccauuucagaauauacauccgaucacaauuggaaaauguccaaaauauguaaaaagcacaaaauugagacuggccacaggauugaggaauaucccgucuauucaaucuagaggccuauuuggggccauugccgguuucauugaagggggguggacagggaugguagauggaugguacgguuaucaccaucaaaaugagcaggggucaggauaugcagccgaccugaagagcacacagaaugccauugacgagauuacuaacaaaguaaauucuguuauugaaaagaugaauacacaguucacagcaguagguaaagaguucaaccaccuggaaaaaagaauagagaauuuaaauaaaaaaguugaugaugguuuccuggacauuuggacuuacaaugccgaacuguugguucuauuggaaaaugaaagaacuuuggacuaccacgauucaaaugugaagaacuuauaugaaaagguaagaagccaguuaaaaaacaaugccaaggaaauuggaaacggcugcuuugaauuuuaccacaaaugcgauaacacgugcauggaaagugucaaaaaugggacuuaugacuacccaaaauacucagaggaagcaaaauuaaacagagaagaaauagaugggguaaagcuggaaucaacaaggauuuaccagauuuuggcgaucuauucaacugucgccaguucauugguacugguagucucccugggggcaaucaguuucuggaugugcucuaaugggucucuacaguguagaauauguauuuaa

SEQ ID NO: 36036 - RNA, 1701 nt, Artificial Sequence
  derived and/or modified CDS sequence (wt) from hemagglutinin__InfluenzaA__ADB89150
augaaggcaauacuaguaguucugcuauauacauuugcaaccgcaaaugcagacacauuauguauagguuaucaugcgaacaauucaacagacacuguagacacaguacuagaaaagaauguaacaguaacacacucuguuaaccuucuagaagacaagcauaacgggaaacuaugcaaacuaagagggguagccccauugcauuuggguaaauguaacauugcuggcuggauccugggaaauccagagugugaaucacucuccacagcaagcucaugguccuacauuguggaaacaucuaguucagacaauggaacguguuacccaggagauuucaucgauuaugaggagcuaagagagcaauugagcucagugucaucauuugaaagguuugagauauuccccaagacaaguucauggcccaaucaugacucgaacaaagguguaacggcagcauguccucaugcuggagcaaaaagcuucuacaaaaauuuaauauggcuaguuaaaaaaggaaauucauacccaaagcucagcaaauccuacauuaaugauaaagggaaagaaguccucgugcuauggggcauucaccauccaucuacuagugcugaccaacaaagucucuaucagaaugcagaugcauauguuuuuguggggacaucaagauacagcaagaaguucaagccggaaauagcaauaagacccaaagugagggaacaagaagggagaaugaacuauuacuggacacuaguagagccgggagacaaaauaacauucgaagcaacuggaaaucuagugguaccgagauaugcauucgcaauggaaagaaaugcuggaucugguauuaucauuucagauacaccaguccacgauugcaauacaacuugucagacacccaagggugcuauaaacaccagccucccauuucagaauauacauccgaucacaauuggaaaauguccaaaauauguaaaaagcacaaaauugagacuggccacaggauugaggaaugucccgucuauucaaucuagaggccuauuuggggccauugccgguuucauugaagggggguggacagggaugguagauggaugguacgguuaucaccaucaaaaugagcaggggucaggauaugcagccgaccugaagagcacacagaaugccauugacgagauuacuaacaaaguaaauucuguuauugaaaagaugaauacacaguucacagcaguagguaaagaguucaaccaccuggaaaaaagaauagagaauuuaaauaaaaaaguugaugaugguuuccuggacauuuggacuuacaaugccgaacuguugguucuauuggaaaaugaaagaacuuuggacuaccacgauucaaaugugaagaacuuauaugaaaagguaagaagccaguuaaaaaacaaugccaaggaaauuggaaacggcugcuuugaauuuuaccacaaaugcgauaacacgugcauggaaagugucaaaaaugggacuuaugacuacccaaaguacucagaggaagcaaaauuaaacagagaagaaauagaugggguaaagcuggaaucaacaaggauuuaccagauuuuggcgaucuauucaacugucgccaguucauugguacugguagucucccugggggcaaucaguuucuggaugugcucuaaugggucucuacaguguagaauauguauuuaa

SEQ ID NO: 36037 - RNA, 1701 nt, Artificial Sequence
  derived and/or modified CDS sequence (wt) from hemagglutinin__InfluenzaA__ADB89221
augaaggcaauacuaguaguucugcuauauacauuugcaaccgcaaaugcagacacauuauguauagguuaucaugcgaacaauucaacagacacuguagacacaguacuagaaaagaauguaacaguaacacacucuguuaaccuuuuagaagacaagcauaacgggaaacuaugcaaacuaagagggguagccccauugcauuuggguaaauguaacauugcuggcuggauccugggaaauccagagugugaaucacucuccacagcaagcucaugguccuacauuguggaaacaucuaguucagacaauggaacguguuacccaggagauuucaucgauuaugaggagcuaagagagcaauugagcucagugucaucauuugaaagguuugagauauuccccaagacaaguucauggcccaaucaugacucgaacaaagguguaacggcagcauguccucaugcuggagcaaaaagcuucuacaaaaauuuaauauggcuaguuaaaaaaggaaauucauacccaaagcucagcaaauccuacauuaaugauaaagggaaagaaguccucguacuauggggcauucaccauccaucuacuagugcugaccaacaaaaucucuaucagaaugcagaugcauauguuuuuguggggucaucaagauacagcaagaaguucaagccggaaauagcaauaagacccaaagugagggaucaagaagggagaaugaacuauuacuggacacuaguagagccgggagacaaaauaacauucgaagcaacuggaaaucuagugguaccgagauaugcauucgcaauggaaagaaaugcuggaucugguauuaucauuucagauacaccaguccacgauugcaauacaacuugucagacacccaagggugcuauaaacaccagccucccauuucagaauauacauccgaucacaauuggaaaauguccaaaauauguaaaaagcacaaaauugagacuggccacaggauugaggaaugucccgucuauucaaucuagaggccuauuuggggccauugccgguuucauugaagggggguggacagggaugguagauggaugguacgguuaucaucaucaaaaugagcaggggucaggauaugcagccgaccugaagagcacacagaaugccauugacgagauuacuaacaaaguaaauucuguuauugaaaagaugaauacacaguucacagcaguagguaaagaguucaaccaccuggaaaaaagaauagagaauuuaaauaaaaaaguugaugaugguuuccuggacauuuggacuuacaaugccgaacuguugguucuauuggaaaaugaaagaacuuuggacuaccacgauucaaaugugaagaacuuauaugaaaagguaagaagccaguuaaaaaacaaugccaaggaaauuggaaacggcugcuuugaauuuuaccacaaaugcgauaacacgugcauggaaagugucaaaaaugggacuuaugacuacccaaaauacucagaggaagcaaaauuaaacagagaagaaauagaugggguaaagcuggaaucaacaaggauuuaccagauuuuggcgaucuauucaacugucgccaguucauugguacugguagucucccugggggcaaucaguuucuggaugugcucuaaugggucucuacaguguagaauauguauuuaa

SEQ ID NO: 36038 - RNA, 1701 nt, Artificial Sequence; identical to SEQ ID NO: 34737
  derived and/or modified CDS sequence (wt) from hemagglutinin__InfluenzaA__ADB89241

SEQ ID NO: 36039 - RNA, 1701 nt, Artificial Sequence; identical to SEQ ID NO: 34980
  derived and/or modified CDS sequence (wt) from hemagglutinin__InfluenzaA__ADB89251

SEQ ID NO: 36040 - RNA, 1701 nt, Artificial Sequence; identical to SEQ ID NO: 35128
  derived and/or modified CDS sequence (wt) from hemagglutinin__InfluenzaA__ADB89261

SEQ ID NO: 36041 - RNA, 1701 nt, Artificial Sequence
  derived and/or modified CDS sequence (wt) from hemagglutinin__InfluenzaA__ADB89271
augaaggcaauacuaguaguucugcuauauacauuugcaaccgcaaaugcagacacauuauguauagguuaucaugcgaacaauucaacagacacuguagacacaguacuagaaaagaauguaacaguaacacacucuguuaaccuucuagaagacaagcauaacgggaaacuaugcaaacuaagagggguagccccauugcauuuggguaaauguaacauugcuggcuggauccugggaaauccagagugugaaucacucuccacagcaagcucaugguccuacauuguggaaacaucuaguucagacaauggaacguguuacccaggagauuucaucgauuaugaggagcuaagagagcaauugagcucagugucaucauuugaaagguuugagauauuccccaagacaaguucauggcccaaucaugacucgaacaaagguguaacggcagcauguccucaugcuggagcaaaaagcuucuacaaaaauuuaauauggcuaguuaaaaaaggaaauucauacccaaagcucagcaaauccuacauuaaugauaaagggaaagaaguccucguacuauggggcauucaccauccaucuacuagugcugaccaacaaagucucuaucagaaugcagaugcauauguuuuuguggggucaucaagauacagcaagaaguucaagccggaaauagcaauaagacccaaagugagggaucaagaagggagaaugaacuauuacuggacacuaguagagccgggagacaaaauaacauucgaagcaacuggaaaucuagugguaccgagauaugcauucgcaauggaaagaaaugcuggaucuggcauuaucauuucagauacaccaguccacgauugcaauacaacuugucagacacccaagggugcuauaaacaccagccucccauuucagaauauacauccgaucacaauuggaaaauguccaaaauauguaaaaagcacaaaauugagacuggccacaggauugaggaaugucccgucuauucaaucuagaggccuauuuggggccauugccgguuucauugaagggggguggacagggaugguagauggaugguacgguuaucaccaucaaaaugagcaggggucaggauaugcagccgaccugaagagcacacagaaugccauugacgagauuacuaacaaaguaaauucuguuauugaaaagaugaauacacaguucacagcaguagguaaagaguucaaccaccuggaaaaaagaauagagaauuuaaauaaaaaaguugaugaugguuuccuggacauuuggacuuacaaugccgaacuguugguucuauuggaaaaugaaagaacuuuggacuaccacgauucaaaugugaagaacuuauaugaaaagguaagaagccaguuaaaaaacaaugccaaggaaauuggaaacggcugcuuugaauuuuaccacaaaugcgauaacacgugcaugggaagugucaaaaaugggacuuaugacuacccaaaauacucagaggaagcaaaauuaaacagagaagaaauagaugggguaaagcuggaaucaacaaggauuuaccagauuuuggcgaucuauucaacugucgccaguucauugguacugguagucucccugggggcaaucaguuucuggauguguucuaaugggucucuacaguguagaauauguauuuaa

SEQ ID NO: 36042 - RNA, 1701 nt, Artificial Sequence
  derived and/or modified CDS sequence (wt) from hemagglutinin__InfluenzaA__ADB89281
augaaggcaauacuaguaguucugcuauauacauuugcaaccgcaaaugcagacacauuauguauagguuaucaugcaaacaauucaacagacacuguagacacaguacuagaaaagaauguaacaguaacacacucuguuaaccuucuagaagacaagcauaacgggaaacuaugcaaacuaagagggguagccccauugcauuuggguaaauguaacauugcuggcuggauccugggaaauccagagugugaaucacucuccacagcaagcucaugguccuacauuguggaaacaucuaguucagacaauggaacguguuacccaggagauuucaucgauuaugaggagcuaagagagcaauugagcucagugucaucauuugaaagguuugagauauuccccaagacaaguucauggcccaaucaugacucgaacaaagguguaacggcagcauguccucaugcuggagcaaaaagcuucuacaaaaauuuaauauggcuaguuaaaaaaggaaauucauacccaaagcucagcaaauccuacauuaaugauaaagggaaagaaguccucgugcuauggggcauucaccauccaccuacuagugcugaccaacaaagucucuaucagaaugcagaugcauauguuuuuguggggacaucaagauacagcaagaaguucaagccggaaauagcaauaagacccaaagugaggggucaagaagggagaaugaacuauuacuggacacuaguagagccgggagacaaaauaacauucgaagcaacuggaaaucuagugguaccgagauaugcauucgcaauggaaagaaaugcuggaucugguauuaucauuucagauacaccaguccacgauugcaauacaacuugucagacacccaagggugcuauaaacaccagccucccauuucagaauauacauccgaucacaauuggaaaauguccaaaauauguaaaaagcacaaaauugagacuggccacaggauugaggaaugucccgucuauucaaucuagaggccuauuuggggccauugccgguuucauugaagggggguggacagggaugguagauggaugguacgguuaucaccaucaaaaugagcaggggucaggauaugcagccgaccugaagagcacacagaaugccauugacgagauuacuaacaaaguaaauucuguuauugaaaagaugaauacacaguucacagcaguagguaaagaguucaaccaccuggaaaaaagaauagagaauuuaaauaaaaaaguugaugaugguuuccuggacauuuggacuuacaaugccgaacuguugguucuauuggaaaaugaaagaacuuuggacuaccacgauucaaaugugaagaacuuauaugaaaagguaagaagccaguuaaaaaacaaugccaaggaaauuggaaacggcugcuuugaauuuuaccacaaaugcgauaacacgugcauggaaagugucaaaaaugggacuuaugacuacccaaaauacucagaggaagcaaaauuaaacagagaagaaauagaugggguaaagcuggaaucaacaaggauuuaccagauuuuggcgaucuauucaacugucgccaguucauugguacugguagucucccugggggcaaucaguuucuggaugugcucuaaugggucucuacaguguagaauauguauuuaa

SEQ ID NO: 36043 - RNA, 1701 nt, Artificial Sequence; identical to SEQ ID NO: 34714
  derived and/or modified CDS sequence (wt) from hemagglutinin__InfluenzaA__ADB89291

SEQ ID NO: 36044 - RNA, 1701 nt, Artificial Sequence
  derived and/or modified CDS sequence (wt) from hemagglutinin__InfluenzaA__ADB89301
augaaggcaauacuaguaguuuugcuauauacauuugcaaccgcaaaugcagacacauuauguauagguuaucaugcgaacaauucaacagacacuguagacacaguacuagaaaagaauguaacaguaacacacucuguuaaccuucuagaagacaagcauaacgggaaacuaugcaaacuaagagggguagccccauugcauuuggguaaauguaacauugcuggcuggauccugggaaauccagagugugaaucacucuccacagcaagcucaugguccuacauuguggaaacaucuaguucagacaauggaacguguuacccaggagauuucaucgauuaugaggagcuaagagagcaauugagcucagugucaucauuugaaagguuugagauauuccccaagacaaguucauggcccaaucaugacucgaacaaagguguaacggcagcauguccucaugcuggagcaaaaagcuucuacaaaaauuuaauauggcuaguuaaaaaaggaaauucauacccaaagcucagcaaauccuacauuaaugauaaagggaaagaaguccucgugcuauggggcauucaccauccaucuacuagugcugaccaacaaagucucuaucagaaugcagaugcauauguuuuuguggggacaucaagauacagcaagaaguucaagccggaaauagcaauaagacccaaagugagggaucaagaagggagaaugaacuauuacuggacacuaguagagccgggagacaaaauaacauucgaagcaacuggaaaucuagugguaccgagauaugcauucgcaauggaaagaaaugcuggaucugguauuaucauuucagauacaccaguccacgauugcaauacaacuugucagacacccaagggugcuauaaacaccagccucccauuucagaauauacauccgaucacaauuggaaaauguccaaaauauguaaaaagcacaaaauugagacuggccacaggauugaggaaugucccgucuauucaaucuagaggccuauuuggggccauugccgguuucauugaagggggguggacagggaugguagauggaugguacgguuaucaccaucaaaaugagcaggggucaggauaugcagccgaccugaagagcacacagaaugccauugacgagauuacuaacaaaguaaauucuguuauugaaaagaugaauacacaguucacagcaguagguaaagaguucaaccaccuggaaaaaagaauagagaauuuaaauaaaaagguugaugaugguuuccuggacauuuggacuuacaaugccgaacuguugguucuauuggaaaaugaaagaacuuuggacuaccacgauucaaaugugaagaacuuauaugaaaagguaagaagccaguuaaaaaacaaugccaaggaaauuggaaacggcugcuuugaauuuuaccacaaaugcgauaacacgugcauggaaagugucaaaaaugggacuuaugacuacccaaaauacucagaggaagcaaaauuaaacagagaagaaauagaugggguaaagcuggaaucaacaaggauuuaccagauuuuggcgaucuauucaacugucgccaguucauugguacugguagucucccugggggcaaucaguuucuggaugugcucuaaugggucucuacaguguagaauauguauuuaa

SEQ ID NO: 36045 - RNA, 1701 nt, Artificial Sequence
  derived and/or modified CDS sequence (wt) from hemagglutinin__InfluenzaA__ADB89311
augaaggcaauacuaguaguucugcuauauacauuugcaaccgcaaaugcagacacauuauguauagguuaucaugcgaacaauucaacagacacuguagacacaguacuagaaaagaauguaacaguaacacacucuguuaaucuucuagaagacaagcauaacgggaaacuaugcaaacuaagagggguagccccauugcauuuggguaaauguaacauugcuggcuggauccugggaaauccagagugugaaucacucuccacagcaagcucaugguccuacauuguggaaacaucuaguucagacaauggaacguguuacccaggagauuucaucgauuaugaggagcuaagagagcaauugagcucagugucaucauuugaaagguuugagauauuccccaagacaaguucauggcccaaucaugacucgaacaaagguguaacggcagcauguccucaugcuggagcaaaaagcuucuacaaaaauuuaauauggcuaguuaaaaaaggaaauucauacccaaagcucagcaaauccuacauuaaugauaaagggaaagaaguccucgugcuauggggcauucaccauccaucuacuagugcugaccaacaaagucucuaucagaaugcagaugcauauguuuuuguggggacaucaagauacagcaagaaguucaagccggaaauagcaauaagacccaaagugagggaucaagaagggagaaugaacuauuacuggacacuaguagagccgggagacaaaauaacauucgaagcaacuggaaaucuagugguaccgagauaugcauucgcaauggaaagaaaugcuggaucugguauuaucauuucagauacaccaguccacgauugcaauacaacuugucagacacccaagggugcuauaaacaccagccucccauuucagaauauacauccgaucacaauuggaaaauguccaaaauauguaaaaagcacaaaauugagacuggccacaggauugaggaaugucccgucuauucaaucuagaggccuauuuggggccauugccgguuucauugaagggggguggacagggaugguagauggaugguacgguuaucaccaucaaaaugagcaggggucaggauaugcagccgaccugaagagcacacagaaugccauugacgagauuacuaacaaaguaaauucuguuauugaaaagaugaauacacaguucacagcaguagguaaagaguucaaccaccuggaaaaaagaauagagaauuuaaauaaaaagguugaugaugguuuccuggacauuuggacuuacaaugccgaacuguugguucuauuggaaaaugaaagaacuuuggacuaccacgauucaaaugugaagaacuuauaugaaaagguaagaagccaguuaaaaaacaaugccaaggaaauuggaaacggcugcuuugaauuuuaccacaaaugcgauaacacgugcauggaaagugucaaaaaugggacuuaugacuacccaaaauacucagaggaagcaaaauuaaacagagaagaaauagaugggguaaagcuggaaucaacaaggauuuaccagauuuuggcgaucuauucaacugucgccaguucauugguacugguagucucccugggggcaaucaguuucuggaugugcucuaaugggucucuacaguguagaauauguauuuaa

SEQ ID NO: 36046 - RNA, 1701 nt, Artificial Sequence
  derived and/or modified CDS sequence (wt) from hemagglutinin__InfluenzaA__ADB89321
augaaggcaauacuaguaguucugcuauauacauuugcaaccgcaaaugcagacacauuauguauagguuaucaugcgaacaauucaacagacacuguagacacaguacuagaaaagaauguaacaguaacacacucuguuaaccuucuagaagacaagcauaacgggaaacuaugcaaacuaagagggguagccccauugcauuuggguaaauguaacauugcuggcuggauccugggaaauccagagugugaaucacucuccacagcaagcucaugguccuacauuguggaaacaucuaguucagacaauggaacguguuacccaggagauuucaucgauuaugaggagcuaagagagcaauugagcucagugucaucauuugaaagguuugagauauuccccaagacaaguucauggcccaaucaugauucgaacaaagguguaacggcagcauguccucaugcuggagcaaaaagcuucuacaaaaauuuaauauggcuaguuaaaaaaggaaauucauacccaaagcucagcgaauccuacauuaaugauaaagggaaagaaguccucgugcuauggggcauucaccauccaucuacuagugcugaccaacaaagucucuaucagaaugcagaugcauauguuuuuguggggacaucaaaauacagcaagaaguucaagccggaaauagcaauaagacccaaagugagggaucaagaagggagaaugaacuauuacuggacacuaguagagccgggagacaaaauaacauucgaagcaacuggaaaucuagugguaccaagauaugcauucgcaauggaaagaaaugcuggaucugguauuaucauuucagauacaccaguccacgauugcaauacaacuugucagacacccaagggugcuauaaacaccagccucccauuucagaauauacauccgaucacaauuggaaaauguccaaaauauguaaaaagcacaaaauugagacuggccacaggauugaggaaugucccgucuauucaaucuagaggccuauuuggggccauugccgguuucauugaagggggguggacagggaugguagauggaugguacgguuaucaccaucaaaaugagcaggggucaggauaugcagccgaccugaagagcacacagaaugccauugacgagauuacuaacaaaguaaauucuguuauugaaaagaugaauacacaguucacagcaguagguaaagaguucaaccaucuggaaaaaagaauagagaauuuaaauaaaaagguugaugaugguuuccuggacauuuggacuuacaaugccgaacuguugguucuauuggaaaaugaaagaacuuuagacuaccacgauucaaaugugaagaacuuauaugaaaagguaagaagccaguuaaaaaacaaugccaaggaaauuggaaacggcugcuuugaauuuuaccacaaaugcgauaacacgugcauggaaagugucaaaaaugggacuuaugacuacccaaaauacucagaggaagcaaaauuaaacagagaagaaauagaugggguaaagcuggaaucaacaaggauuuaccagauuuuggcgaucuauucaacugucgccaguucauugguacugguagucucccugggggcaaucaguuucuggaugugcucuaaugggucucuacaguguagaauauguauuuaa

SEQ ID NO: 36047 - RNA, 1701 nt, Artificial Sequence
  derived and/or modified CDS sequence (wt) from hemagglutinin__InfluenzaA__ADB89331
augaaggcaauacuaguaguucugcuauauacauuugcaaccgcaaaugcagacacauuauguauagguuaucaugcgaacaauucaacagacacuguagacacaguacuagaaaagaauguaacaguaacacacucuguuaaccuucuagaagacaagcauaacgggaaacuaugcaaacuaagagggguagccccauugcauuuggguaaauguaacauugcuggcuggauccugggaaauccagagugugaaucacucuccacagcaagcucaugguccuacauuguggaaacaucuaguucagacaauggaacguguuacccaggagauuucaucgauuaugaggagcuaagagagcaauugagcucagugucaucauuugaaagguuugagauauuccccaagacaaguucauggcccaaucaugacucgaacaaagguguaacggcagcauguccucaugcuggagcaaaaagcuucuacaaaaauuuaauauggcuaguuaaaaaaggaaauucauacccaaagcucagcaaauccuacauuaaugauaaagggaaagaaguccucgugcuauggggcauucaccauccaucuacuagugcugaccaacaaagucucuaucagaaugcagaugcauauguuuuuguggggucaucaaaauacagcaagaaguucaagccggaaauagcaauaagacccaaagugagggaucaagaagggagaaugaacuauuacuggacacuaguagagccgggagacaaaauaacauucgaagcaacuggaaaucuagugguaccgagauaugcauucgcaauggaaagaaaugcuggaucugguauuaucauuucagauacaccaguccacgauugcaauacaacuugucagacacccaagggugcuauaaacaccagccucccauuucagaauauacauccgaucacaauuggaaaauguccaaaauauguaaaaagcacaaaauugagacuggccacaggauugaggaaugucccgucuauucaaucuagaggccuauuuggggccauugccgguuucauugaagggggguggacagggaugguagauggaugguacgguuaucaccaucaaaaugagcaggggucaggauaugcagccgaccugaagagcacacagaaugccauugacgagauuacuaacaaaguaaauucuguuauugaaaagaugaauacacaguucacagcaguagguaaagaguucaaccaccuggaaaaaagaauagagaauuuaaauaaaaaaguugaugaugguuuccuggacauuuggacuuacaaugccgaacuguugguucuauuggaaaaugaaagaacuuuggacuaccacgauucaaaugugaagaacuuauaugaaaagguaagaagccaguuaaaaaacaaugccaaggaaauuggaaacggcugcuuugaauuuuaccacaaaugcgauaacacgugcauggaaagugucaaaaaugggacuuaugacuacccaaaauacucagaggaagcaaaauuaaacagagaagaaauagaugggguaaagcuggaaucaacaaggguuuaccagauuuuggcgaucuauucaacugucgccaguucauugguacugguagucucccugggggcaaucaguuucuggaugugcucuaaugggucucuacaguguagaauauguauuuaa

SEQ ID NO: 36048 - RNA, 1701 nt, Artificial Sequence; identical to SEQ ID NO: 36001
  derived and/or modified CDS sequence (wt) from hemagglutinin__InfluenzaA__ADB89341

SEQ ID NO: 36049 - RNA, 1701 nt, Artificial Sequence; identical to SEQ ID NO: 34681
  derived and/or modified CDS sequence (wt) from hemagglutinin__InfluenzaA__ADB89351

SEQ ID NO: 36050 - RNA, 1701 nt, Artificial Sequence; identical to SEQ ID NO: 36001
  derived and/or modified CDS sequence (wt) from hemagglutinin__InfluenzaA__ADB89361

SEQ ID NO: 36051 - RNA, 1701 nt, Artificial Sequence; identical to SEQ ID NO: 34681
  derived and/or modified CDS sequence (wt) from hemagglutinin__InfluenzaA__ADB89371

SEQ ID NO: 36052 - RNA, 1701 nt, Artificial Sequence
  derived and/or modified CDS sequence (wt) from hemagglutinin__InfluenzaA__ADB89381
augaaggcaauacuaguaguucugcuauauacauuugcaaccgcaaaugcagacacauuauguauagguuaucaugcgaacaauucaacagacacuguagacacaguacuagaaaagaauguaacaguaacacacucuguuaaccuucuagaagacaagcauaacgggaaacuaugcaaacuaagagggguagccccauugcauuuggguaaauguaacauugcuggcuggauccugggaaauccagagugugaaucacucuccacagcaagcucaugguccuacauuguggaaacaucuaguucagacaauggaacguguuacccaggagauuucaucgauuaugaggagcuaagagagcaauugagcucagugucaucauuugaaagguuugagauauuccccaagacaaguucauggcccaaucaugauucgaacaaagguguaacggcagcauguccucaugcuggagcaaaaagcuucuacaaaaauuuaauauggcuaguuaaaaaaggaaauucauacccaaagcucagcaaauccuacauuaaugauaaagggaaagaaguccucgugcuauggggcauucaccauccaucuacuagugcugaccaacaaagucucuaucagaaugcagaugcauauguuuuuguggggacaucaagauacagcaagaaguucaagccggaaauagcaauaagacccaaagugaggggucaagaagggagaaugaacuauuacuggacacuaguagagccgggagacaaaauaacauucgaagcaacuggaaaucuagugguaccgagauaugcauucgcaauggaaagaaaugcuggaucugguauuaucauuucagauacaccaguccacgauugcaauacaacuugucagacacccaagggugcuauaaacaccagccucccauuucagaauauacauccgaucacaauuggaaaauguccaaaauauguaaaaagcacaaaauugagacuggccacaggauugaggaaugucccgucuauucaaucuagaggccuauuuggggccauugccgguuucauugaagggggguggacagggaugguagauggaugguacgguuaucaccaucaaaaugagcaggggucaggauaugcagccgaccugaagagcacacagaaugccauugacgagauuacuaacaaaguaaauucuguuauugaaaagaugaauacacaguucacagcaguagguaaagaguucaaccaccuggaaaaaagaauagagaauuuaaauaaaaagguugaugaugguuuccuggacauuuggacuuacaaugccgaacuguugguucuauuggaaaaugaaagaacuuuagacuaccacgauucaaaugugaagaacuuauaugaaaagguaagaagccaguuaaaaaacaaugccaaggaaauuggaaacggcugcuuugaauuuuaccacaaaugcgauaacacgugcauggaaagugucaaaaaugggacuuaugacuacccaaaauacucagaggaagcaaaauuaaacagagaagaaauagaugggguaaagcuggaaucaacaaggauuuaccagauuuuggcgaucuauucaacugucgccaguucauugguacugguagucucccugggggcaaucaguuucuggaugugcucuaaugggucucuacaguguagaauauguauuuaa

SEQ ID NO: 36053 - RNA, 1701 nt, Artificial Sequence
  derived and/or modified CDS sequence (wt) from hemagglutinin__InfluenzaA__ADB89391
augaaggcaauacuaguaguucugcuauauacauuugcaaccgcaaaugcagacacauuauguauagguuaucaugcgaacaauucaacagacacuguagacacaguacuagaaaagaauguaacaguaacacacucuguuaaccuucuagaagacaagcauaacgggaaacuaugcaaacuaagagggguagccccauugcauuuggguaaauguaacauugcuggcuggauccugggaaauccagagugugaaucacucuccacagcaagcucaugguccuacauuguggaaacaucuaguucagacaauggaacguguuacccaggagauuucaucgauuaugaggagcuaagagagcaauugagcucagugucaucauuugaaagguuugagauauuccccaagacaaguucauggcccaaucaugacucgaacaaagguguaacggcagcaugucuucaugcuggagcaaaaagcuucuacaaaaauuuaauauggcuaguuaaaaaaggaaauucauacccaaagcucagcaaauccuacauuaaugauaaagggaaagaaguccucgugcuauggggcauucaccauccaucuacuagugcugaccaacaaagucucuaucagaaugcagaugcauauguuuuuguggggacaucaagauacagcaagaaguucaagccggaaauagcaauaagacccaaagugagggaucaagaagggagaaugaacuauuacuggacacuaguagagccgggagacaaaauaacauucgaagcaacuggaaaucuagugguaccgagauaugcauucgcaauggaaagaaaugcuggaucugguauuaucauuucagauacaccaguccacgauugcaauacaacuugucagacacccaagggugcuauaaacaccagccucccauuucagaauauacauccgaucacaauuggaaaauguccaaaauauguaaaaagcacaaaauugagacuggccacaggauugaggaaugucccgucuauucaaucuagaggccuauuuggggccauugccgguuucauugaagggggguggacagggaugauagauggaugguacgguuaucaccaucaaaaugagcaggggucaggauaugcagccgaccugaagagcacacagaaugccauugacgagauuacuaacaaaguaaauucuguuauugaaaagaugaauacacaguucacagcaguagguaaagaguucaaccaccuggaaaaaagaauagagaauuuaaauaaaaagguugaugaugguuuccuggacauuuggacuuacaaugccgaacuguugguucuauuggaaaaugaaagaacuuuggacuaccacgauucaaaugugaagaacuuauaugaaaagguaagaagccaguuaaaaaacaaugccaaggaaauuggaaacggcugcuuugaauuuuaccacaaaugcgauaacacgugcauggaaagugucaaaaaugggacuuaugacuacccaaaauacucagaggaagcaaaauuaaacagagaagaaauagaugggguaaagcuggaaucaacaaggauuuaccagauuuuggcgaucuauucaacugucgccaguucauugguacugguagucucccugggggcaaucaguuucuggaugugcucuaaugggucucuacaguguagaauauguauuuaa

SEQ ID NO: 36054 - RNA, 1701 nt, Artificial Sequence
  derived and/or modified CDS sequence (wt) from hemagglutinin__InfluenzaA__ADB89401
augaaggcaauacuaguaguucugcuauauacauuugcaaccgcaaaugcagacacauuauguauagguuaucaugcgaacaauucaacagacacuguagacacaguacuagaaaagaauguaacaguaacacacucuguuaaccuucuagaagacaagcauaacgggaaacuaugcaaacuaagagggguagccccauugcauuuggguaaauguaacauugcuggcuggauccugggaaauccagagugugaaucacucuccacagcaagcucaugguccuacauuguggaaacaucuaguucagacaauggaacguguuacccaggagauuucaucgauuaugaggaacuaagagagcaauugagcucagugucaucauuugaaagguuugagauauuccccaagacaaguucauggcccaaucaugacucgaacaaagguguaacggcagcauguccucaugcuggagcaaaaagcuucuacaaaaauuuaauauggcuaguuaaaaaaggaaauucauacccaaagcucagcaaauccuacauuaaugauaaagggaaagaaguccucgugcuauggggcauucaccauccaucuacuagugcugaccaacaaagucucuaucagaaugcagaugcauauguuuuuguggggucaucaagauacagcaagaaguucaagccggaaauagcaauaagacccaaagugagggaucaagaagggagaaugaacuauuacuggacacuaguagagccgggagacaaaauaacauucgaagcaacuggaaaucuagugguaccgagauaugcauucgcaauggaaagaaaugcuggaucugguauuaucauuucagauacaccaguccacgauugcaauacaacuugucagacacccaagggugcuauaaacaccagccucccauuucagaauauacauccgaucacaauuggaaaauguccaaaauauguaaaaagcacaaaauugagacuggccacaggauugaggaaugucccgucuauucaaucgagaggccuauuuggggccauugccgguuucauugaagggggguggacagggaugguagauggaugguacgguuaucaccaucaaaaugagcaggggucaggauaugcagccgaccugaagagcacacagaaugccauugacgagauuacuaacaaaguaaauucuguuauugaaaagaugaauacacaguucacagcaguagguaaagaguucaaccaccuggaaaaaagaauagagaauuuaaauaaaaaaguugaugaugguuuccuggacauuuggacuuacaaugccgaacuguugguucuauuggaaaaugaaagaacuuuggacuaccacgauucaaaugugaagaacuuauaugaaaagguaagaagccagcuaaaaaacaaugccaaggaaauuggaaacggcugcuuugaauuuuaccacaaaugcgauaacacgugcauggaaagugucaaaaaugggacuuaugacuacccaaaauacucagaggaagcaaaauuaaacagagaagaaauagaugggguaaagcuggaaucaacaaggauuuaccagauuuuggcgaucuauucaacugucgccaguucauugguacugguagucucccugggggcaaucaguuucuggaugugcucuaaugggucucuacaguguagaauauguauuuaa

SEQ ID NO: 36055 - RNA, 1701 nt, Artificial Sequence
  derived and/or modified CDS sequence (wt) from hemagglutinin__InfluenzaA__ADB89411
augaaggcaauacuaguaguucugcuauauacauuugcaaccgcaaaugcagacacauuauguauagguuaucaugcgaacaauucaacagacacuguagacacaguacuagaaaagaauguaacaguaacacacucuguuaaccuucuagaagacaagcauaacgggaaacuaugcaaacuaagagggguagccccauugcauuuggguaaauguaacauugcuggcuggauccugggaaauccagagugugaaucacucuccacagcaagcucaugguccuacauuguggaaacaucuaguucagacaauggaacguguuacccaggagauuucaucgauuaugaggagcuaagagagcaauugagcucagugucaucauuugaaagguuugagauauuccccaagacaaguucauggcccaaucaugacucgaacaaagguguaacggcagcauguccucaugcuggagcaaaaagcuucuacaaaaauuuaauauggcuaguuaaaaaaggaaauucauacccaaagcucagcaaauccuacauuaaugauaaagggaaagaaguccucgugcuauggggcauucaccauccaucuacuagugcugaccaacaaagccucuaucagaaugcagaugcauauguuuuuguggggacaucaagauacagcaagaaguucaagccggaaauagcaauaagacccaaagugagggaucaagaagggagaaugaacuauuacuggacacuaguagagccgggagacaaaauaacauucgaagcaacuggaaaucuagugguaccgagauaugcauucgcaauggaaagaaaugcuggaucugguauuaucauuucagauacaccaguccacgauugcaauacaacuugucagacacccaagggugcuauaaacaccagccucccauuucagaauauacauccgaucacaauuggaaaauguccaaaauauguaaaaagcacaaaauugagacuggccacaggauugaggaaugucccgucuauucaaucuagaggccuauuuggggccauugccgguuucauugaagggggguggacaggaaugguagauggaugguacgguuaucaccaucaaaaugagcaggggucaggauaugcagccgaccugaagagcacacagaaugccauugacgagauuacuaacaaaguaaauucuguuauugaaaagaugaauacacaguucacagcaguagguaaagaguucaaccaccuggaaaaaagaauagagaauuuaaauaaaaaaguugaugaugguuuccuggacauuuggacuuacaaugccgaacuguugguucuauuggaaaaugaaagaacuuuggacuaccacgauucaaaugugaagaacuuauaugaaaagguaagaagccaguuaaaaaacaaugccaaggaaauuggaaacggcugcuuugaauuuuaccacaaaugcgauaacacgugcauggaaagugucaaaaaugggacuuaugacuacccaaaauacucagaggaagcaaaauuaaacagagaagaaauagaugggguaaagcuggaaucaacaaggauuuaccagauuuuggcgaucuauucaacugucgccaguucauugguacugguagucucccugggggcaaucaguuucuggaugugcucuaaugggucucuacaguguagaauauguauuuaa

SEQ ID NO: 36056 - RNA, 1701 nt, Artificial Sequence; identical to SEQ ID NO: 35128
  derived and/or modified CDS sequence (wt) from hemagglutinin__InfluenzaA__ADB89431

SEQ ID NO: 36057 - RNA, 1701 nt, Artificial Sequence
  derived and/or modified CDS sequence (wt) from hemagglutinin__InfluenzaA__ADB89441
augaaggcaauacuaguaguucugcuauauacauuugcaaccgcaaaugcagacacauuauguauagguuaucaugcgaacaauucaacagacacuguagacacaguacuagaaaagaauguaacaguaacacacucuguuaaccuucuagaagacaagcauaacgggaaacuaugcaaacuaagagggguagccccauugcauuuggguaaauguaacauugcuggcuggauccugggaaauccagagugugaaucacucuccacagcaagcucaugguccuacauuguggaaacaucuaguucagacaauggaacguguuacccaggagauuucaucgauuaugaggagcuaagagagcaauugagcucagugucaucauuugaaagguuugagauauuccccaagacaaguucauggcccaaucaugacucgaacaaagguguaacggcagcauguccucaugcuggagcaaaaagcuucuacaaaaauuuaauauggcuaguuaaaaaaggaaauucauacccaaagcucagcaaauccuacauuaaugauaaagggaaagaaguccucgugcuauggggcauucaccauccaucuacuagugcugaccaacaaagucucuaucagaaugcagaugcauauguuuuuguggggacaucaagauacagcaagaaguucaagccggaaauagcaauaagacccaaagugagggaacaagaagggagaaugaacuauuacuggacacuaguagagccgggagacaaaauaacauucgaagcaacuggaaaucuagugguaccgagauaugcauucgcaauggaaagaaaugcuggaucugguauuaucauuucagauacaccaguccacgauugcaauacaacuugucagacacccaagggugcuauaaacaccagccucccauuucagaauauacauccgaucacaauuggaaaauguccaaaauauguaaaaagcacaaaauugagacuggccacaggauugaggaaugucccgucuauucaaucuagaggccuauuuggggccauugccgguuucauugaagggggguggacagggaugguagauggaugguacgguuaucaccaucaaaaugagcaggggucaggauaugcagccgaccugaagagcacacagaaugccauugacgagauuacuaacaaaguaaauucuguuauugaaaagaugaauacacaguucacagcaguagguaaagaguucaaccaccuggaaaaaagaauagagaauuuaaauaaaaaaguugaugaugguuuccuggacauuuggacuuacaaugccgaacuguugguucuauuggaaaaugaaagaacuuuggacuaccacgauucaaaugugaagaacuuauaugaaaagguaagaagccaguuaaaaaacaaugccaaggaaauuggaaacggcugcuuugaauuuuaccacaaaugcgauaacacgugcauggaaagugucaaaaaugggacuuaugacuacccaaaauacucagaggaagcaaaauuaaacagagaagaaauagaugggguaaagcuggaaucaacaaggauuuaccagauuuuggcgaucuauucaacugucgcaaguucauugguacugguagucucccugggggcaaucaguuucuggaugugcucuaaugggucucuacaguguagaauauguauuuaa

SEQ ID NO: 36058 - RNA, 1701 nt, Artificial Sequence
  derived and/or modified CDS sequence (wt) from hemagglutinin__InfluenzaA__ADB89461
augaaggcaauacuaguaguucugcuauauacauuugcaaccgcaaaugcagacacauuauguauagguuaucaugcgaacaauucaacagacacuguagacacaguacuagaaaagaauguaacaguaacacacucuguuaaccuucuagaagacaagcauaacgggaaacucugcaaacuaagagggguagccccauugcauuuggguaaauguaacauugcuggcuggauccugggaaauccagagugugaaucacucuccacagcaagcucaugguccuacauuguggaaacaucuaguucagacaauggaacguguuacccaggagauuucaucgauuaugaggagcuaagagagcaauugagcucagugucaucauuugaaagguuugagauauuccccaagacaaguucauggcccaaucaugacucgaacaaagguguaacggcagcauguccucaugcuggagcaaaaagcuucuacaaaaauuuaauauggcuaguuaaaaaaggaaauucauacccaaagcucagcaaauccuacauuaaugauaaagggaaagaaguccucgugcuauggggcauucaccauccaucuacuagugcugaccaacaaagucucuaucagaaugcagaugcauauguuuuuguggggacaucaagauacagcaagaaguucaagccggaaauagcaauaagacccaaagugagggaucaagaagggagaaugaacuauuacuggacacuaguagagccgggagacaaaauaacauucgaagcaacuggaaaucuagugguaccgagauaugcauucgcaauggaaagaaaugcuggaucugguauuaucauuucagauacaccaguccacgauugcaauacaacuugucagacacccaagggugcuauaaacaccagccucccauuucagaauauacauccgaucacaauuggaaaauguccaaaauauguaaaaagcacaaaauugagacuggccacaggauugaggaaugucccgucuauucaaucuagaggccuauuuggggccauugccgguuucauugaagggggguggacagggaugguagauggaugguacgguuaucaccaucaaaaugagcaggggucaggauaugcagccgaccugaagagcacacagaaugccauugacgagauuacuaacaaaguaaauucuguuauugaaaagaugaauacacaguucacagcaguagguaaagaguucaaccaccuggaaaaaagaauagagaauuuaaauaaaaagguugaugaugguuuccuggacauuuggacuuacaaugccgaacuguugguucuauuggaaaaugaaagaacuuuggacuaccacgauucaaaugugaagaacuuauaugaaaagguaagaagccaguuaaaaaacaaugccaaggaaauuggaaacggcugcuuugaauuuuaccacaaaugcgauaacacgugcauggaaagugucaaaaaugggacuuaugacuacccaaaauacucagaggaagcaaaauuaaacagagaagaaauagaugggguaaagcuggaaucaacaaggauuuaccagauuuuggcgaucuauucaacugucgccaguucauugguacugguagucucccugggggcaaucaguuucuggaugugcucuaaugggucucuacaguguagaauauguauuuaa

SEQ ID NO: 36059 - RNA, 1701 nt, Artificial Sequence; identical to SEQ ID NO: 35128
  derived and/or modified CDS sequence (wt) from hemagglutinin__InfluenzaA__ADB89481

SEQ ID NO: 36060 - RNA, 1701 nt, Artificial Sequence
  derived and/or modified CDS sequence (wt) from hemagglutinin__InfluenzaA__ADB89491
augaaggcaauacuaguaguucugcuauauacauuugcaaccgcaaaugcagacacauuauguauagguuaucaugcgaacaauucaacagacacuguagacacaguacuagaaaagaauguaacaguaacacacucuguuaaccuucuagaagacaagcauaacgggaaacuaugcaaacuaagagggguagccccauugcauuuggguaaauguaacauugcuggcuggauccugggaaauccagagugugaaucacucuccacagcaagcucaugguccuacauuguggaaacaucuaguucagacaauggaacguguuacccaggagauuucaucgauuaugaggagcuaagagagcaauugagcucagugucaucauuugaaagguuugagauauuccccaagacaaguucauggcccaaucaugacucgaacaaagguguaacggcagcauguccucaugcuggagcaaaaagcuucuacaaaaauuuaauauggcuaguuaaaaaaggaaauucauacccaaagcucagcaaauccuacaucaaugauaaagggaaagaaguccucgugcuauggggcauucaccauccaucuacuagugcugaccaacaaagucucuaucagaaugcagaugcauauguuuuuguggggacaucaagauacagcaagaaguucaagccggaaauagcaauaagacccaaagugagggaacaagaagggagaaugaacuauuacuggacacuaguagagccgggagacaaaauaacauucgaagcaacuggaaaucuagugguaccgagauaugcauucgcaauggaaagaaaugcuggaucugguauuaucauuucagauacaccaguccacgauugcaauacaacuugucagacacccaagggugcuauaaacaccagccucccauuucagaauauacauucgaucacaauuggaaaauguccaaaauauguaaaaagcacaaaauugagacuggccacaggauugaggaaugucccgucuauucaaucuagaggccuauuuggggccauugccgguuucauugaagggggguggacagggaugguagauggaugguacgguuaucaccaucaaaaugagcaggggucaggauaugcagccgaccugaagagcacacagaaugccauugacgagauuacuaacaaaguaaauucuguuauugaaaagaugaauacacaguucacagcaguagguaaagaguucaaccaccuggaaaaaagaauagagaauuuaaauaaaaaaguugaugaugguuuccuggacauuuggacuuacaaugccgaacuguugguucuauuggaaaaugaaagaacuuuggacuaccacgauucaaaugugaagaacuuauaugaaaagguaagaagccaguuaaaaaacaaugccaaggaaauuggaaacggcugcuuugaauuuuaccacaaaugcgauaacacgugcauggaaagugucaaaaaugggacuuaugacuacccaaaauacucagaggaagcaaaauuaaacagagaagaaauagaugggguaaagcuggaaucaacaaggauuuaccagauuuuggcgaucuauucaacugucgccaguucauugguacugguagucucccugggggcaaucaguuucuggaugugcucuaaugggucucuacaguguagaauauguauuuaa

SEQ ID NO: 36061 - RNA, 1701 nt, Artificial Sequence
  derived and/or modified CDS sequence (wt) from hemagglutinin__InfluenzaA__ADB89501
augaaggcaauacuaguaguucugcuauauacauuugcaaccgcaaaugcagacacauuauguauagguuaucaugcgaacaauucaacagacacuguagacacaguacuagaaaagaauguaacaguaacacacucuguuaaccuucuagaagacaagcauaacgggaaacuaugcaaacuaagagggguagccccauugcauuuggguaaauguaacauugcuggcuggauccugggaaauccagagugugaaucacucuccacagcaagcucaugguccuacauuguggaaacaucuaguucagacaauggaacguguuacccaggagauuucaucgauuaugaggagcuaagagagcaauugagcucagugucaucauuugaaagguuugagauauuccccaagacaaguucauggcccaaucaugacucgaacaaagguguaacggcagcauguccucaugcuggagcaaaaagcuucuacaaaaauuuaauauggcuaguuaaaaaaggaaauucauacccaaagcucagcaaauccuacauuaaugauaaagggaaagaaguccucgugcuauggggcauucaccauccaucuacuagugcugaccaacaaagucucuaucagaaugcagaugcauauguuuuuguggggucaucaagauacagcaagaaguucaagccggaaauagcaauaagacccaaagugagggaucaagaagggagaaugaacuauuacuggacacuaguagagccgggagacaaaauaacauucgaagcaacuggaaaucuagugguaccgagauaugcauucgcaauggaaagaaaugcuggaucugguauuaucauuucagauacaccaguccacgauugcaauacaacuugucagacacccaagggugcuauaaacaccagccucccauuucagaauauacauccgaucacaauuggaaaauguccaaaauauguaaaaagcacaaaauugagacuggccacaggauugaggaaugucccgucuauucaaucuagaggccuauuuggggccauugccgguuucauugaagggggguggacaggguugguagauggaugguacgguuaucaccaucaaaaugagcaggggucaggauaugcagccgaccugaagagcacacagaaugccauugacgagauuacuaacaaaguaaauucuguuauugaaaagaugaauacacaguucacagcaguagguaaagaguucaaccaccuggaaaaaagaauagagaauuuaaauaaaaaaguugaugaugguuuccuggacauuuggacuuacaaugccgaacuguugguucuauuggaaaaugaaagaacuuuggacuaccacgauucaaaugugaagaacuuauaugaaaagguaagaagccagcuaaaaaacaaugccaaggaaauuggaaacggcugcuuugaauuuuaccacaaaugcgauaacacgugcauggaaagugucaaaaaugggacuuaugacuacccaaaauacucagaggaagcaaaauuaaacagagaagaaauagaugggguaaagcuggaaucaacaaggauuuaccagauuuuggcgaucuauucaacugucgccaguucauugguacugguagucucccugggggcaaucaguuucuggaugugcucuaaugggucucuacaguguagaauauguauuuaa

SEQ ID NO: 36062 - RNA, 1701 nt, Artificial Sequence; identical to SEQ ID NO: 34681
  derived and/or modified CDS sequence (wt) from hemagglutinin__InfluenzaA__ADB89511

SEQ ID NO: 36063 - RNA, 1701 nt, Artificial Sequence; identical to SEQ ID NO: 35128
  derived and/or modified CDS sequence (wt) from hemagglutinin__InfluenzaA__ADB89531

SEQ ID NO: 36064 - RNA, 1701 nt, Artificial Sequence
  derived and/or modified CDS sequence (wt) from hemagglutinin__InfluenzaA__ADB89541
augaaggcaauacuaguaguucugcuauauacauuugcaaccgcaaaugcagacacauuauguauagguuaucaugcgaacaauucaacagacacuguagacacaguacuagaaaagaauguaacaguaacacacucuguuaaccuucuagaagacaagcauaacgggaaacuaugcaaacuaagagggguagccccauugcauuuggguaaauguaacauugcuggcuggauccugggaaauccagagugugaaucacucuccacagcaagcucaugguccuacauuguggaaacaucuaguucagacaauggaacguguuacccaggagauuucaucgauuaugaggagcuaagagagcaauugagcucagugucaucauuugaaagguuugagauauuccccaagacaaguucauggcccaaucaugacucgaacaaagguguaacggcagcauguccucaugcuggagcaaaaagcuucuacaaaaauuuaauauggcuaguuaaaaaaggaaauucauacccaaagcucagcaaauccuacauuaaugauaaagggaaagaaguccucgugcuauggggcauucaccauccaucuacuagugcugaccaacaaagucucuaucagaaugcagaugcauauguuuuuguggggacaucaagauacagcaagaaguucaagccggaaauagcaauaagacccaaagugagggaacaagaagggagaaugaacuauuacuggacacuaguagagccgggagacaaaauaacauucgaagcaacuggaaaucuagugguaccgagauaugcauucgcaauggaaagaaaugcuggaucugguauuaucauuucagauacaccaguccacgauugcaauacaacuugucagacacccaagggugcuauaaacaccagccucccauuucagaauauacauucgaucacaauuggaaaauguccaaaauauguaaaaagcacaaaauugagacuggccacaggauugaggaaugucccgucuauucaauccagaggccuauuuggggccauugccgguuucauugaagggggguggacagggaugguagauggaugguacgguuaucaccaucaaaaugagcaggggucaggauaugcagccgaccugaagagcacacagaaugccauugacgagauuacuaacaaaguaaauucuguuauugaaaagaugaauacacaguucacagcaguagguaaagaguucaaccaccuggaaaaaagaauagagaauuuaaauaaaaaaguugaugaugguuuccuggacauuuggacuuacaaugccgaacuguugguucuauuggaaaaugaaagaacuuuggacuaccacgauucaaaugugaagaacuuauaugaaaagguaagaagccaguuaaaaaacaaugccaaggaaauuggaaacggcugcuuugaauuuuaccacaaaugcgauaacacgugcauggaaagugucaaaaaugggacuuaugacuacccaaaauacucagaggaagcaaaauuaaacagagaagaaauagaugggguaaagcuggaaucaacaaggauuuaccagauuuuggcgaucuauucaacugucgccaguucauugguacugguagucucccugggggcaaucaguuucuggaugugcucuaaugggucucuacaguguagaauauguauuuaa

SEQ ID NO: 36065 - RNA, 1701 nt, Artificial Sequence
  derived and/or modified CDS sequence (wt) from hemagglutinin__InfluenzaA__ADB89551
augaaggcaauacuaguaguucugcuauauacauuugcaaccgcaaaugcagacacauuauguauagguuaucaugcgaacaauucaacagacacuguagacacaguacuagaaaagaauguaacaguaacacacucuguuaaccuucuagaagacaagcauaacgggaaacuaugcaaacuaagagggguagccccauugcauuuggguaaauguaacauugcuggcuggauccugggaaauccagagugugaaucacucuccacagcaagcucaugguccuacauuguggaaacaucuaguucagacaauggaacguguuacccaggagauuucaucgauuaugaggagcuaagagagcaauugagcucagugucaucauuugaaagguuugagauguuccccaagacaaguucauggcccaaucaugacucgaacaaagguguaacggcagcauguccucaugcuggagcaaaaagcuucuacaaaaauuuaauauggcuaguuaaaaaaggaaauucauacccaaagcucagcaaauccuacauuaaugauaaagggaaagaaguccucgugcuauggggcauucaccauccaucuacuagugcugaccaacaaagucucuaucagaaugcagaugcauauguuuuuguggggacaucaagauacagcaagaaguucaagccggaaauagcaauaagacccaaagugagggaucaagaagggagaaugaacuauuacuggacacuaguagagccgggagacaaaauaacauucgaagcaacuggaaaucuagugguaccgagauaugcauucgcaauggaaagaaaugcuggaucugguauuaucauuucagauacaccaguccacgauugcaauacaacuugucagacacccaagggugcuauaaacaccagccucccauuucagaauauacauccgaucacaauuggaaaauguccaaaauauguaaaaagcacaaaauugagacuggccacaggauugaggaaugucccgucuauucaaucuagaggccuauuuggggccauugccgguuucauugaagggggguggacagggaugguagauggaugguacgguuaucaccaucaaaaugagcaggggucaggauaugcagccgaccugaagagcacacagaaugccauugacgagauuacuaacaaaguaaauucuguuauugaaaagaugaauacacaguucacagcaguagguaaagaguucaaccaccuggaaaaaagaauagagaauuuaaauaaaaaaguugaugaugguuuccuggacauuuggacuuacaaugccgaacuguugguucuauuggaaaaugaaagaacuuuggacuaccacgauucaaaugugaagaacuuauaugaaaagguaagaagccaguuaaaaaacaaugccaaggaaauuggaaacggcugcuuugaauuuuaccacaaaugcgauaacacgugcauggaaagugucaaaaaugggacuuaugacuacccaaaauacucagaggaagcaaaauuaaacagagaagaaauagaugggguaaagcuggaaucaacaaggauuuaccagauuuuggcgaucuauucaacugucgccaguucauugguacugguagucucccugggggcaaucaguuucuggaugugcucuaaugggucucuacaguguagaauauguauuuaa

SEQ ID NO: 36066 - RNA, 1701 nt, Artificial Sequence; identical to SEQ ID NO: 34681
  derived and/or modified CDS sequence (wt) from hemagglutinin__InfluenzaA__ADB89561

SEQ ID NO: 36067 - RNA, 1701 nt, Artificial Sequence; identical to SEQ ID NO: 36001
  derived and/or modified CDS sequence (wt) from hemagglutinin__InfluenzaA__ADB89571

SEQ ID NO: 36068 - RNA, 1701 nt, Artificial Sequence; identical to SEQ ID NO: 35130
  derived and/or modified CDS sequence (wt) from hemagglutinin__InfluenzaA__ADB89581

SEQ ID NO: 36069 - RNA, 1701 nt, Artificial Sequence
  derived and/or modified CDS sequence (wt) from hemagglutinin__InfluenzaA__ADB89591
augaaggcaauacuaguaguucugcuauauacauuugcaaccgcaaaugcagacacauuauguauagguuaucaugcgaacaauucaacagacacuguagacacaguacuagaaaagaauguaacaguaacacacucuguuaaccuucuagaagacaagcauaacgggaaacuaugcaaacuaagagggguagccccauugcauuuggguaaauguaacauugcuggcuggauccugggaaauccagagugugaaucacucuccacagcaagcucaugguccuacauuguggaaacaucuaguucagacaauggaacguguuacccaggagauuucaucgauuaugaggagcuaagagagcaauugagcucagugucaucauuugaaagguuugagauauuccccaagacaaguucauggcccaaucaugacucgaacaaagguguaacggcagcauguccucaugcuggagcaaaaagcuucuacaaaaauuuaauauggcuaguuaaaaaaggaaauucauacccaaagcucagcaaauccuacauuaaugauaaagggaaagaaguccucgugcuauggggcauucaccauccaucuacuagugcugaccaacaaagucucuaucagaaugcagaugcauauguuuuuguggggacaucaagauacagcaagaaguucaagccggaaauagcaauaagacccaaagugagggaacaagaagggagaaugaacuauuacugggcacuaguagagccgggagacaaaauaacauucgaagcaacuggaaaucuagugguaccgagauaugcauucgcaauggaaagaaaugcuggaucugguauuaucauuucagauacaccaguccacgauugcaauacaacuugucagacacccaagggugcuauaaacaccagccucccauuucagaauauacauucgaucacaauuggaaaauguccaaaauauguaaaaagcacaaaauugagacuggccacaggauugaggaaugucccgucuauucaaucuagaggccuauuuggggccauugccgguuucauugaagggggguggacagggaugguagauggaugguacgguuaucaccaucaaaaugagcaggggucaggauaugcagccgaccugaagagcacacagaaugccauugacgagauuacuaacaaaguaaauucuguuauugaaaagaugaauacacaguucacagcaguagguaaagaguucaaccaccuggaaaaaagaauagagaauuuaaauaaaaaaguugaugaugguuuccuggacauuuggacuuacaaugccgaacuguugguucuauuggaaaaugaaagaacuuuggacuaccacgauucaaaugugaagaacuuauaugaaaagguaagaagccaguuaaaaaacaaugccaaggaaauuggaaacggcugcuuugaauuuuaccacaaaugcgauaacacgugcauggaaagugucaaaaaugggacuuaugacuacccaaaauacucagaggaagcaaaauuaaacagagaagaaauagaugggguaaagcuggaaucaacaaggauuuaccagauuuuggcgaucuauucaacugucgccaguucauugguacugguagucucccugggggcaaucaguuucuggaugugcucuaaugggucucuacaguguagaauauguauuuaa

SEQ ID NO: 36070 - RNA, 1701 nt, Artificial Sequence
  derived and/or modified CDS sequence (wt) from hemagglutinin__InfluenzaA__ADB89601
augaaggcaauaauaguaguucugcuauauacauuugcaaccgcaaaugcagacacauuauguauagguuaucaugcgaacaauucaacagacacuguagacacaguacuagaaaagaauguaacaguaacacacucuguuaaccuucuagaagacaagcauaacgggaaacuaugcaaacuaagagggguagccccauugcauuuggguaaauguaacauugcuggcuggauccugggaaauccagagugugaaucacucuccacagcaagcucaugguccuacauuguggaaacaucuaguucagacaauggaacguguuacccaggagauuucaucgauuaugaggagcuaagagagcaauugagcucagugucaucauuugaaagguuugagauauuccccaagacaaguucauggcccaaucaugacucgaacaaagguguaacggcagcauguccucaugcuggagcaaaaagcuucuacaaaaauuuaauauggcuaguuaaaaaaggaaauucauacccaaagcucagcaaauccuacauuaaugauaaagggaaagaaguccucgugcuauggggcauucaccauccaucuacuagugcugaccaacaaagucucuaucagaaugcagaugcauauguuuuuguggggacaucaagauacagcaagaaguucaagccggaaauagcaauaagacccaaagugagggaucaagaagggagaaugaacuauuacuggacacuaguagagccgggagacaaaauaacauucgaagcaacuggaaaucuagugguaccgagauaugcauucgcaauggaaagaaaugcuggaucugguauuaucauuucagauacaccaguccacgauugcaauacaacuugucagacacccaagggugcuauaaacaccagccucccauuucagaauauacauccgaucacaauuggaaaauguccaaaauauguaaaaagcacaaaauugagacuggccacaggauugaggaaugucccgucuauucaaucuagaggccuauuuggggccauugccgguuucauugaagggggguggacagggaugguagauggaugguacgguuaucaccaucaaaaugagcaggggucaggauaugcagccgaccugaagagcacacagaaugccauugacaagauuacuaacaaaguaaauucuguuauugaaaagaugaauacacaguucacagcaguagguaaagaguucaaccaccuggaaaaaagaauagagaauuuaaauaaaaaaguugaugaugguuuccuggacauuuggacuuacaaugccgaacuguugguucuauuggaaaaugagagaacuuuggacuaccacgauucaaaugugaagaacuuauaugaaaagguaagaagccaguuaaaaaacaaugccaaggaaauuggaaacggcugcuuugaauuuuaccacaaaugcgauaacacgugcauggaaagugucaaaaaugggacuuaugacuacccaaaauacucagaggaagcaaaauuaaacagagaagaaauagaugggguaaagcuggaaucaacaaggauuuaccagauuuugacgaucuauucaacugucgccaguucauugguacugguagucucccugggggcaaucaguuucuggaugugcucuaaugggucucuacaguguagaauauguauuuaa

SEQ ID NO: 36071 - RNA, 1701 nt, Artificial Sequence
  derived and/or modified CDS sequence (wt) from hemagglutinin__InfluenzaA__ADB89611
augaaggcaauacuaguaguucugcuauauacauuugcaaccgcaaaugcagacacauuauguauagguuaucaugcgaacaauucaacagacacuguagacacaguacuagaaaagaauguaacaguaacacacucuguuaaccuucuagaagacaagcauaacgggaaacuaugcaaacuaagagggguagccccauugcauuuggguaaauguaacauugcuggcuggauccugggaaauccagagugugaaucacucuccacagcaagcucaugguccuacauuguggaaacaucuaguucagacaauggaacguguuacccaggagauuucaucgauuaugaggagcuaagagagcaauugagcucagugucaucauuugaaagguuugagauauuccccaagacaaguucauggcccaaucaugacucgaacaaagguguaacggcagcauguccucaugcuggagcaaaaagcuucuacaaaaauuuaauauggcuaguuaaaaaaggaaauucauacccaaagcucagcaaauccuacauuaaugauaaagggaaagaaguccucgugcuauggggcauucaccauccaucuacuagugcugaccaacaaagucucuaucagaaugcagaugcauauguuuuuguggggacaucaagauacagcaagaaguucaagccggaaauagcaauaagacccaaagugagggaucaagaagggagaaugaacuauuacuggacacuaguagagccgggagacaaaauaacauucgaagcaacuggaaaucuagugguaccgagauaugcauucgcaauggaaagaaaugcuggaucugguauuaucauuucagauacaccaguccacgauugcaauacaacuugucagacacccaagggugcuauaaacaccagccucccauuucagaauauacauccgaucacaauuggaaaauguccaaaauauguaaaaagcacaaaauugagacuggccacaggauugaggaaugucccgucuauucaaucuagaggccuauuuggggccauugccgguuucauugaagggggguggacagggaugguagauggaugguacgguuaucaccaucaaaaugagcaggggucaggauaugcagccgaccugaagagcacacagaaugccauugacaagauuacuaacaaaguaaauucuguuauugaaaagaugaauacacaguucacagcaguagguaaagaguucaaccaccuggaaaaaagaauagagaauuuaaauaaaaagguugaugaugguuuccuggacauuuggacuuacaaugccgaacuguugguucuauuggaaaaugaaagaacuuuggacuaccacgauucaaaugugaagaacuuauaugaaaagguaagaagccaguuaaaaaacaaugccaaggaaauuggaaacggcugcuuugaauuuuaccacaaaugcgauaacacgugcauggaaagugucaaaaaugggacuuaugacuacccaaaauacucagaggaagcaaaauuaaacagagaagaaauagaugggguaaagcuggaaucaacaaggauuuaccagauuuuggcgaucuauucaacugucgccaguucauugguacugguagucucccugggggcaaucaguuucuggaugugcucuaaugggucucuacaguguagaauauguauuuaa

SEQ ID NO: 36072 - RNA, 1701 nt, Artificial Sequence; identical to SEQ ID NO: 35845
  derived and/or modified CDS sequence (wt) from hemagglutinin__InfluenzaA__ADB89621

SEQ ID NO: 36073 - RNA, 1701 nt, Artificial Sequence
  derived and/or modified CDS sequence (wt) from hemagglutinin__InfluenzaA__ADB89631
augaaggcaauacuaauaguucugcuauauacauuugcaaccgcaaaugcagacacauuauguauagguuaucaugcgaacaauucaacagacacuguagacacaguacuagaaaagaauguaacaguaacacacucuguuaaccuucuagaagacaagcauaacgggaaacuaugcaaacuaagagggguagccccauugcauuuggguaaauguaacauugcuggcuggauccugggaaauccagagugugaaucacucuccacagcaagcucaugguccuacauuguggaaacaucuaguucagacaauggaacguguuacccaggagauuucaucgauuaugaggagcuaagagagcaauugagcucagugucaucauuugaaagguuugagauauuccccaagacaaguucauggcccaaucaugacucgaacaaagguguaacggcagcauguccucaugcuggagcaaaaagcuucuacaaaaauuuaauauggcuaguuaaaaaaggaaauucauacccaaagcucagcaaauccuacauuaaugauaaagggaaagaaguccucgugcuauggggcauucaccauccaucuacuagugcugaccaacaaagccucuaucagaaugcagaugcauauguuuuuguggggacaucaagauacagcaagaaguucaagccggaaauagcaauaagacccaaagugagggaucaagaagggagaaugaacuauuacuggacacuaguagagccgggagacaaaauaacauucgaagcaacuggaaaucuagugguaccgagauaugcauucgcaauggaaagaaaugcuggaucugguauuaucauuucagauacaccaguccacgauugcaauacaacuugucagacacccaagggugcuauaaacaccagccucccauuucagaauauacauccgaucacaauuggaaaauguccaaaauauguaaaaagcacaaaauugagacuggccacaggauugaggaauaucccgucuauucaaucuagaggccuauuuggggccauugccgguuucauugaagggggguggacagggaugguagauggaugguacgguuaucaccaucaaaaugagcaggggucaggauaugcagccgaccugaagagcacacagaaugccauugacgagauuacuaacaaaguaaauucuguuauugaaaagaugaauacacaguucacagcaguagguaaagaguucaaccaccuggaaaaaagaauagagaauuuaaauaaaaaaguugaugaugguuuccuggacauuuggacuuacaaugccgaacuguugguucuauuggaaaaugaaagaacuuuggacuaccacgauucaaaugugaagaacuuauaugaaaagguaagaagccaguuaaaaaacaaugccaaggaaauuggaaacggcugcuuugaauuuuaccacaaaugcgauaacacgugcauggaaagugucaaaaaugggacuuaugacuacccaaaauacucagaggaagcaaaauuaaacagagaagaaauagaugggguaaagcuggaaucaacaaggauuuaccagauuuuggcgaucuauucaacugucgccaguucauugguacugguagucucccugggggcaaucaguuucuggaugugcucuaaugggucucuacaguguagaauauguauuuaa

SEQ ID NO: 36074 - RNA, 1701 nt, Artificial Sequence; identical to SEQ ID NO: 35845
  derived and/or modified CDS sequence (wt) from hemagglutinin__InfluenzaA__ADB89641

SEQ ID NO: 36075 - RNA, 1701 nt, Artificial Sequence; identical to SEQ ID NO: 34714
  derived and/or modified CDS sequence (wt) from hemagglutinin__InfluenzaA__ADB89651

SEQ ID NO: 36076 - RNA, 1701 nt, Artificial Sequence
  derived and/or modified CDS sequence (wt) from hemagglutinin__InfluenzaA__ADB89661
augaaggcaauacuaguaguucugcuauauacauuugcaaccgcaaaugcagacacauuauguauagguuaucaugcgaacaauucaacagacacuguagacacaguacuagaaaagaauguaacaguaacacacucuguuaaccuucuagaagacaagcauaacgggaaacuaugcaaacuaagagggguagccccauugcauuuggguaaauguaacauugcuggcuggauccugggaaauccagagugugaaucacucuccacagcaagcucaugguccuacauuguggaaacaucuaguucagacaauggaacguguuacccaggagauuucaucgauuaugaggagcuaagagagcaauugagcucagugucaucauuugaaagguuugagauauuccccaagacaaguucauggcccaaucaugacucgaacaaagguguaacggcagcauguccucaugcuggagcaaaaagcuucuacaaaaauuuaauauggcuaguuaaaaaaggaaauucauacccaaagcucagcaaauccuacauuaaugauaaagggaaagaaguccucgugcuauggggcauucaccauccaucuacuagugcugaccaacaaagucucuaucagaaugcagaugcauauguuuuuguggggacaucaagauacagcaagaaguucaagccggaaauagcaauaagacccaaagugagggaucaagaagggagaaugaacuauuacuggacacuaguagagccgggagacaaaauaacauucgaagcaacuggaaaucuagugguaccgagauaugcauucgcaauggaaagaaaugcuggaucugguauuaucauuucagauacaccaguccacgauugcaauacaacuugucagacacccaagggugcuauaaacaccagccucccauuucagaauauacauccgaucacaauuggaaaauguccaaaauauguaaaaagcacaaaauugagacuggccacaggauugaggaaugucccgucuauucaaucuagaggccuauuuggggccauugccgguuucauugaagggggguggacagggaugguagauggaugguacgguuaucaccaucaaaaugagcaggggucaggauaugcagccgaccugaagagcacacagaaugccauugacgagauuacuaacaaaguaaauucuguuauugaaaagaugaauacacaguucacagcaguagguaaagaguucaaccaccuggaaaaaagaauagagaauuuaaauaaaaaaguugaugaugguuuccuggacauuuggacuuacaaugccgaacuguugguucuauuggaaaaugaaagaacuuuggacuaccacgauucaaaugugaagaacuuguaugaaaagguaagaagccaguuaaaaaacaaugccaaggaaauuggaaacggcugcuuugaauuuuaccacaaaugcgauaacacgugcauggaaagugucaaaaaugggacuuaugacuacccaaaauacucggaggaagcaaaauuaaacagagaagaaauagaugggguaaagcuggaaucaacaaggauuuaccagauuuuggcgaucuauucaacugucgccaguucauugguacugguagucucccugggggcaaucaguuucuggaugugcucuaaugggucucuacaguguagaauauguauuuaa

SEQ ID NO: 36077 - RNA, 1701 nt, Artificial Sequence; identical to SEQ ID NO: 35845
  derived and/or modified CDS sequence (wt) from hemagglutinin__InfluenzaA__ADB89671

SEQ ID NO: 36078 - RNA, 1701 nt, Artificial Sequence
  derived and/or modified CDS sequence (wt) from hemagglutinin__InfluenzaA__ADB89681
augaaggcaauacuaguaguucugcuauauacauuugcaaccgcaaaugccgacacauuauguauagguuaucaugcgaacaauucaacagacacuguagacacaguacuagaaaagaauguaacaguaacacacucuguuaaccuucuagaagacaagcauaacgggaaacuaugcaaacuaagaggaguagccccauugcauuuggguaaauguaacauugcuggcuggauccugggaaauccagagugugaaucacucuccacagcaagcucaugguccuacauuguggaaacaucuaguucagacaauggaacguguuacccaggagauuucaucgauuaugaggagcuaagagagcaauugagcucagugucaucauuugaaagguuugagauauuccccaagacaaguucauggcccaaucaugacucgaacaaagguguaacggcagcauguccucaugcuggagcaaaaagcuucuacaaaaauuuaauauggcuaguuaaaaaaggaaauucauacccaaagcucagcaaauccuacauuaaugauaaagggaaagaaguccucgugcuauggggcauucaccauccaucuacuagugcugaccaacaaagucucuaucagaaugcagaugcauauguuuuuguggggacaucaagauacagcaagaaguucaagccggaaauagcaauaagacccaaagugagggaucaagaagggagaaugaacuauuacuggacacuaguagagccgggagacaaaauaacauucgaagcaacuggaaaucuagugguaccgagauaugcauucgcaauggaaagaaaugcuggaucugguauuaucauuucagauacaccaguccacgauugcaauacaacuugucagacacccaagggugcuauaaacaccagccucccauuucagaauauacauccgaucacaauuggaaaauguccaaaauauguaaaaagcacaaaauugagacuggccacaggauugaggaaugucccgucuauucaaucuagaggccuauuuggggccauugccgguuucauugaagggggguggacagggaugguagauggaugguacgguuaucaccaucaaaaugagcaggggucaggauaugcagccgaccugaagagcacacagaaugccauugacgagauuacuaacaaaguaaauucuguuauugaaaagaugaauacacaguucacagcaguagguaaagaguucaaccaccuggaaaaaagaauagagaauuuaaauaaaaaaguugaugaugguuuccuggacauuuggacuuacaaugccgaacuguugguucuauuggaaaaugaaagaacuuuggacuaccacgauucaaaugugaagaacuuauaugaaaagguaagaagccaguuaaaaaacaaugccaaggaaauuggaaacggcugcuuugaauuuuaccacaaaugcgauaacacgugcauggaaagugucaaaaaugggacuuaugacuacccaaaauacucagaggaagcaaaauuaaacagagaagaaauagaugggguaaagcuggaaucaacaaggauuuaccagauuuuggcgaucuauucaacugucgccaguucauugguacugguagucucccugggggcaaucaguuucuggaugugcucuaaugggucucuacaguguagaauauguauuuaa

SEQ ID NO: 36079 - RNA, 1701 nt, Artificial Sequence; identical to SEQ ID NO: 34681
  derived and/or modified CDS sequence (wt) from hemagglutinin__InfluenzaA__ADB89691

SEQ ID NO: 36080 - RNA, 1701 nt, Artificial Sequence
  derived and/or modified CDS sequence (wt) from hemagglutinin__InfluenzaA__ADB89701
augaaggcaauacuaguaguucugcuauauacauuugcaaccgcaaaugcagacacauuauguauagguuaucaugcgaacaauucaacagacacuguagacacaguacuagaaaagaauguaacaguaacacacucuguuaaccuucuagaagacaagcauaacgggaaacuaugcaaacuaagagggguagccccauugcauuuggguaaauguaacauugcuggcuggauccugggaaauccagagugugaaucacucuccacagcaagcucaugguccuacauuguggaaacaucuaguucaggcaauggaacguguuacccaggagauuucaucgauuaugaggagcuaagagagcaauugagcucagugucaucauuugaaagguuugagauauuccccaagacaaguucauggcccaaucaugacucgaacaaagguguaacggcagcauguccucaugcuggagcaaaaagcuucuacaaaaauuuaauauggcuaguuaaaaaaggaaacucauacccaaagcucagcaaauccuacauuaaugauaaagggaaagaaguccucgugcuauggggcauucaccauccaucuacuagugcugaccaacaaagucucuaucagaaugcagaugcauauguuuuuguggggacaucaagauacagcaagaaguucaagccggaaauagcaauaagacccaaagugagggaucaagaagggagaaugaacuauuacuggacacuaguagagccgggagacaaaauaacauucgaagcaacuggaaaucuagugguaccgagauaugcauucgcaauggaaagaaaugcuggaucugguauuaucauuucagauacaccaguccacgauugcaauacaacuugucagacacccaagggugcuauaaacaccagccucccauuucagaauauacauccgaucacaauuggaaaauguccaaaauauguaaaaagcacaaaauugagacuggccacaggauugaggaaugucccgucuauucaaucuagaggccuauuuggggccauugccgguuucauugaagggggguggacagggaugguagauggaugguacgguuaucaccaucaaaaugagcaggggucaggauaugcagccgaccugaagagcacacagaaugccauugacgagauuacuaacaaaguaaauucuguuauugaaaagaugaauacacaguucacagcaguagguaaagaguucaaccaccuggaaaaaagaauagagaauuuaaauaaaaaaguugaugaugguuuccuggacauuuggacuuacaaugccgaacuguugguucuauuggaaaaugaaagaacuuuggacuaccacgauucaaaugugaagaacuuauaugaaaagguaagaagccaguuaaaaaacaaugccaaggaaauuggaaacggcugcuuugaauuuuaccacaaaugcgauaacacgugcauggaaagugucaaaaaugggacuuaugacuacccaaaauacucagaggaagcaaaauuaaacagagaagaaauagaugggguaaagcuggaaucaacaaggauuuaccagauuuuggcgaucuauucaacugucgccaguucauugguacugguagucucccugggggcaaucaguuucuggaugugcucuaaugggucucuacaguguagaauauguauuuaa

SEQ ID NO: 36081 - RNA, 1701 nt, Artificial Sequence
  derived and/or modified CDS sequence (wt) from hemagglutinin__InfluenzaA__ADB89711
augaaggcaauacuaguaguucugcuauauacauuugcaaccgcaaaugcagacacauuauguauagguuaucaugcgaacaauucaacagacacuguagacacaguacuagaaaagaauguaacaguaacacacucuguuaaccuucuagaagacaagcauaacgggaaacuaugcaaacuaagagggguagccccauugcauuuggguaaauguaacauugcuggcuggauccugggaaauccagagugugaaucacucuccacagcaagcucaugguccuacauuguggaaacaucuaguucaggcaauggaacguguuacccaggagauuucaucgauuaugaggagcuaagagagcaauugagcucagugucaucauuugaaagguuugagauauuccccaagacaaguucauggcccaaucaugacucgaacaaagguguaacggcagcauguccucaugcuggagcaaaaagcuucuacaaaaauuuaauauggcuaguuaaaaaaggaaacucauacccaaagcucagcaaauccuacauuaaugauaaagggaaagaaguccucgugcuauggggcauucaccauccaucuacuagugcugaccaacaaagucucuaucagaaugcagaugcauauguuuuuguggggacaucaagauacagcaagaaguucaagccggaaauagcaauaagacccaaagugagggaucaagaagggagaaugaacuaucacuggacacuaguagagccgggagacaaaauaacauucgaagcaacuggaaaucuagugguaccgagauaugcauucgcaauggaaagaaaugcuggaucugguauuaucauuucagauacaccaguccacgauugcaauacaacuugucagacacccaagggugcuauaaacaccagccucccauuucagaacauacauccgaucacaauuggaaaauguccaaaauauguaaaaagcacaaaauugagacuggccacaggauugaggaaugucccgucuauucaaucuagaggccuauuuggggccauugccgguuucauugaagggggguggacagggaugguagauggaugguacgguuaucaccaucaaaaugagcaggggucaggauaugcagccgaccugaagagcacacagaaugccauugacgagauuacuaacaaaguaaauucuguuauugaaaagaugaauacacaguucacagcaguagguaaagaguucaaccaccuggaaaaaaggauagagaauuuaaauaaaaaaguugaugaugguuuccuggacauuuggacuuacaaugccgaacuguugguucuauuggaaaaugaaagaacuuuggacuaccacgauucaaaugugaagaacuuauaugaaaagguaagaagccaguuaaaaaacaaugccaaggaaauuggaaacggcugcuuugaauuuuaccacaaaugcgauaacacgugcauggaaagugucaaaaaugggacuuaugacuacccaaaauacucagaggaagcaaaauuaaacagagaagaaauagaugggguaaagcuggaaucaacaaggauuuaccagauuuuggcgaucuauucaacugucgccaguucauugguacugguagucucccugggggcaaucaguuucuggaugugcucuaaugggucucuacaguguagaauauguauuuaa

SEQ ID NO: 36082 - RNA, 1701 nt, Artificial Sequence
  derived and/or modified CDS sequence (wt) from hemagglutinin__InfluenzaA__ADB89721
augaagacuaucauugcuuugagcuacauucuaugucugguuuucgcucaaaaacuuccuggaaaugacaacagcacggcaacgcugugccuugggcaccaugcaguaccaaacggaacgauagugaaaacaaucacgaaugaccaaauugaaguuacuaaugcuacugagcugguucagaguuccucaacaggugaaauaugcgacaguccucaucagauccuugauggaaaaaacugcacacuaauagaugcucuauugggagacccucagugugauggcuuccaaaauaagaaaugggaccuuuuuguugaacgcagcaaagccuacagcaacuguuacccuuaugaugugccggauuaugccucccuuaggucacuaguugccucauccggcacgcuggaguuugacaaugaaagcuucaauuggacuggagucacucaaaacggaacaagcucugcuugcauaaggagaucuaaaaacaguuucuuuaguagauugaauugguugacccacuuaaacuucaaauacccagcauugaacgugacuaugccaaacaaugaacaauuugacaaauuguaccuuugggggguucaccacccggguacggacaaagaccaaaucuuccuguaugcucaagcaucaggaagaaucacagucucuaccaaaagaagccaacaaacuguaaucccgaauaucggaucuagacccagaguaaggaauaucccuagcagaauaagcaucuauuggacaauaguaaaaccgggagacauacuuuugauuaacagcacagggaaucuaauugcuccuagggguuacuucaaaauacaaaguggaaaaagcucaauaaugagaucagaugcacccauuggcaaaugcaauucugaaugcaucacuccaaauggaagcauucccaaugacaaaccauuccaaaauguaaacaggaucacauacggggccugucccagauauguuaagcaaaacacucugaaauuggcaacagggaugcgaaauguaccagagaaacaaacuagaggcauauuuggcgcaaucgcggguuucauagaaaaugguugggagggaaugguggaugguugguacgguuucaggcaucaaaauucugagggaagaggacaagcagcagaucucaaaagcacucaagcagcaaucgaucaaaucaaugggaagcugaauagauugaucgggaaaaccaacgagaaauuccaucagauugaaaaagaauucucagaagucgaagggagaauucaggaccuugagaaauauguugaggacacuaaaauagaucucuggucauacaacgcggagcuucuuguugcccuggagaaccaacauacaauugaucuaacugacucagaaaugaacaaacuguuugaaaaaacaaagaagcaacugagggaaaaugcugaggauaugggcaaugguuguuucaaaauauaccacaaaugugacaaugccugcauaggaucaaucagaaauggaacuuaugaccacgauguauacagagaugaagcauuaaacaaccgguuucagaucaagggaguugagcugaagucaggguacaaagauuggauccuauggauuuccuuugccauaucauguuuuuugcuuuguguugcuuuguugggguucaucaugugggccugccaaaaaggcaacauuaggugcaacauuugcauuuga

SEQ ID NO: 36083 - RNA, 1701 nt, Artificial Sequence
  derived and/or modified CDS sequence (wt) from hemagglutinin__InfluenzaA__ADB90360
augaaggcaauacuaguaguucugcuauauacauuugcaaccgcaaaugcagacacauuauguauagguuaucaugcgaacaauucaacagacacuguagacacaguacuagaaaagaauguaacaguaacacacucuguuaaccuucuagaagacaagcauaacgggaaacuaugcaaacuaagagggguagccccauugcauuuggguaaauguaacauugcuggcuggauccugggaaauccagagugugaaucacucuccacagcaagcucaugguccuacauuguggaaacaucuaguucaaacaauggaacguguuacccaggagauuucaucgauuaugaggagcuaagagagcaauugagcucagugucaucauuugaaagguuugagauauuccccaagacaaguucauggcccaaucaugacccgaacaaagguguaacggcagcauguccucaugcuggagcaaaaagcuucuacaaaaauuuaauauggcuaguuaaaaaaggaaauucauacccaaagcucagcaaauccuacauuaaugauaaagggaaagaaguccuagugcuauggggcauucaccauccaucuacuagugcugaccaacaaagucucuaucagaaugcagaugcauauguuuuuguggggacaucaagauacagcaagaaguucaagccggaaauagcaauaagacccaaagugaggggucaagaagggagaaugaacuauuacuggacacuaguagagccgggagacaaaauaacauucgaagcaacuggaaaucuagugguaccgagauaugcauucgcaauggaaagaaaugcuggaucugguauuaucauuucagauacaccaguccacgauugcaauacaacuugucagacacccaagggugcuauaaacaccagccucccauuucagaauauacauccgaucacaauuggaaaauguccaaaauauguaaaaagcacaaaauugagacuggccacaggauugaggaauaucccgucuauucaaucuagaggccuauuuggggccauugccgguuucauugaagggggguggacagggaugguagauggaugguacgguuaucaccaucaaaaugagcaggggucaggauaugcagccgaccugaagagcacacagaaugccauugacgagauuacuaacaaaguaaauucuguuauugaaaagaugaauacacaguucacagcaguagguaaagaguucaaccaccuggaaaaaagaauagagaauuuaaauaaaaagguugaugaugguuuccuggacauuuggacuuacaaugccgaacuguugguucuauuggaaaaugaaagaacuuuggacuaccacgauucaaaugugaagaacuuauaugaaaagguaagaagccaguuaaaaaacaaugccaaggaaauuggaaacggcugcuuugaauuuuaccacaaaugcgauaacacgugcauggaaagugucaaaaaugggacuuaugacuacccaaaauacucagaggaagcaaaauuaaacagagaagaaauagaugggguaaagcuggaaucaacaaggauuuaccagauuuuggcgaucuauucaacugucgccaguucauugguacugguagucucccugggggcaaucaguuucuggaugugcucuaaugggucucuacaguguagaauauguauuuaa

SEQ ID NO: 36084 - RNA, 1701 nt, Artificial Sequence
  derived and/or modified CDS sequence (wt) from hemagglutinin__InfluenzaA__ADB90370
augaaggcaauacuaguaguucugcuauauacauuugcaaccgcaaaugcagacacauuauguauagguuaucaugcgaacaauucaacagacacuguagacacaguacuagaaaagaauguaacaguaacacacucuguuaaccuucuagaagacaagcauaacgggaaacuaugcaaacuaagagggguagccccauugcauuuggguaaauguaacauugcuggcuggauccugggaaauccagagugugaaucacucuccacagcaagcucaugguccuacauuguggaaacaucuaguucagacaauggaacguguuacccaggagauuucaucgauuaugaggagcuaagagagcaauugagcucagugucaucauuugaaagguuugagauauuccccaagacaaguucauggcccaaucaugacccgaacaaagguguaacggcagcauguccucaugcuggagcaaaaagcuucuacaaaaauuuaauauggcuaguuaaaaaaggaaauucauacccaaagcucagcaaauccuacauuaaugauaaagggaaagaaguccucgugcuauggggcauucaccauccaucuacuagugcugaccaacaaagucucuaucagaaugcagaugcauauguuuuuguggggacaucaagauacagcaagaaguucaagccggaaauagcaauaagacccaaagugaggggucaagaagggagaaugaacuauuacuggacacuaguagagccgggagacaaaauaacauucgaagcaacuggaaaucuagugguaccgagauaugcauucgcaauggaaagaaaugcuggaucugguauuaucauuucagauacaccaguccacgauugcaauacaacuugucagacacccaagggugcuauaaacaccagccucccauuucagaauauacauccgaucacaauuggaaaauguccaaaauauguaaaaagcacaaaauugagacuggccacaggauugaggaaugucccgucuauucaaucuagaggccuauuuggggccauugccgguuucauugaagggggguggacagggaugguagauggaugguacgguuaucaccaucaaaaugagcaggggucaggauaugcagccgaccugaagagcacacagaaugccauugacgagauuacuaacaaaguaaauucuguuauugaaaagaugaauacacaguucacagcaguagguaaagaguucaaccaccuggaaaaaagaauagagaauuuaaauaaaaaaguugaugaugguuuccuggacauuuggacuuacaaugccgaacuguugguucuauuggaaaaugaaagaacuuuggacuaccacgauucaaaugugaagaacuuauaugaaaagguaagaagccaguuaaaaaacaaugccaaggaaauuggaaacggcugcuuugaauuuuaccacaaaugcgauaacacgugcauggaaagugucaaaaaugggacuuaugacuacccaaaauacucagaggaagcaaaauuaaacagagaagaaauagaugggguaaagcuggaaucaacaaggauuuaccagauuuuggcgaucuauucaacugucgccaguucauugguacugguagucucccugggggcaaucaguuucuggaugugcucuaaugggucucuacaguguagaauauguauuuaa

SEQ ID NO: 36085 - RNA, 1701 nt, Artificial Sequence; identical to SEQ ID NO: 35602
  derived and/or modified CDS sequence (wt) from hemagglutinin__InfluenzaA__ADB90414

SEQ ID NO: 36086 - RNA, 1701 nt, Artificial Sequence; identical to SEQ ID NO: 35128
  derived and/or modified CDS sequence (wt) from hemagglutinin__InfluenzaA__ADC32409

SEQ ID NO: 36087 - RNA, 1701 nt, Artificial Sequence
  derived and/or modified CDS sequence (wt) from hemagglutinin__InfluenzaA__ADC32410
augaaggcaauacuaguaguucugcuauauacauuugcaaccgcaaaugcagacacauuauguauagguuaucaugcgaacaauucaacagacacuguagacacaguacuagaaaagaauguaacaguaacacacucuguuaaccuucuagaagacaagcauaacgggaaacuaugcaaacuaagagggguagccccauugcauuuggguaaauguaacauugcuggcuggauccugggaaauccagagugugaaucacucuccacagcaagcucaugguccuacauuguggaaacaucuaguucagacaauggaacguguuacccaggagauuucaucgauuaugaggagcuaagagagcaauugagcucagugucaucauuugaaagguuugagauauuccccaagacaaguucauggcccaaucaugacucgaacaaagguguaacggcagcauguccucaugcuggagcaaaaagcuucuacaaaaauuuaauauggcuaguuaaaaaaggaaauucauacccaaagcucagcaaauccuacauuaaugauaaagggaaagaaguccucgugcuauggggcauucaccauccaucuacuagugcugaccaacaaagucucuaucagaaugcagaugcauauguuuuuguggggacaucaagauacagcaagaaguucaagccggaaauagcaauaagacccaaagugagggaucaagaagggagaaugaacuauuacuggacacuaguagagccgggagacaaaauaacauucgaagcaacuggaaaucuagugguaccgagauaugcauucgcaauggaaagaaaugcuggaucugguauuaucauuucagauacaccaguccacgauugcaauacaacuugucagacacccaagggugcuauaaacaccagccucccauuucagaauauacauccgaucacaauuggaaaauguccaaaguauguaaaaagcacaaaauugagacuggccacaggauugaggaaugucccgucuauucaaucuagaggccuauuuggggccauugccgguuucauugaagggggguggacagggaugguagauggaugguacgguuaucaccaucaaaaugagcaggggucaggauaugcagccgaccugaagagcacacagaaugccauugacgagauuacuaacaaaguaaauucuguuauugaaaagaugaauacacaguucacagcaguagguaaagaguucaaccaccuggaaaaaagaauagagaauuuaaauaaaaaaguugaugaugguuuccuggacauuuggacuuacaaugccgaacuguugguucuauuggaaaaugaaaaaacuuuggacuaccacgauucaaaugugaagaacuuauaugaaaagguaagaagccaguuaaaaaacaaugccaaggaaauuggaaacggcugcuuugaauuuuaccacaaaugcgauaacacgugcauggaaagugucaaaaaugggacuuaugacuacccaaaauacucagaggaagcaaaauuaaacagagaagaaauagaugggguaaagcuggaaucaacaaggauuuaccagauuuuggcgaucuauucaacugucgccaguucauugguacugguagucucccugggggcaaucaguuucuggaugugcucuaaugggucucuacaguguagaauauguauuuaa

SEQ ID NO: 36088 - RNA, 1701 nt, Artificial Sequence
  derived and/or modified CDS sequence (wt) from hemagglutinin__InfluenzaA__ADC32411
augaaggcaauacuaguaguucugcuauauacauuugcaaccgcaaaugcagacacauuauguauagguuaucaugcgaacaauucaacagacacuguagacacaguacuagaaaagaauguaacaguaacacacucuguuaaccuucuagaagacaagcauaacgggaaacuaugcaaacuaagagggguagccccauugcauuuggguaaauguaacauugcuggcuggauccugggaaauccagagugugaaucacucuccacagcaagcucaugguccuacauuguggaaacaucuaguucagacaauggaacguguuacccaggagauuucaucgauuaugaggagcuaagagagcaauugagcucagugucaucauuugaaagguuugagauauuccccaagacaaguucauggcccaaucaugacucgaacaaagguguaacggcagcauguccucaugcuggagcaaaaagcuucuacaaaaauuuaauauggcuaguuaaaaaaggaaauucauacccaaagcucagcaaauccuacauuaaugauaaagggaaagaaguccucgugcuauggggcauucaccauccaucuacuagugcugaccaacaaagucucuaucagaaugcagaugcauauguuuuuguggggacaucaagauacagcaagaaguucaagccggaaauagcaauaagacccaaagugagggaacaagaagggagaaugaacuauuacuggacacuaguagagccgggagacaaaauaacauucgaagcaacuggaaaucuagugguaccgagauaugcauucgcaauggaaagaaaugcuggaucugguauuaucauuucagauacaccaguccacgauugcaauacaacuugucagacacccaagggugcuauaaacaccagccucccauuucagaauauacauucgaucacaauuggaaaauguccaaaauauguaaaaagcacaaaauugagacuggccacaggauugaggaaugucccgucuauucaaucuagaggccuauuuggggccauugccgguuucauugaagggggguggacagggaugguagauggaugguacgguuaucaccaucaaaaugagcaggggucaggauaugcagccgaccugaagagcacacagaaugccauugacgagauuacuaacaaaguaaauucuguuauugaaaagaugaauacacaguucacagcaguagguaaagaguucaaccaccuggcaaaaagaauagagaauuuaaauaaaaaaguugaugaugguuuccuggacauuuggacuuacaaugccgaacuguugguucuauuggaaaaugaaagaacuuuggacuaccacgauucaaaugugaagaacuuauaugaaaagguaagaagccaguuaaaaaacaaugccaaggaaauuggaaacggcugcuuugaauuuuaccacaaaugcgauaacacgugcauggaaagugucaaaaacgggacuuaugacuacccaaaauacucagaggaagcaaaauuaaacagagaagaaauagaugggguaaagcuggaaucaacaaggauuuaccagauuuuggcgaucuauucaacugucgccaguucauugguacugguagucucccugggggcaaucaguuucuggaugugcucuaaugggucucuacaguguagaauauguauuuaa

SEQ ID NO: 36089 - RNA, 1701 nt, Artificial Sequence; identical to SEQ ID NO: 35772
  derived and/or modified CDS sequence (wt) from hemagglutinin__InfluenzaA__ADC32412

SEQ ID NO: 36090 - RNA, 1701 nt, Artificial Sequence
  derived and/or modified CDS sequence (wt) from hemagglutinin__InfluenzaA__ADC32413
augaaggcaauacuaguaguucugcuauauacauuugcaaccgcaaaugcagacacauuauguauagguuaucaugcgaacaauucaacagacacuguagacacaguacuagaaaagaauguaacaguaacacacucuguuaaccuucuagaagacaagcauaacgggaaacuaugcaaacuaagagggguagccccauugcauuuggguaaauguaacauugcuggcuggauccuggggaauccagagugugaaucacucuccacagcaagcucaugguccuacauuguggaaacaucuaguucagacaauggaacguguuacccaggagauuucaucgauuaugaggagcuaagagagcaauugagcucagugucaucauuugaaagguuugagauauuccccaagacaaguucauggcccaaucaugacucgaacaaagguguaacggcagcauguccucaugcuggagcaaaaagcuucuacaaaaauuuaauauggcuaguuaaaaaaggaaauucauacccaaagcucagcaaauccuacauuaaugauaaagggaaagaaguccucgugcuauggggcauucaccauccaucuacuagugcugaccaacaaagucucuaucagaaugcagaugcauauguuuuuguggggacaucaagauacagcaagaaguucaagccggaaauagcaauaagacccaaagugagggaucaagaagggagaaugaacuauuacuggacacuaguagagccgggagacaaaauaacauucgaagcaacuggaaaucuagugguaccgagauaugcauucgcaauggaaagaaaugcuggaucugguauuaucauuucagauacaccaguccacgauugcaauacaacuugucagacacccaagggugcuauaaacaccagccucccauuucagaauauacauccgaucacaauuggaaaauguccaaaauauguaaaaagcacaaaauugagacuggccacaggauugaggaaugucccgucuauucaaucuagaggccuauuuggggccauugccgguuucauugaagggggguggacagggaugguagauggaugguacgguuaucaccaucaaaaugagcaggggucaggauaugcagccgaccugaagagcacacagaaugccauugacgagauuacuaacaaaguaaauucuguuauugaaaagaugaauacacaguucacagcaguagguaaagaguucaaccaccuggaaaaaagaauagagaauuuaaauaaaaaaguugaugaugguuuccuggacauuuggacuuacaaugccgaacuguugguucuauuggaaaaugaaagaacuuuggacuaccacgauucaaaugugaagaacuuauaugaaaagguaagaagccaguuaaaaaacaaugccaaggaaauuggaaacggcugcuuugaauuuuaccacaaaugcgauaacacgugcauggaaagugucaaaaaugggacuuaugacuacccaaaauacucagaggaagcaaaauuaaacagagaagaaauagaugggguaaagcuggaaucaacaaggauuuaccagauuuuggcgaucuauucaacugucgccaguucauugguacugguagucucccugggggcaaucaguuucuggaugugcucuaaugggucucuacaguguagaauauguauuuaa

SEQ ID NO: 36091 - RNA, 1701 nt, Artificial Sequence; identical to SEQ ID NO: 35128
  derived and/or modified CDS sequence (wt) from hemagglutinin__InfluenzaA__ADC32414

SEQ ID NO: 36092 - RNA, 1701 nt, Artificial Sequence; identical to SEQ ID NO: 35128
  derived and/or modified CDS sequence (wt) from hemagglutinin__InfluenzaA__ADC32415

SEQ ID NO: 36093 - RNA, 1701 nt, Artificial Sequence; identical to SEQ ID NO: 35128
  derived and/or modified CDS sequence (wt) from hemagglutinin__InfluenzaA__ADC32416

SEQ ID NO: 36094 - RNA, 1701 nt, Artificial Sequence
  derived and/or modified CDS sequence (wt) from hemagglutinin__InfluenzaA__ADC32417
augaaggcaauacuaguaguucugcuauauacauuugcaaccgcaaaugcagacacauuauguauagguuaucaugcgaacaauucaacagacacuguagacacaguacuagaaaagaauguaacaguaacacacucuguuaaccuucuagaauacaagcauaacgggaaacuaugcaaacuaagagggguagccccauugcauuuggguaaauguaacauugcuggcuggauccugggaaauccagagugugaaucacucuccacagcaagcucaugguccuacauuguggaaacaucuaguucagacaauggaacguguuacccaggagauuucaucgauuaugaggagcuaagagagcaauugagcucagugucaucauuugaaagguuugagauauuccccaagacaaguucauggcccaaucaugacucgaacaaagguguaacggcagcauguccucaugcuggagcaaaaagcuucuacaaaaauuuaauauggcuaguuaaaaaaggaaauucauacccaaagcucagcaaauccuacauuaaugauaaagggaaagaaguccucgugcuauggggcauucaccauccaucuacuagugcugaccaacaaagucucuaucagaaugcagaugcauauguuuuuguggggacaucaagauacagcaagaaguucaagccggaaauagcaauaagacccaaagugagggaacaagaagggagaaugaacuauuacuggacacuaguagagccgggagacaaaauaacauucgaagcaacuggaaaucuagugguaccgagauaugcauucgcaauggaaagaaaugcuggaucugguauuaucauuucagauacaccaguccacgauugcaauacaacuugucagacacccaagggugcuauaaacaccagccucccauuucagaauauacauccgaucacaauuggaaaauguccaaaauauguaaaaagcacaaaauugagacuggccacaggauugaggaaugucccgucuauucaaucuagaggccuauuuggggccauugccgguuucauugaagggggguggacagggaugguagauggaugguacgguuaucaccaucaaaaugagcaggggucaggauaugcagccgaccugaagagcacacagaaugccauugacgagauuacuaacaaaguaaauucuguuauugaaaagaugaauacacaguucacagcaguagguaaagaguucaaccaccuggaaaaaagaauagagaauuuaaauaaaaaaguugaugaugguuuccuggacauuuggacuuacaaugccgaacuguugguucuauuggaaaaugaaagaacuuuggacuaccacgauucaaaugugaagaacuuauaugaaaagguaagaagccaguuaaaaaacaaugccaaggaaauuggaaacggcugcuuugaauuuuaccacaaaugcaauaacacgugcauggaaagugucaaaaaugggacuuaugacuacccaaaauacucagaggaagcaaaauuaaacagagaagaaauagaugggguaaagcuggaaucaacaaggauuuaccagauuuuggcgaucuauucaacugucgccaguucauugguacugguagucucccugggggcaaucaguuucuggaugugcucuaaugggucucuacaguguagaauauguauuuaa

SEQ ID NO: 36095 - RNA, 1701 nt, Artificial Sequence; identical to SEQ ID NO: 35128
  derived and/or modified CDS sequence (wt) from hemagglutinin__InfluenzaA__ADC32418

SEQ ID NO: 36096 - RNA, 1701 nt, Artificial Sequence
  derived and/or modified CDS sequence (wt) from hemagglutinin__InfluenzaA__ADC32419
augaaggcaauacuaguaguucugcuauauacauuugcaaccgcaaaugcagacacauuauguauagguuaucaugcgaacaauucaacagacacuguagacacaguacuagaaaagaauguaacaguaacacacucuguuaaccuucuagaagacaagcauaacgggaaacuaugcaaacuaagagggguagccccauugcauuuggguaaauguaacauugcuggcuggauccugggaaauccagagugugaaucacucuccacagcaagcucaugguccuacauuguggaaacaucuaguucagacaauggaacguguuacccaggagauuucaucgauuaugaggagcuaagagagcaauugagcucagugucaucauuugaaagguuugagauauuccccaagacaaguucauggcccaaucaugacucgaacaaagguguaacggcagcauguccucaugcuggagcaaaaagcuucuacaaaaauuuaauauggcuaguuaaaaaaggaaauucauacccaaagcucagcaaauccuacauuaaugauaaagggaaagaaguccucgugcuauggggcauucaccauccaucuacuagugcugaccaacaaagucucuaucagaaugcagaugcauauguuuuuguggggacaucaagauacagcaagaaguucaagccggaaauagcaauaagacccaaagugagggaacaagaagggagaaugaacuauuacuggacacuaguagagccgggagacaaaauaacauucgaagcaacuggaaaucuagugguaccgagauaugcauucgcaauggaaagaaaugcuggaucugguauuaucauuucagauacaccaguccacgauugcaauacaacuugucagacacccaagggugcuauaaacaccagccucccauuucagaauauacauucgaucacaauuggaaaauguccaaaauauguaaaaagcacaaaauugagacuggccacaggauugaggaaugucccgucuauucaaucuagaggccuauuuggggccauugccgguuucauugaagggggguggacagggaugguagauggaugguucgguuaucaccaucaaaaugaucaggggucagcauaugcagccgaccugaagagcacacagaaugccauugacgagauuacuaacaaaguaaauucuguuauugaaaagaugaauacacaguucacagcaguagguaaagaguucaaccaccuggaaaaaagaauagagaauuuaaauaaaaaaguugaugaugguuuccuggacauuuggacuuacaaugccgaacuguugguucuauuggaaaaugaaagaacuuuggacuaccacgauucaaaugugaagaacuuauaugaaaagguaagaagccaguuaaaaaacaaugccaaggaaauuggaaacggcugcuuugaauuuuaccacaaaugcgauaacacgugcauggaaagugucaaaaaugggacuuaugacuacccaaaauacucagaggaagcaaaauuaaacagagaagaaauagaugggguaaagcuggaaucaacaaggauuuaccagauuuuggcgaucuauucaacugucgccaguucauugguacugguagucucccugggggcaaucaguuucuggaugugcucuaaugggucucuacaguguagaauauguauuuaa

SEQ ID NO: 36097 - RNA, 1701 nt, Artificial Sequence
  derived and/or modified CDS sequence (wt) from hemagglutinin__InfluenzaA__ADC32420
augaaggcaauacuaguaguucugcuauauacauuugcaaccgcaaaugcagacacauuauguauagguuaucaugcgaacaauucaacagacacuguagacacaguacuagaaaagaauguaacaguaacacacucuguuaaccuucuagaagacaagcauaacgggaaacuaugcaaacuaagagggguagccccauugcauuuggguaaauguaacauugcuggcuggauccugggaaauccagagugugaaucacucuccacagcaagcucaugguccuacauuguagaaacaucuaguucagacaauggaacguguuacccaggagauuucaucgauuaugaggagcuaagagagcaauugagcucagugucaucauuugaaagguuugagauauuccccaagacaaguucauggcccaaucaugacucgaacaaagguguaacggcagcauguccucaugcuggagcaaaaagcuucuacaaaaauuuaauauggcuaguuaaaaaaggaaauucauacccaaagcucagcaaauccuacauuaaugauaaagggaaagaaguccucgugcuauggggcauucaccauccaucuacuagugcugaccaacaaagucucuaucagaaugcagaugcauauguuuuuguggggacaucaagauacagcaagaaguucaagccggaaauagcaauaagacccaaagugagggaacaagaagggagaaugaacuauuacuggacacuaguagagccgggagacaaaauaacauucgaagcaacuggaaaucuagugguaccgagauaugcauucgcaauggaaagaaaugcuggaucugguauuaucauuucagauacaccaguccacgauugcaauacaacuugucagacacccaagggugcuauaaacaccagccucccauuucagaauauacauucgaucacaauuggaaaauguccaaaauauguaaaaagcacaaaauugagacuggccacaggauugaggaaugucccgucuauucaaucuagaggccuauuuggggccauugccgguuucauugaagggggguggacagggaugguagauggaugguacgguuaucaccaucaaaaugagcaggggucaggauaugcagccgaccugaagagcacacagaaugccauugacgagauuacuaacaaaguaaauucuguuauugaaaagaugaauacacaguucacagcaguagguaaagaguucaaccaccuggaaaaaagaauagagaauuuaaauaaaaaaguugaugaugguuuccuggacauuuggacuuacaaugccgaacuguugguucuauuggaaaacgaaagaacuuuggacuaccacgauucaaaugugaagaacuuauaugaaaagguaagaagccaguuaaaaaacaaugccaaggaaauuggaaacggcugcuuugaauuuuaccacaaaugcgauaacacgugcauggaaagugucaaaaaugggacuuaugacuacccaaaauacucagaggaagcaaaauuaaacagagaagaaauagaugggguaaagcuggaaucaacaaggauuuaccagauuuuggcgaucuauucaacugucgccaguucauugguacugguagucucccugggggcaaucaguuucuggaugugcucuaaugggucucuacaguguagaauauguauuuaa

SEQ ID NO: 36098 - RNA, 1701 nt, Artificial Sequence; identical to SEQ ID NO: 35128
  derived and/or modified CDS sequence (wt) from hemagglutinin__InfluenzaA__ADC32421

SEQ ID NO: 36099 - RNA, 1701 nt, Artificial Sequence
  derived and/or modified CDS sequence (wt) from hemagglutinin__InfluenzaA__ADC32422
augaaggcaauacuaguaguucugcuauauacauuugcaaccgcaaaugcagacacauuauguauagguuaucaugcgaacaauucaacagacacuguagacacaguacuagaaaagaauguaacaguaacacacucuguuaaccuucuagaagacaagcauaacgggaaacuaugcaaacuaagagggguagccccauugcauuuggguaaauguaacauugcuggcuggauccugggaaauccagagugugaaucacucuccacagcaagcucaugguccuacauuguggaaacaucuaguucagacaauggaacguguuacccaggagauuucaucgauuaugaggagcuaagagagcaauugagcucagugucaucauuugaaagguuugagauauuccccaagacaaguucauggcccaaucaugacucgaacaaagguguaacggcagcauguccucaugcuggagcaaaaagcuucuacaaaaauuuaauauggcuaguuaaaaaaggaaauucauacccaaagcucagcaaauccuacauuaaugauaaagggaaagaaguccucgugcuauggggcauucaccauccaucuacuagugcugaccaacaaagucucuaucagaaugcagaugcauauguuuuuguggggacaucaagauacagcaagaaguucaagccggaaauagcaauaagacccaaagugagggaacaagaagggagaaugaacuauuacuggacacuaguagagccgggagacaaaauaacauucgaagcaacuggaaaucuaaugguaccgagauaugcauucgcaauggaaagaaaugcuggaucugguauuaucauuucagauacaccaguccacgauugcaauacaacuugucagacacccaagggugcuauaaacaccagccucccauuucagaauauacauucgaucacaauuggaaaauguccaaaauauguaaaaagcacaaaauugagacuggccacaggauugaggaaugucccgucuauucaaucuagaggccuauuuggggccauugccgguuucauugaagggggguggacagggaugguagauggaugguacgguuaucaccaucaaaaugagcaggggucaggauaugcagccgaccugaagagcacacagaaugccauugacgagauuacuaacaaaguaaauucuguuauugaaaagaugaauacacaguucacagcaguagguaaagaguucaaccaccuggaaaaaagaauagagaauuuaaauaaaaaaguugaugaugguuuccuggacauuuggacuuacaaugccgaacuguugguucuauuggaaaaugaaagaacuuuggacuaccacgauucaaaugugaagaacuuauaugaaaagguaagaagccaguuaaaaaacaaugccaaggaaauuggaaacggcugcuuugaauuuuaccacaaaugcgauaacacgugcauggaaagugucaaaaaugggacuuaugacuacccaaaauacucagaggaagcaaaauuaaacagagaagaaauagaugggguaaagcuggaaucaacaaggauuuaccagauuuuggcgaucuauucaacugucgccaguucauugguacugguagucucccugggggcaaucaguuucuggaugugcucuaaugggucucuacaguguagaauauguauuuaa

SEQ ID NO: 36100 - RNA, 1701 nt, Artificial Sequence
  derived and/or modified CDS sequence (wt) from hemagglutinin__InfluenzaA__ADC32423
augaaggcaauacuaguaguucugcuauauacauuugcaaccgcaaaugcagacacauuauguauagguuaucaugcgaacaauucaacagacacuguagacacaguacuagaaaagaauguaacaguaacacacucuguuaaccuucuagaagacaagcauaacgggaaacuaugcaaacuaagagggguagccccauugcauuuggguaaauguaacauugcuggcuggauccugggaaauccagagugugaaucacucuccacagcaagcucaugguccuacauuguggaaacaucuaguucagacaauggaacguguuacccaggagauuucaucgauuaugaggagcuaagagagcaauugagcucagugucaucauuugaaagguuugagauauuccccaagacaaguucauggcccaaucaugacucgaacaaagguguaacggcagcauguccucaugcuggagcaaaaagcuucuacaaaaauuuaauauggcuaguuaaaaaaggaaauucauacccaaagcucagcaaauccuacauuaaugauaaagggaaagaaguccucgugcuauggggcauucaccauccaucuacuagugcugaccaacaaagucucuaucagaaugcagaugcauauguuuuuguggggacaucaagauacagcaagaaguucaagccggaaauagcaauaagacccaaagugagggaacaagaagggagaaugaacuauuacuggacacuaguagagccgggagacaaaauaacauucgaagcaacuggaaaucuagugguaccgagauaugcauucgcaauggaaagaaaugcuggaucugguauuaucauuucagauacaccaguccacgauugcaauacaacuugucagacacccaagggugcuauaaacaccagccucccauuucagaauauacauucgaucacaauuggaaaauguccaaaauauguaaaaagcacaaaauugagacuggccacaggauugaggaaugucccgucuauucaaucuagaggccuauuuggggccauugccgguuucauugaagggggguggacagggaugguagauggaugguacgguuaucaccaucaaaaugagcaggggucaggauaugcagccgaccugaagagcacacagaaugccauugacgagauuacuaacaaaguaaauucuguuauugaaaagaugaauacacaguucacagcaguagguaaagaguucaaccaccuggaaaaaagaauagagaauuuaaauaaaaaaguuaaugaugguuuccuggacauuuggacuuacaaugccgaacuguugguucuauuggaaaaugaaagaacuuuggacuaccacgauucaaaugugaagaacuuauaugaaaagguaagaagccaguuaaaaaacaaugccaaggaaauuggaaacggcugcuuugaauuuuaccacaaaugcgauaacacgugcauggaaagugucaaaaaugggacuuaugacuacccaaaauacucagaggaagcaaaauuaaacagagaagaaauagaugggguaaagcuggaaucaacaaggauuuaccagauuuuggcgaucuauucaacugucgccaguucauugguacugguagucucccugggggcaaucaguuucuggaugugcucuaaugggucucuacaguguagaauauguauuuag

SEQ ID NO: 36101 - RNA, 1701 nt, Artificial Sequence
  derived and/or modified CDS sequence (wt) from hemagglutinin__InfluenzaA__ADC32434
augaaggcaauacuaguaguucugcuauauacauuugcaaccgcaaaugcagacacauuauguauagguuaucaugcgaacaauucaacagacacuguagacacaguacuagaaaagaauguaacaguaacacacucuguuaaccuucuagaagacaagcauaacgggaaacuaugcaaacuaagagggguagccccauugcauuuggguaaauguaacauugcuggcuggauccugggaaauccagagugugaaucacucuccacagcaagcucaugguccuacauuguggaaacaucuaguucagacaauggaacguguuacccaggagauuucaucgauuaugaggagcuaagagagcaauugagcucagugucaucauuugaaagguuugagauauuccccaagacaaguucauggcccaaucaugacucgaacaaagguguaacggcagcauguccucaugcuggagcaaaaagcuucuacaaaaauuuaauauggcuaguuaaaaaaggaaauucauacccaaagcucagcaaauccuacauuaaugauaaggggaaagaaguccucgugcuauggggaauucaccauccaucuacuagugcugaccaacaaagucucuaucagaaugcagaugcauauguuuuuguggggacaucaagauacagcaagaaguucaagccggaaauagcaauaagacccaaagugagggaucaagaagggagaaugaacuauuacuggacacuaguagagccaggagacaaaauaacauucgaagcaacuggaaaucuagugguaccgagauaugcauucgcaauggaaagaaaugcuggaucugguauuaucauuucagauacaccaguccacgauugcaauacaacuugucagacacccaagggugcuauaaacaccagccucccauuucagaauauacauccgaucacaauuggaaaauguccaaaauauguaaaaagcacaaaauugagacuggccacaggauugaggaaugucccgucuauucaaucuagaggccuauuuggggccauugccgguuucauugaagggggguggacagggaugguagauggaugguacgguuaucaucaucaaaaugagcaggggucaggauaugcagccgaccugaagagcacacagcaugccauugacgagauuacuaacaaaguaaauucuguuauugaaaagaugaauacacaguucacagcaguagguaaagaguucaaccaccuggaaaaaagaauagagaauuuaaauaaaaaaguugaugaugguuuccuggacauuuggacuuacaaugccgaacuguugguucuauuggaaaaugaaagaacuuuggacuaccacgauucaaaugugaagaacuuauaugaaaagguaagaagccaguuaaaaaacaaugccaaggaaauuggaaacggcugcuuugaauuuuaccacaaaugcgauaacacgugcauggaaagugucaaaaaugggacuuaugacuacccaaaauacucagaggaagcaaaauuaaacagagaagaaauagaugggguaaagcuggaaucaacaaggauuuaccagauuuuggcgaucuauucaacugucgccaguucauugguacugguagucucccugggggcaaucaguuucuggaugugcucuaaugggucucuacaguguagaauauguauuuaa

SEQ ID NO: 36102 - RNA, 1701 nt, Artificial Sequence
  derived and/or modified CDS sequence (wt) from hemagglutinin__InfluenzaA__ADC32435
augaaggcaauacuaguaguucugcuauauacauuugcaaccgcaaaugcagacacauuauguauagguuaucaugcgaacaauucaacagacacuguagacacaguacuagaaaagaauguaacaguaacacacucuguuaaccuucuagaagacaagcauaacgggaaacuaugcaaacuaagagggguagccccauugcauuuggguaaauguaacauugcuggcuggauccugggaaauccagagugugaaucacucuccacagcaagcucaugguccuacauuguggaaacaucuaguucagacaauggaacguguuacccaggagauuucaucgauuaugaggagcuaagagagcaauugagcucagugucaucauuugaaagguuugagauauuccccaagacaaguucauggcccaaucaugacucgaacaaagguguaacggcagcauguccucaugcuggagcaaaaagcuucuacaaaaauuuaauauggcuaguuaaaaaaggaaauucauacccaaagcucagcaaauccuacauuaaugauaaagggaaagaaguccucgugcuauggggcauucaccauccaucuacuagugcugaccaacaaagucucuaucagaaugcagaugcauauguuuuuguggggacaucaagauacagcaagaaguucaagccggaaauagcaauaagacccaaagugagggaucaagaagggagaaugaacuauuacuggacacuaguagagccgggagacaaaauaacauucgaagcaacuggaaaucuagugguaccgagauaugcauucgcaauggaaagaaaugcuggaucugguauuaucauuucagauacaccaguccacgauugcaauacaacuugucagacacccaagggugcuauaaacaccagccucccauuucagaauauacauccgaucacaauuggaaaauguccaaaauauguaaaaagcacaaaauugagacuggccacaggauugaggaaugucccgucuauucaaucuagaggccuauuuggggccauugccgguuucauugaagggggguggacagggaugguagauggaugguacgguuaucaccaucaaaaugagcaggggucaggauaugcagccgaccugaagagcacacagcaugccauugacgagauuacuaacaaaguaaauucuguuauugaaaagaugaauacacaguucacagcaguagguaaagaguucaaccaccuggaaaaaagaauagagaauuuaaauaaaaaaguugaugaugguuuccuggacauuuggacuuacaaugccgaacuguugguucuauuggaaaaugaaagaacuuuggacuaccacgauucaaaugugaagaacuuauaugaaaagguaagaagccaguuaaaaaacaaugccaaggaaauuggaaacggcugcuuugaauuuuaccacaaaugcgauaacacgugcauggaaagugucaaaaaugggacuuaugacuacccaaaauacucagaggaagcaaaauuaaacagagaagaaauagaugggguaaagcuggaaucaacaaggauuuaccagauuuuggcgaucuauucaacugucgccaguucauugguacugguagucucccugggggcaaucaguuucuggaugugcucuaaugggucucuacaguguagaauauguauuuaa

SEQ ID NO: 36103 - RNA, 1701 nt, Artificial Sequence
  derived and/or modified CDS sequence (wt) from hemagglutinin__InfluenzaA__ADC34940
augaagacuaucauugcuuugagcuacauucuaugucugguuuucgcucaaaaacuucccggaaaugacaacagcacggcaacgcugugccuugggcaccaugcaguaccaaacggaacaauagugaaaacaaucacgaaugaccaaauugaaguuacuaaugcuacugagcugguucagaguuccucaacagguggaauaugcgacaguccucaucagauccuugauggagaaaacugcacacuaauagaugcucuauugggagacccucagugugauggcuuccaaaauaagaaaugggaccuuuuuguugaacgcagcaaagccuacagcaacuguuacccuuaugaugugccggauuaugccucccugaggucacuaguugccucaucuggcacacuggaguuuaacaaugaaagauucaauuggacgggagucacucaaaauggaacaagcucugcuugcaaaaggggaucugauaacaguuucuuuaguagauugaauugguugacccacuuaaaauucaaauacccagcauugaacgugacuaugccaaacaaugaaaaauuugacaaauuguacauuugggggguucaccacccggguacggacaaugaccaaaucuuccugcaugcucaagcaucaggaagaaucacagucucuaccaaaagaagccaacaaacuguaaucccgaauaucggaucuagacccagaguaaggaauauccccagcagaauaagcaucuauuggacaauaguaaaaccgggagacauacuuuugauuaacagcacagggaaucuaauugcuccuagggguuacuucaaaauacgaagugggaaaagcucaauaaugaaaucagaugcacccauuggcaaaugcaauucugaaugcaucacuccaaauggaagcauucccaaugacaaaccauuucaaaauguaaacaggaucacauauggggccugucccagauauguuaagcagaacacccugaaauuggcaacagggaugcgaaauguaccagagaaacaaacuagaggcauauuuggcgcaaucgcggguuucauagaaaaugguugggagggaaugguggaugguugguacgguuucaggcaucaaaauucugagggaauaggacaagcagcagaucucaaaagcacucaagcagcaaucaaucaaaucaaugggaagcugaauaggcugaucgggaaaaccaacgagaaauuccaucagauugaaaaagaauucucagaaguagaagggagaauucaggaccucgagaaauauguugaggacacuaaaauagaucucuggucauacaacgcggagcuccuuguugcccuggagaaccaacauacaauugaucuaacugacucagaaaugaacaaacuguuugaaagaacaaagaagcaacugagggaaaaugcugaggauaugggcaaugguuguuucaaaauauaccacaaaugugacaaugccugcauaggaucaaucagaaauggaacuuaugaccaugauguauacagagaugaagcauuaaacaaccgguuccagaucaaaggcguugagcugaagucaggcuacaaagauuggauccuauggauuuccuuugccauaucauguuuuuugcuuuguguugcuuuguugggguucaucaugugggccugccaaaaaggcaacauuaggugcaacauuugcauuuaa

SEQ ID NO: 36104 - RNA, 1701 nt, Artificial Sequence; identical to SEQ ID NO: 36016
  derived and/or modified CDS sequence (wt) from hemagglutinin__InfluenzaA__ADC38987

SEQ ID NO: 36105 - RNA, 1701 nt, Artificial Sequence
  derived and/or modified CDS sequence (wt) from hemagglutinin__InfluenzaA__ADC38997
augaaggcaauacuaguaguucugcuauauacauuugcaaccgcaaaugcagacacauuauguauagguuaucaugcgaacaauucaacagacacuguagacacaguacuagaaaagaauguaacaguaacacacucuguuaaccuucuagaagacaagcauaacgggaaacuaugcaaacuaagagggguagccccauugcauuuggguaaauguaacauugcuggcuggauccugggaaauccagagugugaaucacucuccacagcaagcucaugguccuacauuguggaaacaucuaguucagacaauggaacguguuacccaggagauuucaucgauuaugaggagcuaagagagcaauugagcucagugucaucauuugaaagguuugagauauuccccaagacaaguucauggcccaaucaugacucaaacaaagguguaacggcagcauguccucaugcuggagcaaaaagcuucuacaaaaauuuaauauggcuaguuaaaaaaggaaauucauacccaaagcucagcaaauccuacauuaaugauaaagggaaagacguccucgugcuauggggcauucaccauccaucuacuagugcugaccaacaaagucucuaucagaaugcagaugcauauguuuuuguggggacaucaagauacagcaagaaguucaagccggaaauagcaauaagacccaaagugagggaucaagaagggagaaugaacuauuacuggacacuaguagagccgggagacaaaauaacauucgaagcaacuggaaaucuagugguaccgagauaugcauucgcaauggaaagaaaugcuggaucugguauuaucauuucagauacaccaguccacgauugcaauacaacuugucagacacccaagggugcuauaaacaccagccucccauuucagaauauacauccgaucacaauuggaaaauguccaaaauauguaaaaagcacaaaauugagacuggccacaggauugaggaaugucccgucuauucaaucuagaggccuauuuggggccauugccgguuucauugaagggggguggacagggaugguagauggaugguacgguuaucaccaucaaaaugagcaggggucaggauaugcagccgaccugaagagcacacagaaugccauugacgagauuacuaacaaaguaaauucuguuauugaaaagaugaacacacaguucacagcaguagguaaagaguucaaccaccuggaaaaaagaauagagaauuuaaauaaaaaaguugaugaugguuuccuggacauuuggacuuacaaugccgaacuguugguucuauuggaaaaugaaagaacuuuggacuaccacgauucaaaugugaagaacuuauaugaaaagguaagaagccaguuaaaaaacaaugccaaggaaauuggaaacggcugcuuugaauuuuaccacaaaugcgauaacacgugcauggaaagugucaaaaaugggacuuaugacuacccaaaauacucagaggaagcaaaauuaaacagagaagaaauagaugggguaaagcuggaaucaacaaggauuuaccagauuuuggcgaucuauucaacugucgccaguucauugguacugguagucucccugggggcaaucaguuucuggaugugcucuaaugggucucuacagugcagaauauguauuuaa

SEQ ID NO: 36106 - RNA, 1701 nt, Artificial Sequence
  derived and/or modified CDS sequence (wt) from hemagglutinin__InfluenzaA__ADC39007
augaaggcaauacuaguaguucugcuauauacauuugcaaccgcaaaugcagacacauuauguauagguuaucaugcgaacaauucaacagacacuguagacacaguacuagaaaagaauguaacaguaacacacucuguuaaccuucuagaagacaagcauaacgggaaacuaugcaaacuaagagggguagccccauugcauuuggguaaauguaacauugcuggcuggauccugggaaauccagagugugaaucacucuccacagcaagcucaugguccuacauuguggaaacaucuaguucagacaauggaacguguuacccaggagauuucaucgauuaugaggagcuaagagagcaauugagcucagugucaucauuugaaagguuugagauauuccccaagacaaguucauggcccaaucaugacucgaacaaagguguaacggcagcauguccucaugcuggagcaaaaagcuucuacaaaaauuuaauauggcuaguuaaaaaaggaaauucauacccaaagcucagcaaauccuacauuaaugauaaagggaaagaaguccuagugcuauggggcauucaccauccaucuacuagugcugaccaacaaagucucuaucagaaugcagaugcauauguuuuuguggggacaucaagauacagcaagaaguucaagccggaaauagcaauaagacccaaagugagggaucaagaagggagaaugaacuauuacuggacacuaguagagccgggagacaaaauaacauucgaagcaacuggaaaucuagugguaccgagauaugcauucgcaauggaaagaaaugcuggaucugguauuaucauuucagauacaccaguccacgauugcaauacaacuugucagacacccaagggugcuauaaacaccagccucccauuucagaauauacauccgaucacaauuggaaaauguccaaaauaugugaaaagcacaaaauugagacuggccacaggauugaggaauaucccgucuauucaaucuagaggccuauuuggggccauugccgguuucauugaagggggguggacagggaugguagauggaugguacgguuaucaccaucaaaaugagcaggggucaggauaugcagccgaccugaagagcacacagaaugccauugacgagauuacuaacaaaguaaauucuguuauugaaaagaugaauacacaguucacagcaguagguaaagaguucaaccaccuggaaaaaagaauagagaauuuaaauaaaaagguugaugaugguuuccuggacauuuggacuuacaaugccgaacuguugguucuauuggaaaaugaaagaacuuuggacuaccacgauucaaaugugaagaacuuauaugaaaagguaagaagccaguuaaaaaacaaugccaaggaaauuggaaacggcugcuuugaauuuuaccacaaaugcgauaacacgugcauggaaagugucaaaaaugggacuuaugacuacccaaaauacucagaggaagcaaaauuaaacagagaagaaauagaugggguaaagcuggaaucaacaaggauuuaccagauuuuggcgaucuauucaacugucgccaguucauugguacugguagucucccugggggcaaucaguuucuggaugugcucuaaugggucucuacaguguagaauauguauuuaa

SEQ ID NO: 36107 - RNA, 1698 nt, Artificial Sequence
  derived and/or modified CDS sequence (wt) from hemagglutinin__InfluenzaA__ADC45604
augaaagcaaaacuacugguccuguuaugcacauuuacagcuacauaugcagacacaauauguauaggcuaccaugcuaacaacucgaccgacacuguugacacaguacuugaaaagaaugugacagugacgcacucugucaaccugcuugagaacagucacaauggaaaacuaugucuauuaaaaggaauagccccacuacaauuggguaauugcagcguugccgguuggaucuuaggaaacccagaaugcgaauuacugauuuccaaggagucaugguccuacauuguagaaaaaccaaauccugagaauggaacauguuacccagggcauuucgcugacuaugaggaacugagggagcaauugaguucaguaucuucauuugagagguucgaaauauuccccaaagaaagcucauggcccaaccacaccguaaccggagugucagcaucaugcucccauaauggggaaagcaguuuuuacagaaauuugcuauggcugacggggaagaaugguuuguacccaaaccugagcaagucuuaugcaaacaacaaagaaaaagaaguccuuguacuaugggguguucaucacccgccaaacauaggugaccaaaaggcccucuaucauacagaaaaugcuuaugucucuguagugucuucacauuauagcagaaaauucaccccagaaauagccaaaagacccaaaguaagagaucaagaaggaagaaucaacuacuacuggacucugcuugaacccggggauacaauaauauuugaggcaaauggaaaucuaauagcgccaagauaugcuuucgcacugaguagaggcuuaggaucaggaaucaucaacucaaaugcaccaauggauaaaugugaugcgaagugccaaacaccucagggagcuauaaacagcagucuuccuuuccagaacguacacccagucacaauaggagaguguccaaaguaugucaggagugcaaaauuaaggaugguuacaggacuaaggaacaucccauccauucaauccagagguuuguuuggagccauugccgguuucauugaagggggguggacuggaaugguagaugguugguaugguuaucaucaucagaaugagcaaggaucuggcuaugcugcagaucaaaaaagcacacaaaaugccauuaaugggauuacaaacaaggugaauucuguaauugagaaaaugaacacucaauucacagcagugggcaaagaauucaacaaauuggaaagaaggauggaaaacuugaauaaaaaaguugaugauggguuuauagacauuuggacauauaaugcagaacuguugguucuacuggaaaaugaaaggacuuuggauuuccaugacuccaaugugaagaaucuguaugagaaaguaaaaagccaguuaaagaauaaugcuaaagaaauaggaaauggguguuuugaauucuaucacaaguguaacgaugaaugcauggagaguguaaagaauggaacuuaugacuauccaaaauauuccgaagaaucaaaguuaaacagggagaaaauugauggagugaaauuggaaucaaugggagucuaucagauucuggcgaucuacucaacagucgccaguucucugguucuuuuggucucccugggggcaaucagcuucuggauguguuccaaugggucuuugcaguguagaauaugcaucuaa

SEQ ID NO: 36108 - RNA, 1698 nt, Artificial Sequence
  derived and/or modified CDS sequence (wt) from hemagglutinin__InfluenzaA__ADC45626
augaaaguaaaacuacugguccuauuaugcacauuuacagcuacauaugcagacacaauauguaucggcuaccaugccaacaacucaaccgacacuguugacacaguacuugaaaagaaugugacagugacacacucugucaaccugcuugaggacaaccacaauggaaaacuaugucuauuaaaaggaauagccccauuacaauuggguaacugcagcguugccggguggaucuuaggaaacccagaaugcgaauuacugauuuccaaggagucaugguccuacauuguagaaaaaccaaauccugagaauggaacauguuacccagggcauuucgccgacuaugaggaacugagggagcaauugaguucaguaucuucauuugagagguucgaaauauuccccaaagaaagcucauggcccaaccacacuguaaccggaguauccgcaucaugcucccauaauggggaaagcagcuuuuacaaaaauuugcuauggcugacgggaaagaaugguuuguacccaaaccugagcaaguccuaugcaaacaacaaggagaaagaaguccucguacuaugggguguucaucacccgccaaacauagguaaccaaaugacccucuaccauaaagaaaaugcuuaugucucuguagugucuucacauuauagcagaaaauucaccccagaaauagccaaaagacccaaagugagagaucaagaaggaagaaucaacuacuacuggacucugcuugaacccggggauacaauaauauuugaggcaaguggaaaucuaauagcgccaagauaugcuuucgcacugaguagaggcuuuggaucaggaaucaucaacucaaaugcaccaauggaugaaugugaugcgaagugccaaacaccucagggagcuauaaacagcagucuuccuuuccagaauguacacccagucacaauaggagaauguccaaaguaugucagaagugcaaaauuaaggaugguuacaggacuaaggaacaucccauccauucaauccagagguuuguuuggagccauugcugguuucauugaagggggguggacuggaaugguagaugguugguaugguuaucaucaccagaaugagcaaggaucuggcuaugcugcagaucaaaaaagcacacaaaaugccauuaaugggaucacaaacaaggugaauucuguaauugagaagaugaacacucaauucacagcugugggcaaagaauucaacaaauuggaaagaaggauggaaaacuuaaauaaaaaaguugaugacggguuuauagacguuuggacauauaaugcagaacuguugguucuacuggaaaaugagagaacuuuggauuuccaugacuccaaugugaagaauuuguaugagaaaguaaaaaaccaauuaaaaaauaaugccaaagaaauaggaaauggguguuuugaauuuuaucacaaguguaacgaugaaugcauggagaguguaaaaaauggaacuuaugacuauccaaaauauuccgaagaaucaaaguuaagcagggagaaaauugauggagugaaauuggaaucaaugggagucuaucagauucuggcgaucuacucaacagucgccaguucucugguucuuuuggucucccugggggcaaucagcuucuggauguguuccaaugggucuuugcaguguagaauaugcaucuaa

SEQ ID NO: 36109 - RNA, 1698 nt, Artificial Sequence
  derived and/or modified CDS sequence (wt) from hemagglutinin__InfluenzaA__ADC45637
augaaaguaaaacuacugguccuauuaugcacauuuacagcuacauaugcagacacaauauguaucggcuaccaugccaacaacucaaccgacacuguugacacaguacuugaaaagaaugugacagugacacacucugucaaccugcuugaggacaaccacaauggaaaacuaugucuauuaaaaggaauagccccauuacaauuggguaacugcagcguugccggguggaucuuaggaaacccagaaugcgaauuacugauuuccaaggagucaugguccuacauuguagaaaaaccaaauccugagaauggaacauguuacccagggcauuuugccgacuaugaggaacugagggagcaauugaguucaguaucuucauuugagagguucgaaauauuccccaaagaaagcucauggcccaaucacaccguaaccggaguauccgcaucaugcucccauaauggggaaagcagcuuuuacaaaaauuugcuauggcugacgggaaagaaugguuuguacccaaaccugagcaaguccuaugcaaacaacaaggagaaagaaguccucguacuaugggguguucaucacccgccaaacauaggugaccaaaugacccucuaucauaaagaaaaugcuuaugucucuguagugucuucacauuauagcagaaaauucaccccagaaauagccaaaagacccaaagugagagaucaagaaggaagaaucaacuacuacuggacucugcuugaacccggggauacaauaauauuugaggcaaguggaaaucuaauagcgccaagauaugcuuucgcacugaguagaggcuuuggaucaggaaucaucaacucaaaugcaccaauggaugaaugugaugcgaagugccaaacaccucagggagcuauaaacagcagucuuccuuuccagaauguacacccagucacaauaggagaauguccaaaguaugucagaagugcaaaauuaaggaugguuacaggacuaaggaacaucccauccauucaauccagagguuuguuuggagccauugcugguuucauugaagggggguggacuggaaugguagaugguugguaugguuaucaucaccagaaugagcaaggaucuggcuaugcugcagaucaaaaaagcacacaaaaugccauuaaugggaucacaaacaaggugaauucuguaauugagaagaugaacacucaauucacagcugugggcaaagaauucaacaaauuggaaagaaggauggaaaacuuaaauaaaaaaguugaugacggguuuauagacguuuggacauauaaugcagaacuguugguucuacuggaaaaugagagaacuuuggauuuccaugacuccaaugugaagaauuuguaugagaaaguaaaaaaccaauuaaaaaauaaugccaaagaaauaggaaauggguguuuugaauuuuaucacaaguguaacgaugaaugcauggagaguguaaaaaauggaacuuaugacuauccaaaauauuccgaagaaucaaaguuaagcagggagaaaauugauggagugaaauuggaaucaaugggagucuaucagauucuggcgaucuacucaacagucgccaguucucugguucuuuuggucucccugggggcaaucagcuucuggauguguuccaaugggucuuugcaguguagaauaugcaucuaa

SEQ ID NO: 36110 - RNA, 1698 nt, Artificial Sequence
  derived and/or modified CDS sequence (wt) from hemagglutinin__InfluenzaA__ADC45648
augaaaguaaaacuacugguccuguuaugcacauuugcagcuacauaugcagacacaauauguauaggcuaccaugcuaacaacucgaccgacacuguugacacaguacuugaaaagaaugugacagugacacacucugucaaccugcuugagaacagucacaauggaaaacuaugucuauuaaaaggaauagccccacuacaauuggguaauugcagcauugccgggugggucuuaggaaacccagaaugcgaauugcugauuuccaaggagucaugguccuacauuguagaaaaaccaaauccugagaauggaacauguuacccagggcauuucgcugacuaugaggaacugagggagcaauugaguucaguaucuucauuugagagguucgaaauauuccccaaagaaagcucauggcccaaccacaccguaaccggagugucagcaucaugcucccauaauggggaaagcaguuuuuacagaaauuugcuauggcugacggggaagaaugguuuguacccaaaccugagcaaguccuaugcaaacaacaaagaaaaagaaguccuuguacuaugggguguucaucacccgccaaacauaggugaccaaaaggcccucuaucauacagaaaaugcuuaugucucuguagugucuucacauuauagcagaaaauucaccccagaaauagccaaaagacccaaaguaagagaucaagaaggaagaaucaauuacuacuggacucugcuugaacccggggauacaauaauauuugaggcaaauggaaaucuaauagcgccaagauaugcuuucgcacugaguagaggcuuuggaucaggaaucaucaacucaaaugcaccaauggauaaaugugaugcgaagugccaaacaccucagggagcuauaaacagcagucuuccuuuccagaacguacacccagucacaauaggagaguguccaaaguaugucagaagugcaaaauuaaggaugguuacaggacuaaggaacaucccauccauucaauccagagguuuguuuggagccauugccgguuucauugaagggggguggacuggaaugguagaugguugguaugguuaucaucaucagaaugagcaaggaucuggcuaugcugcagaucaaaaaagcacacaaaaugccauuaaugggauuacaaacaaggugaauucuguaauugagaaaaugaacacucaauucacagcagugggcaaagaauucaacaaauuggaaagaaggauggaaaacuugaauaaaaaaguugaugauggguuuauagacauuuggacauauaaugcagaacuguugguucuacuggaaaaugaaaggacuuuggauuuccaugacuccaaugugaagaaucuguaugagaaaguaaaaagccaguuaaagaauaaugcuaaagaaauaggaaauggguguuuugaauucuaucacaaguguaacgaugaaugcauggagaguguaaagaauggaacuuaugacuauccaaaauauuccgaagaaucaaaguuaaacagggagaaaauugauggagugaaauuggaaucaaugggagucuaucagauucuggcgaucuacucaacagucgccaguucucugguucuuuuggucucccugggggcaaucagcuucuggauguguuccaaugggucuuugcaguguagaauaugcaucuaa

SEQ ID NO: 36111 - RNA, 1698 nt, Artificial Sequence
  derived and/or modified CDS sequence (wt) from hemagglutinin__InfluenzaA__ADC45659
augaaaguaaaacuacugguccuguuaugcacauuuacagcuacauaugcagacacaauauguauaggcuaccaugcuaacaacucgaccgacacuguugacacaguacuugaaaagaaugugacagugacacacucugucaaccugcuugagaacagucacaauggaaaacuaugucuauuaaaaggaauagccccacuacaauuggguaauugcagcguugccggguggaucuuaggaaacccagaaugcgaauuacugauuuccaaggagucaugguccuacauuguagaaaaaccaaauccugagaauggaacauguuacccagggcauuucgcugacuaugaggaacugagggagcaauugaguucaguaucuucauuugagagguucgaaauauuccccaaaaaaagcucauggcccaaccacaccguaaccggagugucagcaucaugcucccauaauggagaaagcaguuuuuacagaaauuugcuauggcugacggagaagaaugguuuguacccaaaccugagcaaguccuaugcaaacaacaaagaaaaagaaguccuuguacuaugggguguucaucacccgccaaacauaggugaccaaaaggcccucuaucauacagaaaaugcuuauguuucuguagugucuucacauuauagcagaaaauucaccccagaaauagccaaaagacccaaaguaagagaucaagaaggaagaaucaacuacuacuggacucugcuugaacccggggauacaauaauauuugaggcaaauggaaaucuaauagcgccaagauaugcuuucgcacugaguagaggcuuuggaucaggaaucaucaacucaaaugcaccaauggauaaaugugaugcgaagugccaaacaccucagggagcuauaaacagcagucuuccuuuccagaacguacacccagucacaauaggagaguguccaaaauaugucaggagugcaaaauuaaggaugguuacaggacuaaggaacaucccauccauucaauccagagguuuguuuggagccauugccgguuucauugaagggggguggacuggaaugguagaugguugguaugguuaucaucaucagaaugagcaaggaucuggcuaugcugcagaucaaaaaagcacacaaaaugccauuaaugggauuacaaacaaggugaauucuguaauugagaaaaugaacacucaauucacagcagugggcaaagaauucaacaaauuggaaagaaggauggaaaacuugaauaaaaaaguugaugauggguuuauagacauuuggacauauaaugcagaacuguugguucuacuggaaaaugaaaggacuuuggauuuccaugacuccaaugugaagaaucuguaugagaaaguaaaaagccaguuaaagaauaaugcuaaagaaauaggaaauggguguuuugaauucuaucacaaguguaacgaugaaugcauggagaguguaaagaauggaacuuaugacuauccaaaauauuccgaagaaucaaaguuaaacagggagaaaauugauggagugaaauuggaaucaaugggagucuaucagauucuggcgaucuacucaacagucgccaguucucugguucuuuuggucucccugggggcaaucagcuucuggauguguuccaaugggucuuugcaguguagaauaugcaucuaa

SEQ ID NO: 36112 - RNA, 1698 nt, Artificial Sequence
  derived and/or modified CDS sequence (wt) from hemagglutinin__InfluenzaA__ADC45670
augaaaguaaaacuacugguccuguuaugcacauuuacagcuacauaugcagacacaauauguauaggcuaccaugcuaacaacucgaccgacacuguugacacaguacuugaaaagaaugugacagugacacacucugucaaccugcuugagaacagucacaauggaaaacuaugucuauuaaaaggaauagccccacuacaauuggguaauugcagcguugccggguggaucuuaggaaacccagaaugcgaauuacugauuuccaaggagucaugguccuacauuguagaaaaaccaaauccugagaauggaacauguuacccagggcauuucgcugacuaugaggaacugagggagcaauugaguucaguaucuucauuugagagguucgaaauauuccccaaagaaagcucauggcccaaccacaccguaaccggagggucagcaucaugcucccauaauggagaaagcaguuuuuacagaaauuugcuauggcugacggggaagaaugguuuguacccaaaccugagcaaguccuaugcaaacaacaaagaaaaagaaguccuuguacuaugggguguucaucacccuccaaacauaggugaccaaaaggcccucuaucauacagaaaaugcuuauguuucuguagugucuucacauuauagcagaaaauucaccccagaaauagccaaaagacccaaaguaagagaucaagaaggaagaaucaacuacuacuggacucugcuugaacccggggauacaauaauauuugaggcaaauggaaaucuaauagcgccaagauaugcuuucgcacugaguagaggcuuuggaucaggaaucaucaacucaaaugcaccaauggauaaaugugaugcgaagugccaaacaccucagggagcuauaaacagcagucuuccuuuccagaacguacacccagucacaauaggagaguguccaaaauaugucaggagugcaaaauuaaggaugguuacaggacuaaggaacaucccauccauucaauccagagguuuguuuggagccauugccgguuucauugaagggggguggacuggaaugguagaugguugguaugguuaucaucaucagaaugagcaaggaucuggcuaugcugcagaucaaaaaagcacacaaaaugccauuaaugggauuacaaacaaggugaauucuguaauugagaaaaugaacacucaauucacagcagugggcaaagaauucaacaaauuggaaagaaggauggaaaacuugaauaaaaaaguugaugauggguuuauagacauuuggacauauaaugcagaacuguugguucuacuggaaaaugaaaggacuuuggauuuccaugacuccaaugugaagaaucuguaugagaaaguaaaaagccaguuaaagaauaaugcuaaagaaauaggaaauggguguuuugaauucuaucacaaguguaacgaugaaugcauggagaguguaaagaauggaacuuaugacuauccaaaauauuccgaagaaucaaaguuaaacagggagaaaauugauggagugaaauuggaaucaaugggagucuaucagauucuggcgaucuacucaacagucgccaguucucugguucuuuuggucucccugggggcaaucagcuucuggauguguuccaaugggucuuugcaguguagaauaugcaucuaa

SEQ ID NO: 36113 - RNA, 1698 nt, Artificial Sequence
  derived and/or modified CDS sequence (wt) from hemagglutinin__InfluenzaA__ADC45681
augaaaguaaaacuacugguccuauuaugcacauuuacagcuacauaugcagacacaauauguaucggcuaccaugccaacaacucaaccgacacuguugacacaguacuugaaaagaaugugacagugacacacucugucaaccugcuugaggacaaccacaauggaaaacuaugucuauuaaaaggaauagccccauuacaauuggguaacugcagcguugccggguggaucuuaggaaacccagaaugcgaauuacugauuuccaaggagucaugguccuacauuguagaaaaaccaaauccugagaauggaacauguuacccagggcauuucgccgacuaugaggaacugagggagcaauugaguucagcaucuucauuugagagguucgaaauauuccccaaagaaagcucauggcccaaccacaccguaaccggaguauccgcaucaugcucccauaauggggaaagcagcuuuuacaaaaauuugcuauggcugacgggaaagaaugguuuguacccaaaccugagaaaguccuaugcaaacaacaaggagaaagaaguccucguacuaugggguguucaucacccgccaaacauaggugaccaaaugacccucuaccauaaagaaaaugcuuaugucucuguagugucuucacauuauagcagaaaauucaccccagaaauagccaaaagacccaaagugagagaucaagaaggaagaaucaacuacuacuggacucugcuugaacccggggauacaauaauauuugaggcaaguggaaaucuaauagcgccaagauaugcuuucgcacugaguagaggcuuuggaucaggaaucaucaacucaaaugcaccaauggaugaaugugaugcgaagugccaaacaccucagggagcuauaaacagcagucuuccuuuccagaauguacacccagucacaauaggagaauguccaaaguaugucagaagugcaaaauuaaggaugguuacaggacuaaggaacaucccauccauucaauccagagguuuguuuggagccauugcugguuucauugaagggggguggacuggaaugguagaugguugguaugguuaucaucaccagaaugagcaaggaucuggcuaugcugcagaucaaaaaagcacacaaaaugccauuaaugggaucacaaacaaggugaauucuguaauugagaagaugaacacucaauucacagcugugggcaaagaauucaacaaauuggaaagaaggauggaaaacuuaaauaaaaaaguugaugacggguuuauagacguuuggacauauaaugcagaacuguugguucuacuggaaaaugagagaacuuuggauuuccaugacuccaaugugaagaauuuguaugagaaaguaaaaaaccaauuaaaaaauaaugccaaagaaauaggaaauggguguuuugaauuuuaucacaaguguaacgaugaaugcauggagaguguaaaaaauggaacuuaugacuauccaaaauauuccgaagaaucaaaguuaagcagggagaaaauugauggagugaaauuggaaucaaugggagucuaucagauucuggcgaucuacucaacagucgccaguucucugguucuuuuggucucccugggggcaaucagcuucuggauguguuccaaugggucuuugcaguguagaauaugcaucuaa

SEQ ID NO: 36114 - RNA, 1698 nt, Artificial Sequence
  derived and/or modified CDS sequence (wt) from hemagglutinin__InfluenzaA__ADC45692
augaaaguaaaacuacugguccuguuaugcacauuuacagcuacauaugcagacacaauauguauaggcuaccaugcuaacaacucgaccgacacuguugacacaguacuugaaaagaaugugacagugacacacucugucaaccugcuugagaacagucacaauggaaaacuaugucuauuaaaaggaauagccccacuacaauuggguaauugcagcguugccggguggaucuuaggaaacccagaaugcgaauuacugauuuccaagaagucaugguccuacauuguagaaaaaccaaauccugagaauggaacauguuacccagggcauuucgcugacuaugaggaacugagggagcaauugaguucaguaucuucauuugagagguucgaaauauuccccaaagaaagcucauggcccaaccacaccguaaccggagugucagcaucaugcucccauaauggggaaagcaguuuuuacagaaauuugcuauggcugacggggaagaaugguuuguacccaaaccugagcaaguccuaugcaaacaacaaagaaaaagaaguccuuguacuaugggguguucaucacccgccaaacauaggugaccaaaaggcccucuaucauacagaaaaugcuuaugucucuguagugucuucacauuauagcagaaaauucaccccagaaauagccaaaagacccaaaguaagagaucaagaaggaagaaucaauuacuacuggacucugcuugaacccggggauacaauaauauuugaggcaaauggaaaucuaauagcgccaagauaugcuuucgcacuaaguagaggcuuuggaucaggaaucaucaacucaaaugcaccaauggauaaaugugaugcgaagugccaaacaccucagggagcuauaaacagcagucuuccuuuccagaacguacacccagucacaauaggagaguguccaaaguaugucaggagugcaaaauuaaggaugguuacaggacuaaggaacaucccauccauucaauccagagguuuguuuggagccauugccgguuucauugaagggggguggacuggaaugguagaugguugguaugguuaucaucaucagaaugagcaaggaucuggcuaugcugcagaucaaaaaagcacacaaaaugccauuaaugggauuacaaacaaagugaauucuguaauugagaaaaugaacacucaauucacagcagugggcaaagaauucaacaaauuggaaagaaggauggaaaacuugaauaaaaaaguugaugauggguuuauagacauuuggacauauaaugcagaacuguugguucuacuggaaaaugaaaggacuuuggauuuccaugacuccaaugugaagaaucuguaugagaaaguaaaaagccaguuaaagaauaaugcuaaagaaauaggaaauggguguuuugaauucuaucacaaguguaaugaugaaugcauggagaguguaaagaauggaacuuaugacuauccaaaauauuccgaagaaucaaaguuaaacagggagaaaauugauggagugaaauuggaaucaaugggagucuaucagauucuggcgaucuacucaacagucgccaguucucugguucuuuuggucucccugggggcaaucagcuucuggauguguuccaaugggucuuugcaguguagaauaugcaucuaa

SEQ ID NO: 36115 - RNA, 1698 nt, Artificial Sequence; identical to SEQ ID NO: 35182
  derived and/or modified CDS sequence (wt) from hemagglutinin__InfluenzaA__ADC45703

SEQ ID NO: 36116 - RNA, 1698 nt, Artificial Sequence
  derived and/or modified CDS sequence (wt) from hemagglutinin__InfluenzaA__ADC45714
augaaaguaaaacuacugguccuauuaugcacauuuacagcuacauaugcagacacaauauguaucggcuaccaugccaacaacucaaccgacacuguugacacaguacuugaaaagaaugugacagugacacacucugucaaccugcuugaggacaaccacaauggaaaacuaugucuauuaaaaggaauagccccauuacaauuggguaacugcagcguugccggguggaucuuaggaaacccagaaugcgaauuacugauuuccaaggagucaugguccuacauuguagaaaaaccaaauccugagaauggaacauguuacccagggcauuuugccgacuaugaggaacugagggagcaauugaguucaguaucuucauuugagagguucgaaauauuccccaaagaaagcucauggcccaaucacaccguaaccggaguauccgcaucaugcucccauaauggggaaagcagcuuuuacaaaaauuugcuauggcugacgggaaagaaugguuuguacccaaaccugagcaaguccuaugcaaacaacaaggagaaagaaguccucguacuaugggguguucaucacccgccaaacauaggugaccaaacgacccucuaucauaaagaaaaugcuuaugucucuguagugucuucacauuauagcagaaaauucaccccagaaauagccaaaagacccaaagugagagaucaagaaggaagaaucaacuacuacuggacucugcuugaacccggggauacaauaauauuugaggcaaguggaaaucuaauagcgccaagauaugcuuucgcacugaguagaggcuuuggaucaggaaucaucaacucaaaugcaccaauggaugaaugugaugcgaagugccaaacaccucagggagcuauaaacagcagucuuccuuuccagaauguacacccagucacaauaggagaauguccaaaguaugucagaagugcaaaauuaaggaugguuacaggacuaaggaacaucccauccauucaauccagagguuuguuuggagccauugcugguuucauugaagggggguggacuggaaugguagaugguugguaugguuaucaucaccagaaugagcaaggaucuggcuaugcugcagaucaaaaaagcacacaaaaugccauuaaugggaucacaaacaaagugaauucuguaauugagaagaugaacacucaauucacagcugugggcaaagaauucaacaaauuggaaagaaggauggaaaacuuaaauaaaaaaguugaugacggguuuauagacguuuggacauauaaugcagaacuguugguucuacuggaaaaugagagaacuuuggauuuccaugacuccaaugugaagaauuuguaugagaaaguaaaaaaccaauuaaaaaauaaugccaaagaaauaggaaauggguguuuugaauuuuaucacaaguguaacgaugaaugcauggagaguguaaaaaauggaacuuaugacuauccaaaauauuccgaagaaucaaaguuaagcagggagaaaauugauggagugaaauuggaaucaaugggagucuaucagauucuggcgaucuacucaacagucgccaguucucugguucuuuuggucucccugggggcaaucagcuucuggauguguuccaaugggucuuugcaguguagaauaugcaucuaa

SEQ ID NO: 36117 - RNA, 1698 nt, Artificial Sequence
  derived and/or modified CDS sequence (wt) from hemagglutinin__InfluenzaA__ADC45725
augaaaguaaaacuacugguccuguuaugcacauuugcagcuacauaugcagacacaauauguauaggcuaccaugcuaacaacucgaccgacacuguugacacaguacuugaaaagaaugugacagugacacacucugucaaccugcuugagaacagucacaauggaaaacuaugucuauuaaaaggaauagccccacuacaauuggguaauugcagcguugccggguggaucuuaggaaacccagaaugcgaauugcugauuuccaaggagucaugguccuacauuguagaaaaaccaaauccugagaauggaacauguuacccagggcauuucgcugacuaugaggaacugagggagcaauugaguucaguaucuucauuugagagguucgaaauauuccccaaagaaagcucauggcccaaccacaccguaaccggagugucagcaucaugcucccauaauggggaaagcaguuuuuacagaaauuugcuauggcugacggggaagaaugguuuguacccaaaccugagcaaguccuaugcaaacaacaaagaaaaagaaguccuuguacuaugggguguucaucacccgccaaacauaggugaccaaaaggcccucuaucauacagaaaaugcuuaugucucuguagugucuucacauuauagcagaaaauucaccccagaaauagccaaaagacccaaaguaagagaucaagaaggaagaaucaauuacuacuggacucugcuugaacccggggauacaauaauauuugaggcaaauggaaaucuaauagcgccaagauaugcuuucgcacugaguagaggcuuuggaucaggaaucaucaacucaaaugcaccaauggauaaaugugaugcgaagugccaaacaccucagggagcuauaaacagcagucuuccuuuccagaacguacacccagucacaauaggagaguguccaaaguaugucaggagugcaaaauuaaggaugguuacaggacuaaggaacaucccauccauucaauccagagguuuguuuggagccauugccgguuucauugaagggggguggacuggaaugguagaugguugguaugguuaucaucaucagaaugagcaaggaucuggcuaugcugcagaucaaaaaagcacacaaaaugccauuaaugggauuacaaacaaggugaauucuguaauugagaaaaugaacacucaauucacagcagugggcaaagaauucaacaaauuggaaagaaggauggaaaacuugaauaaaaaaguugaugauggguuuauagacauuuggacauauaaugcagaacuguugguucuacuggaaaaugaaaggacuuuggauuuccaugacuccaaugugaagaaucuguaugagaaaguaaaaagccaguuaaagaauaaugcuaaagaaauaggaaauggguguuuugaauucuaucacaaguguaacgaugaaugcauggagaguguaaagaauggaacuuaugacuauccaaaauauuccgaagaaucaaaguuaaacagggagaaaauugauggagugaaauuggaaucaaugggagucuaucagauucuggcgaucuacucaacagucgccaguucucugguccuuuuggucucccugggggcaaucagcuucuggauguguuccaaugggucuuugcaguguagaauaugcaucuaa

SEQ ID NO: 36118 - RNA, 1698 nt, Artificial Sequence
  derived and/or modified CDS sequence (wt) from hemagglutinin__InfluenzaA__ADC45736
augaaaguaaaacuacugguccuguuaugcacauuuacagcuacauaugcagacacaauauguauaggcuaccaugcuaacaacucgaccgacacuguugacacaguacuugaaaagaaugugacagugacacacucugucaaccugcuugagaacagucacaauggaaaacuaugucuauuaaaaggaauagccccacuacaauuggguaauugcagcguugccggguggaucuuaggaaacccagaaugcgaauuacugaucuccaaggagucaugguccuacauuguagaaaaaccaaauccugagaauggaacauguuacccagggcauuucgcugacuaugaggaacugagggagcaauugaguucaguaucuucauuugagagguucgaaauauuccccaaagaaagcucauggcccaaccacaccguaaccggagugucagcaucaugcucccauaauggagaaagcaguuuuuacagaaauuugcuauggcugacggggaagaaugguuuguacccaaaccugagcaaguccuaugcaaacaacaaagaaaaagaaguccuuguacuaugggguguucaucacccgccaaacauaggugaccaaaaggcccucuaucauacagaaaauacuuauguuucuguagugucuucacauuauagcagaaaauucaccccagaaauagccaaaagacccaaaguaagagaucaagaaggaagaaucaacuacuacuggacucugcuugaacccggggauacaauaauauuugaggcaaauggaaaucuaauagcgccaagauaugcuuucgcacugaguagaggcuuuggaucaggaaucaucaacucaaaugcaccaauggauaaaugugaugcgaagugccaaacaccucagggagcuauaaacagcagucuuccuuuccagaacguacacccagucacaauaggagaguguccaaaauaugucaggagugcaaaauuaaggaugguuacaggacuaaggaacaucccauccauucaauccagagguuuguuuggagccauugccgguuucauugaagggggguggacuggaaugguagaugguugguaugguuaucaucaucagaaugagcaaggaucuggcuaugcugcagaucaaaaaagcacacaaaaugccauuaaugggauuacaaacaaggugaauucuguaauugagaaaaugaacacucaauucacagcagugggcaaagaauucaacaaauuggaaagaaggauggaaaacuugaauaaaaaaguugaugauggguuuauagacauuuggacauauaaugcagaacuguugguucuacuggaaaaugaaaggacuuuggauuuccaugacuccaaugugaagaaucuguaugagaaaguaaaaagccaguuaaagaauaaugcuaaagaaauaggaaauggguguuuugaauucuaucacaaguguaacgaugaaugcauggagaguguaaagaauggaacuuaugacuauccaaaauauuccgaagaaucaaaguuaaacagggagaaaauugauggagugaaauuggaaucaaugggagucuaucagauucuggcgaucuacucaacagucgccaguucucugguucuuuuggucucccugggggcaaucagcuucuggauguguuccaaugggucuuugcaguguagaauaugcaucuaa

SEQ ID NO: 36119 - RNA, 1698 nt, Artificial Sequence
  derived and/or modified CDS sequence (wt) from hemagglutinin__InfluenzaA__ADC45747
augaaaguaaaacuacugguccuguuaugcacauuuacagcuacauaugcagacacaauauguauaggcuaccaugcuaacaacucgaccgacacuguugacacaguacuugaaaagaaugugacagugacacacucugucaaccugcuugagaacagucacaauggaaaacuaugucuauuaaaaggaauagccccacuacaauuggguaacugcagcguugccggguggaucuuaggaaacccagaaugcgaauuacugauuuccaaggagucaugguccuacauuguagaaaaaccaaauccugagaauggaacauguuacccagggcauuucgcugacuaugaggaacugagggagcaauugaguucaguaucuucauuugagagguucgaaauauuccccaaagaaagcucauggcccaaccacaccguaaccggagugucagcaucaugcucccauaauggggaaagcaguuuuuacagaaauuugcuauggcugacggggaagaaugguuuguacccaaaccugagcaaguccuaugcaaacaacaaagaaaaagaaguccuuguacuaugggguguucaucacccgccaaacauaggugaccaaaaggcccucuaucauacagaaaaugcuuauguuucuguagugucuucacauuauagcagaaaauucaccccagaaauagccaaaagacccaaaguaagagaccaagaaggaagaaucaacuacuacuggacucugcuugaacccggggauacaauaauauuugaggcaaauggaaaucuaauagcgccaagauaugcuuucgcacugaguagaggcuuuggaucaggaaucaucaacucaaaugcaccaauggauaaaugugaugcgaagugccaaacaccucagggagcuauaaacagcagucuuccuuuccagaacguacacccagucacaauaggagaguguccaaaguaugucaggagugcaaaauuaaggaugguuacaggacuaaggaacaucccauccauucaauccagagguuuguuuggagccauugccgguuucauugaagggggguggacuggaaugguagaugguugguaugguuaucaucaucagaaugagcaaggaucuggcuaugcugcagaucaaaaaagcacacaaaaugccauuaaugggauuacaaacaaggugaauucuguaauugagaaaaugaacacucaauucacagcagugggcaaagaauucaacaaauuggaaagaaggauggaaaacuugaauaaaaaaguugaugauggguuuauagacauuuggacauauaaugcagaacuguugguucuacuggaaaaugaaaggacuuuggauuuccaugacuccaaugugaagaaucuguaugagaaaguaaaaagccaguuaaagaauaaugcuaaagaaauaggaaauggguguuuugaauucuaucacaaguguaacgaugaaugcauggagaguguaaagaauggaacuuaugacuauccaaaauauuccgaagaaucaaaguuaaacagggagaaaauugauggagugaaauuggaaucaaugggagucuaucagauucuggcgaucuacucaacagucgccaguucucugguucuuuuggucucccugggggcaaucagcuucuggauguguuccaaugggucuuugcaguguagaauaugcaucuaa

SEQ ID NO: 36120 - RNA, 1698 nt, Artificial Sequence
  derived and/or modified CDS sequence (wt) from hemagglutinin__InfluenzaA__ADC45758
augaaaguaaaacuacugguccuguuaugcacauuuacagcuacauaugcagacacaauauguauaggcuaccaugcuaacaacucgaccgacacuguugacacaguacuugaaaagaaugugacagugacacacucugucaaccugcuugagaacagucacaauggaaaacuaugucuauuaaaaggaauagccccacuacaauuggguaacugcagcguugccggguggaucuuaggaaacccagaaugcgaauuacugauuuccaaggagucaugguccuacauuguagaaaaaccaaauccugagaauggaacauguuacccaggacauuucgcugacuaugaggaacugagggagcaauugaguucaguaucuucauuugagagguucgaaauauuccccaaagaaagcucuuggcccaaccacaccguaaccggagugucagcaucaugcucccauaauggggaaaacaguuuuuacagaaauuugcuauggcugacggggaagaaugguuuguacccaaaccugagcaaguccuaugcaaacaacaaagaaaaagaaguccuuguacuaugggguguucaucacccgccaaacauagcugaccaaaagacccucuaucauacagaaaaugcuuauguuucuguagugucuucacauuauagcagaaaauucaccccagaaauagccaaaagacccaaaguaagagaucaagaaggaagaaucaacuacuacuggacucugcuugaacccggggauacaauaauauuugaggcaaauggaaaucuaauagcgccaagauaugcuuucgcacugaguagaggcuuuggaucaggaaucaucaacucaaaugcaccaauggauaaaugugaugcgaagugccaaacaccucaaggagcuauaaacagcagucuuccuuuccagaacguacacccagucacaauaggagaguguccaaaguaugucaggagugcaaaauuaaggaugguuacaggacuaaggaacaucccauccauucaauccagagguuuguuuggagccauugccgguuucauugaagggggguggacuggaaugguagaugguugguaugguuaucaucaucagaaugagcaaggaucuggcuaugcugcagaucaaaaaagcacacaaaaugccauuaaugggauuacaaacaaggugaauucuguaauugagaaaaugaacacucaauucacagcagugggcaaagaauucaacaaauuagaaagaaggauggaaaacuugaauaaaaaaguugaugauggauuuauagacauuuggacauauaaugcagaacuguugguucuacuggaaaaugaaaggacuuugaauuuccaugacuccaaugugaagaaucuguaugagaaaguaaaaagccaguuaaagaauaaugcuaaagaaauaggaaauggguguuuugaauucuaucacaaguguaacgaugaaugcauggagaguguaaagaauggaacuuaugacuauccaaaauauuccgaagaaucaaaguuaaacagggagaaaauugauggagugaaauuggaaucaaugggagucuaucagauucuggcgaucuacucaacagucgccaguucucugguucuuuuggucucccugggggcaaucagcuucuggauguguuccaaugggucuuugcaguguagaauaugcaucuaa

SEQ ID NO: 36121 - RNA, 1698 nt, Artificial Sequence
  derived and/or modified CDS sequence (wt) from hemagglutinin__InfluenzaA__ADC45780
augaaaguaaaacuacugguccuguuaugcacauuuacagcuacauaugcagacacaauauguauaggcuaccaugcuaacaacucgaccgacacuguugacacaguacuugaaaagaaugugacagugacacacucugucaaccugcuugagaacagucacaauggaaaacuaugucuauuaaaaggaauagccccacuacaauuggguaacugcagcguugccggguggaucuuaggaaacccagaaugcgaauuacugauuuccaaggagucaugguccuacauuguagaaaaaccaaauccugagaauggaacauguuacccaggacauuucgcugacuaugaggaacugagggagcaauugaguucaguaucuucauuugagagguucgaaauauuccccaaagaaagcucauggcccaaccacaccguaaccggagugucagcaucaugcucccauaauggggaaaacaguuuuuacagaaauuugcuauggcugacggggaagaaugguuuguacccaaaccugagcaaguccuaugcaaacaacaaagaaaaagaaguccuuguacuaugggguguucaucacccgccaaacauagcugaccaaaagacccucuaucauacagaaaaugcuuauguuucuguagugucuucacauuauagcagaaaauucaccccagaaauagccaaaagacccaaaguaagagaucaagaaggaagaaucaacuacuacuggacucugcuugaacccggggauacaauaauauuugaggcaaauggaaaucuaauagcgccaagauaugcuuucgcacugaguagaggcuuuggaucaggaaucaucaacucaaaugcaccaauggauaaaugugaugcgaagugccaaacaccucaaggagcuauaaacagcagucuuccuuuccagaacgugcacccagucacaauaggagaguguccaaaguaugucaggagugcaaaauuaaggaugguuacaggacuaaggaacaucccauccauucaauccagagguuuguuuggagccauugccgguuucauugaagggggguggacuggaaugguagaugguugguaugguuaucaucaucagaaugagcaaggaucaggcuaugcugcagaucaaaaaagcacacaaaaugccauuaaugggauuacaaacaaggugaauucuguaauugagaaaaugaacacucaauucacagcagugggcaaagaauucaacaaauuggaaagaaggauggaaaacuugaauaaaaaaguugaugauggguuuauagacauuuggacauauaaugcagaacuguugguucuacuggaaaaugaaaggacuuuggauuuccaugacuccaaugugaagaaucuguaugagaaaguaaaaagccaguuaaagaauaaugcuaaagaaauaggaaauggguguuuugaauucuaucacaaguguaacgaugaaugcauggagaguguaaagaauggaacuuaugacuauccaaaauauuccgaagaaucaaaguuaaacagggagaaaauugauggagugaaauuggaaucaaugggagucuaucagauucuggcgaucuacucaacagucgccaguucucugguucuuuuggucucccugggggcaaucagcuucuggauguguuccaaugggucuuugcaguguagaauaugcaucuaa

SEQ ID NO: 36122 - RNA, 1698 nt, Artificial Sequence
  derived and/or modified CDS sequence (wt) from hemagglutinin__InfluenzaA__ADC45791
augaaaguaaaacuacugguccuguuaugcacauuuacagcuacauaugcagacacaauauguauaggcuaccaugcuaacaacucgaccgacacuguugacacaguacuugaaaagaaugugacagugacacacucugucaaccugcuugagaacagucacaauggaaaacuaugucuauuaaaaggaauagccccacuacaauuggguaacugcagcguugccggguggaucuuaggaaacccagaaugcgaauuacugauuuccaaagagucauggucauacauuguagaaaaaccaaauccugagaauggaacauguuacccagggcauuucgcugacuaugaggaacugagggagcaauugaguucaguaucuucauuugagagguucgaaauauuccccaaagaaagcucauggcccaaccacaccguaaccggagugucagcaucaugcucccauaauggggaaagcaguuuuuacagaaauuugcuauggcugacggggaagaaugguuuguacccaaaccugagcaaguccuaugcaaacaacaaagaaaaagaaguccuuguacuaugggguguucaucacccgccaaacauaguugaccaaaagacccucuaucguacagaaaaugcuuauguuucuguagugucuucacauuauagcagaaaauucaccccagaaauagccaaaagacccaaaguaagagaucaagaaggaagaaucaacuacuacuggacucugcuugaacccggggauacaauaauauuugaggcaaauggaaaucuaauagcgccaagauaugcuuucgcacugaguagaggcuuuggaucaggaaucaucaacucaaaugcaccaauggauaaaugugaugcgaagugccaaacaccucagggagcuauaaacagcagucuuccuuuccagaacguacacccagucacaauaggagaguguccaaaguaugucaggagugcaaaauuaaggaugguuacaggacuaaggaacaucccauccauucaauccagagguuuguuuggagccauugccgguuucauugaagggggguggacuggaaugguagaugguugguaugguuaucaucaucagaaugagcaaggaucuggcuaugcugcagaucaaaaaagcacacaaaaugccauuaaugggauuacaaacaaggugaauucuguaauugagaaaaugaacacucaauucacagcagugggcaaagaauucaacaaauuggaaagaaggauggaaaacuugaauaaaaaaguugaugauggguuuauagacauuuggacauauaaugcagaacuguugguucuacuggaaaaugaaaggacuuuggauuuccaugacuccaaugugaagaaucuguaugagaaaguaaaaagccaguuaaagaauaaugcuaaagaaauaggaaauggguguuuugaauucuaucacaaguguaacgaugaaugcauggagaguguaaagaauggaacuuaugacuauccaaaauauuccgaagaaucaaaguuaaacagggagaaaauugauggagugaaauuggaaucaaugggagucuaucagauucuggcgaucuacucaacagucgccaguucucugguucuuuuggucucccugggggcaaucagcuucuggauguguuccaaugggucuuugcaguguagaauaugcaucuaa

SEQ ID NO: 36123 - RNA, 1698 nt, Artificial Sequence
  derived and/or modified CDS sequence (wt) from hemagglutinin__InfluenzaA__ADC45813
augaaaguaaaacuacugauccuguuaugcacauuuacagcuacauaugcagacacaauauguauaggcuaccaugcuaacaacucgaccgacacuguugacacaguacuugaaaagaaugugacagugacacacucugucaaccugcuugagaacagucacaauggaaaacuaugucuauuaaaaggaauagccccacuacaauuggguaacugcagcguugccggguggaucuuaggaaacccagaaugcgaauuacugauuuccaaggagucaugguccuacauuguagaaaaaccaaauccugagaauggaacauguuacccagggcauuucgcugacuaugaggaacugagggagcaauugaguucaguaucuucauuugagagguucgaaauauuccccaaagaaagcucauggcccaaccacaccguaaccggagugucagcaucaugcucccauaauggggaaagcaguuuuuacagaaauuugcuauggcugacgaugaagaaugguuuguacccaaaccugagcaaguccuaugcaaacaacaaagaaaaagaaguccuuguacuaugggguguucaucacccgccaaacauaggugaccaaaagacccucuauaacacagaaaaugcuuauguuucuguagugucuucacauuauagcagaaaauucaccccagaaauagccaaaagacccaaaguaagagaucaagaaggaagaaucaacuacuacuggacucugcuugaacccggggauacaauaauauuugaggcaaauggaaaucuaauagcgccaagauaugcuuucgcacugaguagaggcuuuggaucaggaaucaucaacucaaaugcaccaauggauaaaugugaugcaaagugccaaacaccucagggagcuauaaacagcagucuuccuuuccagaacguacacccagucacaauaggagaguguccaaaguaugucaggagugcaaaauuaaggaugguuacaggacuaaggaacaucccauccauucaauccagagguuuguuuggagccauugccgguuucauugaagggggguggacuggaaugguagaugguugguaugguuaucaucaucagaaugagcaaggaucuggcuaugcugcagaucaaaaaagcacacaaaaugccauuaaugggauuacaaacaaggugaauucuguaauugagaaaaugaacacucaauucacagcagugggcaaagaauucaacaaauuggaaagaaggauggaaaacuugaauaaaaaaguugaugauggguuuauagacauuuggacauauaaugcagaacuguugguucuacuggaaaaugaaaggacuuuggauuuccaugacuccaaugugaagaaucuguaugagaaaguaaaaagccaguuaaagaauaaugcuaaagaaauaggaaauggguguuuugaauucuaucacaaguguaacgaugaaugcauggagaguguaaagaauggaacuuaugacuauccaaaauauuccgaagaaucaaaguuaaacagggagaaaauugauggagugaaauuggaaucaaugggagucuaucagauucuggcgaucuacucaacagucgccaguucucugguucuuuuggucucccugggggcaaucagcuucuggauguguuccaaugggucuuugcaguguagaauaugcaucuaa

SEQ ID NO: 36124 - RNA, 1698 nt, Artificial Sequence
  derived and/or modified CDS sequence (wt) from hemagglutinin__InfluenzaA__ADC45824
augaaaguaaaacuacugguccuguuaugcacauuuacagcuacauaugcagacacaauauguauaggcuaccaugcuaacaacucgaccgacacuguugacacaguacuugaaaagaaugugacagugacacacucugucaaccugcuugagaacagucacaauggaaaacuaugucuauuaaaaggaauagccccacuacaauuggguaacugcagcguugccggguggaucuuaggaaacccagaaugcgaauuacugauuuccaaagagucauggucauacauuguagaaaaaccaaauccugagaauggaacauguuacccagggcauuucgcugacuaugaggaauugagggagcaauugaguucaguaucuucauuugagagguucgaaauauuccccaaagaaagcucauggcccaaccacaccguaaccggagugucagcaucaugcucccauaauggggaaagcaguuuuuacagaaauuugcuauggcugacggggaagaaugguuuguacccaaaccugagcaaguccuaugcaaacaacaaagaaaaagaaguccuuguacuaugggguguucaucacccgccaaacauaguugaccaaaagacccucuaucguacagaaaaugcuuauguuucuguagugucuucacauuauagcagaaaauucaccccagaaauagccaaaagacccaaaguaagagaucaagaaggaagaaucaacuacuacuggacucugcuugaacccggggauacaauaauauuugaggcaaauggaaaucuaauagcgccaagauaugcuuucgcacugaguagaggcuuuggaucaggaaucaucaacucaaaugcaccaauggauaaaugugaugcgaagugccaaacaccucagggagcuauaaacagcagucuuccuuuccagaacguacacccagucacaauaggagaguguccaaaguaugucaggagugcaaaauuaaggaugguuacaggacuaaggaacaucccauccauucaauccagagguuuguuuggagccauugccgguuucauugaagggggguggacuggaaugguagaugguugguaugguuaucaucaucagaaugagcaaggaucuggcuaugcugcagaucaaaaaagcacacaaaaugccauuaaugggauuacaaacaaggugaauucuguaauugagaaaaugaacacucaauucacagcagugggcaaagaauucaacaaauuggaaagaaggauggaaaacuugaauaaaaaaguugaugauggguuuauagacauuuggacauauaaugcagaacuguugguucuacuggaaaaugaaaggacuuuggauuuccaugacuccaaugugaagaaucuguaugagaaaguaaaaagccaguuaaagaauaaugcuaaagaaauaggaaauggguguuuugaauucuaucacaaguguaacgaugaaugcauggagaguguaaagaauggaacuuaugacuauccaaaauauuccgaagaaucaaaguuaaacagggagaaaauugauggagugaaauuggaaucaaugggagucuaucagauucuggcgaucuacucaacagucgccaguucucugguucuuuuggucucccugggggcaaucagcuucuggauguguuccaaugggucuuugcaguguagaauaugcaucuaa

SEQ ID NO: 36125 - RNA, 1698 nt, Artificial Sequence
  derived and/or modified CDS sequence (wt) from hemagglutinin__InfluenzaA__ADC45835
augaaaguaaaacuacugguccuguuaugcacauuuacagcuacauaugcagacacaauauguauaggcuaccaugcuaacaacucgaccgacacuguugacacaguacuugaaaagaaugugacagugacacacucugucaaccugcuugagaacagucacaauggaaaacuaugucuauuaaaaggaauagccccacuacaauuggguaacugcagcguugccggguggaucuuaggaaacccagaaugcgaauuacugauuuccaaggagucaugguccuacauuguagaaaaaccaaauccugagaauggaacauguuacccagggcauuucgcugacuaugaggaacugagggagcaauugaguucaguaucuucauuugagagguucgaaauauuccccaaagaaagcucauggcccaaccacaccguaaccggagugucagcaucaugcucccauaauggggaaaacaguuuuuacagaaauuugcuauggcugacggggaagaaugguuuguacccaaaccugagcaaguccuaugcaaacaacaaagaaaaagaaguccuuguacuaugggguguucaucacccgccaaacauagcugaccaaaagacccucuaucauacagaaaaugcuuauguuucuguagugucuucacauuauagcagaaaauucaccccagaaauagccaaaagacccaaaguaagagaucaagaaggaagaaucaacuacuacuggacucugcuugaacccggggauacaauaauauuugaggcaaauggaaaucuaauagcgccaagauaugcuuucgcacugaguagaggcuuuggaucaggaaucaucaacucaaaugcaccaauggauaaaugugaugcgaagugccaaacaccucaaggagcuauaaacagcagucuuccuuuccagaacguacacccagucacaauaggagaguguccaaaguaugucaggagugcaaaauuaaggaugguuacaggacuaaggaacaucccauccauucaauccagagguuuguuuggagccauugccgguuucauugaagggggguggacuggaaugguagaugguugguaugguuaucaucaucagaaugagcaaggaucuggcuaugcugcagaucaaaaaagcacacaaaaugccauuaaugggauuacaaacaaggugaauucuguaauugagaaaaugaacacucaauucacagcagugggcaaagaauucaacaaauuggaaagaaggauggaaaacuugaauaaaaaaguugaugauggauuuauagacauuuggacauauaaugcagaacuguugguucuacuggaaaaugaaaggacuuuggauuuccaugacuccaaugugaagaaucuguaugagaaaguaaaaagccaguuaaagaauaaugcuaaagaaauaggaaauggguguuuugaauucuaucacaaguguaacgaugaaugcauggagaguguaaagaauggaacuuaugacuauccaaaauauuccgaagaaucaaaguuaaacagggagaaaauugauggagugacauuggaaucaaugggagucuaucagauuuuggcgaucuacucaacagucgccaguucucugguucucuuggucucccugggggcaaucagcuucuggauguguuccaaugggucuuugcaguguagaauaugcaucuaa

SEQ ID NO: 36126 - RNA, 1698 nt, Artificial Sequence; identical to SEQ ID NO: 34517
  derived and/or modified CDS sequence (wt) from hemagglutinin__InfluenzaA__ADC45846

SEQ ID NO: 36127 - RNA, 1701 nt, Artificial Sequence; identical to SEQ ID NO: 35767
  derived and/or modified CDS sequence (wt) from hemagglutinin__InfluenzaA__ADC53558

SEQ ID NO: 36128 - RNA, 1701 nt, Artificial Sequence
  derived and/or modified CDS sequence (wt) from hemagglutinin__InfluenzaA__ADD14087
augaaggcaauacuaguaguucugcuauauacauuugcaaccgcaaaugcagacacauuauguauagguuaucaugcgaacaauucaacagacacuguagacacaguacuagaaaagaauguaacaguaacacacucuguuaaccuucuagaagacaagcauaacgggaaacuaugcaaacuaagagggguagccccauugcauuuggguaaauguaacauugcuggcuggauccugggaaauccagagugugaaucacucuccacagcaagcucaugguccuacauuguggaaacaucuaguucagacaauggaacguguuacccaggagauuucaucgauuaugaggagcuaagagagcaauugagcucagugucaucauuugaaagguuugagauauuccccaagacaaguucauggcccaaucaugacucgaacaaagguguaacggcagcauguccucaugcuggagcaaaaagcuucuacaaaaauuuaauauggcuaguuaaaaaaggaaauucauacccaaagcucagcaaauccuacauuaaugauaaagggaaagaaguccucgugcuauggggcauucaccauccaucuacuagugcugaccaacaaagucucuaucagaaugcagaugcauauguuuuuguggggacaucaagauacagcaagaaguucaagccggaaauagcaauaagacccaaagugagggaucaagaagggagaaugaacuauuacuggacacuaguagagccgggagacaaaauaacauucgaagcaacuggaaaucuagugguaccgagauaugcauucgcaauggaaagaaaugcuggaucugguauuaucauuucagauacaccaguccacgauugcaauacaacuugucagacacccaagggugcuauaaacaccagccucccauuucagaauauacauccgaucacaauuggaaaauguccaaaauauguaaaaagcacaaaauugagacuggccacaggauugaggaaugucccgucuauucaaucuagaggccuauuuggggccauugccgguuucauugaagggggguggacagggaugguagauggaugguacgguuaucaccaucaaaaugagcaggggucaggauaugcagccgaccugaagagcacacagaaugccauugacgagauuacuaacaaaguaaauucuguuauugaaaagaugaauacacaauucacagcaguagguaaagaguucaaccaccuggaaaaaagaauagagaauuuaaauaaaaaaauugaugaugguuuccuggacauuuggacuuacaaugccgaacuguugguucuauuggaaaaugaaagaacuuuggacuaucacgauucaaaugugaagaacuuauaugaaaagguaagaagccaguuaaaaaacaaugccaaggaaauuggaaacggcugcuuugaauuuuaccacaaaugcgauaacacgugcauggaaagugucaaaaaugggacuuaugacuacccaaaauacucagaggaagcaaaauuaaacagagaagaaauagaugggguaaagcuggaaucaacaaggauuuaccagauuuuggcgaucuauucaacugucgccaguucauugguacugguagucucccugggggcaaucaguuucuggaugugcucuaaugggucucuacaguguagaauauguauuuaa

SEQ ID NO: 36129 - RNA, 1701 nt, Artificial Sequence
  derived and/or modified CDS sequence (wt) from hemagglutinin__InfluenzaA__ADD14089
augaaggcaauacuaguaguucugcuauauacauuugcaaccgcaaaugcagacacauuauguauagguuaucaugcgaacaauucaacagacacuguagacacaguacuagaaaagaauguaacaguaacacacucuguuaaccuucuagaagacaagcauaacgggaaacuaugcaaacuaagagggguagccccauugcauuuggguaaauguaacauugcuggcuggauccugggaaauccagagugugaaucacucuccacagcaagcucaugguccuacauuguggaaacaucuaguucagacaauggaacguguuacccaggagauuucaucgauuaugaggagcuaagagagcaauugagcucagugucaucauuugaaagguuugagauauuccccaagacaaguucauggcccaaucaugacucgaacaaagguguaacggcagcauguccucaugcuggagcaaaaagcuucuacaaaaauuuaauauggcuaguuaaaaaaggaaauucauacccaaagcucagcaaauccuacauuaaugauaaagggaaagaaguccucgugcuauggggcauucaccauccaucuacuagugcugaccaacaaagucucuaucagaaugcagaugcauauguuuuuguggggacaucaagauacagcaagaaguucaagccggaaauagcaauaagacccaaagugagggaucaagaagggagaaugaacuauuacuggacacuaguagagccgggagacaaaauaacauucgaagcaacuggaaaucuagugguaccgagauaugcauucgcaauggaaagaaaugcuggaucugguaucaucauuucagauacaccaguccacgauugcaauacaacuugucagacacccaagggugcuauaaacaccagccucccauuucagaauauacauccgaucacaauuggaaaauguccaaaauauguaaaaagcacaaaauugagacuggccacaggauugaggaaugucccuucuauucaaucuagaggccuauuuggggccauugccgguuucauugaagggggguggacagggaugguagauggaugguacgguuaucaccaucaaaaugagcaggggucaggauaugcagccgaucugaagagcacacagaaugccauugacgagauuacuaacaaaguaaauucuguuauugaaaagaugaauacacaguucacagcaguagguaaagaguucaaccaccuggaaaaaagaauagagaauuuaaauaaaaaaguugaugaugguuuccuggacauuuggacuuacaaugccgaacuguugguucuauuggaaaaugaaagaacuuuggacuaccacgauucaaaugugaagaacuuauaugaaaagguaagaagccaguuaaaaaacaaugccaaggaaauuggaaacggcugcuuugaauuuuaccacaaaugcgauaacacgugcauggaaagugucaaaaaugggacuuaugacuacccaaaauacucagaggaagcaaaauuaaacagagaagaaauagaugggguaaagcuggaaucaacaaggauuuaccagauuuuggcgaucuauucaacugucgccaguucauugguacugguagucucccugggggcaaucaguuucuggaugugcucuaaugggucucuacaguguagaauauguauuuaa

SEQ ID NO: 36130 - RNA, 1701 nt, Artificial Sequence; identical to SEQ ID NO: 34681
  derived and/or modified CDS sequence (wt) from hemagglutinin__InfluenzaA__ADD14093

SEQ ID NO: 36131 - RNA, 1701 nt, Artificial Sequence
  derived and/or modified CDS sequence (wt) from hemagglutinin__InfluenzaA__ADD14095
augaaggcaauacuaguaguucugcuauauacauuugcaaccgcaaaugcagacacauuauguauagguuaucaugcgaacaauucaacagacacuguagacacaguacuagaaaagaauguaacaguaacacacucuguuaaccuucuagaagacaagcauaacgggaaacuaugcaaacuaagagggguagccccauugcauuuggguaaauguaacauugcuggcuggauccugggaaauccagagugugaaucacucuccacagcaagcucaugguccuacauuguggaaacaucuaguucagacaauggaacguguuacccaggagauuucaucgauuaugaggagcuaagagagcaauugagcucagugucaucauuugaaagguuugagauauuccccaagacaaguucauggcccaaucaugacucgaacaaagguguaacggcagcauguccucaugcuggagcaaaaagcuucuacaaaaauuuaauauggcuaguuaaaaaaggaaauucauacccaaagcucagcaaauccuacauuaaugauaaagggaaagaaguccucgugcuauggggcauucaccauccaucuacuagugcugaccaacaaagucucuaucagaaugcagaugcauauguuuuuguggggacaucaagauacagcaagaaguucaagccggaaauagcaauaagacccaaagugagggaucaagaagggagaaugaacuauuacuggacacuaguagagccgggagacaaaauaacauucgaagcaacuggaaaucuaguguuaccgagauaugcauucgcaauggaaagaaaugcuggaucugguauuaucauuucagauacaccaguccacgauugcaauacaacuugucagacacccaagggugcuauaaacaccagccucccauuucagaauauacauccgaucacaauuggaaaauguccaaaauauguaaaaagcacaaaauugagacuggccacaggauugaggaaugucccgucuauucaaucuagaggccuauuuggggccauugccgguuucauugaagggggguggacagggaugguagauggaugguacgguuaucaccaucaaaaugagcaggggucaggauaugcagccgaccugaagagcacacagaaugccauugacgagauuacuaacaaaguaaauucuguuauugaaaagaugaauacacaguucacagcaguagguaaagaguucaaccaccuggaaaaaagaauagagaauuuaaauaaaaaaguugaugaugguuuccuggacauuuggacuuacaaugccgaacuguugguucuauuggaaaaugaaagaacuuuggacuaccacgauucaaaugugaagaacuuauaugaaaagguaagaagccaguuaaaaaacaaugccaaggaaauuggaaacggcugcuuugaauuuuaccacaaaugcgauaacacgugcauggaaagugucaaaaauggaacuuaugacuacccaaaauacucagaggaagcaaaauuaaacagagaagaaauagaugggguaaagcuggaaucaacaaggauuuaccagauuuuggcgaucuauucaacugucgccaguucauugguacugguagucucccugggggcaaucaguuucuggaugugcucuaaugggucucuacaguguagaauauguauuuaa

SEQ ID NO: 36132 - RNA, 1701 nt, Artificial Sequence; identical to SEQ ID NO: 34681
  derived and/or modified CDS sequence (wt) from hemagglutinin__InfluenzaA__ADD14097

SEQ ID NO: 36133 - RNA, 1701 nt, Artificial Sequence
  derived and/or modified CDS sequence (wt) from hemagglutinin__InfluenzaA__ADD14099
augaaggcaauacuaguaguucugcuauauacauuugcaaccgcaaaugcagacacauuauguauagguuaucaugcgaacaauucaacagacacuguagacacaguacuagaaaagaauguaacaguaacacacucuguuaaccuucuagaagacaagcauaacgggaaacuaugcaaacuaagagggguagccccauugcauuuggguaaauguaacauugcuggcuggauccugggaaauccagagugugaaucacucuccacagcaagcucaugguccuacauuguggaaacaucuaguucagacaauggaacguguuacccaggagauuucaucgauuaugaggagcuaagagagcaauugagcucagugucaucauuugaaagguuugagauauuccccaagacaaguucauggcccaaucaugacucgaacaaagguguaacggcagcauguccucaugcuggagcaaaaagcuucuacaaaaauuuaauauggcuaguuaaaaaaggaaauucauacccaaagcucagcaaauccuacauuaaugauaaagggaaagaaguccucgugcuauggggcauucaccauccaucuacuagugcugaccaacaaagucucuaucagaaugcagaugcauauguuuuuguggggacaucaagauacagcaagaaguucaagccggaaauagcaauaagacccaaagugagggaucaagaagggagaaugaacuauuacuggacacuaguagagccgggagacaaaauaacauucgaagcaacuggaaaucuagugguaccgagauaugcauucgcaauggaaagaaaugcuggaucugguauuaucauuucagauacaccaguccacgauugcaauacaacuugucagacacccaagggugcuauaaacaccagccucccauuucagaauauacauccgaucacaauuggaaaauguccaaaauauguaaaaagcacaaaauugagacuggccacaggauugaggaaugucccgucuauucaaucuagaggccuauuuggggccauugccgguuucauugaagggggguggacagggaugguagauggaugguacgguuaucaccaucaaaaugagcaggggucaggauaugcagccgaccugaagagcacacagaaugccauugacgagauuacuaacaaaguaaauucuguuauugaaaagaugaauacacaguucacagcaguagguaaagaguucaaccaccuggaaaaaagaauagagaauuuaaauaaaaaaguugaugaugguuuccuggacauuuggacuuacaaugccgaacuguugguucuauuggaaaaugaaagaacuuuggacuaccacgauucaaaugugaagaacuuauaugaaaagguaagaagccaguuaaaaaacaaugccaaggaaauuggaaacggcugcuuugaauuuuaccacaaaugcgauaacacgugcauggaaagugucaaaaaugggacuuaugacuacccaaaauacucagaggaagcaaaauuaaacagagaagaaauagaugggguaaaguuggaaucaacaaggauuuaccagauuuuggcgaucuauucaacugucgccaguucauugguacugguagucucccugggggcaaucaguuucuggaugugcucuaaugggucucuacaguguagaauauguauuuaa

SEQ ID NO: 36134 - RNA, 1701 nt, Artificial Sequence; identical to SEQ ID NO: 34681
  derived and/or modified CDS sequence (wt) from hemagglutinin__InfluenzaA__ADD14101

SEQ ID NO: 36135 - RNA, 1701 nt, Artificial Sequence
  derived and/or modified CDS sequence (wt) from hemagglutinin__InfluenzaA__ADD14103
augaaggcaauacuaguaguucugcuauguacauuugcaaccgcaaaugcagacacauuauguauagguuaucaugcgaacaauucaacagacacuguagacacaguacuagaaaagaauguaacaguaacacacucuguuaaccuucuagaagacaagcauaacgggaaacuaugcaaacuaagagggguagccccauugcauuuggguaaauguaacauugcuggcuggauccugggaaauccagagugugaaucacucuccacagcaagcucaugguccuacauuguggaaacaucuaguucagacaauggaacguguuacccaggagauuucaucgauuaugaggagcuaagagagcaauugagcucagugucaucauuugaaagguuugagauauuccccaagacaaguucauggcccaaucaugacucgaacaaagguguaacggcagcauguccucaugcuggagcaaaaagcuucuacaaaaauuuaauauggcuaguuaaaaaaggaaauucauacccaaagcucagcaaauccuacauuaaugauaaagggaaagaaguccucgugcuauggggcauucaccauccaucuacuagugcugaccaacaaagucucuaucagaaugcagaugcauauguuuuuguggggacaucaagauacagcaagaaguucaagccggaaauagcaauaagacccaaagugagggaucaagaagggagaaugaacuauuacuggacacuaguagagccgggagacaaaauaacauucgaagcaacuggaaaucuagugguaccgagauaugcauucgcaauggaaagaaaugcuggaucugguauuaucauuucagauacaccaguccacgauugcaauacaacuugucagacacccaagggugcuauaaacaccagccucccauuucagaauauacauccgaucacaauuggaaaauguccaaaauauguaaaaagcacaaaauugagacuggccacaggauugaggaaugucccgucuauucaaucuagaggccuauuuggggccauugccgguuucauugaagggggguggacagggaugguagauggaugguacgguuaucaccaucaaaaugagcaggggucaggauaugcagccgaccugaagagcacacagaaugccauugacgagauuacuaacaaaguaaauucuguuauugaaaagaugaauacacaguucacagcaguagguaaagaguucaaccaccuggacaaaagaauagagaauuuaaauaaaaaaauugaugaugguuuccuggacauuuggacuuacaaugccgaacuguugguucuauuggaaaaugaaagaacuuuggacuaccacgauucaaaugugaagaacuuauaugaaaagguaagaagccaguuaaaaaacaaugccaaggaaauuggaaacggcugcuuugaauuuuaccacaaaugcgauaacacgugcauggaaagugucaaaaaugggacuuaugacuacccaaaauacucagaggaagcaaaauuaaacagagaagaaauagaugggguaaagcuggaaucaacaaggauuuaccagauuuuggcgaucuauucaacugucgccaguucauugguacugguagucucccugggggcaaucaguuucuggaugugcucuaaugggucucuacaguguagaauauguauuuaa

SEQ ID NO: 36136 - RNA, 1701 nt, Artificial Sequence
  derived and/or modified CDS sequence (wt) from hemagglutinin__InfluenzaA__ADD14111
augaaggcaauacuaguaguucugcuauauacauuugcaaccgcaaaugcagacacauuauguauagguuaucaugcgaacaauucaacagacacuguagacacaguacuagaaaagaauguaacaguaacacacucuguuaaccuucuagaagacaagcauaacgggaaacuaugcaaacuaagagggguagccccauugcauuuggguaaauguaacauugcuggcuggauccugggaaauccagagugugaaucacucuccacagcaagcucaugguccuacauuguggaaauaucuaguucagacaauggaacguguuacccaggagauuucaucgauuaugaggagcuaagagagcaauugagcucagugucaucauuugaaagguuugagauauuccccaagacaaguucauggcccaaucaugacucgaacaaagguguaacggcagcauguccucaugcuggagcaaaaagcuucuacaaaaauuuaauauggcuaguuaaaaaaggaaauucauacccaaagcucagcaaauccuacauuaaugauaaagggaaagaaguccucgugcuauggggcauucaccauccaucuacuagugcugaccaacaaagucucuaucagaaugcagaugcauauguuuuuguggggacaucaagauacagcaagaaguucaagccggaaauagcaauaagacccaaagugagggaucaagaagggagaaugaacuauuacuggacacuaguagagccgggagacaaaauaacauucgaagcaacuggaaaucuagugguaccgagauaugcauucgcaauggaaagaaaugcuggaucugguauuaucauuucagauacaccaguccacgauugcaauacaacuugucagacacccaagggugcuauaaacaccagccucccauuucagaauauacauccgaucacaauuggaaaauguccaaaauauguaaaaagcacaaaauugagacuggccacaggauugaggaaugucccuucuauucaaucuagaggccuauuuggggccauugccgguuucauugaagggggguggacagggaugguagauggaugguacgguuaucaccaucaaaaugagcaggggucaggauaugcagccgaccugaagagcacacagaaugcuauugacgagauuacuaacaaaguaaauucuguuauugaaaagaugaauacacaguucacagcgguagguaaagaguucaaccaccuggaaaaaagaauagagaauuuaaauaaaaaaguugaugaugguuuccuggacauuuggacuuacaaugccgaacuguugguucuauuggaaaaugaaagaacuuuggacuaccacgauucaaaugugaagaacuuauaugaaaagguaagaagccaguuaaaaaacaaugccaaggaaauuggaaacggcugcuuugaauuuuaccacaaaugcgauaacacgugcauggaaagugucaaaaaugggacuuaugacuacccaaaauacucagaggaagcaaaauuaaacagagaagaaauagaugggguaaagcuggaaucaacaaggauuuaccagauuuuggcgaucuauucaacugucgccaguucauugguacugguagucucccugggggcaaucaguuucuggaugugcucuaaugggucucuacaguguagaauauguauuuaa

SEQ ID NO: 36137 - RNA, 1701 nt, Artificial Sequence
  derived and/or modified CDS sequence (wt) from hemagglutinin__InfluenzaA__ADD14115
augaaggcaauacuaguaguucugcuauauacauuugcaaccgcaaaugcagacacauuauguauagguuaucaugcgaacaauucaacagacacuguagacacaguacuagaaaagaauguaacaguaacacacucuguuaaccuucuagaagacaagcauaacgggaaacuaugcaaacuaagaggaguagccccauugcauuuggguaaauguaacauugcuggcuggauccugggaaauccagagugugaaucacucuccacagcaagcucaugguccuacauuguggaaacaucuaguucagacaauggaacguguuacccaggagauuucaucgauuaugaggagcuaagagagcaauugagcucagugucaucauuugaaagguuugagauauuccccaagacaaguucauggcccaaucaugacucgaacaaagguguaacggcagcauguccucaugcuggagcaaaaagcuucuacaaaaauuuaauauggcuaguuaaaaaaggaaauucauacccaaagcucagcaaauccuacauuaaugauaaagggaaagaaguccucgugcuauggggcauucaccauccaucuacuagugcugaccaacaaagucucuaucagaaugcagaugcauauguuuuuguggggacaucaagauacagcaagaaguucaagccggaaauagcaauaagacccaaagugagggaucaagaagggagaaugaacuauuacuggacacuaguagagccgggagacaaaauaacauucgaagcaacuggaaaucuagugguaccgagauaugcauucgcaauggaaagaaaugcuggaucugguauuaucauuucagauacaccaguccacgauugcaauacaacuugucagacacccaagggugcuauaaacaccagccucccauuucagaauauacauccgaucacaauuggaaaaugucccaaauauguaaaaagcacaaaauugagacuggccacaggauugaggaaugucccuucuauucaaucuagaggccuauuuggggccauugccgguuucauugaagggggguggacagggaugguagauggaugguacgguuaucaccaucaaaaugagcaggggucaggauaugcagccgaccugaagagcacacagaaugccauugacgagauuacuaacaaaguaaauucuguuauugaaaagaugaauacacaguucacagcaguagguaaagaguucaaccaccuggaaaaaagaauagagaauuuaaauaaaaaaguugaugaugguuuccuggacauuuggacuuacaaugccgaacuguugguucuauuggaaaaugaaagaacuuuggacuaccacgauucaaaugugaagaacuuauaugaaaagguaagaagccaguuaaaaaacaaugccaaggaaauuggaaacggcugcuuugaauuuuaccacaaaugcgauaacacgugcauggaaagugucaaaaaugggacuuaugacuacccaaaauacucagaggaagcaaaauuaaacagagaagaaauagaugggguaaagcuggaaucaacaaggauuuaccagauuuuggcgaucuauucaacugucgccaguucauugguacugguagucucccugggggcaaucaguuucuggaugugcucuaaugggucucuacaguguagaauauguauuuaa

SEQ ID NO: 36138 - RNA, 1701 nt, Artificial Sequence; identical to SEQ ID NO: 34681
  derived and/or modified CDS sequence (wt) from hemagglutinin__InfluenzaA__ADD14117

SEQ ID NO: 36139 - RNA, 1701 nt, Artificial Sequence
  derived and/or modified CDS sequence (wt) from hemagglutinin__InfluenzaA__ADD14119
augaaggcaauacuaguaguucugcuauauacauuugcaaccgcaaaugcagacacauuauguauagguuaucaugcgaacaauucaacagacacuguagacacaguacuagaaaagaauguaacaguaacacacucuguuaaccuucuagaagacaagcauaacgggaaacuaugcaaacuaagagggguagccccauugcauuuggguaaauguaacauugcuggcuggauccugggaaauccagagugugaaucacucuccacagcaagcucaugguccuacauuguggaaacaucuaguucagacaauggaacguguuacccaggagauuucaucgauuaugaggagcuaagagagcaauugagcucagugucaucauuugaaagguuugagauauuccccaagacaaguucauggcccaaucaugacucgaacaaagguguaacggcagcauguccucaugcuggagcaaaaagcuucuacaaaaauuuaauauggcuaguuaaaaaaggaaauucauacccaaagcucagcaaauccuacauuaaugauaaagggaaagaaguccucgugcuauggggcauucaccauccaucuacuagugcugaccaacaaagucucuaucagaaugcagaugcauauguuuuuguggggacaucaagauacagcaagaaguucaagccggaaauagcaauaagacccaaagugagggaucaagaagggagaaugaacuauuacuggacacuaguagagccgggagacaaaauaacauucgaagcaacuggaaaucuagugguaccgagauaugcauucgcaauggaaagaaaugcuggaucugguauuaucauuucagauacaccaguccacgauugcaauacaacuugucagacacccaagggugcuauaaacaccagccucccauuucagaauauacauccgaucacaauuggaaaaugucccaaauauguaaaaagcacaaaauugagacuggccacaggauugaggaaugucccuucuauucaaucuagaggccuauuuggggccauugccgguuucauugaagggggguggacagggaugguagauggaugguacgguuaucaccaucaaaaugagcaggggucaggauaugcagccgaccugaagagcacacagaaugccauugacgagauuacuaacaaaguaaauucuguuauugaaaagaugaauacacaguucacagcaguagguaaagaguucaaccaccuggaaaaaagaauagagaauuuaaauaaaaaaguugaugaugguuuccuggacauuuggacuuacaaugccgaacuguugguucuauuggaaaaugaaagaacuuuggacuaccacgauucaaaugugaagaacuuauaugaaaagguaagaagccaguuaaaaaacaaugccaaggaaauuggaaacggcugcuuugaauuuuaccacaaaugcgauaacacgugcauggaaagugucaaaaaugggacuuaugacuacccaaaauacucagaggaagcaaaauuaaacagagaagaaauagaugggguaaagcuggaaucaacaaggauuuaccagauuuuggcgaucuauucaacugucgccaguucauugguacugguagucucccugggggcaaucaguuucuggaugugcucuaaugggucucuacaguguagaauauguauuuaa

SEQ ID NO: 36140 - RNA, 1701 nt, Artificial Sequence; identical to SEQ ID NO: 36139
  derived and/or modified CDS sequence (wt) from hemagglutinin__InfluenzaA__ADD14121

SEQ ID NO: 36141 - RNA, 1701 nt, Artificial Sequence; identical to SEQ ID NO: 36139
  derived and/or modified CDS sequence (wt) from hemagglutinin__InfluenzaA__ADD14123

SEQ ID NO: 36142 - RNA, 1701 nt, Artificial Sequence; identical to SEQ ID NO: 34681
  derived and/or modified CDS sequence (wt) from hemagglutinin__InfluenzaA__ADD14127

SEQ ID NO: 36143 - RNA, 1701 nt, Artificial Sequence
  derived and/or modified CDS sequence (wt) from hemagglutinin__InfluenzaA__ADD14129
augaaggcaauacuaguaguucugcuauauacauuugcaaccgcaaaugcagacacauuauguauagguuaucaugcgaacaauucaacagacacuguagacacaguacuagaaaagaauguaacaguaacacacucuguuaaccuucuagaagacaagcauaacgggaaacuaugcaaacuaagagggguagccucauugcauuuggguaaauguaacauugcuggcuggauccugggaaauccagagugugaaucacucuccacagcaagcucaugguccuacauuguggaaacaucuaguucagacaauggaacguguuacccaggagauuucaucgauuaugaggagcuaagagagcaauugagcucagugucaucauuugaaagguuugagauauuccccaagacaaguucauggcccaaucaugacucgaacaaagguguaacggcagcauguccucaugcuggagcaaaaagcuucuacaaaaauuuaauauggcuaguuaaaaaaggaaauucauacccaaagcucagcaaauccuacauuaaugauaaagggaaagaaguccucgugcuauggggcauucaccauccaucuacuagugcugaccaacaaagucucuaucagaaugcagaugcauauguuuuuguggggacaucaagauacagcaagaaguucaagccggaaauagcaauaagacccaaagugagggaucaagaagggagaaugaacuauuacuggacacuaguagagccgggagacaaaauaacauucgaagcaacuggaaaucuagugguaccgagauaugcauucgcaauggaaagaaaugcuggaucugguauuaucauuucagauacaccaguccacgauugcaauacaacuugucagacacccaagggugcuauaaacaccagccucccauuucagaauauacauccgaucacaauuggaaaauguccaaaauauguaaaaagcacaaaauugagacuggccacaggauugaggaaugucccgucuauucaaucuagaggccuauuuggggccauugccgguuucauugaagggggguggacagggaugguagauggaugguacgguuaucaccaucaaaaugagcaggggucaggauaugcagccgaccugaagagcacacagaaugccauugacgagauuacuaacaaaguaaauucuguuauugaaaagaugaauacacaguucacagcaguagguaaagaguucaaccaccuggaaaaaagaauagagaauuuaaauaaaaaaguugaugaugguuuccuggacauuuggacuuacaaugccgaacuguugguucuauuggaaaaugaaagaacuuuggacuaccacgauucaaaugugaagaacuuauaugaaaagguaagaagccaguuaaaaaacaaugccaaggaaauuggaaacggcugcuuugaauuuuaccacaaaugcgauaacacgugcauggaaagugucaaaaaugggacuuaugacuacccaaaauacucagaggaagcaaaauuaaacagagaagaaauagaugggguaaagcuggaaucaacaaggauuuaccagauuuuggcgaucuauucaacugucgccaguucauugguacugguagucucccugggggcaaucaguuucuggaugugcucuaaugggucucuacaguguagaauauguauuuaa

SEQ ID NO: 36144 - RNA, 1701 nt, Artificial Sequence
  derived and/or modified CDS sequence (wt) from hemagglutinin__InfluenzaA__ADD14133
augaaggcaauacuaguaguucugcuauauacauuugcaaccgcaaaugcagacacauuauguauagguuaucaugcgaacaauucaacagacacuguagacacaguacuagaaaagaauguaacaguaacacacucuguuaaccuucuagaagacaagcauaacgggaaacuaugcaaacuaagagggguagccccauugcauuuggguaaauguaacauugcuggcuggauccugggaaauccagagugugaaucacucuccacagcaagcucaugguccuacauuguggaaacaucuaguucagacaauggaacguguuacccaggagauuucaucgauuaugaggagcuaagagagcaauugagcucagugucaucauuugaaagguuugagauauuccccaagacaaguucauggcccaaucaugacucgaacaaagguguaacggcagcauguccucaugcuggagcaaaaagcuucuacaaaaauuuaauauggcuaguuaaaaaaggaaauucauacccaaagcucagcaaauccuacauuaaugauaaagggaaagaaguccucgugcuauggggcauucaccauccaucuacuagugcugaccaacaaagucucuaucagaauguagaugcauauguuuuuguggggacaucaagauacagcaagaaguucaagccggaaauagcaauaagacccaaagugagggaucaagaagggagaaugaacuauuacuggacacuaguagagccgggagacaaaauaacauucgaagcaacuggaaaucuagugguaccgagauaugcauucgcaauggaaagaaaugcuggauuugguauuaucauuucagauacaccaguccacgauugcaauacaacuugucagacacccaagggugcuauaaacaccagccucccauuucagaauauacauccgaucacaauuggaaaauguccaaaauauguaaaaagcacaaaauugagacuggccacaggauugaggaaugucccuucuauucaaucuagaggccuauuuggggccauugccgguuucauugaagggggguggacagggaugguagauggaugguacgguuaucaccaucaaaaugagcaggggucaggauaugcagccgaccugaagagcacacagaaugccauugacgagauuacuaacaaaguaaauucuguuauugaaaagaugaauacacaguucacagcaguagguaaagaguucaaccaccuggaaaaaagaauagagaauuuaaauaaaaaaguugaugaugguuuccuggacauuuggacuuacaaugccgaacuguugguucuauuggaaaaugaaagaacuuuggacuaccacgauucaaaugugaagaacuuauaugaaaagguaagaagccaguuaaaaaacaaugccaaggaaauuggaaacggcugcuuugaauuuuaccacaaaugcgauaacacgugcauggaaagugucaaaaaugggacuuaugacuacccaaaauacucagaggaagcaaaauuaaacagagaagaaauagaugggguaaagcuggaaucaacaaggauuuaccagauuuuggcgaucuauucaacugucgccaguucauugguacugguagucucccugggggcaaucaguuucuggaugugcucuaaugggucucuacaguguagaauauguauuuaa

SEQ ID NO: 36145 - RNA, 1701 nt, Artificial Sequence
  derived and/or modified CDS sequence (wt) from hemagglutinin__InfluenzaA__ADD14135
augaaggcaauacuaguaguucugcuauauacauuugcaaccgcaaaugcagacacauuauguauagguuaucaugcgaacaauucaacagacacuguagacacaguacuagaaaagaauguaacaguaacacacucuguuaaccuucuagaagacaagcauaacgggaaacuaugcaaacuaagagggguagccccauugcauuuggguaaauguaacauugcuggcuggauccugggaaauccagagugugaaucacucuccacagcaagcucaugguccuacauuguggaaacaucuaguucagacaauggaacguguuacccaggagauuucaucgauuaugaggagcuaagagagcaauugagcucagugucaucauuugaaagguuugagauauuccccaagacaaguucauggcccaaucaugacucgaacaaagguguaacggcagcauguccucaugcuggagcaaaaagcuucuacaaaaauuuaauauggcuaguuaaaaaaggaaauucauacccaaagcucagcaaauccuacauuaaugauaaagggaaagaaguccucgugcuauggggcauucaccauccaucuacuagugcugaccaacaaagucucuaucagaaugcagaugcauauguuuuuguggggacaucaagauacagcaagaaguucaagccggaaauagcaauaagacccaaagugagggaucaagaagggagaaugaacuauuacuggacacuaguagagccgggagacaaaauaacauucgaagcaacuggaaaucuagugguaccgagauaugcauucgcaauggaaagaaaugcuggaucugguauuaucauuucagauacaccaguccacgauugcaauacaacuugucagacacccaagggugcuauaaacaccagccucccauuucagaauauacauccgaucacaauuggaaaauguccaaaauauguaaaaagcacaaaauugagacuggccacaggauugaggaaugucccgucuauucaaucuagaggccuauuuggggccauugccgguuucauugaagggggguggacagggaugguagauggaugguacgguuaucaccaucaaaaugagcaggggucaggauaugcagccgaccugaagagcacacagaaugccauugacgagauuacuaacaaaguaaauucuguuauugaaaagaugaauacacaauucacagcaguagguaaagaguucaaccaccuggaaaaaagaauagagaauuuaaauaaaaaaauugaugaugguuuccuggacauuuggacuuacaaugccgaacuguugguucuauuggaaaaugaaagaacuuuggacuaccacgauucaaaugugaagaacuuauaugaaaagguaagaagccaguuaaaaaacaaugccaaggaaauuggaaacggcugcuuugaauuuuaccacaaaugcgauaacacgugcauggaaagugucaaaaaugggacuuaugacuacccaaaauacucagaggaagcaaaauuaaacagagaagaaauagaugggguaaagcuggaaucaacaaggauuuaccagauuuuggcgaucuauucaacugucgccaguucauugguacugguagucucccugggggcaaucaguuucuggaugugcucuaaugggucucuacaguguagaauauguauuuaa

SEQ ID NO: 36146 - RNA, 1701 nt, Artificial Sequence; identical to SEQ ID NO: 36139
  derived and/or modified CDS sequence (wt) from hemagglutinin__InfluenzaA__ADD14137

SEQ ID NO: 36147 - RNA, 1701 nt, Artificial Sequence; identical to SEQ ID NO: 35429
  derived and/or modified CDS sequence (wt) from hemagglutinin__InfluenzaA__ADD14139

SEQ ID NO: 36148 - RNA, 1701 nt, Artificial Sequence; identical to SEQ ID NO: 34681
  derived and/or modified CDS sequence (wt) from hemagglutinin__InfluenzaA__ADD14143

SEQ ID NO: 36149 - RNA, 1701 nt, Artificial Sequence
  derived and/or modified CDS sequence (wt) from hemagglutinin__InfluenzaA__ADD14145
augaaggcaauacuaguaguucugcuauauacauuugcaaccgcaaaugcagacacauuauguauagguuaucaugcgaacaauucaacagacacuguagacacaguacuagaaaagaauguaacaguaacacacucuguuaaccuucuagaagacaagcauaacgggaaacuaugcaaacuaagagggguagccccauugcauuuggguaaauguaacauugcuggcuggauccugggaaauccagagugugaaucacucuccacagcaagcucaugguccuacauuguggaaacaucuaguucagacaauggaacguguuacccaggagauuucaucgauuaugaggagcuaagagagcaauugagcucagugucaucauuugaaagguuugagauauuccccaagacaaguucauggcccaaucaugacucgaacaaagguguaacggcagcauguccucaugcuggagcaaaaagcuucuacaaaaauuuaauauggcuaguuaaaaaaggaaauucauacccaaagcucagcaaauccuacauuaaugauaaagggaaagaaguccucgugcuauggggcauucaccauccaucuacuagugcugaccaacaaagucucuaucagaaugcagaugcauauguuuuuguggggacaucaagauacaguaagaaguucaagccggaaauagcaauaagacccaaagugagggaucaagaagggagaaugaacuauuacuggacacuaguagagccgggagacaaaauaacauucgaagcaacuggaaaucuagugguaccgagauaugcauucgcaauggaaagaaaugcuggaucugguauuaucauuucagauacaccaguccacgauugcaauacaacuugucagacacccaagggugcuauaaacaccagccucccauuucagaauauacauccgaucacaauuggaaaauguccaaaauauguaaaaagcacaaaauugagacuggccacaggauugaggaaugucccuucuauucaaucuagaggccuauuuggggccauugccgguuucauugaagggggguggacagggaugguagauggaugguacgguuaucaccaucaaaaugagcaggggucaggauaugcagccgaccugaagagcacacagaaugccauugacgagauuacuaacaaaguaaauucuguuauugaaaagaugaauacacaguucacagcaguagguaaagaguucaaccaccuggaaaaaagaauagagaauuuaaauaaaaaaguugaugaugguuuccuggacauuuggacuuacaaugccgaacuguugguucuauuggaaaaugaaagaacuuuggacuaccacgauucaaaugugaagaacuuauaugaaaagguaagaagccaguuaaaaaacaaugccaaggaaauuggaaacggcugcuuugaauuuuaccacaaaugcgauaacacgugcauggaaagugucaaaaaugggacuuaugacuacccaaaauacucagaggaagcaaaauuaaacagagaagaaauagaugggguaaagcuggaaucaacaaggauuuaccagauuuuggcgaucuauucaacugucgccaguucauugguacugguagucucccugggggcaaucaguuucuggaugugcucuaaugggucucuacaguguagaauauguauuuaa

SEQ ID NO: 36150 - RNA, 1701 nt, Artificial Sequence; identical to SEQ ID NO: 34681
  derived and/or modified CDS sequence (wt) from hemagglutinin__InfluenzaA__ADD14147

SEQ ID NO: 36151 - RNA, 1701 nt, Artificial Sequence
  derived and/or modified CDS sequence (wt) from hemagglutinin__InfluenzaA__ADD14151
augaaggcaauacuaguaguucugcuauauacauuugcaaccgcaaaugcagacacauuauguauagguuaucaugcgaacaauucaacagacacuguagacacaguacuagaaaagaauguaacaguaacacacucuguuaaccuucuagaagacaagcauaacgggaaacuaugcaaacuaagagggguagccccauugcauuuggguaaauguaacauugcuggcuggauccugggaaauccagagugugaaucacucuccacagcaagcucaugguccuacauuguggaaacaucuaguucagacaauggaacguguuacccaggagauuucaucgauuaugaggagcuaagagagcaauugagcucagugucaucauuugaaagguuugagauauuccccaagacaaguucauggcccaaucaugacucgaacaaagguguaacggcagcauguccucgugcuggagcaaaaagcuucuacaaaaauuuaauauggcuaguuaaaaaaggaaauucauacccaaagcucagcaaauccuacauuaaugauaaagggaaagaaguccucgugcuauggggcauucaccauccaucuacuagugcugaccaacaaagucucuaucagaaugcagaugcauauguuuuuguggggacaucaagauacagcaagaaguucaagccggaaauagcaauaagacccaaagugagggaucaagaagggagaaugaacuauuacuggacacuaguagagccgggagacaaaauaacauucgaagcaacuggaaaucuagugguaccgagauaugcauucgcaauggaaagaaaugcuggaucugguauuaucauuucagauacaccaguccacgauugcaauacaacuugucagacacccaagggugcuauaaacaccagccucccauuucagaauauacauccgaucacaauuggaaaauguccaaaauauguaaaaagcacaaaauugagacuggccacaggauugaggaaugucccgucuauucaaucuagaggccuauuuggggccauugccgguuucauugaagggggguggacagggaugguagauggaugguacgguuaucaccaucaaaaugagcaggggucaggauaugcagccgaccugaagagcacacagaaugccauugacaagauuacuaacaaaguaaauucuguuauugaaaagaugaauacacaguucacagcaguagguaaagaguucaaccaccuggaaaaaagaauagagaauuuaaauaaaaaaguugaugaugguuuccuggacauuuggacuuacaaugccgaacuguugguucuauuggaaaaugaaagaacuuuggacuaccacgauucaaaugugaagaacuuauaugaaaagguaagaagccaguuaaaaaacaaugccaaggaaauuggaaacggcugcuuugaauuuuaccacaaaugcgauaacacgugcauggaaagugucaaaaaugggacuuaugacuacccaaaauacucagaggaagcaaaauuaaacagagaagaaauagaugggguaaagcuggaaucaacaaggauuuaccagauuuuggcgaucuauucaacugucgccaguucauugguacugguagucucccugggggcaaucaguuucuggaugugcuccaaugggucucuacaguguagaauauguauuuaa

SEQ ID NO: 36152 - RNA, 1701 nt, Artificial Sequence; identical to SEQ ID NO: 36139
  derived and/or modified CDS sequence (wt) from hemagglutinin__InfluenzaA__ADD14153

SEQ ID NO: 36153 - RNA, 1701 nt, Artificial Sequence
  derived and/or modified CDS sequence (wt) from hemagglutinin__InfluenzaA__ADD14155
augaaggcaauacuaguaguucugcuauauacauuugcaaccgcaaaugcagacacauuauguauagguuaucaugcgaacaauucaacagacacuguagacacaguacuagaaaagaauguaacaguaacacacucuguuaaccuucuagaagacaagcauaacgggaaacuaugcaaacuaagagggguagccccauugcauuuggguaaauguaacauugcuggcuggauccugggaaauccagagugugaaucacucuccacagcaagcucaugguccuacauuguggaaacaucuaguucagacaauggaacguguuacccaggagauuucaucgauuaugaggagcuaagagagcaauugagcucagugucaucauuugaaagguuugagauauuccccaagacaaguucauggcccaaucaugacucgaacaaagguguaacggcagcauguccucaugcuggagcaaaaagcuucuacaaaaauuuaauauggcuaguuaaaaaaggaaauucauacccaaagcucagcaaauccuacauuaaugauaaagggaaagaaguccucgugcuauggggcauucaccauccaucuacuagugcugaccaacaaagucucuaucagaaugcagaugcauauguuuuuguggggacaucaagauacagcaagaaguucaagccggaaauagcaauaaggcccaaagugagggaucaagaagggagaaugaacuauuacuggacacuaguagagccgggagacaaaauaacauucgaagcaacuggaaaucuagugguaccgagauaugcauucgcaauggaaagaaaugcuggaucugguauuaucauuucagauacaccaguccacgauugcaauacaacuugucagacacccaagggugcuauaaacaccagccucccauuucagaauauacauccgaucacaauuggaaaauguccaaaauauguaaaaagcacaaaauugagacuggccacaggauugaggaaugucccuucuauucaaucuagaggccuauuuggggccauugccgguuucauugaagggggguggacagggaugguagauggaugguacgguuaucaccaucaaaaugagcaggggucaggauaugcagccgaccugaagagcacacagaaugccauugacgagauuacuaacaaaguaaauucuguuauugaaaagaugaauacacaguucacagcaguagguaaagaguucaaccaccuggaaaaaagaauagagaauuuaaauaaaaaaguugaugaugguuuccuggacauuuggacuuacaaugccgaacuguugguucuauuggaaaaugaaagaacuuuggacuaccacgauucaaaugugaagaacuuauaugaaaagguaagaagccaguuaaaaaacaaugccaaggaaauuggaaacggcugcuuugaauuuuaccacaaaugcgauaacacgugcauggaaagugucaaaaaugggacuuaugacuacccaaaauacucagaggaagcaaaauuaaacagagaagaaauagaugggguaaagcuggaaucaacaaggauuuaccagauuuuggcgaucuauucaacugucgccaguucauugguacugguagucucccugggggcaaucaguuucuggaugugcucuaaugggucucuacaguguagaauauguauuuaa

SEQ ID NO: 36154 - RNA, 1701 nt, Artificial Sequence
  derived and/or modified CDS sequence (wt) from hemagglutinin__InfluenzaA__ADD14157
augaaggcaauacuaguaguucugcuauauacauuugcaaccgcaaaugcagacacauuauguauagguuaucaugcgaacaauucaacagacacuguagacacaguacuagaaaagaauguaacaguaacacacucuguuaaccuucuagaagacaagcauaacgggaaacuaugcaaacuaagagggguagccccauugcauuuggguaaauguaacauugcuggcuggauccugggaaauccagagugugaaucacucuccacagcaagcucaugguccuacauuguggaaacaucuaguucagacaauggaacguguuacccaggagauuucaucgauuaugaggagcuaagagagcaauugagcucagugucaucauuugaaagguuugagauauuccccaagacaaguucauggcccaaucaugacucgaacaaagguguaacggcagcauguccucaugcuggagcaaaaagcuucuacaaaaauuuaauauggcuaguuaaaaaaggaaauucauacccaaagcucagcaaauccuacauuaaugauaaagggaaagaaguccucgugcuauggggcauucaccauccaucuacuagugcugaccaacaaagucucuaucagaaugcagaugcauauguuuuuguggggacaucaagauacagcaagaaguucaagccggaaauagcaauaagacccaaagugagggaucaagaagggagaaugaacuauuacuggacacuaguagagccgggagacaaaauaacauucgaagcaacuggaaaucuagugguaccgagauaugcauucgcaauggaaagaaaugcuggaucugguauuaucauuucagauacaccaguccacgauugcaauacaacuugucagacacccaagggugcuauaaacaccagccucccauuucagaauauacauccgaucacaauuggaaaaugucccaaauauguaaaaagcacaaaauuaagacuggccacaggauugaggaaugucccuucuauucaaucuagaggccuauuuggggccauugccgguuucauugaagggggguggacagggaugguagauggaugguacgguuaucaccaucaaaaugagcaggggucaggauaugcagccgaccugaagagcacacagaaugccauugacgagauuacuaacaaaguaaauucuguuauugaaaagaugaauacacaguucacagcaguagguaaagaguucaaccaccuggaaaaaagaauagagaauuuaaauaaaaaaguugaugaugguuuccuggacauuuggacuuacaaugccgaacuguugguucuauuggaaaaugaaagaacuuuggacuaccacgauucaaaugugaagaacuuauaugaaaagguaagaagccaguuaaaaaacaaugccaaggaaauuggaaacggcugcuuugaauuuuaccacaaaugcgauaacacgugcauggaaagugucaaaaaugggacuuaugacuacccaaaauacucagaggaagcaaaauuaaacagagaagaaauagaugggguaaagcuggaaucaacaaggauuuaccagauuuuggcgaucuauucaacugucgccaguucauugguacugguagucucccugggggcaaucaguuucuggaugugcucuaaugggucucuacaguguagaauauguauuuaa

SEQ ID NO: 36155 - RNA, 1701 nt, Artificial Sequence
  derived and/or modified CDS sequence (wt) from hemagglutinin__InfluenzaA__ADD14162
augaaggcaauacuaguaguucugcuauauacauuugcaaccgcaaaugcagacacauuauguauagguuaucaugcgaacaauucaacagacacuguagacacaguacuagaaaagaauguaacaguaacacacucuguuaaccuucuagaagacaagcauaacgggaaacuaugcaaacuaagagggguagccccauugcauuuggguaaauguaacauugcuggcuggauccugggaaauccagagugugaaucacucuccacagcaagcucaugguccuacauuguggaaacaucuaguucagacaauggaacguguuacccaggagauuucaucgauuaugaggagcuaagagagcaauugagcucagugucaucauuugaaagguuugagauauuccccaagacaaguucauggcccaaucaugacucgaacaaagguguaacggcagcauguccucaugcuggagcaaaaagcuucuacaaaaauuuaauauggcuaguuaaaaaaggaaauucauacccaaagcucagcaaauccuacauuaaugauaaagggaaagaaguccucgugcuauggggcauucaccauccaucuacuagugcugaccaacaaagucucuaucaaaaugcagaugcauauguuuuuguggggacaucaagauacagcaagaaguucaagccggaaauagcaauaagacccaaagugagggaucaagaagggagaaugaacuauuacuggacacuaguagagccgggagacaaaauaacauucgaagcaacuggaaaucuagugguaccgagauaugcauucgcaauggaaagaaaugcuggaucugguauuaucauuucagauacaccaguccacgauugcaauacaacuugucagacacccaagggugcuauaaacaccagccucccauuucagaauauacauccgaucacaauuggaaaauguccaaaauauguaaaaagcacaaaauugagacuggccacaggauugaggaaugucccgucuauucaaucuagaggccuauuuggggccauugccgguuucauugaagggggguggacagggaugguagauggaugguacgguuaucaccaucaaaaugagcaggggucaggauaugcagccgaccugaagagcacacagaaugccauugacgagauuacuaacaaaguaaauucuguuauugaaaagaugaauacacaguucacagcaguagguaaagaguucaaccaccuggaaaaaagaauagagaauuuaaauaaaaaaguugaugaugguuuccuggacauuuggacuuacaaugccgaacuguugguucuauuggaaaaugaaagaacuuuggacuaccacgauucaaaugugaagaacuuauaugaaaagguaagaagccaguuaaaaaacaaugccaaggaaauuggaaacggcugcuuugaauuuuaccacaaaugcgauaacacgugcauggaaagugucaaaaaugggacuuaugacuacccaaaauacucagaggaagcaaaauuaaacagagaagaaauagaugggguaaagcuggaaucaacaaggauuuaccagauuuuggcgaucuauucaacugucgccaguucauugguacugguagucucccugggggcaaucaguuucuggaugugcucuaaugggucucuacaguguagaauauguauuuaa

SEQ ID NO: 36156 - RNA, 1701 nt, Artificial Sequence; identical to SEQ ID NO: 35309
  derived and/or modified CDS sequence (wt) from hemagglutinin__InfluenzaA__ADD14172

SEQ ID NO: 36157 - RNA, 1701 nt, Artificial Sequence
  derived and/or modified CDS sequence (wt) from hemagglutinin__InfluenzaA__ADD14182
augaaggcaauacuaguaguucugcuauauacauuugcaaccgcaaaugcagacacauuauguauagguuaucaugcgaacaauucaacagacacuguagacacaguacuagaaaagaauguaacaguaacacacucuguuaaccuucuagaagacaagcauaacgggaaacuaugcaaacuaagagggguagccccauugcauuuggguaaauguaacauugcuggcuggauccugggaaauccagagugugaaucacucuccacagcaagcucaugguccuacauuguggaaacaucuaguucagacaaugggacguguuacccaggagauuucaucgauuaugaggagcuaagagagcaauugagcucagugucaucauuugaaagguuugagauauuccccaagacaaguucauggcccaaucaugacucgaacaaagguguaacggcagcauguccucaugcuggagcaaaaagcuucuacaaaaauuuaauauggcuaguuaaaaaaggaaauucauacccaaagcucagcaaauccuacauuaaugauaaagggaaagaaguccucgugcuauggggcauucaccauccaucuacuagugcugaccaacaaagucucuaucagaaugcagaugcauauguuuuuguggggacaucaagauacagcaagaaguucaagccggaaauagcaauaagacccaaagugagggaucaagaagggagaaugaacuauuacuggacacuaguagagccgggagacaaaauaacauucgaagcaacuggaaaucuagugguaccgagauaugcauucgcaauggaaagaaaugcuggaucugguauuaucauuucagauacaccaguccacgauugcaauacaacuugucagacacccaagggugcuauaaacaccagccucccauuucagaauauacauccgaucacaauuggaaaauguccaaaauauguaaaaagcacaaaauugagacuggccacaggauugaggaaugucccgucuauucaaucuagaggccuauuuggggccauugccgguuucauugaagggggguggacagggaugguagauggaugguacgguuaucaccaucaaaaugagcaggggucaggauaugcagccgaccugaagagcacacagaaugccauugacgagauuacuaacaaaguaaauucuguuauugaaaagaugaauacacaguucacagcaguagguaaagaguucaaccaccuggaaaaaagaauagagaauuuaaauaaaaaaguugaugaugguuuccuggacauuuggacuuacaaugccgaacuguugguucuauuggaaaaugaaagaacuuuggacuaccacgauucaaaugugaagaacuuauaugaaaagguaagaagccaguuaaaaaacaaugccaaggaaauuggaaacggcugcuuugaauuuuaccacaaaugcgauaacacgugcauggaaagugucaaaaaugggacuuaugacuacccaaaauacucagaggaagcaaaauuaaacagagaagaaauagaugggguaaagcuggaaucaacaaggauuuaucagauuuuggcgaucuauucaacugucgccaguucauugguacugguagucucccugggggcaaucaguuucuggaugugcucuaaugggucucuacaguguagaauauguauuuaa

SEQ ID NO: 36158 - RNA, 1701 nt, Artificial Sequence; identical to SEQ ID NO: 36157
  derived and/or modified CDS sequence (wt) from hemagglutinin__InfluenzaA__ADD14192

SEQ ID NO: 36159 - RNA, 1701 nt, Artificial Sequence; identical to SEQ ID NO: 34714
  derived and/or modified CDS sequence (wt) from hemagglutinin__InfluenzaA__ADD14202

SEQ ID NO: 36160 - RNA, 1701 nt, Artificial Sequence
  derived and/or modified CDS sequence (wt) from hemagglutinin__InfluenzaA__ADD21447
augaaggcaauacuaguguucuugcuauauacauuugcgaccgcaaaugcagacacacuauguauagguuaccaugcaaauaauucaacugacacuguugacacaguauuagaaaagaauguaacaguaacacacucuguuaaccuucuagaagacagacauaacggaaaacuauguaaacuaagagggguagcuccauugcauuuggguaaauguaacauugcuggauggcuccugggaaauccagagugugaauuacuauucacagcaagcucauggucuuacauuguggagacaucuaacucagauaaugggacauguuacccaggagauuucaucaauuaugaagagcuaagagagcaauugagcucagugucaucauuugaaagauuugagauguuccccaagucaaguucauggcccaaucaugaaacgaacagaggugugacagcagcauguccuuaugcuggagcaaacagcuucuacagaaauuuaauauggcuuguaaaaaaagaaaauucauacccaaagcuaagcaaauccuauauuaacaauaaggagaaggagguccucgugcuauggggaauucaccauccaccuaccagugcugaccaacaaagucucuaccagaaugcagaugccuauguuuuuguggggucaucaaaauacaacaagaaauucaggccagaaauagcagcaagacccaaggugagaggucaaacagggagaaugaacuacuacuggacacuaguagaaccuggagauacaauaacauucgaagcaacugaaaaucuagugguaccaagauaugccuucgcaaugaaaagagguucuggaucugguauuaucauuucagauacaccaguccacgauugcaacacgacuugucaaacacccaaaggugcuauaaacaccagccuuccauuccagaauauacauccaguuacaauuggagaauguccaaaauaugucaaaagcacaaauuugagaauggcuacaggauuaagaaauaucccgucuauucaaucuagaggccuguuuggagcuauugcuggcuuuauugaagggggauggacaggaaugauagauggaugguacgguuaucaccaucaaaaugagcaaggaucaggauaugcagccgaccgaaagagcacacagaaugccauugacgggaucacuaacaaaguaaauucuguuauugaaaagaugaacacacaauucacagcaguggguaaagaauucaaccaucuggaaaaaagaauagagaauuuaaacaaaaaaguugaugauggucuucuggauguuuggacuuauaaugccgaacuguugguucuauuagaaaaugaaagaacuuuggauuaccaugauucaaaugugaagaaccuauaugagaaaguaagaagccagcuaaaaaacaaugccaaggaaauuggaaauggcugcuuugaauuuuaccacaaaugugaugacacguguauggagagcgucagaaauggagcuuaugauuauccaaaauacucagaagaagcaaaacuaaacagagaggagauagaugggguaaagcuggaaucaacaaggauuuaccaaauuuuggcgaucuacucaacugucgccaguucauugguacuguuagucucccugggggcaaucaguuucuggaugugcuccaaugggucuuuacagugcagaauauguauuuaa

SEQ ID NO: 36161 - RNA, 1701 nt, Artificial Sequence
  derived and/or modified CDS sequence (wt) from hemagglutinin__InfluenzaA__ADD21457
augaaggcaauacuaguguucuugcuauauacauuugcgaccgcaaaugcagacacacuauguauagguuaccaugcaaauaauucaacugacacuguugacacgguauuagaaaagaauguaacaguaacacacucuguuaaccuucuagaagacagacauaacggaaaacuauguaaacuaagagggguagcuccauugcauuuggguaaauguaacauugcuggauggcuccugggaaauccagagugugaauuacuauucacagcaagcucauggucuuacauuguggagacaucuaacucagauaaugggacauguuacccaggagauuucaucaauuaugaagagcuaagagagcaauugagcucagugucaucauuugaaagauuugagauguuccccaagucaaguucauggcccaaucaugaaacgaacagaggugugacagcagcauguccuuaugcuggagcaaacagcuucuacagaaauuuaauauggcuuguaaaaaaagaaaauucauacccaaagcuaagcaaauccuauauuaacaauaaggagaaggagguccucgugcuauggggaauucaccauccaccuaccagugcugaccaacaaagucucuaccagaaugcagaugccuauguuuuuguggggucaucaaaauacaacaagaaauucaggccagaaauagcagcaagacccaaggugagaggucaaacagggagaaugaacuacuacuggacacuaguagaaccuggagauacaauaacauucgaagcaacuggaaaucuagugguaccaagauaugccuucgcaaugaaaagagguucuggaucugguauuaucauuucagauacaccaguccacgauugcaacacgacuugucaaacacccaaaggugcuguaaacaccagccuuccauuccagaauauacauccaguuacaauuggagaauguccaaaauaugucaaaagcacaaauuugagaauggcuacaggauuaagaaauaucccgucuauucaaucuagaggccuguuuggagcuauugcuggcuuuauugaagggggauggacaggaaugauagauggaugguacgguuaucaccaucaaaaugagcaaggaucaggauaugcagccgaccgaaagagcacacagaaugccauugacgggaucacuaacaaaguaaauucuguuauugaaaagaugaacacacaauucacagcaguggguaaagaauucaaccaucuggaaaaaagaauagagaauuuaaacaaaaaaguugaugauggucuucuggauguuuggacuuauaaugccgaacuguugguucuauuagaaaaugaaagaacuuuggauuaccaugauucaaaugugaagaaccuauaugagaaaguaagaagccagcuaaaaaacaaugccaaggaaauuggaaauggcugcuuugaauuuuaccacaaaugugaugacacguguauggagagcgucagaaauggaacuuaugauuauccaaaauacucagaagaagcaaaacuaaacagagaggagauagaugggguaaagcuggaaucaacaaggauuuaccaaauuuuggcgaucuacucaacugucgccaguucauugguacuguuagucucccugggggcaaucaguuucuggaugugcuccaaugggucuuuacagugcagaauauguauuuaa

SEQ ID NO: 36162 - RNA, 1698 nt, Artificial Sequence
  derived and/or modified CDS sequence (wt) from hemagglutinin__InfluenzaA__ADD21467
augaaagcaaaacuacugguccuguuauguacauuuacagcuacauaugcagacacaauauguauaggauaccaugccaacaacucaaccgacacuguugacacaguacuugagaagaaugugacagugacacacucugucaaccuacuugaggacagucacaauggaaaacuaugucuacuaaaaggaauagccccacuacaauuggguaauugcagcguugccggauggaucuuaggaaacccagaaugcgaauuacugauuuccaaggaaucaugguccuacauuguagaaacaccaaauccugagaauggaacauguuacccaggguauuucgccgacuaugaggaacugagggagcaauugaguucaguaucuucauuugagagauucgaaauauuccccaaagaaagcucauggcccaaccacaccguaaccggaguaucggcaucaugcucccauaaugggaaaagcaguuuuuaccgaaauuugcuauggcugacggggaagaaugguuuguacccaaaccugaguaaguccuaugcaaacaacaaagagaaagaaguccuuguacuaugggguguucaucacccgccuaacauaagggaccaaagggcccucuaucauacagaaaaugcuuaugucucuguagugucuucacauuauagcagacgauucaccccagaaauagccaaaagacccaaaguaagaggucaggaaggaagaaucaacuacuacuggacucugcuggaacccggggauacaauaauauuugaggcaaauggaaauuuaauagcgccaugguaugcuuucgcacugaguagaggcuuuggaucaggaaucaucaccucaaaugcaccaauggaugaaugugaugcgaagugucaaacaccucagggagcuauaaacagcagucuuccuuuccagaauguacacccagucacaauaggagaguguccaaaguaugccaggagugcaaaauuaaggaugguuacaggacuaaggaacaucccauccauucaauccagagguuuguuuggagccauugccgguuucauugaagggggguggacuggaaugguagaugggugguaugguuaucaucaucagaaugagcaaggaucuggcuaugcugcagaucaaaaaagcacacaaaaugccauuaacgggauuacaaacaaggugaauucuguaauugagaaaaugaacacucaauucacagcugugggcaaagaauucaacaaauuggaaagaaggauggaaaacuuaaauaaaaaaguugaugauggguuucuagacauuuggacauauaaugcagaauuguugguucuacuggaaaaugaaaggacuuuggauuuccaugacuccaaugugaagaaucuguaugagaaaguaaaaagccaauuaaagaauaaugccaaagaaauaggaaacggguguuuugaauucuaucacaaguguaacaaugaaugcauggagagugugaaaaauggaacuuaugacuauccaaaauauuccgaagaaucaaaguuaaacagggagaaaauugauggagugaaauuggaaucaaugggagucuaucagauucuggcgaucuacucaacugucgccaguucccugguucuuuuggucucccugggggcaaucagcuucuggauguguuccaaugggucuuugcaguguagaauaugcaucuga

SEQ ID NO: 36163 - RNA, 1701 nt, Artificial Sequence
  derived and/or modified CDS sequence (wt) from hemagglutinin__InfluenzaA__ADD21560
augaagacuaucauugcuuuuagccacauuuuaugucugauuuacgcucaaaaacuucccggaagugacaacagcauggcaacgcuaugccugggacaccaugcaguaccaaauggaacguuagugaaaacaaucacggaugaccaaauugaagugacuaaugcuacugagcugguucaaaguuccucaacagguagaauauguaacaguccucaccacauccuugaugggaaaaauugcacacugauagaugcucuauugggagacccucauugugaugacuuccaaaacaaggaaugggaccuuuuuguugaacgaagcacagccuacagcaacugcuacccuuauuaugugccggauuaugccucccuuaggucacuaguugccucauccggcacccuggaauucacccaagaaagcuucaauuggaccggaguuacucaagauggaucaagcuauacuugcagaaggaaaucuguuaacaguuucuuuaguagauuaaauugguugcauaauuuggacuacaaauauccagcgcugaacguaacuaugccaaacaaugacaaauuugacaaauuguacauuugggggguucaccacccggguacggacagggaccaaaccaaccuauauguucaagcaucagggagaguuacagucuccacaaaaagaagccaacaaacuguaaucccgaacaucggaucuagacccuggguaaggggugucuccagcauaauaagcaucuauuggacaauaguaaaaccgggagacauacuuuugauuaacagcacaggaaaucuaauugccccucgggguuacuucaaaauacaaagugggaaaagcucaauaaugagaucagaugcacccauuggcaacugcaauucugaaugcauuacuccaaauggaagcauucccaaugacaaaccuuuucaaaauguaaacaggaucacauauggggccuguccaagauauguuaagcaaaacacucugaaauuggcaacagggaugcggaauguaccagagaaacaaacuagaggcauauucggcgcaaucgcaggcuucauagaaaaugguugggaggggaugguggacgguugguacgguuucaggcaucaaaauucugaaggcacaggacaagcagcagaucuuaaaaguacucaagcagcaaucaaccaaaucaccgggaaacugaauagaguaaucaagaaaacgaacgagaaauuccaucaaaucgaaaaagaauucucagaaguagaagggagaauucaggaccuagagaaauacguugaagacacuaaaauagaucucuggucuuacaacgcggagcuucuuguugcccuggagaaccaacauacaauugauuuaacugacucagaaaugaacaaacuguucgaaagaacaaggaagcaacugcgggaaaaugcugaggacaugggcaaugguugcuucaaaauauaccacaaaugugacaaugccugcauaggaucaaucagaaauggaacuuaugaccaugauguauacagagacgaggcauuaaacaaucgguuccagaucaaaaguguucagcugaagucaggauacaaagauuggauccuauggauuuccuuugccaugucaugcuuuuugcuuuguguuguucugcugggguucauuauguggaccugccaaaaaggcaacauuaagugcaacauuugcauuuga

SEQ ID NO: 36164 - RNA, 1701 nt, Artificial Sequence; identical to SEQ ID NO: 34705
  derived and/or modified CDS sequence (wt) from hemagglutinin__InfluenzaA__ADD21734

SEQ ID NO: 36165 - RNA, 1701 nt, Artificial Sequence; identical to SEQ ID NO: 34681
  derived and/or modified CDS sequence (wt) from hemagglutinin__InfluenzaA__ADD21744

SEQ ID NO: 36166 - RNA, 1701 nt, Artificial Sequence
  derived and/or modified CDS sequence (wt) from hemagglutinin__InfluenzaA__ADD21764
augaaggcaauacuaguaguucugcuauauacauuugcaaccgcaaaugcagacacauuauguauagguuaucaugcgaacaauucaacagacacuguagacacaguacuagaaaagaauguaacaguaacacacucuguuaaccuucuagaagacaagcauaacgggaaacuaugcaaacuaagagggguagccccauugcauuuggguaaauguaacauugcuggcuggauccugggaaauccagagugugaaucacucuccacagcaagcucaugguccuacauuguggaaacaucuaguucagacaauggaacguguuacccaggagauuucaucgauuaugaggagcuaagagagcaauugagcucagugucaucauuugaaagguuugagauauuccccaagacaaguucauggcccaaucaugacucgaacaaagguguaacggcagcauguccucaugcuggagcaaaaagcuucuacaaaaauuuaauauggcuaguuaaaaaaggaaauucauacccaaagcucagcaaauccuacauuaaugauaaagggaaagaaguccucgugcuauggggcauucaccauccaucuacuagugcugaccaacaaagucucuaucagaaugcagaugcauauguuuuuguggggacaucaagauacagcaagaaguucaagccggaaauagcaauaagacccaaagugagggaucaagaagggagaaugaacuauuacuggacacuaguagagccgggagacaaaauaacauucgaagcaacuggaaaucuagugguaccgagauaugcauucgcaauggaaagaaaugcugaaucugguauuaucauuucagauacaccaguccacgauugcaauacaacuugucagacacccaagggugcuauaaacaccagccucccauuucagaauauacauccgaucacaauuggaaaauguccaaaauauguaaaaagcacaaaauugagacuggccacaggauugaggaaugucccgucuauucaaucuagaggccuauuuggggccauugccgguuucauugaagggggguggacagggaugguagauggaugguacgguuaucaccaucaaaaugagcaggggucaggauaugcagccgaccugaagagcacacagaaugccauugacgagauuacuaacaaaguaaauucuguuauugaaaagaugaauacacaguucacagcaguagguaaagaguucaaccaccuggaaaaaagaauagagaauuuaaauaaaaaaguugaugaugguuuccuggacauuuggacuuacaaugccgaacuguugguucuauuggaaaaugaaagaacuuuggacuaccacgauucaaaugugaagaacuuauaugaaaagguaagaagccaguuaaaaaacaaugccaaggaaauuggaaacggcugcuuugaauuuuaccacaaaugcgauaacacgugcauggaaagugucaaaaaugggacuuaugacuacccaaaauacucagaggaagcaaaauuaaacagagaagaaauagaugggguaaagcuggaaucaacaaggauuuaccagauuuuggcgaucuauucaacugucgccaguucauugguacugguagucucccugggggcaaucaguuucuggaugugcucuaaugggucucuacaguguagaauauguauuuaa

SEQ ID NO: 36167 - RNA, 1701 nt, Artificial Sequence
  derived and/or modified CDS sequence (wt) from hemagglutinin__InfluenzaA__ADD21774
augaaggcaauacuaguaguucugcuauauacauuugcaaccgcaaaugcagacacauuauguauagguuaucaugcgaacaauucaacagacacuguagacacaguacuagaaaagaauguaacaguaacacacucuguuaaccuucuagaagacaagcauaacgggaaacuaugcaaacuaagagggguagccccauugcauuuggguaaauguaacauugcuggcuggauccugggaaauccagagugugaaucacucuccacagcaagcucaugguccuacauuguggaaacaucuaguucagacaauggaacguguuacccaggagauuucaucgauuaugaggagcuaagagagcaauugagcucagugucaucauuugaaagguuugagauauuccccaagacaaguucauggcccaaucaugacucgaacaaagguguaacggcagcauguccucaugcuggagcaaaaagcuucuacaaaaauuuaauauggcuaguuaaaaaaggaaauucauacccaaagcucagcaaauccuacauuaaugauaaagggaaagaaguccucgugcuauggggcauucaccauccaucuacuagugcugaccaacaaagucucuaucagaaugcagaugcauauguuuuuguggggucaucaagauacagcaagaaguucaagccggaaauagcaauaagacccaaagugagggaucaagaagggagaaugaacuauuacuggacacuaguagagccgggagacaaaauaacauucgaagcaacuggaaaucuagugguaccgagauaugcauucgcaauggaaagaaaugcuggaucugguauuaucauuucagauacaccaguccacgauugcaauacaacuugucagacacccaagggugcuauaaacaccagccucccauuucagaauauacauccgaucacaauuggaaaauguccaaaauauguaaaaagcacaaaauugagacuggccacaggauugaggaaugucccgucuguucaaucuagaggccuauuuggggccauugccgguuucauugaagggggguggacagggaugguagauggaugguacgguuaucaccaucaaaaugagcaggggucaggauaugcagccgaccugaagagcacacagaaugccauugacgagauuacuaacaaaguaaauucuguuauugaaaagaugaauacacaguucacagcaguagguaaagaguucaaccaccuggaaaaaagaauagagaauuuaaauaaaaaaguugaugaugguuuccuggacauuuggacuuacaaugccgaacuguugguucuauuggaaaaugaaagaacuuuggacuaccacgauucaaaugugaagaacuuauaugaaaagguaagaagccaguuaaaaaacaaugccaaggaaauuggaaacggcugcuuugaauuuuaccacaaaugcgauaacacgugcauggaaagugucaaaaaugggacuuaugacuacccaaaauacucagaggaagcaaaauuaaacagagaagaaauagaugggguaaagcuggaaucaacaaggauuuaccagauuuuggcgaucuauucaacugucgccaguucauugguacugguagucucccugggggcaaucaguuucuggaugugcucuaaugggucucuacaguguagaauauguauuuaa

SEQ ID NO: 36168 - RNA, 1701 nt, Artificial Sequence; identical to SEQ ID NO: 34681
  derived and/or modified CDS sequence (wt) from hemagglutinin__InfluenzaA__ADD21784

SEQ ID NO: 36169 - RNA, 1701 nt, Artificial Sequence; identical to SEQ ID NO: 36065
  derived and/or modified CDS sequence (wt) from hemagglutinin__InfluenzaA__ADD21794

SEQ ID NO: 36170 - RNA, 1701 nt, Artificial Sequence; identical to SEQ ID NO: 34681
  derived and/or modified CDS sequence (wt) from hemagglutinin__InfluenzaA__ADD21804

SEQ ID NO: 36171 - RNA, 1701 nt, Artificial Sequence
  derived and/or modified CDS sequence (wt) from hemagglutinin__InfluenzaA__ADD21814
augaaggcaauacuaguaguucugcuauauacauuugcaaccgcaaaugcagacacauuauguauagguuaucaugcgaacaauucaacagacacuguagacacaguacuagaaaagaauguaacaguaacacacucuguuaaccuucuagaagacaagcauaacgggaaacuaugcaaacuaagagggguagccccauugcauuuggguaaauguaacauugcuagcuggauccugggaaauccagagugugaaucacucuccacagcaagcucaugguccuacauuguggaaacaucuaguucagacaauggaacguguuacccaggagauuucaucgauuaugaggagcuaagagagcaauugagcucagugucaucauuugaaagguuugagauauuccccaagacaaguucauggcccaaucaugacucgaacaaagguguaacggcagcauguccucaugcuggagcaaaaagcuucuacaaaaauuuaauauggcuaguuaaaaagggaaauucauacccaaagcucagcaaauccuacauuaaugauaaagggaaagaaguccucgugcuauggggcauucaccauccaucuacuagugcugaccaacaaagucucuaucagaaugcagaugcauauguuuuuguggggacaucaagauacagcaagaaguucaagccggaaauagcaauaagacccaaagugagggaucaagaagggagaaugaacuauuacuggacacuaguagagccgggagacaaaauaacauucgaagcaacuggaaaucuagugguaccgagauaugcauucgcaauggaaagaaaugcuggaucugguauuaucauuucagauacaccaguccacgauugcaauacaacuugucagacacccaagggugcuauaaacaccagccucccauuucagaauauacauccgaucacaauuggaaaaugucccaaauauguaaaaagcacaaaauugagacuggccacaggauugaggaaugucccgucuauucaaucuagaggccuauuuggggccauugccgguuucauugaagggggguggacagggaugguagauggaugguacgguuaucaccaucaaaaugagcaggggucaggauaugcagccgaccugaagagcacacagaaugccauugacgagauuacuaacaaaguaaauucuguuauugaaaagaugaauacacaguucacagcaguagguaaagaguucaaccaccuggaaaaaagaauagagaauuuaaauaaaaaaguugaugaugguuuccuggacauuuggacuuacaaugccgaacuguugguucuauuggaaaaugaaagaacuuuggacuaccacgauucaaaugugaagaacuuauaugaaaagguaagaagccaguuaaaaaacaaugccaaggaaauuggaaacggcugcuuugaauuuuaccacaaaugcgauaacacgugcauggaaagugucaaaaaugggacuuaugacuacccaaaauacucagaggaagcaaaauuaaacagagaagaaauagaugggguaaagcuggaaucaacaaggauuuaccagauuuuggcgaucuauucaacugucgccaguucauugguacugguagucucccugggggcaaucaguuucuggaugugcucuaaugggucucuacaguguagaauauguauuuaa

SEQ ID NO: 36172 - RNA, 1701 nt, Artificial Sequence
  derived and/or modified CDS sequence (wt) from hemagglutinin__InfluenzaA__ADD21824
augaaggcaauacuaguaguucugcuauauacauuugcaaccgcaaaugcagacacauuauguauagguuaucaugcgaacaauucaacagacacuguagacacaguacuagaaaagaauguaacaguaacacacucuguuaaccuucuagaagacaagcauaacgggaaacuaugcaaacuaagagggguagccccauugcauuuggguaaauguaacauugcuggcuggauccugggaaauccagagugugaaucacucuccacagcaagcucaugguccuacauuguggaaacaucuaguucagacaauggaacguguuacccaggagauuucaucgauuaugaggagcuaagagagcaauugagcucagugucaucauuugaaagguuugagauguuccccaagacaaguucauggcccaaucaugacucgaacaaagguguaacggcagcauguccucaugcuggagcaaaaagcuucuacaaaaauuuaauauggcuaguuaaaaaaggaaauucauacccaaagcucagcaaauccuacauuaaugauaaagggaaagaaguccucgugcuauggggcauucaccauccaucuacuagugcugaccaacaaagucucuaucagaaugcagaugcauauguuuuuguggggacaucaagauacagcaagaaguucaagccggaaauagcaauaagacccaaagugagggaucaagaagggagaaugaacuauuacuggacacuaguagagccgggagacaaaauaacauucgaagcaacuggaaaucuagugguaccgagauaugcauucgcaauggaaagaaaugcuggaucugguauuaucauuucagauacaccaguccacgauugcaauacaacuugucagacgcccaagggugcuauaaacaccagccucccauuucagaauauacauccgaucacaauuggaaaauguccaaaauauguaaaaagcacaaaauugagacuggccacaggauugaggaaugucccgucuauucaaucuagaggccuauuuggggccauugccgguuucauugaagggggguggacagggaugguagauggaugguacgguuaucaccaucaaaaugagcaggggucaggauaugcagccgaccugaagagcacacagaaugccauugacgagauuacuaacaaaguaaauucuguuauugaaaagaugaauacacaguucacagcaguagguaaagaguucaaccaccuggaaaaaagaauagagaauuuaaauaaaaaaguugaugaugguuuccuggacauuuggacuuacaaugccgaacuguugguucuauuggaaaaugaaagaacuuuggacuaccacgauucaaaugugaagaacuuauaugaaaagguaagaagccaguuaaaaaacaaugccaaggaaauuggaaacggcugcuuugaauuuuaccacaaaugcgauaacacgugcauggaaagugucaaaaaugggacuuaugacuacccaaaauacucagaggaagcaaaauuaaacagagaagaaauagaugggguaaagcuggaaucaacaaggauuuaccagauuuuggcgaucuauucaacugucgccaguucauugguacugguagucucccugggggcaaucaguuucuggaugugcucuaaugggucucuacaguguagaauauguauuuaa

SEQ ID NO: 36173 - RNA, 1701 nt, Artificial Sequence
  derived and/or modified CDS sequence (wt) from hemagglutinin__InfluenzaA__ADD21834
augaaggcaauacuaguaguucugcuauauacauuugcaaccgcaaaugcagacacauuauguauagguuaucaugcgaacaauucaacagacacuguagacacaguacuagaaaagaauguaacaguaacacacucuguuaaccuucuagaagacaagcauaacgggaaacuaugcaaacuaagagggguagccccauugcauuuggguaaauguaacauugcuggcuggauccugggaaauccagagugugaaucacucuccacagcaagcucaugguccuacauuguggaaacaucuaguucagacaauggaacguguuacccaggagauuucaucgauuaugaggagcuaagagagcaauugagcucagugucaucauuugaaagguuugagauguuccccaagacaaguucauggcccaaucaugacucgaacaaagguguaacggcagcauguccucaugcuggagcaaaaagcuucuacaaaaauuuaauauggcuaguuaaaaaaggaaauucauacccaaagcucagcaaauccuacauuaaugauaaagggaaagaaguccucgugcuauggggcauucaccauccaucuacuagugcugaccaacaaagucucuaucagaaugcagaugcauauguuuuuguggggacaucaagauacagcaagaaguucaagccggaaauagcaauaagacccaaagugagggaucaagaagggagaaugaacuauuacuggacacuaguagagccgggagacaaaauaacauucgaagcaacuggaaaucuagugguaccgagauaugcauucgcaauggaaagaaaugcuggaucugguauuaucauuucagauacaccaguccacgauugcaauacaacuugucagacgcccaagggugcuauaaacaccagccucccauuucagaauauacauccgaucacaauuggaaaauguccaaaauauguaaaaaguacaaaauugagacuggccacaggauugaggaaugucccgucuauucaaucuagaggccuauuuggggccauugccgguuucauugaagggggguggacagggaugguagauggaugguacgguuaucaccaucaaaaugagcaggggucaggauaugcagccgaccugaagagcacacagaaugccauugacgagauuacuaacaaaguaaauucuguuauugaaaagaugaauacacaguucacagcaguagguaaagaguucaaccaccuggaaaaaagaauagagaauuuaaauaaaaaaguugaugaugguuuccuggacauuuggacuuacaaugccgaacuguugguucuauuggaaaaugaaagaacuuuggacuaccacgauucaaaugugaagaacuuauaugaaaagguaagaagccaguuaaaaaacaaugccaaggaaauuggaaacgguugcuuugaauuuuaccacaaaugcgauaacacgugcauggaaagugucaaaaaugggacuuaugacuacccaaaauacucagaggaagcaaaauuaaacagagaagaaauagaugggguaaagcuggaaucaacaaggauuuaccagauuuuggcgaucuauucaacugucgccaguucauugguacugguagucucccugggggcaaucaguuucuggaugugcucuaaugggucucuacaguguagaauauguauuuaa

SEQ ID NO: 36174 - RNA, 1701 nt, Artificial Sequence
  derived and/or modified CDS sequence (wt) from hemagglutinin__InfluenzaA__ADD21844
augaaggcaauacuaguaguucugcuauauacauuugcaaccgcaaaugcagacacauuauguauagguuaucaugcgaacaauucaacagacacuguagacacaguacuagaaaagaauguaacaguaacacacucuguuaaccuucuagaagacaagcauaacgggaaacuaugcaaacuaagagggguagccccauugcauuuggguaaauguaacauugcuggcuggauccugggaaauccagagugugaaucacucuccacagcaagcucaugguccuacauuguggaaacaucuaguucagacaauggaacguguuacccaggagauuucaucgauuaugaggagcuaagagagcaauugagcucagugucaucauuugaaagguuugagauauuccccaagacaaguucauggcccaaucaugacucgaacaaagguguaacggcagcauguccucaugcuggagcaaaaagcuucuacaaaaauuuaauauggcuaguuaaaaaaggaaauucauacccaaagcucagcaaauccuacauuaaugauaaagggaaagaaguccucgugcuauggggcauucaccauccaucuacuagugcugaccaacaaagucucuaucagaaugcagaugcauauguuuuuguggggacaucaagauacagcaagaaguucaagccggaaauagcaauaagacccaaagugagggaucaagaagggagaaugaacuauuacuggacacuaguagagccgggagacaaaauaacauucgaagcaacuggaaaucuagugguaccgagauaugcauucgcaauggaaagaaaugcuggaucugguauuaucauuucagauacaccaguccacgauugcaauacaacuugucaaacacccaagggugcuauaaacaccagccucccauuucagaauauacauccgaucacaauuggaaaauguccaaaauauguaaaaagcacaaaauugagacuggccacaggauugaggaaugucccgucuauucaaucuagaggccuauuuggggccauugccgguuucauugaagggggguggacagggaugguagauggaugguacgguuaucaccaucaaaaugagcaggggucaggauaugcagccgaccugaagagcacacagaaugccauugacaagauuacuaacaaaguaaauucuguuauugaaaaaaugaauacacaguucacagcaguagguaaagaguucaaccaccuggaaaaaagaauagagaauuuaaauaaaaaaguugaugaugguuuccuggacauuuggacuuacaaugccgaacuguugguucuauuggaaaaugaaagaacuuuggacuaccacgauucaaaugugaagaacuuauaugaaaagguaagaagccaguuaaaaaacaaugccaaggaaauuggaaacggcugcuuugaauuuuaccacaaaugcgauaacacgugcauggaaagugucaaaaaugggacuuaugacuacccaaaauacucagaggaagcaaaauuaaacagagaagaaauagaugggguaaagcuggaaucaacaaggauuuaccagauuuuggcgaucuauucaacugucgccaguucauugguacugguagucucccugggggcaaucaguuucuggaugugcucuaaugggucucuacaguguagaauauguauuuaa

SEQ ID NO: 36175 - RNA, 1701 nt, Artificial Sequence; identical to SEQ ID NO: 35845
  derived and/or modified CDS sequence (wt) from hemagglutinin__InfluenzaA__ADD21854

SEQ ID NO: 36176 - RNA, 1701 nt, Artificial Sequence
  derived and/or modified CDS sequence (wt) from hemagglutinin__InfluenzaA__ADD21864
augaaggcaauacuaguaguucugcuauauacauuugcaaccgcaaaugcagacacauuauguauagguuaucaugcgaacaauucaacagacacuguagacacaguacuagaaaagaauguaacaguaacacacucuguuaaccuucuagaagacaagcauaacgggaaacuaugcaaacuaagagggguagccccauugcauuuggguaaauguaacauugcuggcuggauccugggaaauccagagugugaaucacucuccacagcaagcucaugguccuacauuguggaaacaucuaguucaggcaauggaacguguuacccaggagauuucaucgauuaugaggagcuaagagagcaauugagcucagugucaucauuugaaagguuugagauauuccccaagacaaguucauggcccaaucaugacucgaacaaagguguaacggcagcauguccucaugcuggagcaaaaagcuucuacaaaaauuuaauauggcuaguuaaaaaaggaaacucauacccaaagcucagcaaauccuacauuaaugauaaagggaaagaaguccucgugcuauggggcauucaccauccaucuacuagugcugaccaacaaagucucuaucagaaugcagaugcauauguuuuuguggggacaucaagauacagcaagaaguucaagccggaaauagcaauaagacccaaagugagggaucaagaagggagaaugaacuauuacuggacacuaguagagccgggagacaaaauaacauucgaagcaacuggaaaucuagugguaccgagauaugcauucgcaauggaaagaaaugcuggaucugguauuaucauuucagauacaccaguccacgauugcaauacaacuugucagacacccaagggugcuauaaacaccagccucccauuucagaauauacauccgaucacaauuggaaaauguccaaaauauguaaaaagcacaaaauugagacuggccacaggauugaggaaugucccgucuauucaaucuagaggccuauuuggggccauugccgguuucauugaagggggguggacagggaugguagauggaugguacgguuaucaccaucaaaaugagcaggggucaggauaugcagccgaccugaagagcacacagaaugccauugacgagauuacuaacaaaguaaauucuguuauugaaaagaugaauacacaguucacagcaguagguaaagaguucaaccaccuggaaaaaagaauagagaauuuaaauaaaaaaguugaugaugguuuccuggacauuuggacuuacaaugccgagcuguugguucuauuggaaaaugaaagaacuuuggacuaccacgauucaaaugugaagaacuuauaugaaaagguaagaagccaguuaaaaaacaaugccaaggaaauuggaaacggcugcuuugaauuuuaccacaaaugcgauaacacgugcauggaaagugucaaaaaugggacuuaugacuacccaaaauacucagaggaagcaaaauuaaacagagaagaaauagaugggguaaagcuggaaucaacaaggauuuaccagauuuuggcgaucuauucaacugucgccaguucauugguacugguagucucccugggggcaaucaguuucuggaugugcucuaaugggucucuacaguguagaauauguauuuaa

SEQ ID NO: 36177 - RNA, 1701 nt, Artificial Sequence
  derived and/or modified CDS sequence (wt) from hemagglutinin__InfluenzaA__ADD21884
augaaggcaauacuaguaguucugcuauauacauuugcaaccgcaaaugcagacacauuauguauagguuaucaugcgaacaauucaacagacacuguagacacaguacuagaaaagaauguaacaguaacacacucuguuaaccuucuagaagacaagcauaacgggaaacuaugcaaacuaagagggguagccccauugcauuuggguaaauguaacauugcuggcuggauccugggaaauccagagugugaaucacucuccacagcaagcucaugguccuacauuguggaaacaucuaguucaggcaauggaacguguuacccaggagauuucaucgauuaugaggagcuaagagagcaauugagcucagugucaucauuugaaagguuugagauauuccccaagacaaguucauggcccaaucaugacucgaacaaagguguaacggcagcauguccucaugcuggagcaaaaagcuucuacaaaaauuuaauauggcuaguuaaaaaaggaaacucauacccaaagcucagcaaauccuacauuaaugauaaagggaaagaaguccucgugcuauggggcauucaccauccaucuacuagugcugaccaacaaagucucuaucagaaugcagaugcauauguuuuuguggggacaucaagauacagcaagaaguucaagccggaaauagcaauaagacccaaagugagggaucaagaagggagaaugaacuauuacuggacacuaguagagccgggagacaaaauaacauucgaagcaacuggaaaucuagugguaccgagauaugcauucgcaauggaaagaaaugcuggaucugguauuaucauuucagauacaccaguccacgauugcaauacaacuugucagacacccaaaggugcuauaaacaccagccucccauuucagaauauacauccgaucacaauuggaaaauguccaaaauauguaaaaagcacaaaauugagacuggccacaggauugaggaaugucccgucuauucaaucuagaggccuauuuggggccauugccgguuucauugaagggggguggacagggaugguagauggaugguacgguuaucaccaucaaaaugagcaggggucaggauaugcagccgaccugaagagcacacagaaugccauugacgagauuacuaacaaaguaaauucuguuauugaaaagaugaauacacaguucacagcaguagguaaagaguucaaccaccuggaaaaaagaauagagaauuuaaauaaaaaaguugaugaugguuuccuggacauuuggacuuacaaugccgagcuguugguucuauuggaaaaugaaagaacuuuggacuaccacgauucaaaugugaagaacuuauaugaaaagguaagaagccaguuaaaaaacaaugccaaggaaauuggaaacggcugcuuugaauuuuaccacaaaugcgauaacacgugcaugggaagugucaaaaaugggacuuaugacuacccaaaauacucagaggaagcaaaauuaaacagagaagaaauagaugggguaaagcuggaaucaacaaggauuuaccagauuuuggcgaucuauucaacugucgccaguucauugguacugguagucucccugggggcaaucaguuucuggaugugcucuaaugggucucuacaguguagaauauguauuuaa

SEQ ID NO: 36178 - RNA, 1701 nt, Artificial Sequence; identical to SEQ ID NO: 36080
  derived and/or modified CDS sequence (wt) from hemagglutinin__InfluenzaA__ADD21894

SEQ ID NO: 36179 - RNA, 1701 nt, Artificial Sequence
  derived and/or modified CDS sequence (wt) from hemagglutinin__InfluenzaA__ADD22501
augaaggcaauacuaguaguucugcuauauacauuugcaaccgcaaaugcagacacauuauguauagguuaucaugcgaacaauucaacagacacuguagacacaguacuagaaaagaauguaacaguaacacacucuguuaaccuucuagaagacaagcauaacgggaaacuaugcaaacuaagagggguagccccauugcauuuggguaaauguaacauugcuggcuggauccugggaaauccagagugugaaucacucuccacagcaagcucaugguccuacauuguggaaacaucuaguucagacaauggaacguguuacccaggagauuucaucgauuaugaggagcuaagagagcaacugagcucagugucaucauuugaaagguuugagauauuccccaagacaaguucauggcccaaucaugacucgaacaaagguguaacggcagcauguccucaugcuggagcaaaaagcuucuacaaaaauuuaauauggcuaguuaaaaaaggaaauucauacccaaagcucagcaaauccuacauuaaugauaaagggaaagaaguccucgugcuauggggcauucaccauccaucuacuagugcugaccaacaaagucucuaucagaaugcagaugcauauguuuuuguggggacaucaaaauacagcaagaaguucaagccggaaauagcaauaagacccaaagugagggaucaagaagggagaaugaacuauuacuggacacuaguagagccgggagacaaaauaacauucgaagcaacuggaaaucuagugguaccgagauaugcauucgcaauggaaagaaaugcuggaucugguauuaucauuucagauacaccaguccacgauugcaauacaacuugucagacacccaagggugcuauaaacaccagccucccauuucagaauauacauccgaucacaauuggaaaauguccaaaauauguaaaaagcacaaaauugagacuggccacaggauugaggaaugucccgucuauucaaucuagaggccuauuuggggccauugccgguuucauugaagggggguggacagggaugguagauggaugguacgguuaucaccaucaaaaugagcaggggucaggauaugcagccgaccugaagagcacacagaaugccauugacgagauuacuaacaaaguaaauucuguuauugaaaagaugaauacacaguucacagcaguagguaaagaguucaaccaccuggaaaaaagaauagagaauuuaaauaaaaaaauugaugaugguuuccuggacauuuggacuuacaaugccgaacuguugguucuauuggaaaaugaaagaacuuuggacuaccacgauucaaaugugaagaacuuauaugaaaagguaagaauccaguuaaaaaacaaugccaaggaaauuggaaacggcugcuuugaauuuuaccacaaaugcgauaacacgugcauggaaagugucaaaaaugggacuuaugacuacccaaaauacucagaggaagcaaaauuaaacagagaagaaauagaugggguaaagcuggaaucaacaaggauuuaccagauuuuggcgaucuauucaacugucgccaguucauugguacugguagucucccugggggcaaucaguuucuggaugugcucuaaugggucucuacaguguagaauauguauuuaa

SEQ ID NO: 36180 - RNA, 1701 nt, Artificial Sequence; identical to SEQ ID NO: 36080
  derived and/or modified CDS sequence (wt) from hemagglutinin__InfluenzaA__ADD22511

SEQ ID NO: 36181 - RNA, 1701 nt, Artificial Sequence
  derived and/or modified CDS sequence (wt) from hemagglutinin__InfluenzaA__ADD22521
augaaggcaauacuaguaguucugcuauauacauuugcaaccgcaaaugcagacacauuauguauagguuaucaugcgaacaauucaacagacacuguagacacaguacuagaaaagaauguaacaguaacacacucuguuaaccuucuagaagacaagcauaacgggaaacuaugcaaacuaagagggguagccccauugcauuuggguaaauguaacauugcuggcuggauccugggaaauccagagugugaaucacucuccacagcaagcucaugguccuacauuguggaaacaucuaguucagacaauggaacguguuacccaggagauuucaucgauuaugaggagcuaagagagcaauugagcucagugucaucauuugaaagguuugagauauuccccaagacaaguucauggcccaaucaugacucgaacaaagguguaacggcagcauguccucaugcuggagcaaaaagcuucuacaaaaauuuaauauggcuaguuaaaaaaggaaauucauacccaaagcucagcaaauccuacauuaaugauaaagggaaagaaguccucgugcuauggggcauucaccauccaucuacuagugcugaccaacaaagucucuaucagaaugcagauacauauguuuuuguggggacaucaagauacagcaagaaguucaagccggaaauagcaauaagacccaaagugagggaucaagaagggagaaugaacuauuacuggacacuaguagagccgggagacaaaauaacauucgaagcaacuggaaaucuagugguaccgagauaugcauucgcaauggaaagaaaugcuggaucugguauuaucauuucagauacaccaguccacgauugcaauacaacuugucagacacccaagggugcuauaaacaccagccucccauuucagaauauacauccgaucacaauuggaaaauguccaaaauauguaaaaagcacaaaauugagacuggccacaggauugaggaaugucccgucuauucaaucuagaggccuauuuggggccauugccgguuucauugaagggggguggacagggaugguagauggaugguacgguuaucaccaucaaaaugagcaggggucaggauaugcagccgaccugaagagcacacagaaugccauugacgagauuacuaacaaaguaaauucuguuauugaaaagaugaauacacaguucacagcaguagguaaagaguucaaccaccuggaaaaaagaauagagaauuuaaauaaaaaaauugaugaugguuuccuggacauuuggacuuacaaugccgaacuguugguucuauuggaaaaugaaagaacuuuggacuaccacgauucaaaugugaagaacuuauaugaaaagguaagaagccaguuaaaaaacaaugccaaggaaauuggaaacggcugcuuugaauuuuaccacaaaugcgauaacacgugcauggaaagugucaaaaaugggacuuaugacuacccaaaauacucagaggaagcaaaauuaaacagagaagaaauagaugggguaaagcuggaaucaacaaggauuuaccagauuuuggcgaucuauucaacugucgccaguucauugguacugguagucucccugggggcaaucaguuucuggaugugcucuaaugggucucuacaguguagaauauguauuuaa

SEQ ID NO: 36182 - RNA, 1701 nt, Artificial Sequence; identical to SEQ ID NO: 34681
  derived and/or modified CDS sequence (wt) from hemagglutinin__InfluenzaA__ADD22531

SEQ ID NO: 36183 - RNA, 1701 nt, Artificial Sequence
  derived and/or modified CDS sequence (wt) from hemagglutinin__InfluenzaA__ADD22541
augaaggcaauacuaguaguucugcuauauacauuugcaaccgcaaaugcagacacauuauguauagguuaucaugcgaacaauucaacagacacuguagacacaguacuagaaaagaauguaacaguaacacacucuguuaaccuucuagaagacaagcauaacgggaaacuaugcaaacuaagagggguagccccauugcauuuggguaaauguaacauugcuggcuggauccugggaaauccagagugugaaucacucuccacagcaagcucaugguccuacauuguggaaacaucuaguucaggcaauggaacguguuacccaggagauuucaucgauuaugaggagcuaagagagcaauugagcucagugucaucauuugaaagguuugagauauuccccaagacaaguucauggcccaaucaugacucgaacaaagguguaacggcagcauguccucaugcuggagcaaaaagcuucuacaaaaauuuaauauggcuaguuaaaaaaggaaacucauacccaaagcucagcaaauccuacauuaaugauaaagggaaagaaguccucgugcuauggggcauucaccauccaucuacuagugcugaccaacaaagucucuaucagaaugcagaugcauauguuuuuguggggacaucaaaauacagcaagaaguucaagccggaaauagcaauaagacccaaagugagggaucaagaagggagaaugaacuauuacuggacacuaguagagccgggagacaaaauaacauucgaagcaacuggaaaucuagugguaccgagauaugcauucgcaauggaaagaaaugcuggaucugguauuaucauuucagauacaccaguccacgauugcaauacaacuugucagacacccaagggugcuauaaacaccagccucccauuucagaauauacauccgaucacaauuggaaaauguccaaaauauguaaaaagcacaaaauugagacuagccacaggauugaggaaugucccgucuauucaaucuagaggccuauuuggggccauugccgguuucauugaagggggguggacagggaugguagauggaugguacgguuaucaccaucaaaaugagcaggggucaggauaugcagccgaccugaagagcacacagaaugccauugacgagauuacuaacaaaguaaauucuguuauugaaaagaugaauacacaguucacagcaguggguaaagaguucaaccaccuggaaaaaagaauagagaauuuaaauaaaaaaguugaugaugguuuccuggacauuuggacuuacaaugccgaacuguugguucuauuggaaaaugaaagaacuuuggacuaccacgauucaaaugugaagaacuuauaugaaaagguaagaagccaguuaaaaaacaaugccaaggaaauuggaaacggcugcuuugaauuuuaccacaaaugcgauaacacgugcauggaaagugucaaaaaugggacuuaugacuacccaaaauacucagaggaagcaaaauuaaacagagaagaaauagaugggguaaagcuggaaucaacaaggauuuaccagauuuuggcgaucuauucaacugucgccaguucauugguacugguagucucccugggggcaaucaguuucuggaugugcucuaaugggucucuacaguguagaauauguauuuaa

SEQ ID NO: 36184 - RNA, 1701 nt, Artificial Sequence; identical to SEQ ID NO: 36080
  derived and/or modified CDS sequence (wt) from hemagglutinin__InfluenzaA__ADD22554

SEQ ID NO: 36185 - RNA, 1701 nt, Artificial Sequence; identical to SEQ ID NO: 36080
  derived and/or modified CDS sequence (wt) from hemagglutinin__InfluenzaA__ADD22564

SEQ ID NO: 36186 - RNA, 1701 nt, Artificial Sequence
  derived and/or modified CDS sequence (wt) from hemagglutinin__InfluenzaA__ADD22574
augaaggcaauacuaguaguucugcuauauacauuugcaaccgcaaaugcagacacauuauguauagguuaucaugcgaacaauucaacagacacuguagacacaguacuagaaaagaauguaacaguaacacacucuguuaaccuucuagaagacaagcauaacgggaaacuaugcaaacuaagagggguagccccauugcauuuggguaaauguaacauugcuggcuggauccugggaaauccagagugugaaucacucuccacagcaagcucaugguccuacauuguggaaacaucuaguucagacaauggaacguguuacccaggagauuucaucgauuaugaggagcuaagagagcaauugagcucagugucaucauuugaaagguuugagauauuccccaagacaaguucauggcccaaucaugacucgaacaaagguguaacggcagcauguccucaugcuggagcaaaaagcuucuacaaaaauuuaauauggcuaguuaaaaaaggaaauucauacccaaagcucagcaaauccuacauuaaugauaaagggaaagaaguccucgugcuauggggcauucaccauccaucuacuagugcugaccaacaaagucucuaucagaaugcagauacauauguuuuuguggggacaucaagauacagcaagaaguucaagccggaaauagcaauaagacccaaagugagggaucaagaagggagaaugaacuauuacuggacacuaguagagccgggagacaaaauaacauucgaagcaacuggaaaucuagugguaccgagauaugcauucgcaauggaaagaaaugcuggaucugguauuaucauuucagauacaccaguccacgauugcaauacaacuugucagacacucaagggugcuauaaacaccagccucccauuucagaauauacauccgaucacaauuggaaaauguccaaaauauguaaaaagcacaaaauugagacuggccacaggauugaggaaugucccgucuauucaaucuagaggccuauuuggggccauugccgguuucauugaagggggguggacagggaugguagauggaugguacgguuaucaccaucaaaaugagcaggggucaggauaugcagccgaccugaagagcacacagaaugccauugacgagauuacuaacaaaguaaauucuguuauugaaaagaugaauacacaguucacagcaguagguaaagaguucaaccaccuggaaaaaagaauagagaauuuaaauaaaaaaauugaugaugguuuccuggacauuuggacuuacaaugccgaacuguugguucuauuggaaaaugaaagaacuuuggacuaccacgauucaaaugugaagaacuuauaugaaaagguaagaagccaguuaaaaaacaaugccaaggaaauuggaaacggcugcuuugaauuuuaccacaaaugcgauaacacgugcauggaaagugucaaaaaugggacuuaugacuacccaaaauacucagaggaagcaaaauuaaacagagaagaaauagaugggguaaagcuggaaucaacaaggauuuaccagauuuuggcgaucuauucaacugucgccaguucauugguacugguagucucccugggggcaaucaguuucuggaugugcucuaaugggucucuacaguguagaauauguauuuaa

SEQ ID NO: 36187 - RNA, 1701 nt, Artificial Sequence
  derived and/or modified CDS sequence (wt) from hemagglutinin__InfluenzaA__ADD22584
augaaggcaauacuaguaguucugcuauauacauuugcaaccgcaaaugcagacacauuauguauagguuaucaugcgaacaauucaacagacacuguagacacaguacuagaaaagaauguaacaguaacacacucuguuaaccuucuagaagacaagcauaacgggaaacuaugcaaacuaagagggguagccccauugcauuuggguaaauguaacauugcuggcuggauccugggaaauccagagugugaaucacucuccacagcaagcucaugguccuacauuguggaaacaucuaguucaggcaauggaacguguuacccaggagauuucaucgauuaugaggagcuaagagagcaauugagcucagugucaucauuugaaagguuugagauauuccccaagacaaguucauggcccaaucaugacucgaacaaagguguaacggcagcauguccucaugcuggagcaaaaagcuucuacaaaaauuuaauauggcuaguuaaaaaaggaaacucauacccaaagcucagcaaauccuacauuaaugauaaagggaaagaaguccucgugcuauggggcauucaccauccaucuacuagugcugaccaacaaagucucuaucagaaugcagaugcauauguuuuuguggggacaucaagauacagcaagaaguucaagccggaaauagcaauaagacccaaagugagggaucaagaagggagaaugaacuauuacuggacacuaguagagccgggagacaaaauaacauucgaagcaacuggaaaucuagugguaccgagauaugcauucgcaauggaaagaaaugcuggaucugguauuaucauuucagauacaccaguccacgauugcaauacaacuugucagacacccaagggugcuauaaacaccagccucccauuucagaacauacauccgaucacaauuggaaaauguccaaaauauguaaaaagcacaaaauugagacuggccacaggauugaggaaugucccgucuauucaaucuagaggccuauuuggggccauugccgguuucauugaagggggguggacagggaugguagauggaugguacgguuaucaccaucaaaaugagcaggggucaggauaugcagccgaccugaagagcacacagaaugccauugacgagauuacuaacaaaguaaauucuguuauugaaaagaugaauacacaguucacagcaguagguaaagaguucaaccaccuggaaaaaagaauagagaauuuaaauaaaaaaguugaugaugguuuccuggacauuuggacuuacaaugccgaacuguugguucuauuggaaaaugaaagaacuuuggacuaccacgauucaaaugugaagaacuuauaugaaaagguaagaagccaguuaaaaaacaaugccaaggaaauuggaaacggcugcuuugaauuuuaccacaaaugcgauaacacgugcauggaaagugucaaaaaugggacuuaugacuacccaaaauacucagaggaagcaaaauuaaacagagaagaaauagaugggguaaagcuggaaucaacaaggauuuaccagauuuuggcgaucuauucaacugucgccaguucauugguacugguagucucccugggggcaaucaguuucuggaugugcucuaaugggucucuacaguguagaauauguauuuaa

SEQ ID NO: 36188 - RNA, 1701 nt, Artificial Sequence
  derived and/or modified CDS sequence (wt) from hemagglutinin__InfluenzaA__ADD22594
augaaggcaauacuaguaguucugcuauauacauuugcaaccgcaaaugcagacacauuauguauagguuaucaugcgaacaauucaacagacacuguagacacaguacuagaaaagaauguaacaguaacacacucuguuaaccuucuagaagacaagcauaacgggaaacuaugcaaacuaagaggaguagccccauugcauuuggguaaauguaacauugcuggcuggauccugggaaauccagagugugaaucacucuccacagcaagcucaugguccuacauuguggaaacaucuaguucagacaauggaacguguuacccaggagauuucaucgauuaugaggagcuaagagagcaauugagcucagugucaucauuugaaagguuugagauauuccccaagacaaguucauggcccaaucaugacucgaacaaagguguaacggcagcauguccucaugcuggagcaaaaagcuucuacaaaaauuuaauauggcuaguuaaaaaaggaaauucauacccaaagcucagcaaauccuacauuaaugauaaagggaaagaaguccucgugcuauggggcauucaccauccaucuacuagugcugaccaacaaagucucuaucagaaugcagaugcauauguuuuuguggggacaucaagauacagcaagaaguucaagccggaaauagcaauaagacccaaagugagggaucaagaagggagaaugaacuauuacuggacacuaguagagccgggagacaaaauaacauuugaagcaacuggaaaucuagugguaccgagauaugcauucgcaauggaaagaaaugcuggaucugguauuaucauuucagauacaccaguccacgauugcaauacaacuugucagacacccaagggugcuauaaacaccagccucccauuucagaauauacauccgaucacaauuggaaaauguccaaaauauguaaaaagcacaaaauugagacuggccacaggauugaggaaugucccgucuauucaaucuagaggccuauuuggggccauugccgguuucauugaagggggguggacagggaugguagauggaugguacgguuaucaccaucaaaaugagcaggggucaggauaugcagccgaccugaagagcacacagaaugccauugacgagauuacuaacaaaguaaauucuguuauugaaaagaugaauacacaguucacagcaguagguaaagaguucaaccaccuggaaaaaagaauagagaauuuaaauaaaaaaguugaugaugguuuccuggacauuuggacuuacaaugccgaacuguugguucuauuggaaaaugaaagaacuuuggacuaccacgauucaaaugugaagaacuuauaugaaaagguaagaagccaguuaaaaaacaaugccaaggaaauuggaaacggcugcuuugaauuuuaccacaaaugcgauaacacgugcauggaaagugucaaaaaugggacuuaugacuacccaaaauacucagaggaagcaaaauuaaacagagaagaaauagaugggguaaagcuggaaucaacaaggauuuaccagauuuuggcgaucuauucaacugucgccaguucauugguacugguagucucccugggggcaaucaguuucuggaugugcucuaaugggucucuacaguguagaauauguauuuaa

SEQ ID NO: 36189 - RNA, 1701 nt, Artificial Sequence; identical to SEQ ID NO: 36080
  derived and/or modified CDS sequence (wt) from hemagglutinin__InfluenzaA__ADD22604

SEQ ID NO: 36190 - RNA, 1701 nt, Artificial Sequence; identical to SEQ ID NO: 36080
  derived and/or modified CDS sequence (wt) from hemagglutinin__InfluenzaA__ADD22614

SEQ ID NO: 36191 - RNA, 1701 nt, Artificial Sequence; identical to SEQ ID NO: 36080
  derived and/or modified CDS sequence (wt) from hemagglutinin__InfluenzaA__ADD22624

SEQ ID NO: 36192 - RNA, 1701 nt, Artificial Sequence
  derived and/or modified CDS sequence (wt) from hemagglutinin__InfluenzaA__ADD22634
augaaggcaauacuaguaguucugcuauguacauuugcaaccgcaaaugcagacacauuauguauagguuaucaugcgaacaauucaacagacacuguagacacaguacuagaaaagaauguaacaguaacacacucuguuaaccuucuagaagacaagcauaacgggaaacuaugcaaacuaagagggguagccccauugcauuuggguaaauguaacauugcuggcuggauccugggaaauccagagugugaaucacucuccacagcaagcucaugguccuacauuguggaaacaucuaguucagacaauggaacguguuacccaggagauuucaucgauuaugaggagcuaagagagcaauugagcucagugucaucauuugaaagguuugagauauuccccaagacaaguucauggcccaaucaugacucgaacaaagguguaacggcagcauguccucaugcuggagcaaaaagcuucuacaaaaauuuaauauggcuaguuaaaaaaggaaauucauacccaaagcucagcaaauccuacauuaaugauaaagggaaagaaguccucgugcuauggggcauucaccauccaucuacuagugcugaccaacaaagucucuaucagaaugcagaugcauauguuuuuguggggacaucaagauacagcaagaaguucaagccggaaauagcaauaagacccaaagugagggaucaagaagggagaaugaacuauuacuggacacuaguagagccgggagacaaaauaacauucgaagcaacuggaaaucuagugguaccgagauaugcauucgcaauggaaagaaaugcuggaucugguauuaucauuucagauacaccaguccacgauugcaauacaacuugucagacacccaagggugcuauaaacaccagccucccauuucagaauauacauccgaucacaauuggaaaauguccaaaauauguaaaaagcacaaaauugagacuggccacaggauugaggaaugucccgucuauucaaucuagaggccuauuuggggccauugccgguuucauugaagggggguggacagggaugguagauggaugguacgguuaucaccaucaaaaugagcaggggucaggauaugcagccgaccugaagagcacacagaaugccauugacgagauuacuaacaaaguaaauucuguuauugaaaagaugaauacacaguucacagcaguagguaaagaguucaaccaccuggaaaaaagaauagagaauuuaaauaaaaaaauugaugaugguuuccuggacauuuggacuuacaaugccgaacuguugguucuauuggaaaaugaaagaacuuuggacuaccacgauucaaaugugaagaacuuauaugaaaagguaagaagccaguuaaaaaacaaugccaaggaaauuggaaacggcugcuuugaauuuuaccacaaaugcgauaacacgugcauggaaagugucaaaaaugggacuuaugacuacccaaaauacucagaggaagcaaaauuaaacagagaagaaauagaugggguaaagcuggaaucaacaaggauuuaccagauuuuggcgaucuauucaacugucgccaguucauugguacugguagucucccugggggcaaucaguuucuggaugugcucuaaugggucucuacaguguagaauauguauuuaa

SEQ ID NO: 36193 - RNA, 1701 nt, Artificial Sequence
  derived and/or modified CDS sequence (wt) from hemagglutinin__InfluenzaA__ADD22645
augaaggcaauacuaguaguucugcuauauacauuugcaaccgcaaaugcagacacauuauguauagguuaucaugcgaacaauucaacagacacuguagacacaguacuagaaaagaauguaacaguaacacacucuguuaaccuucuagaagacaagcauaacgggaaacuaugcaaacuaagagggguagccccauugcauuuggguaaauguaacauugcuggcuggauccugggaaauccagagugugaaucacucuccacagcaagcucaugguccuacauuguggaaacaucuaguucaggcaauggaacguguuacccaggagauuucaucgauuaugaggagcuaagagagcaauugagcucagugucaucauuugaaagguuugagauauuccccaagacaaguucauggcccaaucaugacucgaacaaagguguaacggcagcauguccucaugcuggagcaaaaagcuucuacaaaaauuuaauauggcuaguuaaaaaaggaaacucauacccaaagcucagcaaauccuacauuaaugauaaagggaaagaaguccucgugcuauggggcauucaccauccaucuacuagugcugaccaacaaagucucuaucagaaugcagaugcauauguuuuuguggggacaucaagauacagcaagaaguucaagccggaaauagcaauaagacccaaagugagggaucaagaagggagaaugaacuauuacuggacacuaguagagccgggagacaaaauaacauucgaagcaacuggaaaucuagugguaccgagauaugcauucgcaauggaaagaaaugcuggaucugguauuaucauuucagauacaccaguccacgauugcaauacaacuugucagacacccaagggugcuauaaacaccagccucccauuucagaauauacauccgaucacaauuggaaaauguccaaaauauguaaaaagcacaaaauugagacuggccacaggauugaggaaugucccgucuauucaaucuagaggccuauuuggggccauugccgguuucauugaagggggguggacagggaugguagauggaugguacgguuaucaccaucaaaaugagcaggggucaggauaugcagccgaccugaagagcacacagaaugccauugacgagauuacuaacaaaguaaauucuguuauugaaaagaugaauacacaguucacagcaguagguaaagaguucaaccaccuggaaaaaagaauagagaauuuaaauaaaaaaguugaugaugguuuccuggacauuuggacuuacaaugccgaacuguugguucuauuagaaaaugaaagaacuuuggacuaccacgauucaaaugugaagaacuuauaugaaaagguaagaagccaguuaaaaaacaaugccaaggaaauuggaaacggcugcuuugaauuuuaccacaaaugcgauaacacgugcauggaaagugucaaaaaugggacuuaugacuacccaaaauacucagaggaagcaaaauuaaacagagaagaaauagaagggguaaagcuggaaucaacaaggauuuaccagauuuuggcgaucuauucaacugucgccaguucauugguacugguagucucccugggggcaaucaguuucuggaugugcucuaaugggucucuacaguguagaauauguauuuaa

SEQ ID NO: 36194 - RNA, 1701 nt, Artificial Sequence
  derived and/or modified CDS sequence (wt) from hemagglutinin__InfluenzaA__ADD22665
augaaggcaauacuaguaguucugcuauauacauuugcaaccgcaaaugcagacacauuauguauagguuaucaugcgaacaauucaacagacacuguagacacaguacuagaaaagaauguaacaguaacacacucuguuaaccuucuagaagacaagcauaacgggaaacuaugcaaacuaagagggguagccccauugcauuuggguaaauguaacauugcuggcuggauccugggaaauccagagugugaaucacucuccacagcaagcucaugguccuacauuguggaaacaucuaguucaggcaauggaacguguuacccaggagauuucaucgauuaugaggagcuaagagagcaauugagcucagugucaucauuugaaagguuugagauauuccccaagacaaguucauggcccaaucaugacucgaacaaagguguaacggcagcauguccucaugcuggagcaaaaagcuucuacaaaaauuuaauauggcuaguuaaaaaaggaaacucauacccaaagcucagcaaauccuacauuaaugauaaaaggaaagaaguccucgugcuauggggcauucaccauccaucuacuagugcugaccaacaaagucucuaucagaaugcagaugcauauguuuuuguggggacaucaaaauacagcaagaaguucaagccggaaauagcaauaagacccaaagugagggaucaagaagggagaaugaacuauuacuggacacuaguagagccgggagacaaaauaacauucgaagcaacuggaaaucuagugguaccgagauaugcauucgcaauggaaagaaaugcuggaucugguauuaucauuucagauacaccaguccacgauugcaauacaacuugucagacacccaagggugcuauaaacaccagccucccauuucagaauauacauccgaucacaauuggaaaauguccaaaauauguaaaaagcacaaaauugagacuagccacaggauugaggaaugucccgucuauucaaucuagaggccuauuuggggccauugccgguuucauugaagggggguggacagggaugguagauggaugguacgguuaucaccaucaaaaugagcaggggucaggauaugcagccgaccugaagagcacacagaaugccauugacgagauuacuaacaaaguaaauucuguuauugaaaagaugaauacacaguucacagcaguagguaaagaguucaaccaccuggaaaaaagaauagagaauuuaaauaaaaaaguugaugaugguuuccuggacauuuggacuuacaaugccgaacuguugguucuauuggaaaaugaaagaacuuuggacuaccacgauucaaaugugaagaacuuauaugaaaagguaagaagccaguuaaaaaacaaugccaaggaaauuggaaacggcugcuuugaauuuuaccacaaaugcgauaacacgugcauggaaagugucaaaaaugggacuuaugacuacccaaaauacucagaggaagcaaaauuaaacagagaagaaauagaugggguaaagcuggaaucaacaaggauuuaccagauuuuggcgaucuauucaacugucgccaguucauugguacugguagucucccugggggcaaucaguuucuggaugugcucuaaugggucucuacaguguagaauauguauuuaa

SEQ ID NO: 36195 - RNA, 1701 nt, Artificial Sequence
  derived and/or modified CDS sequence (wt) from hemagglutinin__InfluenzaA__ADD22675
augaaggcaauacuaguaguucugcuauauacauuugcaaccgcaaaugcagacacauuauguauagguuaucaugcgaacaauucaacagacacuguagacacaguacuagaaaagaauguaacaguaacacacucuguuaaccuucuagaagacaagcauaacgggaaacuaugcaaacuaagagggguagccccauugcauuuggguaaauguaacauugcuggcuggauccugggaaauccagagugugaaucacucuccacagcaagcucaugguccuacauuguggaaacaucuaguucaggcaauggaacguguuacccaggagauuucaucgauuaugaggagcuaagagagcaauugagcucagugucaucauuugaaagguuugagauauuccccaagacaaguucauggccuaaucaugacucgaacaaagguguaacggcagcauguccucaugcuggagcaaaaagcuucuacaaaaauuuaauauggcuaguuaaaaaaggaaacucauacccaaagcucagcaaauccuacauuaaugauaaagggaaagaaguccucgugcuauggggcauucaccauccaucuacuagugcugaccaacaaagucucuaucagaaugcagaugcauauguuuuuguggggacaucaagauacagcaagaaguucaagccggaaauagcaauaagacccaaagugagggaucaagaagggagaaugaacuauuacuggacacuaguagagccgggagacaaaauaacauucgaagcaacuggaaaucuagugguaccgagauaugcauucgcaauggaaagaaaugcuggaucugguauuaucauuucagauacaccaguccacgauugcaauacaacuugucagacacccaagggugcuauaaacaccagccucccauuucagaacauacauccgaucacaauuggaaaauguccaaaauauguaaaaagcacaaaauugagacuggccacaggauugaggaaugucccgucuauucaaucuagaggccuauuuggggccauugccgguuucauugaagggggguggacagggaugguagauggaugguacgguuaucaccaucaaaaugagcaggggucaggauaugcagccgaccugaagagcacacagaaugccauugacgagauuacuaacaaaguaaauucuguuauugaaaagaugaauacacaguucacagcaguagguaaagaguucaaccaccuggaaaaaagaauagagaauuuaaauaaaaaaguugaugaugguuuccuggacauuuggacuuacaaugccgaacuguugguucuauuggaaaaugaaagaacuuuggacuaccacgauucaaaugugaagaacuuauaugaaaagguaagaagccaguuaaaaaacaaugccaaggaaauuggaaacggcugcuuugaauuuuaccacaaaugcgauaacacgugcauggaaagugucaaaaaugggacuuaugacuacccaaaauacucagaggaagcaaaauuaaacagagaagaaauagaugggguaaagcuggaaucaacaaggauuuaccagauuuuggcgaucuauucaacugucgccaguucauugguacugguagucucccugggggcaaucaguuucuggaugugcucuaaugggucucuacaguguagaauauguauuuaa

SEQ ID NO: 36196 - RNA, 1701 nt, Artificial Sequence
  derived and/or modified CDS sequence (wt) from hemagglutinin__InfluenzaA__ADD22685
augaaggcaauacuaguaguucugcuauauacauuugcaaccgcaaaugcagacacauuauguauagguuaucaugcgaacaauucaacagacacuguagacacaguacuagaaaagaauguaacaguaacacacucuguuaaccuucuagaagacaagcauaacgggaaacuaugcaaacuaagagggguagccccauugcauuuggguaaauguaacauugcuggcuggauccugggaaauccagagugugaaucacucuccacagcaagcucaugguccuacauuguggaaacaucuaguucaggcaauggaacguguuacccaggagauuucaucgauuaugaggagcuaagagagcaauugagcucagugucaucauuugaaagguuugagauauuccccaagacaaguucauggcccaaucaugacucgaacaaagguguaacggcagcauguccucaugcuggagcaaaaagcuucuacaaaaauuuaauauggcuaguuaaaaaaggaaacucauacccaaagcucagcaaauccuacauuaaugauaaagggaaagaaguccucgugcuauggggcauucaccauccaucuacuagugcugaccaacaaagucucuaucagaaugcagaugcauauguuuuuguggggacaucaagauacagcaagaaguucaagccggaaauagcaauaagacccaaagugagggaucaagaagggagaaugaacuauuacuggacacuaguagagccgggagacaaaauaacauucgaagcaacuggaaaucuagugguaccgagauaugcauucgcaauggaaagaaaugcuggaucugguauuaucauuucagauacaccaguccacgauugcaauacaacuugucagacacccaagggugcuauaaacaccagccucccauuucagaauauacauccgaucacaauuggaaaauguccaaaauauguaaaaagcacaaaauugagacuggccacaggauugaggaaugucccgucuauucaaucuagaggccuauuuggggccauugccgguuucauugaagggggguggacagggaugguagauggaugguacgguuaucaccaucaaaaugagcaggggucaggauaugcagccgaccugaagagcacacagaaugccauugacgagauuacuaacaaaguaaauucuguuauugaaaagaugaauacacaguucacagcaguagguaaagaguucaaccaccuggaaaaaagaauagagaauuuaaauaaaaaaguugaugaugguuuccuggacauuuggacuuacaaugccgaacuguugguucuauuggaaaaugaaagaacuuuggacuaccacgauucaaaugugaagaacuuauaugaaaagguaagaagccaguuaaaaaacaaugccaaggaaauuggaaacggcugcuuugaauuuuaccacaaaugcgacaacacgugcauggaaagugucaaaaaugggacuuaugacuacccaaaauacucagaggaagcaaaauuaaacagagaagaaauagaugggguaaagcuggaaucaacaaggauuuaccagauuuuggcgaucuauucaacugucgccaguucauugguacugguagucucccugggggcaaucaguuucuggaugugcucuaaugggucucuacaguguagaauauguauuuaa

SEQ ID NO: 36197 - RNA, 1701 nt, Artificial Sequence; identical to SEQ ID NO: 36187
  derived and/or modified CDS sequence (wt) from hemagglutinin__InfluenzaA__ADD22695

SEQ ID NO: 36198 - RNA, 1701 nt, Artificial Sequence
  derived and/or modified CDS sequence (wt) from hemagglutinin__InfluenzaA__ADD22722
augaaggcaauacuaguaguucugcuauauacauuugcaaccgcaaaugcagacacauuauguauagguuaucaugcgaacaauucaacagacacuguagacacaguacuagaaaagaauguaacaguaacacacucuguuaaccuucuagaagacaggcauaacgggaaacuauguaaacuaagagggguagccccauugcauuuggguaaauguaacauugcuggcuggauccugggaaauccagagugugaaucacucuccacagcaagcucaugguccuacauuguggaaacaucuaguucaggcaauggaacguguuacccaggagauuucaucgauuaugaggagcuaagagagcaauugagcucagugucaucauuugaaagauuugagauauuccccaagacaaguucauggcccaaucaugacucgaacaaagguguaacggcagcauguccucaugcuggagcaaaaagcuucuacaaaaauuuaauauggcuaguuaaaaaaggaaacucauacccaaagcucagcaaauccuacauuaaugauaaagggaaagaaguccucgugcuauggggcauucaccauccaucuacuagugcugaccaacaaagucucuaucagaaugcagaugcauauguuuuuguggggacaucaaguuacagcaagaaguucaagccggaaauagcaauaagacccaaagugagggaucaagaagggagaaugaacuauuacuggacacuaguagagccgggagacaaaauaacauucgaagcaacuggaaaucuagugguaccgagauaugcauucgcaauggaaagaaaugcuggaucugguauuaucauuucagauacaccaguccacgauugcaauacaacuugucagacacccaagggugcuauaaacaccagccucccauuucagaauauacauccgaucacaauuggaaaauguccaaaauauguaaaaagcacaaaauugagacuggccacaggauugaggaaugucccgucuauucaaucuagaggccuauuuggggccauugccgguuucauugaagggggguggacagggaugguagauggaugguacgguuaucaccaucaaaaugagcaggggucaggauaugcagccgaccugaagagcacacagaaugccauugacgagauuacuaacaaaguaaauucuguuauugaaaagaugaauacacaguucacagcaguagguaaagaguucaaccaccuggaaaaaagaauagagaauuuaaauaaaaaaguugaugaugguuuccuggacauuuggacuuacaaugccgaacuguugguucuauuggaaaaugaaagaacuuuggacuaccacgauucaaaugugaagaacuuauaugaaaagguaagaagccaguuaaaaaacaaugcuaaggaaauuggaaacggcugcuuugaauuuuaccacaaaugcgauaacacgugcauggaaagugucaaaaaugggacuuaugacuacccaaaauacucagaggaagcaaaauuaaacagagaagaaauagaugggguaaagcuggaaucaacaaggauuuaccagauuuuggcgaucuauucaacugucgccaguucauugguacugguagucucccugggggcaaucaguuucuggaugugcucuaaugggucucuacaguguagaauauguauuuaa

SEQ ID NO: 36199 - RNA, 1701 nt, Artificial Sequence; identical to SEQ ID NO: 36181
  derived and/or modified CDS sequence (wt) from hemagglutinin__InfluenzaA__ADD22732

SEQ ID NO: 36200 - RNA, 1701 nt, Artificial Sequence
  derived and/or modified CDS sequence (wt) from hemagglutinin__InfluenzaA__ADD22742
augaaggcaauacuaguaguucugcuauauacauuugcaaccgcaaaugcagacacauuauguauagguuaucaugcgaacaauucaacagacacuguagacacaguacuagaaaagaauguaacaguaacacacucuguuaaccuucuagaagacaagcauaacgggaaacuaugcaaacuaagagggguagccccauugcauuuggguaaauguaacauugcuggcuggauccugggaaauccagagugugaaucacucuccacagcaagcucaugguccuacauuguggaaacaucuaguucaggcaauggaacguguuacccaggagauuucaucgauuaugaggagcuaagagagcaauugagcucagugucaucauuugaaagauuugagauauuccccaagacaaguucauggcccaaucaugacucgaacaaagguguaacggcagcauguccucaugcuggagcaaaaagcuucuacaaaaauuuaauauggcuaguuaaaaaaggaaacucauacccaaagcucagcaaauccuacauuaaugauaaagggaaagaaguccucgugcuauggggcauucaccauccaucuacuagugcugaccaacaaagucucuaucagaaugcagaugcauauguuuuuguggggacaucaaguuacagcaagaaguucaagccggaaauagcaauaagacccaaagugagggaucaagaagggagaaugaacuauuacuggacacuaguagagccgggagacaaaauaacauucgaagcaacuggaaaucuagugguaccgagauaugcauucgcaauggaaagaaaugcuggaucugguauuaucauuucagauacaccaguccacgauugcaauacaacuugucagacacccaagggugcuauaaacaccagccucccauuucagaauauacauccgaucacaauuggaaaauguccaaaauauguaaaaagcacaaaauugagacuggccacaggauugaggaaugucccgucuauucaaucuagaggccuauuuggggccauugccgguuucauugaagggggguggacagggaugguagauggaugguacgguuaucaccaucaaaaugagcaggggucaggauaugcagccgaccugaagagcacacagaaugccauugacgagauuacuaacaaaguaaauucuguuauugaaaagaugaauacacaguucacagcaguagguaaagaguucaaccaccuggaaaaaagaauagagaauuuaaauaaaaaaguugaugaugguuuccuggacauuuggacuuacaaugccgaacuguugguucuauuggaaaaugaaagaacuuuggacuaccacgauucaaaugugaagaacuuauaugaaaagguaagaagccaguuaaaaaacaaugcuaaggaaauuggaaacggcugcuuugaauuuuaccacaaaugcgauaacacgugcauggaaagugucaaaaaugggacuuaugacuacccaaaauacucagaggaagcaaaauuaaacagagaagaaauagaugggguaaagcuggaaucaacaaggauuuaccagauuuuggcgaucuauucaacugucgccaguucauugguacugguagucucccugggggcaaucaguuucuggaugugcucuaaugggucucuacaguguagaauauguauuuaa

SEQ ID NO: 36201 - RNA, 1701 nt, Artificial Sequence; identical to SEQ ID NO: 34681
  derived and/or modified CDS sequence (wt) from hemagglutinin__InfluenzaA__ADD22752

SEQ ID NO: 36202 - RNA, 1701 nt, Artificial Sequence; identical to SEQ ID NO: 34772
  derived and/or modified CDS sequence (wt) from hemagglutinin__InfluenzaA__ADD22762

SEQ ID NO: 36203 - RNA, 1701 nt, Artificial Sequence; identical to SEQ ID NO: 36080
  derived and/or modified CDS sequence (wt) from hemagglutinin__InfluenzaA__ADD22772

SEQ ID NO: 36204 - RNA, 1701 nt, Artificial Sequence; identical to SEQ ID NO: 36187
  derived and/or modified CDS sequence (wt) from hemagglutinin__InfluenzaA__ADD22782

SEQ ID NO: 36205 - RNA, 1701 nt, Artificial Sequence
  derived and/or modified CDS sequence (wt) from hemagglutinin__InfluenzaA__ADD22792
augaaggcaauacuaguaguucugcuauauacauuugcaaccgcaaaugcagacacauuauguauagguuaucaugcgaacaauucaacagacacuguagacacaguacuagaaaagaauguaacaguaacacacucuguuaaccuucuagaagacaagcauaacgggaaacuaugcaaacuaagagggguagccccauugcauuuggguaaauguaacauugcuggcuggauccugggaaauccagagugugaaucacucuccacagcaagcucaugguccuacauuguggaaacaucuaguucaggcaauggaacguguuacccaggagauuucaucaauuaugaggagcuaagagagcaauugagcucagugucaucauuugaaagguuugagauauuccccaagacaaguucauggcccaaucaugacucgaacaaagguguaacggcagcauguccucaugcuggagcaaaaagcuucuacaaaaauuuaauauggcuaguuaaaaaaggaaacucauacccaaagcucagcaaauccuacauuaaugauaaagggaaagaaguccucgugcuauggggcauucaccauccaucuacuagugcugaccaacaaagucucuaucagaaugcagaugcauauguuuuuguggggacaucaagauacagcaagaaguucaagccggaaauagcaauaagacccaaagugagggaucaagaagggagaaugaacuauuacuggacacuaguagagccgggagacaaaauaacauucgaagcaacuggaaaucuagugguaccgagauaugcauucgcaauggaaagaaaugcuggaucugguauuaucauuucagauacaccaguccacgauugcaauacaacuugucagacacccaagggugcuauaaacaccagccucccauuucagaauauacauccgaucacaauuggaaaauguccaaaauauguaaaaagcacaaaauugagacuggccacaggauugaggaaugucccgucuauucaaucuagaggccuauuuggggccauugccgguuucauugaagggggguggacagggaugguagauggaugguacgguuaucaccaucaaaaugagcaggggucaggauaugcagccgaccugaagagcacacagaaugccauugacgagauuacuaacaaaguaaauucuguuauugaaaagaugaauacacaguucacagcaguagguaaagaguucaaccaccuggaaaaaagaauagagaauuuaaauaaaaaaguugaugaugguuuccuggacauuuggacuuacaaugccgagcuguuaguucuauuggaaaaugaaagaacuuuggacuaccacgauucaaaugugaagaacuuauaugaaaagguaagaagccaguuaaaaaacaaugccaaggaaauuggaaacggcugcuuugaauuuuaccacaaaugcgauaacacgugcauggaaagugucaaaaaugggacuuaugacuacccaaaauacucagaggaagcaaaauuaaacagagaagaaauagaugggguaaagcuggaaucaacaaggauuuaccagauuuuggcgaucuauucaacugucgccaguucauugguacugguagucucccugggggcaaucaguuucuggaugugcucuaaugggucucuacaguguagaauauguauuuaa

SEQ ID NO: 36206 - RNA, 1701 nt, Artificial Sequence
  derived and/or modified CDS sequence (wt) from hemagglutinin__InfluenzaA__ADD22802
augaaggcaauacuaguaguucugcuauauacauuugcaaccgcaaaugcagacacauuauguauagguuaucaugcgaacaauucaacagacacuguagacacaguacuagaaaagaauguaacaguaacacacucuguuaaccuucuagaagacaagcauaacgggaaacuaugcaaacuaagagggguagccccauugcauuuggguaaauguaacauugcuggcuggauccugggaaauccagagugugaaucacucuccacagcaagcucaugguccuacauuguggaaacaucuaguucagacaauggaacguguuacccaggagauuucaucgauuaugaggagcuaagagagcaauugagcucagugucaucauuugaaagguuugagauauuccccaagacaaguucauggcccaaucaugacucgaacaaagguguaacggcagcauguccucaugcuggagcaaaaagcuucuacaaaaauuuaauauggcuaguuaaaaaaggaaauucauacccaaagcucagcaaauccuacauuaaugauaaagggaaagaaguccucgugcuauggggcauucaccauccaucuacuagugcugaccaacaaagucucuaucagaaugcagauacauauguuuuuguggggacaucaagauacagcaagaaguucaagccggaaauagcaauaagacccaaagugagggaucaagaagggagaaugaacuauuacuggacacuaguagagccgggagacaaaauaacauucgaagcaacuggaaaucuagugguaccgagauaugcauucgcaauggaaagaaaugcuggaucugguauuaucauuucagauacaccaguccacgauugcaauacaacuugucagacacccaagggugcuauaaacaccagccucccauuucagaauauacauccgaucacaauuggaaaauguccaaaauauguaaaaagcacaaaauugagacuggccacaggauugaggaaugucccgucuauucaaucuagaggccuauuuggagccauugccgguuucauugaagggggguggacagggaugguagauggaugguacgguuaucaccaucaaaaugagcaggggucaggauaugcagccgaccugaagagcacacagaaugccauugacgagauuacuaacaaaguaaauucuguuauugaaaagaugaauacacaguucacagcaguagguaaagaguucaaccaccuggaaaaaagaauagagaauuuaaauaaaaaaauugaugaugguuuccuggacauuuggacuuacaaugccgaacuguugguucuauuggaaaaugaaagaacuuuggacuaccacgauucaaaugugaagaacuuauaugaaaagguaagaagccaguuaaaaaacaaugccaaggaaauuggaaacggcugcuuugaauuuuaccacaaaugcgauaacacgugcauggaaagugucaaaaaugggacuuaugacuacccaaaauacucagaggaagcaaaauuaaacagagaagaaauagaugggguaaagcuggaaucaacaaggauuuaccagauuuuggcgaucuauucaacugucgccaguucauugguacugguagucucccugggggcaaucaguuucuggaugugcucuaaugggucucuacaguguagaauauguauuuaa

SEQ ID NO: 36207 - RNA, 1701 nt, Artificial Sequence; identical to SEQ ID NO: 36080
  derived and/or modified CDS sequence (wt) from hemagglutinin__InfluenzaA__ADD22812

SEQ ID NO: 36208 - RNA, 1701 nt, Artificial Sequence
  derived and/or modified CDS sequence (wt) from hemagglutinin__InfluenzaA__ADD22822
augaaggcaauacuaguaguucugcuauauacauuugcaaccgcaaaugcagacacauuauguauagguuaucaugcgaacaauucaacagacacuguagacacaguacuagaaaagaauguaacaguaacacacucuguuaaccuucuagaagacaagcauaacgggaaacuaugcaaacuaagagggguagccccauugcauuuggguaaauguaacauugcuggcuggauccugggaaauccagagugugaaucacucuccacagcaagcucaugguccuacauuguggaaacaucuagugcagacaauggaacguguuacccaggagauuucaucgauuaugaggagcuaagagagcaacugagcucagugucaucauuugaaagguuugagauauuccccaagacaaguucauggcccaaucaugacucgaacaaagguguaacggcagcauguccucaugcuggagcaaaaagcuucuacaaaaauuuaauauggcuaguuaaaaaaggaaauucauacccaaagcucagcaaauccuacauuaaugauaaagggaaagaaguccucgugcuauggggcauucaccauccaucuacuagugcugaccaacaaagucucuaucagaaugcagaugcauauguuuuuguggggacaucaaaauacagcaagaaguucaagccggaaauagcaauaagacccaaagugagggaucaagaagggagaaugaacuauuacuggacacuaguagagccgggagacaaaauaacauucgaagcaacuggaaaucuagugguaccgagauaugcauucgcaauggaaagaaaugcuggaucugguauuaucauuucagauacaccaguccacgauugcaauacaacuugucagacacccaagggugcuauaaacaccagccucccauuucagaauauacauccgaucacaauuggaaaauguccaaaauauguaaaaagcacaaaauugagacuggccacaggauugaggaaugucccgucuauucaaucuagaggccuauuuggggccauugccgguuucauugaagggggguggacagggaugguagauggaugguacgguuaucaccaucaaaaugagcaggggucaggauaugcagccgaccugaagagcacacagaaugccauugacgagauuacuaacaaaguaaauucuguuauugaaaagaugaauacacaguucacagcaguagguaaagaguucaaccaccuggaaaaaagaauagagaauuuaaauaaaaaaauugaugaugguuuccuggacauuuggacuuacaaugccgaacuguugguucuauuggaaaaugaaagaacuuuggacuaccacgauucaaaugugaagaacuuauaugaaaagguaagaagccaguuaaaaaacaaugccaaggaaauuggaaacggcugcuuugaauuuuaccacaaaugcgauaacaugugcauggaaagugucaaaaaugggacuuaugacuacccaaaauacucagaggaagcaaaauuaaacagagaagaaauagaugggguaaagcuggaaucaacaaggauuuaccagauuuuggcgaucuauucaacugucgccaguucauugguacugguagucucccugggggcaaucaguuucuggaugugcucuaaugggucucuacaguguagaauauguauuuaa

SEQ ID NO: 36209 - RNA, 1701 nt, Artificial Sequence; identical to SEQ ID NO: 36080
  derived and/or modified CDS sequence (wt) from hemagglutinin__InfluenzaA__ADD22832

SEQ ID NO: 36210 - RNA, 1701 nt, Artificial Sequence
  derived and/or modified CDS sequence (wt) from hemagglutinin__InfluenzaA__ADD22842
augaaggcaauacuaguaguucugcuauauacauuugcaaccgcaaaugcagacacauuauguauagguuaucaugcgaacaauucaacagacacuguagacacaguacuagaaaagaauguaacaguaacacacucuguuaaccuucuagaagacaagcauaacgggaaacuaugcaaacuaagagggguagccccauugcauuuggguaaauguaacauugcuggcuggauccugggaaauccagagugugaaucacucuccacagcaagcucaugguccuacauuguggaaacaucuaguucaggcaauggaacguguuacccaggagauuucaucgauuaugaggagcuaagagagcaauugagcucagugucaucauuugaaagguuugagauauuccccaagacaaguucauggcccaaucaugacucgaacaaagguguaacggcagcauguccucaugcuggagcaaaaagcuucuacaaaaauuuaauauggcuaguuaaaaaaggaaacucauacccaaagcucagcaaauccuacauuaaugauaaagggaaagaaguccucgugcuauggggcauucaccauccaucuacuagugcugaccaacaaagucucuaucagaaugcagaugcauauguuuuuguggggacaucaagauacagcaagaaguucaagccggaaauagcaauaagacccaaagugagggaucaagaagggagaaugaacuauuacuggacacuaguagagccaggagacaaaauaacauucgaagcaacuggaaaucuagugguaccgagauaugcauucgcaauggaaagaaaugcuggaucugguauuaucauuucagauacaccaguccacgauugcaauacaacuugucagacacccaagggugcuauaaacaccagccucccauuucagaauauacauccgaucacaauuggaaaauguccaaaauauguaaaaagcacaaaauugagacuggccacaggauugaggaaugucccgucuauucaaucuagaggccuauuuggggccauugccgguuucauugaagggggguggacagggaugguagauggaugguacgguuaucaccaucaaaaugagcaggggucaggauaugcagccgaccugaagagcacacagaaugccauugacgagauuacuaacaaaguaaauucuguuauugaaaagaugaauacacaguucacagcaguagguaaagaguucaaccaccuggaaaaaagaauagagaauuuaaauaaaaaaguugaugaugguuuccuggacauuuggacuuacaaugccgaacuguugguucuauuggaaaaugaaagaacuuuggacuaccacgauucaaaugugaagaacuuauaugaaaagguaagaagccaguuaaaaaacaaugccaaggaaauuggaaacggcugcuuugaauuuuaccacaaaugcgauaacacgugcauggaaagugucaaaaaugggacuuaugacuacccaaaauacucagaggaagcaaaauuaaacagagaagaaauagaugggguaaagcuggaaucaacaaggauuuaccagauuuuggcgaucuauucaacugucgccaguucauugguacugguagucucccugggggcaaucaguuucuggaugugcucuaaugggucucuacaguguagaauauguauuuaa

SEQ ID NO: 36211 - RNA, 1701 nt, Artificial Sequence
  derived and/or modified CDS sequence (wt) from hemagglutinin__InfluenzaA__ADD22852
augaaggcaauacuaguaguucugcuauauacauuugcaaccgcaaaugcagacacauuauguauagguuaucaugcgaacaauucaacagacacuguagacacaguacuagaaaagaauguaacaguaacacacucuguuaaccuucuagaagacaagcauaacgggaaacuaugcaaacuaagagggguagccccauugcauuuggguaaauguaacauugcuggcuggauccugggaaauccagagugugaaucacucuccacagcaagcucaugguccuacauuguggaaacaucuaguucagacaauggaacguguuacccaggagauuucaucgauuaugaggagcuaagagagcaauugagcucagugucaucauuugaaagguuugagauauuccccaagacaaguucauggcccaaucaugacucgaacaaagguguaacggcagcauguccucaugcuggagcaaaaagcuucuacaaaaauuuaauauggcuaguuaaaaaaggaaauucauacccaaagcucagcaaauccuacauuaaugauaaagggaaagaaguccucgugcuauggggcauucaccauccaucuacuagugcugaccaacaaagucucuaucagaaugcagaugcauauguuuuuguggggacaucaagauacagcaagaaguucaagccggaaauagcaauaagacccaaagugagggaucaagaagggagaaugaacuauuacuggacacuaguagagccgggagacaaaauaacauucgaagcaacuggaaaucuagugguaccgagauaugcauucgcaauggaaagaaaugcuggaucugguauugucauuucagauacaccaguccacgauugcaauacaacuugucagacacccaagggugcuauaaacaccagccucccauuucagaauauacauccgaucacaauuggaaaauguccaaaauauguaaaaagcacaaaauugagacuggccacaggauugaggaaugucccgucuauucaaucuagaggccuauuuggggccauugccgguuucauugaagggggguggacagggaugguagauggaugguacgguuaucaccaucaaaaugagcaggggucaggauaugcagccgaccugaagagcacacagaaugccauugacgagauuacuaacaaaguaaauucuguuauugaaaagaugaauacacaguucacagcaguagguaaagaguucaaccaccuggaaaaaagaauagagaauuuaaauaaaaaaguugaugaugguuuccuggacauuuggacuuacaaugccgaacuguugguucuauuggaaaaugaaagaacuuuggacuaccacgauucaaaugugaagaacuuauaugaaaagguaagaagccaguuaaaaaacaaugccaaggaaauuggaaacggcugcuuugaauuuuaccacaaaugcgauaacacgugcauggaaagugucaaaaaugggacuuaugacuacccaaaauacucagaggaagcaaaauuaaacagagaagaaauagaugggguaaagcuggaaucaacaaggauuuaccagauuuuggcgaucuauucaacugucgccaguucauugguacugguagucucccugggggcaaucaguuucuggaugugcucuaaugggucucuacaguguagaauauguauuuaa

SEQ ID NO: 36212 - RNA, 1701 nt, Artificial Sequence
  derived and/or modified CDS sequence (wt) from hemagglutinin__InfluenzaA__ADD22941
augaaggcaauacuaguaguucugcuauauacauuugcaaccgcaaaugcagacacauuauguauagguuaucaugcgaacaauucaacagacacuguagacacaguacuagaaaagaauguaacaguaacacacucuguuaaccuucuagaagacaagcauaacgggaaacuaugcaaacuaagagggguagccccauugcauuuggguaaauguaacauugcuggcuggauccugggaaauccagagugugaaucacucuccacagcaaucucaugguccuacauuguggaaacaucuaguucaggcaauggaacguguuacccaggagauuucaucgauuaugaggagcuaagagagcaauugagcucagugucaucauuugaaagguuugagauauuccccaagacaaguucauggcccaaucaugacucgaacaaagguguaacggcagcauguccucaugcuggagcaaaaagcuucuacaaaaauuuaauauggcuaguuaaaaaaggaaacucauacccaaagcucagcaaauccuacauuaaugauaaagggaaagaaguccucgugcuauggggcauucaccauccaucuacuagugcugaccaacaaagucucuaucagaaugcagaugcauauguuuuuguggggacaucaagauacagcaagaaguucaagccggaaauagcaauaagacccaaagugagggaucaagaagggagaaugaacuauuacuggacacuaguagagccgggagacaaaauaacauucgaagcaacuggaaaucuagugguaccgagauaugcauucgcaauggaaagaaaugcuggaucugguauuaucauuucagauacaccaguccacgauugcaauacaacuugucagacacccaagggugcuauaaacaccagccucccauuucagaauauacauccgaucacaauuggaaaauguccaaaauauguaaaaagcacaaaauugagacuggccacaggauugaggaaugucccgucuauucaaucuagaggccuauuuggggccauugccgguuucauugaagggggguggacagggaugguagauggaugguacgguuaucaccaucaaaaugagcaggggucaggauaugcagccgaccugaagagcacacagaaugccauugacgagauuacuaacaaaguaaauucuguuauugaaaagaugaauacacaguucacagcaguagguaaagaguucaaccaccuggaaaaaagaauagagaauuuaaauaaaaaaguugaugaugguuuccuggacauuuggacuuacaaugccgaacuguugguucuauuggaaaaugaaagaacuuuggacuaccacgauucaaaugugaagaacuuauaugaaaagguaagaagccaguuaaaaaacaaugccaaggaaauuggaaacggcugcuuugaauuuuaccacaaaugcgauaacacgugcauggaaagugucaaaaaugggacuuaugacuacccaaaauacucagaggaagcaaaauuaaacagagaagaaauagaugggguaaagcuggaaucaacaaggauuuaccagauuuuggcgaucuauucaacugucgccaguucauugguacugguagucucccugggggcaaucaguuucuggaugugcucuaaugggucucuacaguguagaauauguauuuaa

SEQ ID NO: 36213 - RNA, 1701 nt, Artificial Sequence
  derived and/or modified CDS sequence (wt) from hemagglutinin__InfluenzaA__ADD22951
augaaggcaauacuaguaguucugcuauauacauuugcaaccgcaaaugcagacacauuauguauagguuaucaugcgaacaauucaacagacacuguagacacaguacuagaaaagaauguaacaguaacacacucuguuaaccuucuagaagacaagcauaacgggaaacuaugcaaacuaagagggguagccccauugcauuuggguaaauguaacauugcuggcuggauccugggaaauccagagugugaaucacucuccacagcaagcucaugguccuacauuguggaaacaucuaguucaggcaauggaacguguuacccaggagauuucaucgauuaugaggagcuaagagagcaauugaguucagugucaucauuugaaagguuugagauauuccccaagacaaguucauggcccaaucaugacucgaacaaagguguaacggcagcauguccucaugcuggagcaaaaagcuucuacaaaaauuuaauauggcuaguuaaaaaaggaaacucauacccaaaacucagcaaauccuacauuaaugauaaagggaaagaaguccucgugcuauggggcauucaccauccaucuacuagugcugaccaacaaagucucuaucagaaugcagaugcauauguuuuuguggggacaucaagauacagcaagaaguucaagccggaaauagcaauaagacccaaagugagggaucaagaagggagaaugaacuauuacuggacacuaguagagccgggagacaaaauaacauucgaagcaacuggaaaucuagugguaccgagauaugcauucgcaauggaaagaaaugcuggaucugguauuaucauuucagauacaccaguccacgauugcaauacaacuugucagacacccaagggugcuauaaacaccagccucccauuucagaacauacauccgaucacaauuggaaaauguccaaaauauguaaaaagcacaaaauugagacuggccacaggauugaggaaugucccgucuauucaaucuagaggccuauuuggggccauugccgguuucauugaagggggguggacagggaugguagauggaugguacgguuaucaccaucaaaaugagcaggggucaggauaugcagccgaccugaagagcacacagaaugccauugacgagauuacuaacaaaguaaauucuguuauugaaaagaugaauacacaguucacagcaguagguaaagaguucaaccaccuggaaaaaagaauagagaauuuaaauaaaaaaguugaugaugguuuccuggacauuuggacuuacaaugccgaacuguugguucuauuggaaaaugaaagaacuuuggacuaccacgauucaaaugugaagaacuuauaugaaaagguaagaagccaguuaaaaaacaaugccaaggaaauuggaaacggcugcuuugaauuuuaccacaaaugcgauaacacgugcauggaaagugucaaaaaugggacuuaugacuacccaaaauacucagaggaagcaaaauuaaacagagaagaaauagaugggguaaagcuggaaucaacaaggauuuaccagauuuuggcgaucuauucaacugucgccaguucauugguacugguagucucccugggggcaaucaguuucuggaugugcucuaaugggucucuacaguguagaauauguauuuaa

SEQ ID NO: 36214 - RNA, 1701 nt, Artificial Sequence; identical to SEQ ID NO: 36080
  derived and/or modified CDS sequence (wt) from hemagglutinin__InfluenzaA__ADD22961

SEQ ID NO: 36215 - RNA, 1701 nt, Artificial Sequence; identical to SEQ ID NO: 36080
  derived and/or modified CDS sequence (wt) from hemagglutinin__InfluenzaA__ADD22971

SEQ ID NO: 36216 - RNA, 1701 nt, Artificial Sequence; identical to SEQ ID NO: 36080
  derived and/or modified CDS sequence (wt) from hemagglutinin__InfluenzaA__ADD23072

SEQ ID NO: 36217 - RNA, 1701 nt, Artificial Sequence
  derived and/or modified CDS sequence (wt) from hemagglutinin__InfluenzaA__ADD23082
augaaggcaauacuaguaguucugcuauauacauuugcaaccgcaaaugcagacacauuauguauagguuaucaugcgaacaauucaacagacacuguagacacaguacuagaaaagaauguaacaguaacacacucuguuaaccuucuagaagacaagcauaacgggaaacuaugcaaacuaagagggguagccccauugcauuuggguaaauguaacauugcuggcuggauccugggaaauccagagugugaaucacucuccacagcaagcucaugguccuacauuguggaaacaucuaguucaggcaauggaacguguuacccaggagauuucaucgauuaugaggagcuaagagagcaauugagcucagugucaucauuugaaagguuugagauauuccccaagacaaguucauggcccaaucaugacucgaacaaagguguaacggcagcauguccucaugcuggagcaaaaagcuucuacaaaaauuuaauauggcuaguuaaaaaaggaaacucauacccaaagcucagcaaauccuacauuaaugauaaagggaaagaaguccucgugcuauggggcauucaccauccaucuacuagugcugaccaacaaagucucuaucagaaugcagauacauauguuuuuguggggacaucaagauacagcaagaaguucaagccggaaauagcaauaagacccaaagugagggaucaagaagggagaaugaacuauuacuggacacuaguagagccgggagacaaaauaacauucgaagcaacuggaaaucuagugguaccgagauaugcauucgcaauggaaagaaaugcuggaucugguauuaucauuucagauacaccaguccacgauugcaauacaacuugucagacacccaagggugcuauaaacaccagccucccauuucagaauauacauccgaucacaauuggaaaauguccaaaauauguaaaaagcacaaaauugagacuggccacaggauugaggaaugucccgucuauucaaucuagaggccuauuuggggccauugccgguuucauugaagggggguggacagggaugguagauggaugguacgguuaucaccaucaaaaugagcaggggucaggauaugcagccgaccugaagagcacacagaaugccauugacgagauuacuaacaaaguaaauucuguuauugaaaagaugaauacacaguucacagcaguagguaaagaguucaaccaccuggaaaaaagaauagagaauuuaaauaaaaaaguugaugaugguuuccuggacauuuggacuuacaaugccgaacuguugguucuauuggaaaaugaaagaacuuuggacuaccacgauucaaaugugaagaacuuauaugaaaagguaagaagccaguuaaaaaacaaugccaaggaaauuggaaacggcugcuuugaauuuuaccacaaaugcgauaacacgugcauggaaagugucaaaaaugggacuuaugacuacccaaaauacucagaggaagcaaaauuaaacagagaagaaauagaugggguaaagcuggaaucaacaaggauuuaccagauuuuggcgaucuauucaacugucgccaguucauugguacugguagucucccugggggcaaucaguuucuggaugugcucuaaugggucucuacaguguagaauauguauuuaa

SEQ ID NO: 36218 - RNA, 1701 nt, Artificial Sequence
  derived and/or modified CDS sequence (wt) from hemagglutinin__InfluenzaA__ADD23102
augaaggcaauacuaguaguucugcuauauacauuugcaacugcaaaugcagacacauuauguauagguuaucaugcgaacaauucaacagacacuguagacacaguacuagaaaagaauguaacaguaacacacucuguuaaccuucuagaagacaagcauaacgggaaacuaugcaaacuaagagggguagccccauugcauuuggguaaauguaacauugcuggcuggauccugggaaauccagagugugaaucacucuccacagcaagcucaugguccuacauuguggaaacaucuaguucaggcaauggaacguguuacccaggagauuucaucgauuaugaggagcuaagagagcaauugagcucagugucaucauuugaaaaguuugagauauuccccaagacaaguucauggcccaaucaugacucgaacaaagguguaacggcagcauguccucaugcuggagcaaaaagcuucuacaaaaauuuaauauggcuaguuaaaaaaggaaacucauacccaaagcucagcaaauccuacauuaaugauaaagggaaagaaguccucgugcuauggggcauucaccauccaucuacuagugcugaccaacaaagucucuaucagaaugcagaugcauauguuuuuguggggacaucaagauacagcaagaaguucaagccggaaauagcaauaagacccaaagugagggaucaagaagggagaaugaacuauuacuggacacuaguagagccgggagacaaaauaacauucgaagcaacuggaaaucuagugguaccgagauaugcauucgcaauggaaagaaaugcuggaucugguauuaucauuucagauacaccaguccacgauugcaauacaacuugucagacacccaagggugcuauaaacaccagccucccauuucagaacauacauccgaucacaauuggaaaauguccaaaauauguaaaaagcacaaaauugagacuggccacaggauugaggaaugucccgucuauucaaucuaggggccuauuuggggccauugccgguuucauugaagggggguggacagggaugguagauggaugguacgguuaucaccaucaaaaugagcaggggucaggauaugcagccgaccugaagagcacacagaaugccauugacgagauuacuaacaaaguaaauucuguuauugagaagaugaauacacaguucacagcaguagguaaagaguucaaccaccuggaaaaaagaauagagaauuuaaauaaaaaaguugaugaugguuuccuggacauuuggacuuacaaugccgaacuguugguucuauuggaaaaugaaagaacuuuggacuaccacgauucaaaugugaagaacuuauaugaaaagguaagaagccaguuaaaaaacaaugccaaggaaauuggaaacggcugcuuugaauuuuaccacaaaugcgauaacacgugcauggaaagugucaaaaaugggacuuaugacuacccaaaauacucagaggaagcaaaauuaaacagagaagaaauagauggaguaaagcuggaaucaacaaggauuuaccagauuuuggcgaucuauucaacugucgccaguucauugguacugguagucucccugggggcaaucaguuucuggaugugcucuaaugggucucuacaguguagaauauguauuuaa

SEQ ID NO: 36219 - RNA, 1701 nt, Artificial Sequence; identical to SEQ ID NO: 36080
  derived and/or modified CDS sequence (wt) from hemagglutinin__InfluenzaA__ADD23112

SEQ ID NO: 36220 - RNA, 1701 nt, Artificial Sequence; identical to SEQ ID NO: 36080
  derived and/or modified CDS sequence (wt) from hemagglutinin__InfluenzaA__ADD23122

SEQ ID NO: 36221 - RNA, 1701 nt, Artificial Sequence; identical to SEQ ID NO: 34681
  derived and/or modified CDS sequence (wt) from hemagglutinin__InfluenzaA__ADD23132

SEQ ID NO: 36222 - RNA, 1701 nt, Artificial Sequence
  derived and/or modified CDS sequence (wt) from hemagglutinin__InfluenzaA__ADD23142
augaaggcaauacuaguaguucugcuauauacauuugcaaccgcaaaugcagacacauuauguauagguuaucaugcgaacaauucaacagacacuguagacacaguacuagaaaagaauguaacaguaacacacucuguuaaccuucuagaagacaagcauaacgggaaacuaugcaaacuaagagggguagccccauugcauuuggguaaauguaacauugcuggcuggauccugggaaauccagagugugaaucacucuccacagcaagcucaugguccuacauuguggaaacaucuaguucagacaauggaacguguuacccaggagauuucaucgauuaugaggagcuaagagagcaauugagcucagugucaucauuugaaagguuugagauauuccccaagacaaguucauggcccaaucaugacucgaacaaagguguaacggcagcauguccucaugcuggagcaaagagcuucuauaaaaauuuaauauggcuaguuaaaaaaggaaauucauacccaaagcucagcaaauccuacauuaaugauaaagggaaagaaguccucgugcuauggggcauucaccauccaucuacuagugcugaccaacaaagucucuaucagaaugcagaugcauauguuuuuguggggacaucaagauacagcaagaaguucaagccggaaauagcaauaagacccaaagugagggaucaagaagggagaaugaacuauuacuggacacuaguagagccgggagacaaaauaacauucgaagcaacuggaaaucuagugguaccgagauaugcauucgcaauggaaagaaaugcuggaucugguauuaucauuucagauacaccaguccacgauugcaauacaacuugucagacacccaagggugcuauaaacaccagccucccauuucagaauauacauccgaucacaauuggaaaauguccaaaauauguaaaaagcacaaaauugagacuggccacaggauugaggaaugucccgucuauucaaucuagaggccuauuuggggccauugccgguuucauugaagggggguggacagggaugguagauggaugguacgguuaucaccaucaaaaugagcaggggucaggauaugcagccgaccugaagagcacacagaaugccauugacaagauuacuaacaaaguaaauucuguuauugaaaagaugaauacacaguucacagcaguagguaaagaguucaaccaccuggaaaaaagaauagagaauuuaaauaaaaaaguugaugaugguuuccuggacauuuggacuuacaaugccgaacuguugguucuauuggaaaaugaaagaacuuuggacuaccacgauucaaaugugaagaacuuauaugaaaagguaagaagccaguuaaaaaacaaugccaaggaaauuggaaacggcugcuuugaauuuuaccacaaaugcgauaacacgugcauggaaagugucaaaaaugggacuuaugacuacccaaaauacucagaggaagcaaaauuaaacagagaagaaauagaugggguaaagcuggaaucaacaaggauuuaccagauuuuggcgaucuauucaacugucgccaguucauugguacugguagucucccugggggcaaucaguuucuggaugugcucuaaugggucucuacaguguagaauauguauuuaa

SEQ ID NO: 36223 - RNA, 1701 nt, Artificial Sequence
  derived and/or modified CDS sequence (wt) from hemagglutinin__InfluenzaA__ADD23162
augaaggcaauacuaguaguucugcuauauacauuugcaaccgcaaaugcagacacauuauguauagguuaucaugcgaacaauucaacagacacuguagacacaguacuagaaaagaauguaacaguaacacacucuguuaaccuucuagaagacaagcauaacgggaaacuaugcaaacuaagagggguagccccauugcauuuggguaaauguaacauugcuggcuggauccugggaaauccagagugugaaucacucuccacagcaagcucaugguccuacauuguggaaacaucuaguucagacaauggaacguguuacccaggagauuucaucgauuaugaggagcuaagagagcaauugagcucagugucaucauuugaaagguuugagauauuccccaagacaaguucauggcccaaucaugacucgaacaaagguguaacggcagcauguccucaugcuggagcaaagagcuucuauaaaaauuuaauauggcuaguuaaaaaaggaaauucauacccaaagcucagcaaauccuacauuaaugauaaagggaaagaaguccucgugcuauggggcauucaccauccaucuacuagugcugaccaacaaggucucuaucagaaugcagaugcauauguuuuuguggggacaucaagauacagcaagaaguucaagccggaaauagcaauaagacccaaagugagggaucaagaagggagaaugaacuauuacuggacacuaguagagccgggagacaaaauaacauucgaagcaacuggaaaucuagugguaccgagauaugcauucgcaauggaaagaaaugcuggaucugguauuaucauuucagauacaccaguccacgauugcaauacaacuugucagacacccaagggugcuauaaacaccagccucccauuucagaauauacauccgaucacaauuggaaaauguccaaaauauguaaaaagcacaaaauugagacuggccacaggauugaggaaugucccgucuauucaaucuagaggccuauuuggggccauugccgguuucauugaagggggguggacagggaugguagauggaugguacgguuaucaccaucaaaaugagcaggggucaggauaugcagccgaccugaagagcacacagaaugccauugacaagauuacuaacaaaguaaauucuguuauugaaaagaugaauacacaguucacagcaguagguaaagaguucaaccaccuggaaaaaagaauagagaauuuaaauaaaaaaguugaugaugguuuccuggacauuuggacuuacaaugccgaacuguugguucuauuggaaaaugaaagaacuuuggacuaccacgauucaaaugugaagaacuuauaugaaaagguaagaagccaguuaaaaaacaaugccaaggaaauuggaaacggcugcuuugaauuuuaccacaaaugcgauaacacgugcauggaaagugucaaaaaugggacuuaugacuacccaaaauacucagaggaagcaaaauuaaacagagaagaaauagaugggguaaagcuggaaucaacaaggauuuaccagauuuuggcgaucuauucaacugucgccaguucauugguacugguagucucccugggggcaaucaguuucuggaugugcucuaaugggucucuacaguguagaauauguauuuaa

SEQ ID NO: 36224 - RNA, 1701 nt, Artificial Sequence; identical to SEQ ID NO: 36222
  derived and/or modified CDS sequence (wt) from hemagglutinin__InfluenzaA__ADD23172

SEQ ID NO: 36225 - RNA, 1701 nt, Artificial Sequence; identical to SEQ ID NO: 36222
  derived and/or modified CDS sequence (wt) from hemagglutinin__InfluenzaA__ADD23182

SEQ ID NO: 36226 - RNA, 1701 nt, Artificial Sequence
  derived and/or modified CDS sequence (wt) from hemagglutinin__InfluenzaA__ADD23192
augaaggcaauacuaguaguucugcuauauacauuugcaacugcaaaugcagacacauuauguauagguuaucaugcgaacaauucaacagacacuguagacacaguacuagaaaagaauguaacaguaacacacucuguuaaccuucuagaagacaagcauaacgggaaacuaugcaaacuaagagggguagccccauugcauuuggguaaauguaacauugcuggcuggauccugggaaauccagagugugaaucacucuccacagcaagcucaugguccuacauuguggaaacaucuaguucagacaauggaacguguuacccaggagauuucaucgauuaugaggagcuaagagagcaauugagcucagugucaucauuugaaagguuugagauauuccccaagacaaguucauggcccaaucaugacucgaacaaagguguaacggcagcauguccucaugcuggagcaaagagcuucuauaaaaauuuaauauggcuaguuaaaaaaggaaauucauacccaaagcucagcaaauccuacauuaaugauaaagggaaagaaguccucgugcuauggggcauucaccauccaucuacuagugcugaccaacaaagucucuaucagaaugcagaugcauauguuuuuguggggacaucaagauacagcaagaaguucaagccggaaauagcaauaagacccaaagugagggaucaagaagggagaaugaacuauuacuggacacuaguagagccgggagacaaaauaacauucgaagcaacuggaaaucuagugguaccgagauaugcauucgcaauggaaagaaaugcuggaucugguauuaucauuucagauacaccaguccacgauugcaauacaacuugucagacacccaagggugcuauaaacaccagccucccauuucagaauauacauccgaucacaauuggaaaauguccaaaauauguaaaaagcacaaaauugagacuggccacaggauugaggaaugucccgucuauucaaucuagaggccuauuuggggccauugccgguuucauugaagggggguggacagggaugguagauggaugguacgguuaucaccaucaaaaugagcaggggucaggauaugcagccgaccugaagagcacacagaaugccauugacaagauuacuaacaaaguaaauucuguuauugaaaagaugaauacacaguucacagcaguagguaaagaguucaaccaccuggaaaaaagaauagagaauuuaaauaaaaaaguugaugaugguuuccuggacauuuggacuuacaaugccgaacuguugguucuauuggaaaaugaaagaacuuuggacuaccacgauucaaaugugaagaacuuauaugaaaagguaagaagccaguuaaaaaacaaugccaaggaaauuggaaacggcugcuuugaauuuuaccacaaaugcgauaacacgugcauggaaagugucaaaaaugggacuuaugacuacccaaaauacucagaggaagcaaaauuaaacagagaagaaauagaugggguaaagcuggaaucaacaaggauuuaccagauuuuggcgaucuauucaacugucgccaguucauugguacugguagucucccugggggcaaucaguuucuggaugugcucuaaugggucucuacaguguagaauauguauuuaa

SEQ ID NO: 36227 - RNA, 1701 nt, Artificial Sequence; identical to SEQ ID NO: 36222
  derived and/or modified CDS sequence (wt) from hemagglutinin__InfluenzaA__ADD23202

SEQ ID NO: 36228 - RNA, 1701 nt, Artificial Sequence
  derived and/or modified CDS sequence (wt) from hemagglutinin__InfluenzaA__ADD23220
augaaggcaauacuaguaguucugcuauauacauuugcaaccgcaaaugcagacacauuauguauagguuaucaugcgaacaauucaacagacacuguagacacaguacuagaaaagaauguaacaguaacacacucuguuaaccuucuagaagacaagcauaacgggaaacuaugcaaacuaagagggguagccccauugcauuuggguaaauguaacauugcuggcuggauccugggaaauccagagugugaaucacucuccacagcaagcucaugguccuacauuguggaaacaucuaguucagacaauggaacguguuacccaggagauuucaucgauuaugaggagcuaagagagcaauugagcucagugucaucauuugaaagguuugagauauuccccaagacaaguucauggcccaaucaugacucgaacaaagguguaacggcagcauguccucaugcuggagcaaaaagcuucuacaaaaauuuaauauggcuaguuaaaaaaggaaauucauacccaaagcucagcaaauccuacauuaaugauaaagggaaagaaguccucgugcuauggggcauucaccauccaucuacuagugcugaccaacaaagucucuaucagaaugcagaugcauauguuuuuguggggacaucaagauacagcaagaaguucaagccggaaauagcaauaagacccaaagugagggaucaagaagggagaaugaacuauuacuggacacuaguagagccgggagacaaaauaacauucgaagcaacuggaaaucuagugguaccgagauaugcauucgcaauggaaagaaaugcuggaucugguauuaucauuucagauacaccaguccacgauugcaauacaacuugucagacacccaagggugcuauaaacaccagccucccauuucagaauauacauccgaucacaauuggaaaauguccaaaauauguaaaaagcacaaaauugagacuggccacaggauugaggaaugucccgucuauucaaucuagaggccuauuuggggccauugccgguuucauugaagggggguggacagggaugguagauggaugguacgguuaucaccaucaaaaugagcaggggucaggauaugcagccgaccugaagagcacacagaaugccauugacaagauuacuaacaaaguaaauucuguuauugaaaagaugaauacacaguucacagcaguagguaaagaguucaaccaccuggaaaaaagaauagagaauuuaaauaaaaaaguugaugaugguuuccuggacauuuggacuuacaaugccgaacuguuaguucuauuggaaaaugaaagaacuuuagacuaccacgauucaaaugugaagaacuuauaugaaaagguaagaagccaguuaaaaaacaaugccaaggaaauuggaaacggcugcuuugaauuuuaccacaaaugcgauaacacgugcauggaaagugucaaaaaugggacuuaugacuacccaaaauacucagaggaagcaaaauuaaacagagaagaaauagaugggguaaagcuggaaucaacaaggauuuaccagauuuuggcgaucuauucaacugucgccaguucauugguacugguagucucccugggggcaaucaguuucuggaugugcucuaaugggucucuacaguguagaauauguauuuaa

SEQ ID NO: 36229 - RNA, 1701 nt, Artificial Sequence; identical to SEQ ID NO: 36065
  derived and/or modified CDS sequence (wt) from hemagglutinin__InfluenzaA__ADD23230

SEQ ID NO: 36230 - RNA, 1701 nt, Artificial Sequence; identical to SEQ ID NO: 35845
  derived and/or modified CDS sequence (wt) from hemagglutinin__InfluenzaA__ADD23240

SEQ ID NO: 36231 - RNA, 1701 nt, Artificial Sequence
  derived and/or modified CDS sequence (wt) from hemagglutinin__InfluenzaA__ADD23260
augaaggcaauacuaguaguucugcuauauacauuugcaaccgcaaaugcagacacauuauguauagguuaucaugcgaacaauucaacagacacuguagacacaguacuagaaaagaauguaacaguaacacacucuguuaaccuucuagaagacaagcauaacgggaaacuaugcaaacuaagagggguagccccauugcauuuggguaaauguaacauugcuggcuggauccugggaaauccagagugugaaucacucuccacagcaagcucaugguccuacauuguggaaacaucuaguucagacaauggaacguguuacccaggagauuucaucgauuaugaggagcuaagagagcaauugagcucagugucaucauuugaaagguuugagauauuccccaagacaaguucauggcccaaucaugacucgaacaaagguguaacggcagcauguccucaugcuggagcaaaaagcuucuacaaaaauuuaauauggcuaguuaaaaaaggaaauucauacccaaagcucagcaaauccuacauuaaugauaaagggaaagaaguccucgugcuauggggcauucaccauccaucuacuagugcugaccaacaaagucucuaucagaaugcagaugcauauguuuuuguggggacaucaagauacagcaagaaguucaagccggaaauagcaauaagacccaaagugagggaucaagaagggagaaugaacuauuacuggacacuaguagagccgggagacaaaauaacauucgaagcaacuggaaaucuggugguaccgagauaugcauucgcaauggaaagaaaugcuggaucugguauuaucauuucagauacaccaguccacgauugcaauacaacuugucagacacccgagggugcuauaaacaccagccucccauuucagaauauacauccgaucacaauuggaaaauguccaaaauauguaaaaagcacaaaauugagacuggccacaggauugaggaaugucccgucuauucaaucuagaggccuauuuggggccauugccgguuucauugaagggggguggacagggaugguagauggaugguacgguuaucaccaucaaaaugagcaggggucaggauaugcagccgaccugaagagcacacagaaugccauugacaagauuacuaacaaaguaaauucuguuauugaaaagaugaauacacaguucacagcaguagguaaagaguucaaccaccuggaaaaaagaauagagaauuuaaauaaaaaaguugaugaugguuuccuggacauuuggacuuacaaugccgaacuguugguucuauuggaaaaugaaagaacuuuggacuaccacgauucaaaugugaagaacuuauaugaaaagguaagaagccaguuaaaaaacaaugccaaggaaauuggaaacggcugcuuugaauuuuaccacaaaugcgauaacacgugcauggaaagugucaaaaaugggacuuaugacuacccaaaauacucagaggaagcaaaauuaaacagagaagaaauagaugggguaaagcuggaaucaacaaggauuuaccagauuuuggcgaucuauucaacugucgccaguucauugguacugguagucucccugggggcaaucaguuucuggaugugcucuaaugggucucuacaguguagaauauguauuuaa

SEQ ID NO: 36232 - RNA, 1701 nt, Artificial Sequence
  derived and/or modified CDS sequence (wt) from hemagglutinin__InfluenzaA__ADD23280
augaaggcaauacuaguaguucugcuauauacauuugcaaccgcaaaugcagacacauuauguauagguuaucaugcgaacaauucaacagacacuguagacacaguacuagaaaagaauguaacaguaacacacucuguuaaccuucuagaagacaagcauaacgggaaacuaugcaaacuaagagggguagccccauugcauuuggguaaauguaacauugcuggcuggauccugggaaauccagagugugaaucacucuccacagcgaguucaugguccuacauuguggaaacaucuaguucagacaauggaacguguuacccaggagauuucaucgauuaugaggagcuaagagagcaauugagcucagugucaucauuugaaagguuugagauauuccccaagacaaguucauggcccaaucaugacucgaacaaagguguaacggcagcauguccucaugcuggagcaaaaagcuucuacaaaaauuuaauauggcuaguuaaaaaaggaaauucauacccaaagcucagcaaauccuacauuaaugauaaagggaaagaaguccucgugcuauggggcauucaccauccaucuacuagugcugaccaacaaagucucuaucagaaugcagaugcauauguuuuuguggggacaucaagauacagcaagaaguucaagccggaaauagcaauaagacccaaagugagggaacaagaagggagaaugaacuauuacuggacacuaguagagccgggagacaaaauaacauucgaagcaacuggaaaucuagugguaccgagauaugcauucgcaauggaaagaaaugcuggaucugguauuaucauuucagauacaccaguccacgauugcaauacaacuugucagacacccaagggugcuauaaacaccagccucccauuucagaauauacauccgaucacaauuggaaaauguccaaaauauguaaaaagcacaaaauugagacuggccacaggauugaggaaugucccgucuauucaaucuagaggccuauuuggggccauugccgguuucauugaagggggguggacagggaugguagauggaugguacgguuaucaccaucaaaaugagcaggggucaggauaugcagccgaccugaagagcacacagaaugccauugacgagauuacuaacaaaguaaauucuguuauugaaaagaugaauacacaguucacagcaguagguaaagaauucaaccaccuggaaaaaagaauagagaauuuaaauaaaaaaguugaugaugguuuccuggacauuuggacuuacaaugccgaacuguugguucuauuggaaaaugaaagaacuuuggacuaccacgauucaaaugugaagaacuuauaugaaaagguaagaagccaguuaaaaaacaaugccaaggaaauuggaaacggcugcuuugaauuuuaccacaaaugcgauaacacgugcauggaaagugucaaaaaugggacuuaugacuacccaaaauacucagaggaagcaaaauuaaacagagaagaaauagaugggguaaagcuggaaucaacaaggauuuaccagauuuuggcgaucuauucaacugucgccaguucauugguacugguagucucccugggggcaaucaguuucuggaugugcucuaaugggucucuacaguguagaauauguauuuaa

SEQ ID NO: 36233 - RNA, 1701 nt, Artificial Sequence
  derived and/or modified CDS sequence (wt) from hemagglutinin__InfluenzaA__ADD23290
augaaggcaauacuaguaguucugcuauauacauuugcaaccgcaaaugcagacacauuauguauagguuaucaugcgaacaauucaacagacacuguagacacaguacuagaaaagaauguaacaguaacacacucuguuaaccuucuagaagacaagcauaacgggaaacuaugcaaacuaagagggguagccccauugcauuuggguaaauguaacauugcuggcuggauccugggaaauccagagugugaaucacucuccacagcaagcucaugguccuacauuguggaaacaucuaguucagacaauggaacguguuacccaggagauuucaucaauuaugaggagcuaagagagcaauugagcucagugucaucauuugaaagguuugagauauuccccaagacaaguucauggcccaaucaugacucgaacaaagguguaacggcugcauguccucaugcuggagcaaaaagcuucuacaaaaauuuaauauggcuaguuaaaaaaggaaauucauacccaaagcucagcaaauccuacauuaaugauaaagggaaagaaguccucgugcuauggggcauucaccauccaucuacuagugcugaccaacaaagucucuaucagaaugcagaugcauauguuuuuguggggacaucaagauacagcaagaaguucaagccggaaauagcaauaagacccaaagugagggaucaagaagggagaaugaacuauuacuggacacuaguagagccgggagacaaaauaacauucgaagcaacuggaaaucuagugguaccgagauaugcauucgcaauggaaagaaaugcuggaucugguauuaucaucucagauacaccaguccacgauugcaauacaacuugucagacacccaagggugcuauaaacaccagccucccauuucagaauauacauccgaucacaauuggaaaauguccaaaauauguaaaaagcacaaaauugagacuggccacaggauugaggaaugucccgucuauucaaucuagaggccuauuuggggccauugccgguuucauugaagggggguggacagggaugguagauggaugguacgguuaucaccaucaaaaugagcaggggucaggauaugcagcugaccugaagagcacacagaaugccauugacaagauuacuaacaaaguaaauucuguuauugaaaagaugaauacacaguucacagcaguagguaaagaguucaaccaccuggaaaaaagaauagagaauuuaaauaaaaagguugaugaugguuuccuggacauuuggacuuacaaugccgaacuguugguucuauuggaaaaugaaagaacuuuggacuaccacgauucaaaugugaagaacuuauaugaaaagguaagaagccaguuaaaaaacaaugccaaggaaauuggaaacggcugcuuugaauuuuaccacaaaugcgauaacacgugcauggaaagugucaaaaaugggacuuaugacuacccaaaauacucagaggaagcaaaauuaaacagagaagaaauagaugggguaaagcuggaaucaacaaggauuuaccagauuuuggcgaucuauucaacugucgccaguucauugguacugguagucucccugggggcaaucaguuucuggaugugcucuaaugggucucuacaguguagaauauguauuuaa

SEQ ID NO: 36234 - RNA, 1701 nt, Artificial Sequence
  derived and/or modified CDS sequence (wt) from hemagglutinin__InfluenzaA__ADD23300
augaaggcaauacuaguaguucugcuauauacauuugcaaccgcaaaugcagacacauuauguauagguuaucaugcgaacaauucaacagacacuguagacacaguacuagaaaagaauguaacaguaacacacucuguuaaccuucuagaagacaagcauaacgggaagcuaugcaaacuaagagggguagccccauugcauuuggguaaauguaacauugcuggcuggauccugggaaauccagagugugaaucacucuccacagcaagcucaugguccuacauuguggaaacaucuaguucagacaauggaacguguuacccaggagauuucaucgauuaugaggagcuaagagagcaauugagcucagugucaucauuugaaagguuugagauauuccccaagacaaguucauggcccaaucaugacucgaacaaagguguaacggcagcauguccucaugcuggagcaaaaagcuucuacaaaaauuuaauauggcuaguuaaaaaaggaaauucauacccaaagcucagcaaauccuacauuaaugauaaagggaaagaaguccucgugcuauggggcauucaccauccaucuacuagugcugaccaacaaagucucuaucagaaugcagaugcauauguuuuuguggggacaucaagauacagcaagaaguucaagccggaaauagcaauaagacccaaagugagggaucaagaagggagaaugaacuauuacuggacacuaguagagccgggggacaaaauaacauucgaagcaacuggaaaucuagugguaccgagauaugcauucgcaauggaaagaaaugcuggaucugguauuaucauuucagauacaccaguccacgauugcaauacaacuugucagacacccaagggugcuauaaacaccagccucccauuucagaauauacauccgaucacaauuggaaaauguccaaaauauguaaaaagcacaaaauugagacuggccacaggauugaggaaugucccgucuauucaaucuagaggccuauuuggggccauugccgguuucauugaagggggguggacagggaugguagauggaugguacgguuaucaccaucaaaaugagcaggggucaggauaugcagccgaccugaagagcacacagaaugccauugacaagauuacuaacaaaguaaauucuguuauugaaaagaugaauacacaguucacagcaguagguaaagaguucaaccaccuggaaaaaagaauagagaauuuaaauaaaaaaguugaugaugguuuccuggacauuuggacuuacaaugccgaacuguugguucuauuggaaaaugaaagaacuuuggacuaccacgauucaaaugugaagaacuuauaugaaaagguaagaagccaguuaaaaaacaaugccaaggaaauuggaaacggcugcuuugaauuuuaccacaaaugcgauaacacgugcauggaaagugucaaaaaugggacuuaugacuacccaaaauacucagaggaagcaaaauuaaacagagaagaaauagaugggguaaagcuggaaucaacaaggauuuaccagauuuuggcgaucuauucaacugucgccaguucauugguacugguagucucccugggggcaaucaguuucuggaugugcucuaaugggucucuacaguguagaauauguauuuaa

SEQ ID NO: 36235 - RNA, 1701 nt, Artificial Sequence
  derived and/or modified CDS sequence (wt) from hemagglutinin__InfluenzaA__ADD23310
augaaggcaauacuaguaguucugcuauauacauuugcaaccgcaaaugcagacacauuauguauagguuaucaugcgaacaauucaacagacacuguagacacaguacuagaaaagaauguaacaguaacacacucuguuaaccuucuagaagacaagcauaaugggaaacuaugcaaacuaagagggguagccccauugcauuuggguaaauguaacauugcuggcuggauccugggaaauccagagugugaaucacucuccacagcaagcucaugguccuacauuguggaaacaucuaguucagacaauggaacguguuacccaggagauuucaucaauuaugaggagcuaagagagcaauugagcucagugucaucauuugaaagguuugagauauuccccaagacaaguucauggcccaaucaugacucgaacaaagguguaacggcugcauguccucaugcuggagcaaaaagcuucuacaaaaauuuaauauggcuaguuaaaaaaggaaauucauacccaaagcucagcaaauccuacauuaaugauaaagggaaagaaguccucgugcuauggggcauucaccauccaucuacuagugcugaccaacaaagucucuaucagaaugcagaugcauauguuuuuguggggacaucaagauacagcaagaaguucaagccggaaauagcaauaagacccaaagugagggaucaagaagggagaaugaacuauuacuggacacuaguagagccgggagacaaaauaacauucgaagcaacuggaaaucuagugguaccgagauaugcauucgcaauggaaagaaaugcuggaucugguauuaucaucucagauacaccaguccacgauugcaauacaacuugucagacacccaagggugcuauaaacaccagccucccauuucagaauauacauccgaucacaauuggaaaauguccaaaauauguaaaaagcacaaaauugagacuggccacaggauugaggaaugucccgucuauucaaucuagaggccuauuuggggccauugccgguuucauugaagggggguggacagggaugguagauggaugguacgguuaucaccaucaaaaugagcaggggucaggauaugcagccgaccugaagagcacacagaaugccauugacaagauuacuaacaaaguaaauucuguuauugaaaagaugaauacacaguucacagcaguagguaaagaguucaaccaccuggaaaaaagaauagagaauuuaaauaaaaaaguugaugaugguuuccuggacauuuggacuuacaaugccgaacuguugguucuauuggaaaaugaaagaacuuuggacuaccacgauucaaaugugaagaacuuauaugaaaagguaagaagccaguuaaaaaacaaugccaaggaaauuggaaacggcugcuuugaauuuuaccacaaaugcgauaacacgugcauggaaagugucaaaaaugggacuuaugacuacccaaaauacucagaggaagcaaaauuaaacagagaagaaauagaugggguaaagcuggaaucaacaaggauuuaccagauuuuggcgaucuauucaacugucgccaguucauugguacugguagucucccugggggcaaucaguuucuggaugugcucuaaugggucucuacaguguagaauauguauuuaa

SEQ ID NO: 36236 - RNA, 1701 nt, Artificial Sequence
  derived and/or modified CDS sequence (wt) from hemagglutinin__InfluenzaA__ADD23320
augaaggcaauacuaguaguucugcuauauacauuugcaaccgcaaaugcagacacauuauguauagguuaucaugcgaacaauucaacagacacuguagacacaguacuagaaaagaauguaacaguaacacacucuguuaaccuucuagaagacaagcauaacgggaaacuaugcaaacuaagagggguagccccauugcauuuggguaaauguaacauugcuggcuggauccugggaaauccagagugugaaucacucuccacagcaagcucaugguccuacauuguggaaacaucuaguucagacaauggaacguguuacccaggagauuucaucgauuaugaggagcuaagagagcaauugagcucagugucaucauuugaaagguuugagauauuccccaagacaaguucauggcccaaucaugacucgaacaaagguguaacggcagcauguccucaugcuggagcaaaaagcuucuacaaaaauuuaauauggcuaguuaaaaaaggaaauucauacccaaagcucagcaaauccuacauuaaugauaaagggaaagaaguccucgugcuauggggcauucaccauccaucuacuagugcugaccaacaaagucucuaucagaaugcagaugcauauguuuuuguggggacaucaagauacagcaagaaguucaagccggaaauagcaauaagacccaaagugagggaucaagaagggagaaugaacuauuacuggacacuaguagagccgggagacaaaauaacauucgaagcaacuggaaaucuagugguaccgagauaugcauucgcaauggaaagaaaugcuggaucugguauuaucauuucagauacaccaguccacgauugcaauacaacuugucagacacccaaaggugcuauaaacaccagccucccauuucagaauauacauccgaucacaauuggaaaauguccaaaauauguaaaaagcacaaaauugagacuggccacaggauugaggaaugucccgucuauucaaucuagaggccuauuuggggccauugccgguuucauugaagggggguggacagggaugguagauggaugguacgguuaucaccaucaaaaugagcaggggucaggauaugcagccgaccugaagagcacacagaaugccauugacaagauuacuaacaaaguaaauucuguuauugaaaagaugaauacacaguucacagcaguagguaaagaguucaaccaccuggaaaaaagaauagagaauuuaaauaaaaaaguugaugaugguuuccuggacauuuggacuuacaaugccgaacuguugguucuauuggaaaaugaaagaacuuuggacuaccacgauucaaaugugaagaacuuauaugaaaagguaagaagccaguuaaaaaacaaugccaaggaaauuggaaacggcugcuuugaauuuuaccacaaaugcgauaacacgugcauggaaagugucaaaaaugggacuuaugacuacccaaaauacucagaggaagcaaaauuaaacagagaagaaauagaugggguaaagcuggaaucaacaaggauuuaccagauuuuggcgaucuauucaacugucgccaguucauugguacugguagucucccugggggcaaucaguuucuggaugugcucuaaugggucucuacaguguagaauauguauuuaa

SEQ ID NO: 36237 - RNA, 1701 nt, Artificial Sequence
  derived and/or modified CDS sequence (wt) from hemagglutinin__InfluenzaA__ADD23330
augaaggcaauacuaguaguucuguuauauacauuugcaaccgcaaaugcagacacauuauguauagguuaucaugcgaacaauucaacagacacuguagacacaguacuagaaaagaauguaacaguaacacacucuguuaaccuucuagaagacaagcauaacgggaaacuaugcaaacuaagagggguagccccauugcauuuggguaaauguaacauugcuggcuggauccugggaaauccagagugugaaucacucuccacagcaagcucaugguccuacauuguggaaacaucuaguucagacaauggaacguguuacccaggagauuucaucaauuaugaggagcuaagagagcaauugagcucagugucaucauuugaaagguuugagauauuccccaagacaaguucauggcccaaucaugacucgaacaaagguguaacggcugcauguccucaugcuggagcaaaaagcuucuacaaaaauuuaauauggcuaguuaaaaaaggaaauucauacccaaagcucagcaaauccuacauuaaugauaaagggaaagaaguccucgugcuauggggcauucaccauccaucuacuagugcugaccaacaaagccucuaucagaaugcagaugcauauguuuuuguggggacaucaagauacagcaagaaguucaagccggaaauagcaauaagacccaaagugagggaucaagaagggagaaugaacuauuacuggacacuaguagagccgggagacaaaauaacauucgaagcaacuggaaaucuagugguaccgagauaugcauucgcaauggaaagaaaugcuggaucugguauuaucaucucagauacaccaguccacgauugcaauacaacuugucagacacccaagggugcuauaaacaccagccucccauuucagaauauacauccgaucacaauuggaaaauguccaaaauauguaaaaagcacaaaauugagacuggccacaggauugaggaaugucccgucuauucaaucuagaggccuauuuggggccauugccgguuucauugaagggggguggacagggaugguagauggaugguacgguuaucaccaucaaaaugagcaggggucaggauaugcagccgaccugaagagcacacagaaugccauugacaagauuacuaacaaaguaaauucuguuauugaaaagaugaauacacaguucacagcaguagguaaagaguucaaccaccuggaaaaaagaauagagaauuuaaauaaaaaaguugaugaugguuuccuggacauuuggacuuacaaugccgaacuguugguucuauuggaaaaugaaagaacuuuggacuaccacgauucaaaugugaagaacuuauaugaaaagguaagaagccaguuaaaaaccaaugccaaggaaauuggaaacggcugcuuugaauuuuaccacaaaugcgauaacacgugcauggaaagugucaaaaaugggacuuaugacuacccaaaauacucagaggaagcaaaauuaaacagagaagaaauagaugggguaaagcuggaaucaacaaggauuuaccagauuuuggcgaucuauucaacugucgccaguucauugguacugguagucucccugggggcaaucaguuucuggaugugcucuaaugggucucuacaguguagaauauguauuuaa

SEQ ID NO: 36238 - RNA, 1701 nt, Artificial Sequence
  derived and/or modified CDS sequence (wt) from hemagglutinin__InfluenzaA__ADD23355
augaaggcaauacuaguaguucugcuauauacauuugcaaccgcaaaugcagacacauuauguauagguuaucaugcgaacaauucaacagacacuguagacacaguacuagaaaagaauguaacaguaacacacucuguuaaccuucuagaagacaagcauaacgggaaacuaugcaaacuaagagggguagccccauugcauuuggguaaauguaacauugcuggcuggauccugggaaauccagagugugaaucacucuccacagcaagcucaugguccuacauuguggaaacaucuaguucagacaauggaacguguuacccaggagauuucaucaauuaugaggagcuaagagagcaauugagcucagugucaucauuugaaauguuugagauauuccccaagacaaguucauggcccaaucaugacucgaacaaagguguaacggcagcauguccucaugcuggagcaaaaagcuucuacaaaaauuuaauauggcuaguuaaaaaaggaaauucauacccaaagcucagcaaauccuacauuaaugauaaagggaaagaaguccucgugcuauggggcauucaccauccaucuacuagugcugaccaacaaagucucuaucagaaugcagaugcauauguuuuuguggggacaucaagauacagcaagaaguucaagccggaaauagcaauaagacccaaagugagggaucaagaagggagaaugaacuauuacuggacacuaguagagccgggagacaaaauaacauucgaagcaacuggaaaucuagugguaccgagauaugcauucgcaauggaaagaaaugcuggaucugguauuaucaucucagauacaccaguccacgauugcaauacaacuugucagacacccaagggugcuauaaacaccagccucccauuucagaauauacauccgaucacaauuggaaaauguccaaaauauguaaaaagcacaaaauugagacuggccacaggauugaggaaugucccgucuauucaaucuagaggccuauuuggggccauugccgguuucauugaagggggguggacagggaugguagauggaugguacgguuaucaccaucaaaaugagcaggggucaggauaugcagccgaccugaagagcacacagaaugccauugacaagauuacuaacaaaguaaauucuguuauugaaaagaugaauacacaguucacagcaguagguaaagaguucaaccaccuggaaaaaagaauagagaauuuaaauaaaaaaguugaugaugguuuccuggacauuuggacuuacaaugccgaacuguugguucuauuggaaaaugaaagaacuuuggacuaccacgauucaaaugugaagaacuuauaugaaaagguaagaagccaguuaaaaaacaaugccaaggaaauuggaaacggcugcuuugaauuuuaccacaaaugcgauaacacgugcauggaaagugucaaaaaugggacuuaugacuacccaaaauacucagaggaagcaaaauuaaacagagaagaaauagaugggguaaagcuggaaucaacaaggauuuaccagauuuuggcgaucuauucaacugucgccaguucauugguacugguagucucccugggggcaaucaguuucuggaugugcucuaaugggucucuacaguguagaauauguauuuaa

SEQ ID NO: 36239 - RNA, 1701 nt, Artificial Sequence
  derived and/or modified CDS sequence (wt) from hemagglutinin__InfluenzaA__ADD23375
augaaggcaauacuaguaguucugcuauauacauuugcaaccgcaaaugcagacacauuauguauagguuaucaugcgaacaauucaacagacacuguagacacaguacuagaaaagaauguaacaguaacacacucuguuaaccuucuagaagacaagcauaacgggaaacuaugcaaacuaagagggguagccccauugcauuuggguaaauguaacauugcuggcuggauccugggaaauccagagugugaaucacucuccacagcaagcucaugguccuacauuguggaaacaucuaguucagacaauggaacguguuacccaggagauuucaucaauuaugaggagcuaagagagcaauugagcucagugucaucauuugaaagguuugagauauuccccaagacaaguucauggcccaaucaugacucgaacaaagguguaacggcugcauguccucaugcuggagcaaaaagcuucuacaaaaauuuaauauggcuaguuaaaaaaggaaauucauacccaaagcucagcaaauccuacauuaaugauaaagggaaagaaguccucgugcuauggggcauucaccauccaucuacuagugcugaccaacaaagucucuaucagaaugcagaugcauauguuuuuguggggacaucaagauacagcaagaaguucaagccggaaauagcaauaagacccaaagugagggaucaagaagggagaaugaacuauuacuggacacuaguagagccgggagacaaaauaacauucgaagcaacuggaaaucuagugguaccgagauaugcauucgcaauggaaagaaaugcuggaucugguauuaucaucucagauacaccaguccacgauugcaauacaacuugucagacacccaagggugcuauaaacaccagccucccauuucagaauauacauccgaucacaauuggaaaauguccaaaauauguaaaaagcacaaaauugagacuggccacaggauugaggaaugucccgucuauucaaucuagaggccuauuuggggccauugccgguuucauugaagggggguggacagggaugguagauggaugguacgguuaucaccaucaaaaugagcaggggucaggauaugcagccgaccugaagagcacacagaaugccauugacaagauuacuaacaaaguaaauucuguuauugaaaagaugaauacacaguucacagcaguagguaaagaguucaaccaccuggaaaaaagaauagagaauuuaaauaaaaaaguugaugaugguuuccuggacauuuggacuuacaaugccgaacuguugguucuauuggaaaaugaaagaacuuuggacuaccacgauucaaaugugaagaacuuauaugaaaagguaagaagccaguuaaaaaacaaugccaaggaaauuggaaacggcugcuuugaauuuuaccacaaaugcgauaacacgugcauggaaagugucaaaaaugggacuuaugacuacccaaaauacucagaggaagcaaaauuaaacagagaagaaauagaugggguaaagcuggaaucaacaaggauuuaccagauuuuggcgaucuauucaacugucgccaguucauugguacugguagucucccugggggcaaucaguuucuggaugugcucuaaugggucucuacaguguagaauauguauuuaa

SEQ ID NO: 36240 - RNA, 1701 nt, Artificial Sequence
  derived and/or modified CDS sequence (wt) from hemagglutinin__InfluenzaA__ADD23385
augaaggcaauacuaguaguucugcuauauacauuugcaaccgcaaaugcagacacauuauguauagguuaucaugcgaacaauucaacagacacuguagacacaguacuagaaaagaauguaacaguaacacacucuguuaaccuucuagaagacaagcauaacgggaaacuaugcaaacuaagagggguagccccauugcauuuggguaaauguaacauugcuggcuggauccugggaaauccagagugugaaucacucuccacagcaagcucaugguccuacauuguggaaacaucuaguucagacaauggaacguguuacccaggagauuucaucgauuaugaggagcuaagagagcaauugagcucagugucaucauuugaaagguuugagauauuccccaagacaaguucauggcccaaucaugacucgaacaaagguguaacggcagcauguccucaugcuggagcaaaaagcuucuacaaaaauuuaauauggcuaguuaaaaaaggaaauucauacccaaagcucagcaaauccuacauuaaugauaaagggaaagaaguccucgugcuauggggcauucaccauccaucuacuagugcugaccaacaaagucucuaucagaaugcagaugcauauguuuuuguggggacaucaagauacagcaagaaguucaagccggaaauagcaauaagacccaaagugagggaucaagaagggagaaugaacuauuacuggacacuaguagagccgggagacaaaauaacauucgaagcaacuggaaaucuagugguaccgagauaugcauucgcaauggaaagaaaugcuggaucugguauuaucauuucagauacaccaguccacgauugcaauacaacuugucagacacccaagggugcuauaaacaccagccucccauuucagaauauacauccgaucacaauuggaaaauguccaaaauauguaaaaagcacaaaauugagacuggccacaggauugaggaaugucccgucuauucaaucuagaggccuauuuggggccauugccgguuucauugaagggggguggacagggaugguagauggaugguacgguuaucaccaucaaaaugagcaggggucaggauaugcagccgaccugaagagcacacagaaugccauugacaagauuacuaacaaaguaaauucuguuauugaaaagaugaauacacaguucacagcaguagguaaagaguucaaccaccuggaaaaaagaauagagaauuuaaauaaaaaaguugaugaugguuuccuggacauuuggacuuacaaugccgaacuguugguucuauuggaaaaugaaagaacuuuggacuaccacgauucaaaugugaagaacuuauaugaaaagguaagaagccaguuaaaaaacaaugccaaggaaauuggaaacggcugcuuugaauuuuaccacaaaugcgauaacacgugcauggaaagugucaaaaaugggacuuaugacuacccaaaauacucagaggaagcaaaauuaaacagagaagaaauagaugggguaaagcuggaaucaacaaggauuuaccagauuuuggcgaucuauucaacugucgccaguucauugguacugguagucucucugggggcaaucaguuucuggaugugcucuaaugggucucuacaguguagaauauguauuuaa

SEQ ID NO: 36241 - RNA, 1701 nt, Artificial Sequence
  derived and/or modified CDS sequence (wt) from hemagglutinin__InfluenzaA__ADD23405
augaaggcaauacuaguaguucugcuauauacauuugcaaccgcaaaugcagacacauuauguauagguuaucaugcgaacaauucaacagacacuguagacacaguacuagaaaagaauguaacaguaacacacucuguuaaccuucuagaagacaagcauaacgggaaacuaugcaaacuaagagggguagccccauugcauuuggguaaauguaacauugcuggcuggauccugggaaauccagagugugaaucacucuccacagcaagcucaugguccuacauuguggaaacaucuaguucagacaauggaacguguuacccaggagauuucaucaauuaugaggagcuaagagagcaauugagcucagugucaucauuugaaagguuugagauauuccccaagacaaguucauggcccaaucaugacucgaacaaagguguaacggcagcauguccucaugcuggagcaaaaagcuucuacaaaaauuuaauauggcuaguuaaaaaaggaaauucauacccaaagcucagcaaauccuacauuaaugauaaagggaaagaaguccucgugcuauggggcauucaccauccaucuacuagugcugaccaacaaagucucuaucagaaugcagaugcauauguuuuuguggggacaucaagauacagcaagaaguucaagccggaaauagcaauaagacccaaagugagggaucaagaagggagaaugaacuauuacuggacacuaguagagccgggagacaaaauaacauucgaagcaacuggaaaucuagugguaccgagauaugcauucgcaauggaaagaaaugcuggaucugguauuaucaucucagauacaccaguccacgauugcaauacaacuugucagacacccaagggugcuauaaacaccagccucccauuucagaauauacauccgaucacaguuggaaaauguccaaaauauguaaaaagcacaaaauugagacuggccacaggauugaggaaugucccgucuauucaaucuagaggccuauuuggggccauugccgguuucauugaagggggguggacagggaugguagauggaugguacgguuaucaccaucaaaaugagcaggggucaggauaugcagccgaccugaagagcacacagaaugccauugacaagauuacuaacaaaguaaauucuguuauugaaaagaugaauacacaguucacagcaguagguaaagaguucaaccaccuagaaaaaagaauagagaauuuaaauaaaaaaguugaugaugguuuccuggacauuuggacuuacaaugccgaacuguugguucuauuggaaaaugaaagaacuuuggacuaccacgauucaaaugugaagaacuuauaugaaaagguaagaagccaguuaaaaaacaaugccaaggaaauuggaaacggcugcuuugaauuuuaccacaaaugcgauaacacgugcauggaaagugucaaaaaugggacuuaugacuacccaaaauacucagaggaagcaaaauuaaacagagaagaaauagaugggguaaagcuggaaucaacaaggauuuaccagauuuuggcgaucuauucaacugucgccaguucauugguacugguagucucccugggggcaaucaguuucuggaugugcucuaaugggucucuacaguguagaauauguauuuaa

SEQ ID NO: 36242 - RNA, 1701 nt, Artificial Sequence
  derived and/or modified CDS sequence (wt) from hemagglutinin__InfluenzaA__ADD23415
augaaggcaauacuaguaguucugcuauauacauuugcaaccgcaaaugcagacacauuauguauagguuaucaugcgaacaauucaacagacacuguagacacaguacuagaaaagaauguaacaguaacacacucuguuaaccuucuagaagacaagcauaacgggaaacuaugcaaacuaagagggguagccccauugcauuuggguaaauguaacauugcuggcuggauccugggaaauccagagugugaaucacucuccacagcaagcucaugguccuacauuguggaaacaucuaguucagacaauggaacguguuacccaggagauuucaucaauuaugaggagcuaagagagcaauugagcucagugucaucauuugaaagguuugagauauuccccaagacaaguucauggcccaaucaugacucgaacaaagguguaacggcagcauguccucaugcuggagcaaaaagcuucuacaaaaauuuaauauggcuaguuaaaaaaggaaauucauacccaaagcucagcaaauccuacauuaaugauaaagggaaagaaguccucgugcuauggggcauucaccauccaucuacuagugcugaccaacaaagucucuaucagaaugcagaugcauauguuuuuguggggacaucaagauacagcaagaaguucaagccggaaauagcaauaagacccaaagugagggaucaagaagggagaaugaacuauuacuggacacuaguagagccgggagacaaaauaacauucgaagcaacuggaaaucuagugguaccgagauaugcauucgcaauggaaagaaaugcugaaucugguauuaucaucucagauacaccaguccacgauugcaauacaacuugucagacacccaagggugcuauaaacaccagccucccauuucagaauauacauccgaucacaauuggaaaauguccaaaauauguaaaaagcacaaaauugagacuggccacaggauugaggaaugucccgucuauucaaucuagaggccuauuuggggccauugccgguuucauugaagggggguggacagggaugguagauggaugguacgguuaucaccaucaaaaugagcaggggucaggauaugcagccgaccugaagagcacacagaaugccauugacaagauuacuaacaaaguaaauucuguuauugaaaagaugaauacacaguucacagcaguagguaaagaguucaaccaccuagaaaaaagaauagagaauuuaaauaaaaaaguugaugaugguuuccuggacauuuggacuuacaaugccgaacuguugguucuauuggaaaaugaaagaacuuuggacuaccacgauucaaaugugaagaacuuauaugaaaagguaagaagccaguuaaaaaacaaugccaaggaaauuggaaacggcugcuuugaauuuuaccacaaaugcgauaacacgugcauggaaagugucaaaaaugggacuuaugacuacccaaaauacucagaggaagcaaaauuaaacagagaagaaauagaugggguaaagcuggaaucaacaaggauuuaccagauuuuggcgaucuauucaacugucgccaguucauugguacugguagucucccugggggcaaucaguuucuggaugugcucuaaugggucucuacaguguagaauauguauuuaa

SEQ ID NO: 36243 - RNA, 1701 nt, Artificial Sequence
  derived and/or modified CDS sequence (wt) from hemagglutinin__InfluenzaA__ADD23435
augaaggcaauacuaguaguucugcuauauacauuugcaaccgcaaaugcagacacauuauguauagguuaucaugcgaacaauucaacagacacuguagacacaguacuagaaaagaauguaacaguaacacacucuguuaaccuucuagaagacaagcauaaugggaaacuaugcaaacuaagagggguagccccauugcauuuggguaaauguaacauugcuggcuggauccugggaaauccagagugugaaucacucuccacagcaagcucaugguccuacauuguggaaacaucuaguucagacaauggaacguguuacccaggagauuucaucgauuaugaggagcuaagagagcaauugagcucagugucaucauuugaaagguuugagauauuccccaagacaaguucauggcccaaucaugacucgaacaaagguguaacggcagcauguccucaugcuggagcaaaaagcuucuacaaaaauuuaauauggcuaguuaaaaaaggaaauucauacccaaagcucagcaaauccuacauuaaugauaaagggaaagaaguccucgugcuauggggcauucaccauccaucuacuagugcugaccaacaaagucucuaucagaaugcagaugcauauguuuuuguggggacaucaagauacagcaagaaguucaagccggaaauagcaauaagacccaaagugagggaucaagaagggagaaugaacuauuacuggacacuaguagagccgggagacaaaauaacauucgaagcaacuggaaaucuagugguaccgagauaugcauucgcaauggaaagaaaugcuggaucugguauuaucauuucagauacaccaguccacgauugcaauacaacuugucagacacccaagggugcuauaaacaccagccucccauuucagaauauacauccgaucacaauuggaaaauguccaaaauauguaaaaagcacaaaauugagacuggccacaggauugaggaaugucccgucuauucaaucuagaggccuauuuggggccauugccgguuucauugaagggggguggacagggaugguagauggaugguacgguuaucaccaucaaaaugagcaggggucaggauaugcagccgaccugaagagcacacagaaugccauugacaagauuacuaacaaaguaaauucuguuauugaaaagaugaauacacaguucacagcaguagguaaagaguucaaccaccuggaaaaaagaauagagaauuuaaauaaaaaaguugaugaugguuuccuggacauuuggacuuacaaugccgaacuguugguucuauuggaaaaugaaagaacuuuggacuaccacgauucaaaugugaagaacuuauaugaaaagguaagaagccaguuaaaaaacaaugccaaggaaauuggaaacggcugcuuugaauuuuaccacaaaugcgauaacacgugcauggaaagugucaaaaaugggacuuaugacuacccaaaauacucagaggaagcaaaauuaaacagagaagaaauagaugggguaaagcuggaaucaacaaggauuuaccagauuuuggcgaucuauucaacugucgccaguucauugguacugguagucucccugggggcaaucaguuucuggaugugcucuaaugggucucuacaguguagaauauguauuuaa

SEQ ID NO: 36244 - RNA, 1701 nt, Artificial Sequence
  derived and/or modified CDS sequence (wt) from hemagglutinin__InfluenzaA__ADD23465
augaaggcaauacuagcaguucugcuauauacauuugcaaccgcaaaugcagacacauuauguauagguuaucaugcgaacaauucaacagacacuguagacacaguacuagaaaagaauguaacaguaacacacucuguuaaccuucuagaagacaagcauaacgggaaacuaugcaaacuaagagggguagccccauugcauuuggguaaauguaacauugcuggcuggauccugggaaauccagagugugaaucacucuccacagcaagcucaugguccuacauuguggaaacaucuaguucagacaauggaacguguuacccaggagauuucaucgauuaugaggagcuaagagagcaauugagcucagugucaucauuugaaagguuugagauauuccccaagacaaguucauggcccaaucaugacucgaacaaagguguaacggcagcauguccucaugcuggagcaaaaagcuucuacaaaaauuuaauauggcuaguuaaaaaaggaaauucauacccaaagcucagcaaauccuacauuaaugauaaagggaaagaaguccucgugcuauggggcauucaccauccaucuacuagugcugaccaacaaagucucuaucagaaugcagaugcauauguuuuuguggggacaucaagauacagcaagaaguucaagccggaaauagcaauaagacccaaagugagggaucaagaagggagaaugaacuauuacuggacacuaguagagccgggagacaaaauaacauucgaagcaacuggaaaucuagugguaccgagauaugcauucgcaauggaaagaaaugcuggaucugguauuaucauuucagauacaccaguccacgauugcaauacaacuugucagacacccaagggugcuauaaacaccagccucccauuucagaauauacauccgaucacaauuggaaaauguccaaaauauguaaaaagcacaaaauugagacuggccacaggauugaggaaugucccgucuauucaaucuagaggccuauuuggggccauugccgguuucauugaagggggguggacagggaugguagauggaugguacgguuaucaccaucaaaaugagcaggggucaggauaugcagccgaccugaagagcacacagaaugccauugacaagauuacuaacaaaguaaauucuguuauugaaaagaugaauacacaguucacagcaguagguaaagaguucaaccaccuggaaaaaagaauagagaauuuaaauaaaaaaguugaugaugguuuccuggacauuuggacuuacaaugccgaacuguugguucuauuggaaaaugaaagaacuuuggacuaccacgauucaaaugugaagaacuuauaugaaaagguaagaagccaguuaaaaaacaaugccaaggaaauuggaaacggcugcuuugaauuuuaccacaaaugcgauaacacgugcauggaaagugucaaaaaugggacuuaugacuacccaaaauacucagaggaagcaaaauuaaacagagaagaaauagaugggguaaagcuggaaucaacaaggauuuaccagauuuuggcgaucuauucaacugucgccaguucauugguacugguagucucccugggggcaaucaguuucuggaugugcucuaaugggucucuacaguguagaauauguauuuaa

SEQ ID NO: 36245 - RNA, 1701 nt, Artificial Sequence; identical to SEQ ID NO: 35845
  derived and/or modified CDS sequence (wt) from hemagglutinin__InfluenzaA__ADD23475

SEQ ID NO: 36246 - RNA, 1701 nt, Artificial Sequence; identical to SEQ ID NO: 36222
  derived and/or modified CDS sequence (wt) from hemagglutinin__InfluenzaA__ADD23485

SEQ ID NO: 36247 - RNA, 1701 nt, Artificial Sequence
  derived and/or modified CDS sequence (wt) from hemagglutinin__InfluenzaA__ADD23495
augaaggcaauacuaguaguucugcuauauacauuugcaaccgcaaaugcagacacauuauguauagguuaucaugcgaacaauucaacagacacuguagacacaguacuagaaaagaauguaacaguaacacacucuguuaaccuucuagaagacaagcauaacgggaaacuaugcaaacuaagagggguagccccauugcauuuggguaaauguaacauugcuggcuggauccugggaaauccagagugugaaucacucuccacagcaagcucaugguccuacauuguggaaacaucuaguucagacaauggaacguguuacccaggagauuucaucgauuaugaggagcuaagagagcaauugagcucagugucaucauuugaaagguuugagauauuccccaagacaaguucauggcccaaucaugacucgaacaaagguguaacggcagcauguccucaugcuggagcaagaagcuucuacaaaaauuuaauauggcuaguuaaaaaaggaaauucauacccaaagcucagcaaauccuacauuaaugauaaagggaaagaaguccucgugcuauggggcauucaccauccaucuacuagugcugaccaacaaagucucuaucagaaugcagaugcauauguuuuuguggggacaucaagauacagcaagaaguucaagccggaaauagcaauaagacccaaagugagggaucaagaagggagaaugaacuauuacuggacacuaguagagccgggagacaaaauaacauucgaagcaacuggaaaucuagugguaccgagauaugcauucgcaauggaaagaaaugcuggaucugguauuaucauuucagauacaccaguccacgauugcaauacaacuugucagacacccaagggugcuauaaacaccagccucccauuucagaauauacauccgaucacaauuggaaaauguccaaaauauguaaaaagcacaaaauugagacuggccacaggauugaggaaugucccgucuauucaaucuagaggccuauuuggggccauugccgguuucauugaagggggguggacagggaugguagauggaugguacgguuaucaccaucaaaaugagcaggggucaggauaugcagccgaccugaagagcacacagaaugccauugacgagauuacuaacaaaguaaauucuguuauugaaaagaugaauacacaguucacagcaguagguaaagaguucaaccaccuggaaaaaagaauagagaauuuaaauaaaaaaguugaugaugguuuccuggacauuuggacuuacaaugccgaacuguugguucuauuggaaaaugaaagaacuuuggacuaccacgauucaaaugugaagaacuuauaugaaaagguaagaagccaguuaaaaaacaaugccaaggaaauuggaaacggcugcuuugaauuuuaccacaaaugcgauaacacgugcauggaaagugucaaaaaugggacuuaugacuacccaaaauacucagaggaagcaaaauuaaacagagaagaaauagaugggguaaagcuggaaucaacaaggauuuaccagauuuuggcgaucuauucaacugucgccaguucauugguacugguagucucccugggggcaaucaguuucuggaugugcucuaaugggucucuacaguguagaauauguauuuaa

SEQ ID NO: 36248 - RNA, 1701 nt, Artificial Sequence
  derived and/or modified CDS sequence (wt) from hemagglutinin__InfluenzaA__ADD23505
augaaggcaauacuaguaguucugcuauauacauuugcaaccgcaaaugcagacacauuauguauagguuaucaugcgaacaauucaacagacacuguagacacaguacuagaaaagaauguaacaguaacacacucuguuaaccuucuagaagacaagcauaacgggaaacuaugcaaacuaagagggguagccccauugcauuuggguaaauguaacauugcuggcuggauccugggaaauccagagugugaaucacucuccacagcaagcucaugguccuacauuguggaaacaucuaguucagacaauggaacguguuacccaggagauuucaucgauuaugaggagcuaagagagcaauugagcucagugucaucauuugaaagguuugagauauuccccaagacaaguucauggcccaaucaugacucgaacaaagguguaacggcagcauguccucaugcuggagcaaaaagcuucuacaaaaauuuaauauggcuaguuaaaaaaggaaauucauacccaaagcucagcaaauccuacauuaaugauaaagggaaagaaguccucgugcuauggggcauucaccauccaucuacuagugcugaccaacaaagucucuaucagaaugcagaugcauauguuuuuguggggacaucaagauacagcaagaaguucaagccggaaauagcaauaagacccaaagugagggaucaagaagggagaaugaacuauuacuggacacuaauagagccgggagacaaaauaacauucgaagcaacuggaaaucuagugguaccgagauaugcauucgcaauggaaagaaaugcuggaucugguauuaucauuucagauacaccagcccacgauugcaauacaacuugucagacacccaagggugcuauaaacaccagccucccauuucagaauauacauccgaucacaauuggaaaauguccaaaauauguaaaaagcacaaaauugagacuggccacaggauugaggaaugucccgucuauucaaucuagaggccuauuuggggccauugccgguuucauugaagggggguggacagggaugguagauggaugguacgguuaucaccaucaaaaugaacaggggucaggauaugcagccgaccugaagagcacacagaaugccauugacaagauuacuaacaaaguaaauucuguuauugaaaagaugaauacacaguucacagcaguagguaaagaguucaaccaccuggaaaaaagaauagagaauuuaaauaaaaaaguugaugaugguuuccuggacauuuggacuuacaaugccgaacuguugguucuauuggaaaaugaaagaacuuuggacuaccacgauucaaaugugaagaacuuauaugaaaagguaagaagccaguuaaaaaacaaugccaaggaaauuggaaacggcugcuuugaauuuuaccacaaaugcgauaacacgugcauggaaagugucaaaaaugggacuuaugacuacccaaaauacucagaggaagcaaaauuaaacagagaagaaauagaugggguaaagcuggaaucaacaaggauuuaccagauuuuggcgaucuauucaacugucgccaguucauugguacugguagucucccugggggcaaucaguuucuggaugugcucuaaugggucucuacaguguagaauauguauuuaa

SEQ ID NO: 36249 - RNA, 1701 nt, Artificial Sequence
  derived and/or modified CDS sequence (wt) from hemagglutinin__InfluenzaA__ADD23515
augaaggcaauacuaguaguucugcuauauacauuugcaaccgcaaaugcagacacauuauguauagguuaucaugcgaacaauucaacagacacuguagacacaguacuagaaaagaauguaacaguaacacacucuguuaaccuucuagaagacaagcauaacgggaaacuaugcaaacuaagagggguagccccauugcauuuggguaaauguaacauugcuggcuggauccugggaaauccagagugugaaucacucuccacagcaagcucaugguccuacauuguggaaacaucuaguucagacaauggaacguguuacccaggagauuucauugauuaugaggagcuaagagagcaauugagcucagugucaucauuugaaagguuugagauauuccccaagacaaguucauggcccaaucaugacucgaacaaagguguaacggcagcauguccucaugcuggagcaaaaagcuucuacaaaaauuuaauauggcuaguuaaaaaaggaaauucauacccaaagcucagcaaauccuacauuaaugauaaagggaaagaaguccucgugcuauggggcauucaccauccaucuacuagugcugaccaacaaagucucuaucagaaugcagaugcauauguuuuuguggggacaucaagauacagcaagaaguucaagccggaaauagcaauaagacccaaagugagggaucaagaagggagaaugaacuauuacuggacacuaguagagccgggagacaaaauaacauucgaagcaacuggaaaucuagugguaccgagauaugcauucgcaauggaaagaaaugcuggaucugguauuaucauuucagauacaccaguccacgauugcaauacaacuugucagacacccaagggugcuauaaacaccagucucccauuucagaauauacauccgaucacaauuggaaaauguccaaaauauguaaaaagcacaaaauugagacuggccacaggauugaggaaugucccgucuauucaaucuagaggccuauuuggggccauugccgguuucauugaagggggguggacagggaugguagauggaugguacgguuaucaccaucaaaaugagcaggggucaggauaugcagccgaccugaagagcacacagaaugccauugacaagauuacuaacaaaguaaauucuguuauugaaaagaugaauacacaguucacagcaguagguaaagaguucaaccaccuggaaaaaagaauagagaauuuaaauaaaaaaguugaugaugguuuccuggacauuuggacuuacaaugccgaacuguugguucuauuggaaaaugaaagaacuuuggacuaccacgauucaaaugugaagaacuuauaugaaaagguaagaagccaguuaaaaaacaaugccaaggaaauuggaaacggcugcuuugaauuuuaccacaaaugcgauaacacaugcauggaaagugucaaaaaugggacuuaugacuacccaaaauacucagaggaagcaaaauuaaacagagaagaaauagaugggguaaagcuggaaucaacaaggauuuaccagauuuuggcgaucuauucaacugucgccaguucauugguacugguagucucccugggggcaaucaguuucuggaugugcucuaaugggucucuacaguguagaauauguauuuaa

SEQ ID NO: 36250 - RNA, 1701 nt, Artificial Sequence; identical to SEQ ID NO: 35845
  derived and/or modified CDS sequence (wt) from hemagglutinin__InfluenzaA__ADD23994

SEQ ID NO: 36251 - RNA, 1701 nt, Artificial Sequence
  derived and/or modified CDS sequence (wt) from hemagglutinin__InfluenzaA__ADD24004
augaaggcaauacuaguaguucugcuauauacauuugcaaccgcaaaugcagacacauuauguauagguuaucaugcgaacaauucaacagacacuguagacacaguacuagaaaagaauguaacaguaacacacucuguuaaccuucuagaagacaagcauaacgggaaacuaugcaaacuaagagggguagccccauugcauuuggguaaauguaacauugcuggcuggauccugggaaauccagagugugaaucacucuccacagcaagcucaugguccuacauuguggaaacaucuaguucagacaauggaacguguuacccaggagauuucaucgauuaugaggagcuaagagagcaauugagcucagugucaucauuugaaagguuugagauauuccccaagacaaguucauggcccaaucaugacucgaacaaagguguaacggcagcauguccucaugcuggagcaaaaagcuucuacaaaaauuuaauauggcuaguuaaaaaaggaaauucauacccaaagcucagcaaauccuacauuaaugauaaagggaaagaaguccucgugcuauggggcauucaccauccaucuacuagugcugaccaacaaagucucuaucagaaugcagaugcauauguuuuuguggggacaucaagauacagcaagaaguucaagccggaaauagcaauaagacccaaagugagggaucaagaagggagaaugaacuauuacuggacacuaguagagccgggagacaaaauaacauucgaagcaacuggaaaucuagugguaccgagauaugcauucgcaauggaaagaaaugcuggaucugguauuaucauuucagauacaccaguccacgauugcaauacaacuugucagacacccaauggugcuauaaacaccagccucccauuucagaauauacauccgaucacaauuggaaaauguccaaaauauguaaaaagcacaaaauugagacuggccacaggauugaggaaugucccgucuauucaaucuagaggccuauuuggggccauugccgguuucauugaagggggguggacagggaugguagauggaugguacgguuaucaccaucaaaaugagcaggggucaggauaugcagccgaccugaagagcacacagaaugccauugacgagauuacuaacaaaguaaauucuguuauugaaaagaugaauacacaguucacagcaguagguaaagaguucaaccaccuggaaaaaagaauagagaauuuaaauaaaaaaauugaugaugguuuccuggacauuuggacuuacaaugccgaacuguugguucuauuggaaaaugaaagaacuuuggacuaccacgauucaaaugugaagaacuuauaugaaaagguaagaagccaguuaaaaaacaaugccaaggaaauuggaaacggcugcuuugaauuuuaccacaaaugcgauaacacgugcauggaaagugucaaaaaugggacuuaugacuacccaaaauacucagaggaagcaaaauuaaacagagaagaaauagaugggguaaagcuggaaucaacaaggauuuaccagauuuuggcgaucuauucaacugucgccaguucauugguacugguagucucccugggggcaaucaguuucuggaugugcucuaaugggucucuacaguguagaauauguauuuaa

SEQ ID NO: 36252 - RNA, 1701 nt, Artificial Sequence; identical to SEQ ID NO: 36080
  derived and/or modified CDS sequence (wt) from hemagglutinin__InfluenzaA__ADD24014

SEQ ID NO: 36253 - RNA, 1701 nt, Artificial Sequence
  derived and/or modified CDS sequence (wt) from hemagglutinin__InfluenzaA__ADD52537
augaaggcaauacuaguaguucugcuauauacauuugcaaccgcaaaugcagacacauuauguauagguuaucaugcgaacaauucaacagacacuguagacacaguacuagaaaagaauguaacaguaacacacucuguuaaccuucuagaagacaagcauaacgggaaacuaugcaaacuaagagggguagccccauugcauuuggguaaauguaacauugcuggcuggauccugggaaauccagagugugaaucacucuccacagcaagcucaugguccuacauuguggaaacaucuaguucagacaauggaacguguuacccaggagauuucaucgauuaugaggagcuaagagagcaauugagcucagugucaucauuugaaagguuugagauauuccccaagacaaguucauggcccaaucaugacucgaacaaagguguaacggcagcauguccucaugcuggagcaaaaagcuucuacaaaaauuuaauauggcuaguuaaaaaaggaaauucauacccaaagcucagcaaauccuacauuaaugauaaagggaaagaaguccucgugcuauggggcauucaccauccaucuacuagugcugaccaacaaagucucuaucagaaugcagaugcauauguuuuuguggggucaucaagauacagcaagaaguucaagccggaaauagcaauaagacccaaagugagggaucaagaagggagaaugaacuauuacuggacacuaguagagccgggagacaaaauaacauucgaagcaacuggaaaucuagugguaccgagauaugcauucgcaauggaaagaaaugcuggaucugguauuaucauuucagauacaccaguccacgauugcaauacaacuugucagacacccaagggugcuauaaacaccagccucccauuucagaauauacauccgaucacaauuggaaaauguccaaaauauguaaaaagcacaaaauugagacuggccacaggauugaggaaugucccgucuauucaaucuagaggccuauuuggggccauugccgguuucauugaagggggguggacagggaugguagauggaugguacgguuaucaccaucaaaaugagcaggggucaggauaugcagccgaccugaagagcacacagaaugccauugacggaauuacuaacaaaguaaauucuguuauugaaaagaugaauacacaguucacagcaguagguaaagaguucaaccaccuggaaaaaagaauagagaauuuaaauaaaaaaguugaugaugguuuccuggacauuuggacuuacaaugccgaacuguugguucuauuggaaaaugaaagaacuuuggacuaccacgauucaaaugugaagaacuuauaugaaaagguaagaagccaguuaaaaaacaaugccaaggaaauuggaaacggcugcuuugaauuuuaccacaaaugcgauaacacgugcauggaaagugucaaaaaugggacuuaugacuacccaaaauacucagaggaagcaaaauuaaacagagaagaaauagaugggguaaagcuggaaucaacaaggauuuaccagauuuuggcgaucuauucaacugucgccaguucauugguacugguagucucccugggggcaaucaguuucuggaugugcucuaaugggucucuacaguguagaauauguauuuaa

SEQ ID NO: 36254 - RNA, 1701 nt, Artificial Sequence
  derived and/or modified CDS sequence (wt) from hemagglutinin__InfluenzaA__ADD64203
augaaggcaauacuaguaguucugcuauauacauuugcaaccgcaaaugcagacacauuauguauagguuaucaugcgaacaauucaacagacacuguagacacaguacuagaaaagaauguaacaguaacacacucuguuaaccuucuagaagacaagcauaacgggaaacuaugcaaacuaagagggguagccccauugcauuuggguaaauguaacauugcuggcuggauccugggaaauccagagugugaaucacucuccacagcaagcucaugguccuacauuguggaaacaucuaguucagacaauggaacguguuacccaggagauuucaucgauuaugaggagcuaagagagcaauugagcucagugucaucauuugaaagguuugagauauuccccaagacaaguucauggcccaaucaugacucgaacaaagguguaacggcagcauguccucaugcuggagcaaaaagcuucuacaaaaauuuaauauggcuaguuaaaaaaggaaauucauacccaaagcucagcaaauccuacauuaaugauaaagggaaagaaguccucgugcuauggggcauucaccauccaucuacuagugcugaccaacaaagucucuaucagaaugcagaugcauauguuuuuguggggacaucaagauacagcaagaaguucaagccggaaauagcaauaagacccaaagugagggaucaagaagggagaaugaacuauuacuggacacuaguagagccgggagacaaaauaacauucgaagcaacuggaaaucuagugguaccgagauaugcauucgcaauggaaagaaaugcuggaucugguauuaucauuucagauacaccaguccacgauugcaauacaacuugucagacacccaagggugcuauaaacaccagccucccauuucagaauauacauccgaucacaauugggaaauguccaaaauauguaaaaagcacaaaauugagacuggccacaggauugaggaaugucccgucuauucaaucuagaggccuauuuggggccauugccgguuucauugaagggggguggacagggaugguagauggaugguacgguuaucaccaucaaaaugagcaggggucaggauaugcagccgaccugaagagcacacagaaugccauugacaagauuaccaacaaaguaaauucuguuauugaaaagaugaauacacaguucacagcaguagguaaagaguucaaccaccuggaaaaaagaauagagaauuuaaauaaaaaaguugaugaugguuuccuggacauuuggacuuacaaugccgaacuguugguucuauuggaaaaugaaagaacuuuggacuaccacgauucaaaugugaagaacuuauaugaaaagguaagaagccaguuaaaaaacaaugccaaggaaauuggaaacggcugcuuugaauuuuaccacaaaugcgauaacacgugcauggaaagugucaaaaaugggacuuaugacuacccaaaauacucagaggaagcaaaauuaaacagagaagaaauagaugggguaaagcuggaaucaacaaggauuuaccagauuuuggcgaucuauucaacugucgccaguucauugguacugguagucucccugggggcaaucaguuucuggaugugcucuaaugggucucuacaguguagaauauguauuuaa

SEQ ID NO: 36255 - RNA, 1701 nt, Artificial Sequence
  derived and/or modified CDS sequence (wt) from hemagglutinin__InfluenzaA__ADD64204
augaaggcaauacuaguaguucugcuauauacauuugcaaccgcaaaugcagacacauuauguauagguuaccaugcgaacaauucaacagacacuguagacacaguacuagaaaagaauguaacaguaacacacucuguuaaccuucuagaagacaagcauaacgggaaacuaugcaaacuaagagggguagccccauugcauuuggguaaauguaacauugcuggcuggauccugggaaauccagagugugaaucacucuccacagcaagcucaugguccuacauuguggaaacaucuaguucagacaauggaacguguuacccaggagauuucaucgauuaugaggagcuaagagagcaauugagcucagugucaucauuugaaagguuugagauauuccccaagacaaguucauggcccaaucaugacccgaacaaagguguaacggcagcauguccucaugcuggagcaaaaagcuucuacaaaaauuuaauauggcuaguuaaaaaaggaaauucauacccaaagcucagcaaauccuacauuaaugauaaagggaaagaaguccucgugcuauggggcauucaccauccaucuacuagugcugaccaacaaagucucuaucagaaugcagaugcauauguuuuuguggggacaucaagauacagcaagaaguucaaaccggaaauagcaauaagacccaaagugagggaucaagaagggagaaugaacuauuacuggacacuaauagagccgggagaaaaaauaacauucgaagcaacuggaaaucuagugguaccgagauaugcauucgcaauggaaagaaaugcuggaucugguauuaucauuucagauacaccaguccacgauugcaauacaacuugucagacacccaagggugcuauaaacaccagccucccauuucagaauauacauccgaucacaauuggaaaauguccaaaauauguaaaaagcacaaaauugagacuggccacaggauugaggaaugucccgucuauucaaucuagaggccuauuuggggccauugccgguuucauugaagggggguggacagggaugguagauggaugguacgguuaucaccaucaaaaugagcaggggucaggauaugcagccgaccugaagagcacacagaaugccauugacgaaauuacuaacaaaguaaauucuguuauugaaaagaugaauacacaguucacagcaguagguaaagaguucaaccaccuggaaaaaagaauagagaauuuaaauaaaaaaguugaugaugguuuccuggacauuuggacuuacaaugccgaacuguugguucuauuggaaaaugaaagaacuuuggauuaccacgauucaaaugugaagaacuuauaugaaaagguaagaagccaguuaaaaaacaaugccagggaaauuggaaacggcugcuuugaauuuuaccacaaaugcgauaacacgugcauggaaagugucaaaaaugggacuuaugacuacccaaaauacucagaggaagcaaaauuaaacagagaagaaauagaugggguaaagcuggaaucaacaaggauuuaccagauuuuggcgaucuauucaacugucgccaguucauugguacugguagucucccugggggcaaucaguuucuggaugugcucuaaugggucucuacaguguagaauauguauuuaa

SEQ ID NO: 36256 - RNA, 1701 nt, Artificial Sequence
  derived and/or modified CDS sequence (wt) from hemagglutinin__InfluenzaA__ADD64205
augaaggcaauacuaguaguucugcuauauacauuugcaaccgcaaaugcagacacauuauguauagguuaucaugcgaacaauucaacagacacuguagacacaguacuagaaaagaauguaacaguaacacacucuguuaaccuucuagaagacaagcauaacgggaaacuaugcaaacuaagagggguagccccauugcauuuggguaaauguaacauugcuggcuggauccugggaaauccagagugugaaucacucuccacagcaagcucaugguccuacauuguggaaacaucuaguucagacaauggaacguguuacccaggagauuucaucgauuaugaggagcuaagagagcaauugagcucagugucaucauuugaaagguuugagauauuccccaagacaaguucauggcccaaucaugacucgaacaaagguguaacggcagcauguccucaugcuggagcaaaaagcuucuacaaaaauuuaauauggcuaguuaaaaaaggaaauucauacccaaagcucagcaaauccuacauuaaugauaaagggaaagagguccucgugcuauggggcauucaccauccaucuacuagugcugaccaacaaagucucuaucagaaugcagaugcauauguuuuuguggggacaucaagauacagcaagaaguucaagccggaaauagcaauaagacccaaagugagggaucaagaagggagaaugaacuauuacuggacacuaguagagccgggagacaaaauaacauucgaagcaacuggaaaucuagugguaccgagauaugcauucgcaauggaaagaaaugcuggaucugguauuaucauuucagauacaccaguccacgauugcaauacaacuugucagacacccaagggugcuauaaacaccagccucccauuucagaauauacauccgaucacaauuggaaaauguccaaaauauguaaaaagcacaaaauugagacuggccacaggauugaggaaugucccgucuauucaaucuagaggccuauuuggggccauugccgguuucauugaagggggguggacagggaugguagauggaugguacgguuaucaccaucaaaaugagcaggggucaggauaugcagccgaccugaagagcacacagaaugccauugacgagauuacuaacaaaguaaauucuguuauugaaaagaugaauacacaguucacagcaguagguaaagaguucaaccaccuggaaaaaagaauagagaauuuaaauaaaaaaguugaugaugguuuccuggacauuuggacuuacaaugccgaacuguugguucuauuggaaaaugaaagaacuuuggacuaccacgauucaaaugugaagaacuuauaugaaaagguaagaagccaguuaaaaaacaaugccaaggaaauuggaaacggcugcuuugaauuuuaccacaaaugcgauaacacgugcauggaaagugucaaaaaugggacuuaugacuacccaaaauacucagaggaagcaaaauuaaacagagaagaaauagaugggguaaagcuggaaucaacaaggauuuaccagauuuuggcgaucuauucaacugucgccaguucauugguacugguagucucccugggggcaaucaguuucuggaugugcucuaaugggucucuacaguguagaauauguauuuaa

SEQ ID NO: 36257 - RNA, 1701 nt, Artificial Sequence; identical to SEQ ID NO: 36256
  derived and/or modified CDS sequence (wt) from hemagglutinin__InfluenzaA__ADD64206

SEQ ID NO: 36258 - RNA, 1701 nt, Artificial Sequence; identical to SEQ ID NO: 35479
  derived and/or modified CDS sequence (wt) from hemagglutinin__InfluenzaA__ADD64207

SEQ ID NO: 36259 - RNA, 1701 nt, Artificial Sequence
  derived and/or modified CDS sequence (wt) from hemagglutinin__InfluenzaA__ADD64208
augaaggcaauacuaguaguucugcuauauacauuugcaaccgcaaaugcagacacauuauguauagguuaucaugcgaacaauucaacagacacuguagacacaguacuagaaaagaauguaacaguaacacacucuguuaaccuucuagaagacaagcauaacgggaaacuaugcaaacuaagagggguagccccauugcauuuggguaaauguaacauugcuggcuggauccugggaaauccagagugugaaucacucuccacagcaagcucaugguccuacauuguggaaacaucuaguucagacaauggaacguguuacccaggagauuucaucgauuaugaggagcuaagagagcaauugagcucagugucaucauuugaaagguuugagauauuccccaagacaaguucauggcccaaucaugacccgaacaaagguguaacggcagcauguccucaugcuggagcaaaaagcuucuacaaaaauuuaauauggcuaguuaaaaaaggaaauucauacccaaagcucagcaaauccuacauuaaugauaaagggaaagaaguccucgugcuauggggcauucaccauccaucuacuagugcugaccaacaaagucucuaucagaaugcagaugcauauguuuuuguggggacaucaagauacagcaagaaguucaagccggaaauagcaauaagacccaaagugagggaucaagaagggagaaugaacuauuacuggacacuaguagagccgggagacaaaauaacauucgaagcaacuggaaaucuagugguaccgagauaugcauucgcaauggaaagaaaugcuggaucugguauuaucauuucagauacaccaguccacgauugcaauacaacuugucagacacccaagggugcuauaaacaccagccucccauuucagaauauacauccgaucacaauuggaaaauguccaaaauauguaaaaagcacaaaauugagacuggccacaggauugaggaaugucccgucuauucaaucuagaggccuauuuggggccauugccgguuucauugaagggggguggacaggaaugguagauggaugguacgguuaucaccaucaaaaugagcaggggucaggauaugcagccgaccugaagagcacacagaaugccauugacgagauuacuaacaaaguaaauucuguuauugaaaagaugaauacacaguucacagcaguagguaaagaguucaaccaccuggaaaaaagaauagagaauuuaaauaaaaaaguugaugaugguuuccuggacauuuggacuuacaaugccgaacuguugguucuauuggaaaaugaaagaacuuuggacuaccacgauccaaaugugaagaacuuauaugaaaagguaagaagccaguuaaaaaacaaugccaaggaaauuggaaacggcugcuuugaauuuuaccacaaaugcgauaacacgugcauggaaagugucaaaaaugggacuuaugacuacccaaaauacucagaggaagcaaaauuaaacagagaagaaauagaugggguaaagcuggaaucaacaaggauuuaccagauuuuggcgaucuauucaacugucgccaguucauugguacugguagucucccugggggcaaucaguuucuggaugugcucuaaugggucucuacaguguagaauauguauuuaa

SEQ ID NO: 36260 - RNA, 1701 nt, Artificial Sequence
  derived and/or modified CDS sequence (wt) from hemagglutinin__InfluenzaA__ADD64209
augaaggcaauacuaguaguucugcuauauacauuugcaaccgcaaaugcagacacauuauguauagguuaucaugcgaacaauucaacagacacuguagacacaguacuagaaaagaauguaacaguaacacacucuguuaaccuucuagaagacaagcauaacgggaaacuaugcaaacuaagagggguagccccauugcauuuggguaaauguaacauugcuggcuggauccugggaaauccagagugugaaucacucuccacagcaagcucaugguccuacauuguggaaacaucuaguucagacaauggaacguguuacccaggagauuucaucgauuaugaggagcuaagagagcaauugagcucagugucaucauuugaaagguuugagauauuccccaagacaaguucauggcccaaucaugacccgaacaaagguguaacggcagcauguccucaugcuggagcaaaaagcuucuacaaaaauuuaauauggcuaguuaaaaaaggaaauucauacccaaagcucagcaaauccuacauuaaugauaaagggaaagaaguccucgugcuauggggcauucaccauccaucuacuagugcugaccaacaaagucucuaucagaaugcagaugcauauguuuuuguggggacaucaagauacagcaagaaguucaagccggaaauagcaauaagacccaaagugagggaucaagaagggagaaugaacuauuacuggacacuaguagagccgggagacaaaauaacauucgaagcaacuggaaaucuagugguaccgagauaugcauucgcaauggaaagaaaugcuggaucugguauuaucauuucagauacaccaguccacgauugcaauacaacuugucagacacccaagggugcuauaaacaccagccucccauuucagaauauacauccgaucacaauuggaaaauguccaaaauauguaaaaagcacaaaauugagacuggccacaggauugaggaauguuccgucuauucaaucuagaggccuauuuggggccauugccgguuucauugaagggggguggacagggaugguagauggaugguacgguuaucaccaucaaaaugagcaggggucaggauaugcagccgaccugaagagcacacagaaugccauugacgagauuacuaacaaaguaaauucuguuauugaaaagaugaauacacaguucacagcaguagguaaagaguucaaccaccuggaaaaaagaauagagaauuuaaauaaaaaaguugaugaugguuuccuggacauuuggacuuacaaugccgaacuguugguucuauuggaaaaugaaagaacuuuggacuaccacgauucaaaugugaagaacuuauaugaaaagguaagaagccaguuaaaaaacaaugccaaggaaauuggaaacggcugcuuugaauuuuaccacaaaugcgauaacacgugcauggaaagugucaaaaaugggacuuaugacuacccaaaauacucagaggaagcaaaauuaaacagagaagaaauagaugggguaaagcuggaaucaacaaggauuuaccagauuuuggcgaucuauucaacugucgccaguucauugguacugguagucucccugggggcaaucaguuucuggaugugcucuaaugggucucuacaguguagaauauguauuuaa

SEQ ID NO: 36261 - RNA, 1701 nt, Artificial Sequence
  derived and/or modified CDS sequence (wt) from hemagglutinin__InfluenzaA__ADD64210
augaaggcaauacuaguaguucugcuauauacauuugcaaccgcaaaugcagacacauuauguauagguuaucaugcgaacaauucaacagacacuguagacacaguacuagaaaagaauguaacaguaacacacucuguuaaccuucuagaagacaagcauaacgggaaacuaugcaaacuaagagggguagccccauugcauuuggguaaauguaacauugcuggcuggauccugggaaauccagagugugaaucacucuccacagcaagcucaugguccuacauuguggaaacaucuaguucagacaauggaacguguuacccaggagauuucaucgauuaugaggagcuaagagagcaauugagcucagugucaucauuugaaagguuugagauauuccccaagacaaguucauggcccaaucaugacucgaacaaagguguaacggcagcauguccucaugcuggagcaaaaagcuucuacaaaaauuuaauauggcuaguuaaaaaaggaaauucauacccaaagcucagcaaauccuacauuaaugauaaagggaaagaaguccucgugcuauggggcauucaccauccaucuacuagugcugaccaacaaagucucuaucagaaugcagaugcauauguuuuuguggggacaucaagauacagcaagaaguucaagccggaaauagcaauaagacccaaagugagggaucaagaagggagaaugaacuauuacuggacacuaguagagccgggagacaaaauaacauucgaagcaacuggaaaucuagugguaccgagauaugcauucgcaauggaaagaaaugcuggaucugguauuaucauuucagauacaccaguccacgauugcaauacaacuugucagacacccaagggugcuauaaacaccagccucccauuucagaauauacauccgaucacaauuggaaaauguccaaaauauguaaaaagcacaaaauugagacuggccacaggauugaggaaugucccuucuauucaaucuagaggccuauuuggggccauugccgguuucauugaagggggguggacagggaugguagauggaugguacgguuaucaccaucaaaaugagcaggggucaggauaugcagccgaccugaagagcacacagaaugccauugacgagauuacuaacaaaguaaauucuguuauugaaaagaugaauacacaguucacagcaguagguaaagaguucaaccaccuggaaaaaagaauagagaauuuaaauaaaaaaguugaugaugguuuccuggacauuuggacuuacaaugccgaacuguugguucuauuggaaaaugaaagaacuuuggacuaccacgauucaaaugugaagaacuuauaugaaaagguaagaagccaguuaaaaaacaaugccaaggaaauuggaaacggcugcuuugaauuuuaccacaaaugcgauaacacgugcauggaaagugucaaaaaugggacuuaugacuacccaaaauacucagaggaagcaaaauuaaacagagaagaaauagaugggguaaagcuggaaucaacaaggauuuaccagaucuuggcgaucuauucaacugucgccaguucauugguacugguagucucccugggggcaaucaguuucuggaugugcucuaaugggucucuacaguguagaauauguauuuaa

SEQ ID NO: 36262 - RNA, 1701 nt, Artificial Sequence
  derived and/or modified CDS sequence (wt) from hemagglutinin__InfluenzaA__ADD64211
augaaggcaauacuaguaguucugcuauauacauuugcaaccgcaaaugcagacacauuauguauagguuaucaugcgaacaauucaacggacacuguagacacaguacuagaaaagaauguaacaguaacacacucuguuaaccuucuagaagacaagcauaacgggaaacuaugcaaacuaagagggguagccccauugcauuuggguaaauguaacauugcuggcuggauccugggaaauccagagugugaaucacucuccacagcaagcucaugguccuacauuguggaaacaucuaguucagacaauggaacguguuacccaggagauuucaucgauuaugaggagcuaagagagcaauugagcucagugucaucauuugaaagguuugagauauuccccaagacaaguucauggcccaaucaugacccgaacaaagguguaacggcagcauguccucaugcuggagcaaaaagcuucuacaaaaauuuaauauggcuaguuaaaaaaggaaauucauacccaaagcucagcaaauccuacauuaaugauaaagggaaagaaguccucgugcuauggggcauucaccauccaucuacuagugcugaccaacaaagucucuaucagaaugcagaugcauauguuuuuguggggacaucaagauacagcaagaaguucaagccggaaauagcaauaagacccaaagugagggaucaagaagggagaaugaacuauuacuggacacuaguagagccgggagacaaaauaacauucgaagcaacuggaaaucuagugguaccgagauaugcauucgcaauggaaagaaaugcuggaucugguauuaucauuucagauacaccaguccacgauugcaauacaacuugucagacacccaagggugcuauaaacaccagccucccauuucagaauauacauccgaucacaauuggaaaauguccaaaauauguaaaaagcacaaaauugagacuggccacaggauugaggaaugucccgucuauucaaucuagaggccuauuuggggccauugccgguuucauugaagggggguggacagggaugguagauggaugguacgguuaucaccaucaaaaugagcaggggucaggauaugcagccgaccugaagagcacacagaaugccauugacgagauuacuaacaaaguaaauucuguuauugaaaagaugaauacacaguucacagcaguagguaaagaguucaaccaccuggaaaaaagaauagagaauuuaaauaaaaaaguugaugaugguuuccuggacauuuggacuuacaaugccgaacuguugguucuauuggaaaaugaaagaacuuuggacuaccacgauucaaaugugaagaacuuauaugaaaagguaagaagccaguuaaaaaacaaugccaaggaaauuggaaacggcugcuuugaauuuuaccacaaaugcgauaacacgugcauggaaagugucaaaaaugggacuuaugacuacccaaaauacucagaggaagcaaaauuaaacagagaagaaauagaugggguaaagcuggaaucaacaaggauuuaccagauuuuggcgaucuauucaacugucgccaguucauugguacugguagucucccugggggcaaucaguuucuggaugugcucuaaugggucucuacaguguagaauauguauuuaa

SEQ ID NO: 36263 - RNA, 1701 nt, Artificial Sequence
  derived and/or modified CDS sequence (wt) from hemagglutinin__InfluenzaA__ADD64212
augaaggcaauacuaguaguucugcuauauacauuugcaaccgcaaaugcagacacauuauguauagguuaucaugcaaacaauucaacagacacuguagacacaguacuagaaaagaauguaacaguaacacacucuguuaaccuucuagaagacaagcauaacgggaaacuaugcaaacuaagagggguagccccauugcauuuggguaaauguaacauugcuggcuggauccugggaaauccagagugugaaucacucuccacagcaagcucaugguccuacauuguggaaacaucuaguucagacaauggaacguguuacccaggagauuucaucgauuaugaggagcuaagagagcaauugagcucagugucaucauuugaaagguuugagauauuccccaagacaaguucauggcccaaucaugacucgaacaaagguguaacggcagcauguccucaugcuggagcaaaaagcuucuacaaaaauuuaauauggcuaguuaaaaaaggaaauucauacccaaagcucagcaaauccuacauuaaugauaaagggaaagaaguccucgugcuauggggcauucaccauccaucuacuagugcugaccaacaaagucucuaucagaaugcagaugcauauguuuuuguggggacaucaagauacagcaagaaguucaagccggaaauagcaauaagacccaaagugagggaucaagaagggagaaugaacuauuacuggacacuaguagagccgggagacaaaauaacauucgaagcaacuggaaaucuagugguaccgagauaugcauucgcaauggaaagaaaugcuggaucugguauuaucauuucagauacaccaguccacgauugcaauacaacuugucagacacccaagggugcuauaaacaccagccucccauuucagaauauacauccgaucacaauuggaaaauguccaaaauauguaaaaagcacaaaauugagacuggccacaggauugaggaaugucccgucuauucaaucuagaggccuauuuggggccauugccgguuucauugaagggggguggacagggaugguagauggaugguacgguuaucaccaucaaaaugagcaggggucaggauaugcagccgaccugaagagcacacagaaugccauugacgagauuacuaacaaaguaaauucuguuauugaaaagaugaauacacaguucacagcaguagguaaagaguucaaccaucuggaaaaaagaauagagaauuuaaauaaaaaaguugaugaugguuuccuggacauuuggacuuacaaugccgaacuguugguucuauuggaaaaugaaagaacuuuggacuaccacgauucaaaugugaagaacuuauaugaaaagguaagaagccaguuaaaaaacaaugccaaggaaauuggaaacggcugcuuugaauuuuaccacaaaugcgauaacacgugcauggaaagugucaaaaaugggacuuaugacuacccaaaauacucagaggaagcaaaauuaaacagagaagaaauagaugggguaaagcuggaaucaacaaggauuuaccagauuuuggcgaucuauucaacugucgccaguucauugguacugguagucucccugggggcaaucaguuucuggaugugcucuaaugggucucuacaguguagaauauguauuuaa

SEQ ID NO: 36264 - RNA, 1701 nt, Artificial Sequence
  derived and/or modified CDS sequence (wt) from hemagglutinin__InfluenzaA__ADD64213
augaaggcaauacuaguaguucugcuauauacauuugcaaccgcaaaugcagacacauuauguauagguuaucaugcgaacaauucaacagacacuguagacacaguacuagaaaagaauguaacaguaacacacucuguuaaccuucuagaagacaagcauaacgggaaacuaugcaaacuaagagggguagccccauugcauuuggguaaauguaacauugcuggcuggauccugggaaauccagagugugaaucacucuccacagcaagcucaugguccuacauuguggaaacaucuaguucagacaauggaacguguuacccaggagauuucaucgauuaugaggagcuaagagagcaauugagcucagugucaucauuugaaagguuugagauauuccccaagacaaguucauggcccaaucaugacccgaacaaagguguaacggcagcauguccucaugcuggagcaaaaagcuucuacaaaaauuuaauauggcuaguuaaaaaaggaaauucauacccaaagcucagcaaauccuacauuaaugauaaagggaaagaaguccucgugcuauggggcauucaccauccaucuacuagugcugaccaacaaagucucuaucagaaugcagaugcauauguuuuuguggggacaucaagauacagcaagaaguucaagccggaaauagcaauaagacccaaagugagggaucaagaagggagaaugaacuauuacuggacacuaguagagccgggagacaaaauaacauucgaagcaacuggaaaucuagugguaccgagauaugcauucgcaauggaaagaaaugcuggaucugguauuaucauuucagauacaccaguccacgauugcaauacaacuugucagacacccaagggugcuauaaacaccagccucccauuucagaauauacauccgaucacaauuggaaaauguccaaaauauguaaaaagcacaaaauugagacuggccacaggauugaggaaugucccgucuauucaaucuagaggccuauuuggggccauugccgguuucauugaagggggguggacagggaugguagauggaugguacgguuaucaccaucaaaaugagcaggggucaggauaugcagccgaccugaagagcacacagaaugccauugacgagauuacuaacaaaguaaauucuguuauugaaaagaugaauacacaguucacagcaguagguaaagaguucaaccaccuggaaaaaagaauagagaauuuaaauaaaaaaguugaugaugguuuccuggacauuuggacuuacaaugccgaacuguugguucuauuggaaaaugaaagaacuuuggacuaccacgauucaaaugugaagaacuuauaugaaaagguaagaagccaguuaaaaaacaaugccaaggaaauuggaaacggcugcuuugaauuuuaccacaaaugcgauaacacgugcauggaaagugucaaaaauggaacuuaugacuacccaaaauacucagaggaagcaaaauuaaacagagaagaaauagaugggguaaagcuggaaucaacaaggauuuaccagauuuuggcgaucuauucaacugucgccaguucauugguacugguagucucccugggggcaaucaguuucuggaugugcucuaaugggucucuacaguguagaauauguauuuaa

SEQ ID NO: 36265 - RNA, 1701 nt, Artificial Sequence
  derived and/or modified CDS sequence (wt) from hemagglutinin__InfluenzaA__ADD64214
augaaggcaauacuaguaguucugcuauauacauuugcaaccgcaaaugcagacacauuauguauagguuaucaugcgaacaauucaacagacacuguagacacaguacuagaaaagaauguaacaguaacacacucuguuaaccuucuagaaaacaagcauaacgggaaacuaugcaaacuaagagggguagccccauugcauuuggguaaauguaacauugcuggcuggauccugggaaauccagagugugaaucauucuccacaucaagcucaugguccuacauuguggaaacaucuaguucagacaauggaacguguuacccaggagauuucaucgauuaugaggagcuaagagagcaauugagcucagugucaucauuugaaagguuugagauauuccccaagacaaguucauggcccaaucaugacucgaacaaagguguaacggcagcauguccucaugcuggagcaaaaagcuucuacaaaaauuuaauauggcuaguuaaaaaaggaaauucauacccaaagcucaacaaauccuacauuaaugauaaagggaaagaaguccucgugcuauggggcauucaccauccaucuacuagugcugaccaacaaagucucuaucagaaugcagaugcauauguuuuuguggggacaucaagauacagcaagaaguucaagccggaaauagcaauaagacccaaagugagggaucaagaagggagaaugaacuauuacuggacacuaguagagccgggagacaaaauaacauucgaagcaacuggaaaucuagugguaccgagauaugcauucgcaauggaaagaaaugcuggaucugguauuaucauuucagauacaccaguccacgauugcaauacaacuugucagacacccaagggugcuauaaacaccagccucccauuucagaauauacauccgaucacaauuggaaaauguccaaaauauguaaaaagcacaaaauugagacuggccacaggauugaggaaugucccgucuauucaaucuagaggccuauuuggggccauugccgguuucauugaagggggguggacagggaugguagauggaugguacgguuaucaccaucaaaaugagcaggggucaggauaugcagccgaccugaagagcacacagaaugccauugacgggauuacuaacaaaguaaauucuguuauugaaaagaugaauacacaguucacagcaguagguaaagaguucaaccaccuggaaaaaagaauagagaauuuaaauaaaaaaguugaugaugguuuccuggacauuuggacuuacaaugccgaacuguugguucuauuggaaaaugaaagaacuuuggacuaccacgauucaaaugugaagaacuuauaugaaaagguaagaagccaguuaaaaaacaaugccaaggaaauuggaaacggcugcuuugaauuuuaccacaaaugcgauaacacgugcauggaaagugucaaaaaugggacuuaugacuacccaaaauacucagaggaagcaaaauuaaacagagaagaaauagaugggguaaagcuggaaucaacaaggauuuaccagauuuuggcgaucuauucaacugucgccaguucauugguacugguagucucccugggggcaaucaguuucuggaugugcucuaaugggucucuacaguguagaauauguauuuaa

SEQ ID NO: 36266 - RNA, 1701 nt, Artificial Sequence
  derived and/or modified CDS sequence (wt) from hemagglutinin__InfluenzaA__ADD64215
augaaggcaauacuaguaguucugcuauauacauuugcaaccgcaaaugcagacacauuauguauagguuaucaugcgaacaauucaacagacacuguagacacaguacuagaaaagaauguaacaguaacacacucuguuaaccuucuagaagacaagcauaacgggaaacuaugcaaacuaagagggguagccccauugcauuuggguaaauguaacauugcuggcuggauccugggaaauccagagugugaaucacucuccacagcaagcucaugguccuacauuguggaaacaucuaguucagacaauggaacguguuacccaggagauuucauagauuaugaggagcuaagagagcaauugagcucagugucaucauuugaaagguuugagauauuccccaagacaaguucauggcccaaucaugacucgaacaaagguguaacggcagcauguccucaugcuggagcaaaaagcuucuacaaaaauuuaauauggcuaguuaaaaaaggaaauucauacccaaagcucagcaaauccuacauuaaugauaaagggaaagaaguccucgugcuauggggcauucaccauccaucuacuagugcugaccaacaaagucucuaucagaaugcagaugcauauguuuuuguggggacaucaagauacagcaagaaguucaagccggaaauagcaauaagacccaaagugagggaucaagaagggagaaugaacuauuacuggacacuaguagagccgggagacaaaauaacauucgaagcaacuggaaaucuagugguaccgagauaugcauucgcaauggaaagaaaugcuggaucugguauuaucauuucagauacaccaguccacgauugcaauacaacuugucagacacccaagggugcuauaaacaccagccucccauuucagaauauacauccgaucacaauuggaaaauguccaaaauauguaaaaagcacaaaauugagacuggccacaggauugaggaaugucccgucuauucaaucuagaggccuauuuggggccauugccgguuucauugaagggggguggacagggaugguagauggaugguacgguuaucaccaucaaaaugagcaggggucaggauaugcagccgaccugaagagcacacagaaugccauugacgagauuacuaacaaaguaaauucuguuauugaaaagaugaauacacaguucacagcaguagguaaagaguucaaccaccuggaaaaaagaauagagaauuuaaauaaaaagguugaugaugguuuccuggacauuuggacuuacaaugccgaacuguugguucuauuggaaaaugaaagaacuuuggacuaccacgauucaaaugugaagaacuuauaugaaaagguaagaagccaguuaaaaaacaaugccaaggaaauuggaaacggcugcuuugaauuuuaccacaaaugcgauaacacgugcauggaaagugucaaaaaugggacuuaugacuacccaaaauacucagaggaagcaaaauuaaacagagaagaaauagaugggguaaagcuggaaucaacaaggauuuaccagauuuuggcgaucuauucaacugucgccaguucauugguacugguagucucccugggggcaaucaguuucuggaugugcucuaaugggucucuacaguguagaauauguauuuaa

SEQ ID NO: 36267 - RNA, 1701 nt, Artificial Sequence; identical to SEQ ID NO: 35479
  derived and/or modified CDS sequence (wt) from hemagglutinin__InfluenzaA__ADD64216

SEQ ID NO: 36268 - RNA, 1701 nt, Artificial Sequence
  derived and/or modified CDS sequence (wt) from hemagglutinin__InfluenzaA__ADD64217
augaaggcaauacuaguaguucugcuauauacauuugcaaccgcaaaugcagacacauuauguauagguuaucaugcgaacaauucaacagacacuguagacacaguacuagaaaagaauguaacaguaacacacucuguuaaccuucuagaagacaagcauaacgggaaacuaugcaaacuaagagggguagccccauugcauuuggguaaauguaacauugcuggcuggauccugggaaauccagagugugaaucacucuccacagcaagcucaugguccuacauuguggaaacaucuaguucagacaauggaacguguuacccaggagauuucaucgauuaugaggagcuaagagagcaauugagcucagugucaucauuugaaagguuugagauauuccccaagacaaguucauggcccaaucaugacccgaacaaagguguaacggcagcauguccucaugcuggagcaaaaagcuucuacaaaaauuuaauauggcuaguuaaaaaaggaaauucauacccaaagcucagcaaauccuacauuaaugauaaagggaaagaaguccucgugcuauggggcauucaccauccaucuacuagugcugaccaacaaagucucuaucagaaugcagaugcauauguuuuuguggggacaucaagauacagcaagaaguucaagccggaaauagcaauaagacccaaagugagggaucaagaagggagaaugaacuauuacuggacacuaguagagccgggagacaaaauaacauucgaagcaacuggaaaucuagugguaccgagauaugcauucgcaauggaaagaaaugcuggaucugguauuaucauuucagauacaccaguccacgauugcaauacaacuugucagacacccaagggugcuauaaacaccagccucccauuucagaauauacauccgaucacaauuggaaaauguccaaaauauguaaaaagcacaaaauugagacuggccacaggauugaggaaugucccgucuauucaaucuagaggccuauuuggggccauugcugguuucauugaagggggguggacagggaugguagauggaugguacgguuaucaccaucaaaaugagcaggggucaggauaugcagccgaccugaagagcacacagaaugccauugacgagauuacuaacaaaguaaauucuguuauugaaaagaugaauacacaguucacagcaguagguaaagaguucaaccaccuggaaaaaagaauagagaauuuaaauaaaaaaguugaugaugguuuccuggacauuuggacuuacaaugccgaacuguugguucuauuggaaaaugaaagaacuuuggacuaccacgauucaaaugugaagaacuuauaugaaaagguaagaagccaguuaaaaaacaaugccaaggaaauuggaaacggcugcuuugaauuuuaccacaaaugcgauaacacgugcauggaaagugucaaaaaugggacuuaugacuacccaaaauacucagaggaagcaaaauuaaacagagaagaaauagaugggguaaagcuggaaucaacaaggauuuaccagauuuuggcgaucuauucaacugucgccaguucauugguacugguagucucccugggggcaaucaguuucuggaugugcucuaaugggucucuacaguguagaauauguauuuaa

SEQ ID NO: 36269 - RNA, 1701 nt, Artificial Sequence
  derived and/or modified CDS sequence (wt) from hemagglutinin__InfluenzaA__ADD74350
augaaggcaauacuaguaguucugcuauauacauuugcaaccgcaaaugcagacacauuauguauagguuaucaugcgaacaauucaacagacacuguagacacaguacuagaaaagaauguaacaguaacacacucuguuaacauucuagaagacaagcauaacgggaaacuaugcaaacuaagagggguagccccauugcauuuggguaaauguaacauugcuggcuggauccugggaaauccagagugugaaucacucuccacagcaagcucaugguccuacauuguggaaacaucuaguucagacaauggaacguguuacccaggagauuucaucgauuaugaggagcuaagagagcaauugagcucagugucaucauuugaaagguuugagauauuccccaagacaaguucauggcccaaucaugacucgaacaaagguguaacggcagcauguucucaugcuggagcaaaaagcuucuacaaaaauuuaauauggcuaguuaaaaaaggaaauucauacccaaagcucagcaaauccuacauuaaugauaaagggaaagaaguccucgugcuauggggcauucaccauccaucuacuagugcugaccaacaaagucucuaucagaaugcagaugcauauguuuuuguggggucaucaagauacagcaagaaguucaagccggaaauagcaauaagacccaaagugagggaucaagaagggagaaugaacuauuacuggacacuaguagagccgggagacaaaauaacauucgaagcaacuggaaaucuagugguaccgagauaugcauucgcaauggaaagaaaugcuggaucugguauuaucauuucagauacaccaguccacgauugcaauacaacuugucagacacccaagggugcuauaaacaccagccucccauuucagaauauacauccgaucacaauuggaaaauguccaaaauauguaaaaagcacaaaauugagacuggccacaggauugaggaaugucccgucuauucaaucuagaggccuauuuggggccauugccgguuucauugaagggggguggacagggaugguagauggaugguacgguuaucaccaucaaaaugagcaggggucaggauaugcagccgaccugaagagcacacagaaugccauugacgagauuacuaacaaaguaaauucuguuauugaaaagaugaauacacaguucacagcaguagguaaagaguucaaccaccuggaaaaaagaauagagaauuuaaauaaaaaaguugaugaugguuuccuggacauuuggacuuacaaugccgaacuguugguucuauuggaaaaugaaagaacuuuggacuaccacgauucaaaugugaagaacuuauaugaaaagguaagaagccagcuaaaaaacaaugccaaggaaauuggaaacggcugcuuugaauuuuaccacaaaugcgauaacacgugcauggaaagugucaaaaaugggacuuaugacuacccaaaauacucagaggaagcaaaauuaaacagagaagaaauagaugggguaaagcuggaaucaacaaggauuuaccagauuuuggcgaucuauucaacugucgccaguucauugguacugguagucucccugggggcaaucaguuucuggaugugcucuaaugggucucuacaguguagaauauguauuuaa

SEQ ID NO: 36270 - RNA, 1701 nt, Artificial Sequence
  derived and/or modified CDS sequence (wt) from hemagglutinin__InfluenzaA__ADD74360
augaaggcaauacuaguaguucugcuauauacauuugcaaccgcaaaugcagacacauuauguauagguuaucaugcgaacaauucaacagacacuguagacacaguacuagaaaagaauguaacaguaacacacucuguuaaccuucuagaagacaagcauaacgggaaacuaugcaaacuaagagggguagccccauugcauuuggguaaauguaacauugcuggcuggauccugggaaauccagagugugaaucacucuccacagcaagcucaugguccuacauuguggaaacaucuaguucagacaauggaacguguuacccaggagauuucaucgauuaugaggagcuaagagagcaauugagcucagugucaucauuugaaagguuugagauauuccccaagacaaguucauggcccaaucaugacucgaacaaagguguaacggcagcauguccucaugcuggagcaaaaagcuucuacaaaaauuuaauauggcuaguuaaaaaaggaaauucauacccaaagcucagcaaauccuacauuaaugauaaaaggaaagaaguccucgugcuauggggcauucaccauccaucuacuagugcugaccaacaaagucucuaucagaaugcagaugcauauguuuuuguggggacaucaagauacagcaagaaguucaagccggaaauagcaauaagacccaaagugagggaucaagaagggagaaugaacuauuacuggacacuaguagagccgggagacaaaauaacauucgaagcaacuggaaaucuagugguaccgagauaugcauucgcaauggaaagaaaugcuggaucugguauuaucauuucagauacaccaguccacgauugcaauacaacuugucagacacccaagggugcuauaaacaccagccucccauuucagaauauacauccgaucacaauuggaaaauguccaaaauauguaaaaagcacaaaauugagacuggccacaggauugaggaaugucccgucuauucaaucuagaggccuauuuggggccauugccgguuucauugaagggggguggacagggaugguagauggaugguacgguuaucaccaucaaaaugagcaggggucaggauaugcagccgaccugaagagcacacagaaugccauugacgagauuacuaacaaaguaaauucuguuauugaaaagaugaauacacaguucacagcaguagguaaagaguucaaccaccuggaaaaaagaauagagaauuuaaauaaaaaaguugaugaugguuuccuggacauuuggacuuacaaugccgaacuguugguucuauuggaaaaugaaagaacuuuggacuaccacgauucaaaugugaagaacuuauaugaaaagguaagaagccaguuaaaaaacaaugccaaggaaauuggaaacggcugcuuugaauuuuaccacaaaugcgauaacacgugcauggaaagugucaaaaaugggacuuaugacuacccaaaauacucagaggaagcaaaauuaaacagagaagaaauagaugggguaaagcuggaaucaacaaggauuuaccagauuuuggcgaucuauucaacugucgccaguucauugguacugguagucucccugggggcaaucaguuucuggaugugcucuaaugggucucuacaguguagaauauguauuuaa

SEQ ID NO: 36271 - RNA, 1701 nt, Artificial Sequence; identical to SEQ ID NO: 34681
  derived and/or modified CDS sequence (wt) from hemagglutinin__InfluenzaA__ADD74370

SEQ ID NO: 36272 - RNA, 1701 nt, Artificial Sequence; identical to SEQ ID NO: 35833
  derived and/or modified CDS sequence (wt) from hemagglutinin__InfluenzaA__ADD74398

SEQ ID NO: 36273 - RNA, 1701 nt, Artificial Sequence
  derived and/or modified CDS sequence (wt) from hemagglutinin__InfluenzaA__ADD74428
augaaggcaauacuaguaguucugcuauauacauuugcaaccgcaaaugcagacacauuauguauagguuaucaugcgaacaauucaacagacacuguagacacaguacuagaaaagaauguaacaguaacacacucuguuaaccuucuagaagacaagcauaacgggaaacuaugcaaacuaagagggguagccccauugcauuuggguaaauguaacauugcuggcuggauccugggaaauccagagugugaaucacucuccacagcaagcucaugguccuacauuguggaaacaucuaguucagacaauggaacguguuacccaggagauuucaucaauuaugaggagcuaagagagcaauugagcucagugucaucauuugaaagguuugagauauuccccaagacaaguucauggcccaaucaugacucgaacaaagguguaacggcagcauguccucaugcuggagcaaaaagcuucuacaaaaauuuaauauggcuaguuaaaaaaggaaauucauacccaaagcucagcaaauccuacauuaaugauaaagggaaagaaguccucgugcuauggggcauucaccauccaucuacuagugcugaccaacaaagucucuaucagaaugcagaugcauauguuuuuguggggacaucaagauacagcaagaaguucaagccggaaauagcaauaagacccaaagugagggaucaagaagggagaaugaacuauuacuggacacuaguaaagccgggagacaaaauaacauucgaagcaacuggaaaucuagugguaccgagauaugcauucgcaauggaaagaaaugcuggaucugguauuaucaucucagauacaccaguccacgauugcaauacaacuugucagacacccaagggugcuauaaacaccagccucccauuucagaauauacauccgaucacaauuggaaaauguccaaaauauguaaaaagcacaaaauugagacuggccacaggauugaggaaugucccgucuauucaaucuagaggccuauuuggggccauugccgguuucauugaagggggguggacagggaugguagauggaugguacgguuaucaccaucaaaaugagcaggggucaggauaugcagccgaccugaagagcacacagaaugccauugacaagauuacuaacaaaguaaauucuguuauugaaaagaugaauacacaguucacagcaguagguaaagaguucaaccaccuggaaaaaagaauagagaauuuaaauaaaaaaguugaugaugguuuccuggacauuuggacuuacaaugccgaacuguugguucuauuggaaaaugaaagaacuuuggacuaccacgauucaaaugugaagaacuuauaugaaaagguaagaagccaguuaaaaaacaaugccaaggaaauuggaaacggcugcuuugaauuuuaccacaaaugcgauaacacgugcauggaaagugucaaaaaugggacuuaugacuacccaaaauacucagaggaagcaaaauuaaacagagaagaaauagaugggguaaagcuggaaucaacaaggauuuaccagauuuuggcgaucuauucaacugucgccaguucauugguacugguagucucccugggggcaaucaguuucuggaugugcucuaaugggucucuacaguguagaauauguauuuaa

SEQ ID NO: 36274 - RNA, 1701 nt, Artificial Sequence
  derived and/or modified CDS sequence (wt) from hemagglutinin__InfluenzaA__ADD74438
augaaggcaauacuaguaguucugcuauauacauuugcaaccgcaaaugcagacacauuauguauagguuaucaugcgaacaauucaacagacacuguagacacaguacuagaaaagaauguaacaguaacacacucuguuaaccuucuagaagacaagcauaacgggaaacuaugcaaacuaagagggguagccccauugcauuuggguaaauguaacauugcuggcuggauccugggaaauccagagugugaaucacucuccacagcaagcucaugguccuacauuguggaaacaucuaguucagacaauggaacguguuacccaggagauuucaucgauuaugaggagcuaagagagcaauugagcucagugucaucauuugaaagguuugagauauuccccaagacaaguucauggcccaaucaugacucgaacaaagguguaacagcagcauguccucaugcuggagcaaaaagcuucuacaaaaauuuaauauggcuaguuaaaaaaggaaauucauacccaaagcucagcaaauccuacauuaaugauaaagggaaagaaguccucgugcuauggggcauucaccauccaucuacuagugcugaccaacaaagucucuaucagaaugcagaugcauauguuuuuguggggacaucaagauacagcaagaaguucaagccggaaauagcaauaagacccaaagugagggaucaagaagggagaaugaacuauuacuggacacuaguagagccgggagacaaaauaacauucgaagcaacuggaaaucuagugguaccgagauaugcauucgcaauggaaagaaaugcuggaucugguauuaucauuucagauacaccaguccacgauugcaauacaacuugucagacacccaagggugcuauaaacaccagccucccauuucagaauauacauccgaucacaauuggaaaauguccaaaauauguaaaaagcacaaaauugagacuggccacaggauugaggaaugucccgucuauucaaucuagaggccuauuuggggccauugccgguuucauugaagggggguggacagggaugguagauggaugguacgguuaucaccaucaaaaugagcaggggucaggauaugcagccgaccugaagagcacacagaaugccauugacgagauuacuaacaaaguaaauucuguuauugaaaagaugaauacacaguucacagcaguagguaaagaguucaaccaccuggaaaaaagaauagagaauuuaaauaaaaaaguugaugaugguuuccuggacauuuggacuuacaaugccgaacuguugguucuauuggaaaaugaaagaacuuuggacuaccacgauucaaaugugaagaacuuauaugaaaagguaagaagccaguuaaaaaacaaugccaaggaaauuggaaacggcugcuuugaauuuuaccacaaaugcgauaacacgugcauggaaagugucaaaaaugggacuuaugacuacccaaaauacucagaggaagcaaaauuaaacagagaagaaauagaugggguaaagcuggaaccaacaaggauuuaccagauuuuggcgaucuauucaacugucgccaguucauugguacugguagucucccugggggcaaucaguuucuggaugugcucuaaugggucucuacaguguagaauauguauuuaa

SEQ ID NO: 36275 - RNA, 1701 nt, Artificial Sequence; identical to SEQ ID NO: 35833
  derived and/or modified CDS sequence (wt) from hemagglutinin__InfluenzaA__ADD74448

SEQ ID NO: 36276 - RNA, 1701 nt, Artificial Sequence
  derived and/or modified CDS sequence (wt) from hemagglutinin__InfluenzaA__ADD74458
augaaggcaauacuaguaguucugcuauauacauuugcaaccgcaaaugcagacacauuauguauagguuaucaugcgaacaauucaacagacacuguagacacaguacuagaaaagaauguaacaguaacacacucuguuaaccuucuagaagacaagcauaacgggaaacuaugcaaacuaagagggguagccccauugcauuuggguaaauguaacauugcuggcuggauccugggaaauccagagugugaaucacucuccacagcaagcucaugguccuacauuguggaaacaucuaguucagacaauggaacguguuacccaggagauuucaucgauuaugaggagcuaagagagcaauugagcucagugucaucauuugaaagguuugagauauuccccaagacaaguucauggcccaaucaugacucgaacaaagguguaacggcagcauguccucaugcuggagcaaaaagcuucuacaaaaauuuaauauggcuaguuaaaaaaggaaauucauacccaaagcucagcaaauccuacauuaaugauaaagggaaagaaguccucgugcuauggggcauucaccauccaucuacuagugcugaccaacaaagucucuaucagaaugcagaugcauauguuuuuguggggacaucaagauacagcaagaaguucaagccggaaauagcaauaagacccaaagugagggaucaagaagggagaaugaacuauuacuggacacuaguagagccgggagacaaaauaacauucgaagcaacuggaaaucuagugguaccgagauaugcauucgcaauggaaagaaaugcuggaucugguauuaucauuucagauacaccaguccacgauugcaauacaacuugucagacacccaagggugcuauaaacaccagccucccauuucagaauauacauccgaucacaauuggaaaauguccaaaauauguaaaaagcacaaaauugagacuggccacaggauugaggaaugucccgucuauucaaucuagaggccuauuuggggccauugccgguuucauugaagggggguggacagggaugguagauggaugguacgguuaucaccaucaaaaugagcaggggucaggauaugcagccgaucugaagagcacacagaaugccauugacgagauuacuaacaaaguaaauucuguuauugaaaagaugaauacacaguucacagcaguagguaaagaguucaaccaccuggaaaaaagaauagagaauuuaaauaaaaaaguugaugaugguuuccuggacauuuggacuuacaaugccgaacuguugguucuauuggaaaaugaaagaacuuuggacuaccacgauucaaaugugaagaacuuauaugaaaagguaagaagccaguuaaaaaacaaugccaaggaaauuggaaacggcugcuuugaauuuuaccacaaaugcgauaacacgugcauggaaagugucaaaaaugggacuuaugacuacccaaaauacucagaggaagcaaaauuaaacagagaagaaauagaugggguaaagcuggaaucaacaaggauuuaccagauuuuggcgaucuauucaacugucgccaguucauugguacugguagucucccugggggcaaucaguuucuggaugugcucuaaugggucucuacaguguagaauauguauuuaa

SEQ ID NO: 36277 - RNA, 1701 nt, Artificial Sequence
  derived and/or modified CDS sequence (wt) from hemagglutinin__InfluenzaA__ADD74468
augaaggcaauacuaguaguucugcuauauacauuugcaaccgcaaaugcagacacauuauguauagguuaucaugcgaacaauucaacagacacuguagacacaguacuagaaaagaauguaacaguaacacacucuguugaccuucuagaagacaagcauaacgggaaacuaugcaaacuaagagggguagccccauugcauuuggguaaauguaacauugcuggcuggauccugggaaauccagagugugaaucacucuccacagcaagcucaugguccuacauuguggaaacaucuaguucagacaauggaacguguuacccaggagauuucaucgauuaugaggagcuaagagagcaauugagcucagugucaucauuugaaagguuugagauauuccccaagacaaguucauggcccaaucaugacucgaacaaagguguaacggcagcauguccucaugcuggagcaaaaagcuucuacaaaaauuuaauauggcuaguuaaaaaaggaaauucauacccaaagcucagcaaauccuacauuaaugauaaagggaaagaaguccucgugcuauggggcauucaccauccaucuacuagugcugaccaacaaagucucuaucagaaugcagaugcauauguuuuuguggggacaucaagauacagcaagaaguucaagccggaaauaacaauaagacccaaagugagggaucaagaagggagaaugaacuauuacuggacauuaguagagccgggagacaaaauaacauucgaagcaacuggaaaucuagugguaccgagauaugcauucgcaauggaaagaaaugcuggaucugguauuaucauuucagauacaccaguccacgauugcaauacaacuugucagacacccaagggugcuauaaacaccagccucccauuucagaauauacauccgaucacaauuggaaaauguccaaaauauguaaaaagcacaaaauugagacuggccacaggauugaggaaugucccgucuauucaaucuagaggccuauuuggggccauugccggcuucauugaagggggguggacagggaugguagauggaugguacgguuaucaccaucaaaaugagcaggggucaggauaugcagccgaccugaagagcacacagaaugccauugacgagauuacuaacaaaguaaauucuguuauugaaaagaugaauacacaguucacagcaguagguaaagaguucaaccaccuggaaaaaagaauagagaauuuaaauaaaaaaguugaugaugguuuccuggacauuuggacuuacaaugccgaacuguugguucuauuggaaaaugaaagaacuuuggacuaccacgauucaaaugugaagaacuuauaugaaaagguaagaagccaguuaaaaaacaaugccaaggaaauuggaaacggcugcuuugaauuuuaccacaaaugcgauaacacgugcauggaaagugucaaaaaugggacuuaugacuacccaaaauacucagaggaagcaaaauuaaacagagaagaaauagaugggguaaagcuggaaucaacaaggauuuaccagauuuuggcgaucuauucaacugucgccaguucauugguacugguagucucccugggggcaaucaguuucuggaugugcucuaaugggucucuacaguguagaauauguauuuaa

SEQ ID NO: 36278 - RNA, 1701 nt, Artificial Sequence
  derived and/or modified CDS sequence (wt) from hemagglutinin__InfluenzaA__ADD74488
augaaggcaauacuaguaguucugcuauauacauuugcaaccgcaaaugcagacacauuauguauagguuaucaugcgaacaauucaacagacacuguagacacaguacuagaaaagaauguaacaguaacacacucuguuaacauucuagaagacaagcauaacgggaaacuaugcaaacuaagagggguagccccauugcauuuggguaaauguaacauugcuggcuggauccugggaaauccagagugugaaucacucuccacagcaagcucaugguccuacauuguggaaacaucuaguucagacaauggaacguguuacccaggagauuucaucgauuaugaggagcuaagagagcaauugagcucagugucaucauuugaaagguuugagauauuccccaagacaaguucauggcccaaucaugacucgaacaaagguguaacggcagcauguccucaugcuggagcaaaaagcuucuacaaaaauuuaauauggcuaguuaaaaaaggaaacucauacccaaagcucagcaaauccuacauuaaugauaaagggaaagaaguccucgugcuauggggcauucaccauccaucuacuagugcugaccaacaaagucucuaucagaaugcagaugcauauguuuuuguggggacaucaagauacagcaagaaguucaagccggaaauagcaauaagacccaaagugagggaucaagaagggagaaugaacuauuacuggacacuaguagagccgggagacaaaauaacauucgaagcaacuggaaaucuagugguaccgagauaugcauucgcaauggaaagaaaugcuggaucugguauuaucauuucagauacaccaguccacgauugcaauacaacuugucagacacccaagggugcuauaaacaccagccucccauuucagaauauacauccgaucacaauuggaaaauguccaaaauauguaaaaagcacaaaauugagacuggccacaggauugaggaaugucccgucuauucaaucuagaggccuauuuggggccauugccgguuucauugaagggggguggacagggaugguagauggaugguacgguuaucaccaucaaaaugagcaggggucaggauaugcagccgaccugaagagcacacagaaugccauugacgagauuacuaacaaaguaaauucuguuauugaaaagaugaauacacaguucacagcaguagguaaagaguucaaccaccuggaaaaaagaauagagaauuuaaauaaaaagguugaugaugguuuccuggacauuuggacuuacaaugccgaacuguugguucuauuggaaaaugaaagaacuuuggacuaccaugauucaaaugugaagaacuuauaugaaaagguaagaagccaguuaaaaaacaaugccaaggaaauuggaaacggcugcuuugaauuuuaccacaaaugcgauaacacgugcauggaaagugucaaaaaugggacuuaugacuacccaaaauacucagaggaagcaaaauuaaacagagaagaaauagaugggguaaagcuggaaucaacaaggauuuaccagauuuuggcgaucuauucaacugucgccaguucauugguacugguagucucccugggggcaaucaguuucuggaugugcucuaaugggucucuacaguguagaauauguauuuaa

SEQ ID NO: 36279 - RNA, 1701 nt, Artificial Sequence; identical to SEQ ID NO: 35833
  derived and/or modified CDS sequence (wt) from hemagglutinin__InfluenzaA__ADD74498

SEQ ID NO: 36280 - RNA, 1701 nt, Artificial Sequence
  derived and/or modified CDS sequence (wt) from hemagglutinin__InfluenzaA__ADD74508
augaaggcaauacuaguaguucugcuauauacauuugcaaccgcaaaugcagacacauuauguauagguuaucaugcgaacaauucaacagacacuguagacacaguacuagaaaagaauguaacaguaacacacucuguugaccuucuagaagacaagcauaacgggaaacuaugcaaacuaagagggguagccccauugcauuuggguaaauguaacauugcuggcuggauccugggaaauccagagugugaaucacucuccacagcaagcucaugguccuacauuguggaaacaucuaguucagacaauggaacguguuacccaggagauuucaucgauuaugaggagcuaagagagcaauugagcucagugucaucauuugaaagguuugagauauuccccaagacaaguucauggcccaaucaugacucgaacaaagguguaacggcagcauguccucaugcugaagcaaaaagcuucuacaaaaauuuaauauggcuaguuaaaaaaggaaauucauacccaaagcucagcaaauccuacauuaaugauaaagggaaagaaguccucgugcuauggggcauucaccauccaucuacuagugcugaccaacaaagucucuaucagaaugcagaugcauauguuuuuguggggacaucaagauacagcaagaaguucaagccggaaauagcaauaagacccaaagugagggaucaagaagggagaaugaacuauuacuggacacuaguagagccgggagacaaaauaacauucgaagcaacuggaaaucuagugguaccgagauaugcauucgcaauggaaagaaaugcuggaucugguauuaucauuucagauacaccaguccacgauugcaauacaacuugucagacacccaagggugcuauaaacaccagccucccauuucagaauauacauccgaucacaauuggaaaauguccaaaauauguaaaaagcacaaaauugagacuggccacaggauugaggaaugucccgucuauucaaucuagaggccuauuuggggccauugccggcuucauugaagggggguggacagggaugguagauggaugguacgguuaucaccaucaaaaugagcaggggucaggauaugcagccgaccugaagagcacacagaaugccauugacgagauuacuaacaaaguaaauucuguuauugaaaagaugaauacucaguucacagcaguagguaaagaguucaaccaccuggaaaaaagaauagagaauuuaaauaaaaaaguugaugaugguuuccuggacauuuggacuuacaaugccgaacuguugguucuauuggaaaaugaaagaacuuuggacuaccacgauucaaaugugaagaacuuauaugaaaagguaagaagccaguuaaaaaacaaugccaaggaaauuggaaacggcugcuuugaauuuuaccacaaaugcgauaacacgugcauggaaagugucaaaaaugggacuuaugacuacccaaaauacucagaggaagcaaaauuaaacagagaagaaauagaugggguaaagcuggaaucaacaaggauuuaccagauuuuggcgaucuauucaacugucgccaguucauugguacugguagucucccugggggcaaucaguuucuggaugugcucuaaugggucucuacaguguagaauauguauuuaa

SEQ ID NO: 36281 - RNA, 1701 nt, Artificial Sequence
  derived and/or modified CDS sequence (wt) from hemagglutinin__InfluenzaA__ADD74518
augaaggcaauacuaguaguucugcuauauacauuugcaaccgcaaaugcagacacauuauguauagguuaucaugcgaacaauucaacagacacuguagacacaauacuagaaaagaauguaacaguaacacacucuguuaaccuucuagaagacaagcauaacgggaaacuaugcaaacuaagagggguagccccauugcauuuggguaaauguaacauugcuggcuggauccugggaaauccagagugugaaucacucuccacagcaagcucaugguccuacauuguggaaacaucuaguucagacaauggaacguguuacccaggagauuucaucgauuaugaggagcuaagagagcaauugagcucagugucaucauuugaaagguuugagauauuccccaagacaaguucauggcccaaucaugacucgaacaaagguguaacggcagcauguccucaugcuggagcaaaaagcuucuacaaaaauuuaauauggcuaguuaaaaagggaaauucauacccaaagcucagcaaauccuacauuaaugauaaagggaaagaaauccucgugcuauggggcauucaccauccaucuacuagugcugaccaacaaagucucuaucagaaugcagaugcauauguuuuuguggggacaucaagauacagcaagaaguucaagccggaaauagcaauaagacccaaagugagggaucaagaagggagaaugaacuauuacuggacacuaguagagccgggagacaaaauaacauucgaagcaacuggaaaucuagugguaccgagauaugcauucgcaauggaaagaaauacuggaucugguauuaucauuucagauacaccaguccacgauugcaauacaacuugucagacacccaagggugcuauaaacaccagccucccauuucagaauauacauccgaucacaauuggaaaauguccaaaauauguaaaaagcacaaaauugagacuggccacaggauugaggaaugucccgucuauucaaucuagaggccuauuuggggccauugccgguuucauugaagggggguggacagggaugguagauggaugguacgguuaucaccaucaaaaugagcaggggucaggauaugcagccgaccugaagagcacacagaaugccauugacgagauuacuaacaaaguaaauucuguuauugaaaagaugaauacacaguucacagcaguagguaaagaguucaaccaccuggaaaaaagaauagagaauuuaaauaaaaagguugaugaugguuuccuggacauuuggacuuacaaugccgaacuguugguucuauuggaaaaugaaagaacuuuggacuaccacgauucaaaugugaagaacuuauaugaaaagguaagaagccaguuaaaaaacaaugccaaggaaauuggaaacggcugcuuugaauuuuaccacaaaugcgauaacacgugcauggaaagugucaaaaaugggacuuaugacuacccaaaauacucagaggaagcaaaauuaaacagagaagaaauagaugggguaaagcuggaaucaacaaggauuuaccagauuuuggcgaucuauucaacugucgccaguucauugguacugguagucucccugggggcaaucaguuucuggaugugcucuaaugggucucuacaguguagaauauguauuuaa

SEQ ID NO: 36282 - RNA, 1701 nt, Artificial Sequence
  derived and/or modified CDS sequence (wt) from hemagglutinin__InfluenzaA__ADD74528
augaaggcaauacuaguaguucugcuauauacauuugcaaccgcaaaugcagacacauuauguauagguuaucaugcgaacaauucaacagacacuguagacacaguacuagaaaagaauguaacaguaacacacucuguuaaccuucuagaagacaagcauaacgggaaacuaugcaaacuaagagggguagccccauugcauuuggguaaauguaacauugcuggcuggauccugggaaauccagagugugaaucacucuccacagcaagcucaugguccuacauuguggaaacaucuaguucagacaauggaacguguuacccaggugauuucaucaauuaugaggagcuaagagagcaauugagcucagugucaucauuugaaagguuugagauauuccccaagacaaguucauggcccaaucaugacucgaacaaagguguaacggcugcauguccucaugcuggagcaaaaagcuucuacaaaaauuuaauauggcuaguuaaaaaaggaaauucauacccaaagcucagcaaauccuacauuaaugauaaagggaaagaaguccucgugcuauggggcauucaccauccaucuacuagugcugaccaacaaagucucuaucagaaugcagaugcauauguuuuuguggggacaucaagauacagcaagaaguuccagccggaaauagcaauaagacccaaagugagggaucaagaagggagaaugaacuauuacuggacacuaguagagccgggagacaaaauaacauucgaagcaacuggaaaucuagugguaccgagauaugcauucgcaauggaaagaaaugcuggaucugguauuaucaucucagauacaccaguccacgauugcaauacaacuugucagacacccaagggugcuauaaacaccagccucccauuucagaauauacauccgaucacaauuggaaaauguccaaaauauguaaaaagcacaaaauugagacuggccacaggauugaggaaugucccgucuauucaaucuagaggccuauuuggggccauugccgguuucauugaagggggguggacagggaugguagauggaugguacgguuaucaccaucaaaaugagcaggggucaggauaugcagccgaccugaagagcacacagaaugccauugacaagauuacuaacaaaguaaauucuguuauugaaaagaugaauacacaguucacagcaguagguaaagaguucaaccaccuggaaaaaagaauagagaauuuaaauaaaaaaguugaugaugguuuccuggacauuuggacuuacaaugccgaacuguugguucuauuggaaaaugaaagaacuuuggacuaccacgauucaaaugugaagaacuuauaugaaaagguaagaagccaguuaaaaaacaaugccaaggaaauuggaaacggcugcuuugaauuuuaccacaaaugcgauaacacgugcauggaaagugucaaaaaugggacuuaugacuacccaaaauacucagaggaagcaaaauuaaacagagaagaaauagaugggguaaagcuggaaucaacaaggauuuaccagauuuuggcgaucuauucaacugucgccaguucauugguacugguagucucccugggggcaaucaguuucuggaugugcucuaaugggucucuacaguguagaauauguauuuaa

SEQ ID NO: 36283 - RNA, 1701 nt, Artificial Sequence
  derived and/or modified CDS sequence (wt) from hemagglutinin__InfluenzaA__ADD74538
augaaggcaauacuaguaguucugcuauauacauuugcaaccgcaaaugcagacacauuauguauagguuaucaugcgaacaauucaacagacacuguagacacaguacuagaaaagaauguaacaguaacacacucuguuaaccuucuagaagacaagcauaacgggaaacuaugcagacuaagagggguagccccauugcauuuggguaaauguaacauugcuggcuggauccugggaaauccagagugugaaucacucuccacagcaagcucaugguccuacauuguggaaacaucuaguucagacaauggaacguguuacccaggagauuucaucgauuaugaggagcuaagagagcaauugagcucagugucaucauuugaaagguuugagauauuccccaagacaaguucauggcccaaucaugacucaaacaaagguguaacggcagcauguccucaugcuggagcaaaaagcuucuacaaaaauuuaauauggcuaguuaaaaaaggaaauucauacccaaagcucagcaaauccuacauuaaugauaaagggaaagaaguccucgugcuauggggcauucaccauccaucuacuagugcugaccaacaaagucucuaucagaaugcagaugcauauguuuuuguggggacaucaagauacagcaagaaguucaagccggaaauagcaauaagacccaaagugagggaucaagaagggagaaugaacuauuacuggacacuaguagagccgggagacaaaauaacauucgaagcaacuggaaaucuagugguaccgagauaugcauucgcaauggaaagaaaugcuggaucugguauuaucauuucagauacaccagucuacgauugcaauacaacuugucagacacccaagggugcuauaaacaccagccucccauuucagaauauacauccgaucacaauuggaaaauguccaaaauauguaaaaagcacaaaauugagacuggccacaggauugaggaaugucccgucuauucaaucuagaggccuauuuggggccauugccgguuucauugaagggggguggacagggaugguagauggaugguacgguuaucaccaucaaaaugagcaggggucaggauaugcagccgaccugaagagcacacagaaugccauugacgagauuacuaacaaaguaaauucuguuauugaaaagaugaacacacaguucacagcaguagguaaagaguucaaccaccuggaaaaaagaauagagaauuuaaauaaaaaaguugaugaugguuuccuggacauuuggacuuacaaugccgaacuguugguucuauuggaaaaugaaagaacuuuggacuaccacgauucaaaugugaagaacuuauaugaaaagguaagaagccaguuaaaaaacaaugccaaggaaauuggaaacggcugcuuugaauuuuaccacaaaugcgauaacacgugcauggaaagugucaaaaaugggacuuaugacuacccaaaauacucagaggaagcaaaauuaaacagagaagaaauagaugggguaaagcuggaaucaacaaggauuuaccagauuuuggcgaucuauucaacugucgccaguucauugguacugguagucucccugggggcaaucaguuucuggaugugcucuaaugggucucuacagugcagaauauguauuuaa

SEQ ID NO: 36284 - RNA, 1701 nt, Artificial Sequence; identical to SEQ ID NO: 36278
  derived and/or modified CDS sequence (wt) from hemagglutinin__InfluenzaA__ADD74548

SEQ ID NO: 36285 - RNA, 1701 nt, Artificial Sequence
  derived and/or modified CDS sequence (wt) from hemagglutinin__InfluenzaA__ADD74558
augaaggcaauacuaguaguucugcuauauacauuugcaaccgcaaaugcagacacauuauguauagguuaucaugcgaacaauucaacagacacuguagacacaguacuagaaaagaauguaacaguaacacacucuguuaaccuucuagaagacaagcauaacgggaaacuaugcaaacuaagagggguagccccauugcauuuggguaaauguaacauugcuggcuggauccugggaaauccagagugugaaucacucuccacagcaagcucaugguccuacauuguggaaacaucuaguucagacaauggaacguguuacccaggagauuucaucgauuaugaggaguuaagagagcaauugagcucagugucaucauuugaaagguuugagauauuccccaagacaaguucauggcccaaucaugacucgaacaaagguguaacggcagcauguccucaugcuggagcaaaaagcuucuacaaaaauuuaauauggcuaguuaaaaaaggaaauucauacccaaagcucagcaaauccuacauuaaugauaaagggaaagaaguccucgugcuauggggcauucaccauccaucuacuagugcugaccaacaaagucucuaucagaaugcagaugcauauguuuuuguggggacaucaagauacagcaagaaguucaagccggaaauagcaauaagacccaaagugagggaucaagaagggagaaugaacuauuacuggacacuaguagagccgggagacaaaauaacauucgaagcaacuggaaaucuagugguaccgagauaugcauucgcaauggaaagaaaugcuggaucugguauuaucauuucagauacaccaguccacgauugcaauacaacuugucagacacccaagggugcuauaaacaccagccucccauuucagaauauacauccgaucacaauuggaaaauguccaaaauauguaaaaagcacaaaauugagacuggccacaggauugaggaaugucccgucuauucaaucuagaggccuauuuggggccauugccgguuucauugaagggggguggacagggaugguagauggaugguacgguuaucaccaucaaaaugagcaggggucaggauaugcagccgaccugaagagcacacagaaugccauugacaagauuacuaacaaaguaaauucuguuauugaaaagaugaauacacaguucacagcaguagguaaagaguucaaccaccuggaaaaaagaauagagaauuuaaauaaaaaaguugaugaugguuuccuggacauuuggacuuacaaugccgaacuguugguucuauuggaaaaugaaagaacuuuggacuaccacgauucaaaugugaagaacuuauaugaaaagguaagaagccaguuaaaaaacaaugccaaggaaauuggaaacggcugcuuugaauuuuaccacaaaugcgauaacacgugcauggaaagugucaaaaaugggacuuaugacuacccaaaauacucagaggaagcaaaauuaaacagagaagaaauagaugggguaaagcuggaaucaacaaggauuuaccagauuuuggcgaucuauucaacugucgccaguucauugguacugguagucucccugggggcaaucaguuucuggaugugcucuaaugggucucuacaguguagaauauguauuuaa

SEQ ID NO: 36286 - RNA, 1701 nt, Artificial Sequence
  derived and/or modified CDS sequence (wt) from hemagglutinin__InfluenzaA__ADD74568
augaaggcaauacuaguaguucugcuauauacauuugcaaccgcaaaugcagacacauuauguauagguuaucaugcgaacaauucaacagacacuguagacacaguacuagaaaagaauguaacaguaacacacucuguuaaccuucuagaagacaagcauaacgggaaacuaugcaaacuaagagggguagccccauugcauuuggguaaauguaacauugcuggcuggauccugggaaauccagagugugaaucacucuccacagcaagcucaugguccuacauuguggaaacaucuaguucagacaauggaacguguuacccaggagauuucaucaauuaugaggagcuaagagagcaauugagcucagugucaucauuugaaagguuugagauauuccccaagacaaguucauggcccaaucaugacucgaacaaagguguaacggcagcauguccucaugcuggagcaaaaagcuucuacaaaaauuuaauauggcuaguuaaaaaaggaaauucauacccaaagcucagcaaauccuacauuaaugauaaagggaaagaaguccucgugcuauggggcauucaccauccaucuacuagugcugaccaacaaagucucuaucagaaugcagaugcauauguuuuuguggggacaucaagauacagcaagaaguucaagccggaaauagcaauaagacccaaagugagggaucaagaagggagaaugaacuauuacuggacacuaguagagccgggagacaaaauaacauucgaagcaacuggaaaucuagugguaccgagauaugcauucgcaauggaaagaaaugcuggaucugguauuaucaucucagauacaccaguccacgauugcaauacaacuugucagacacccaagggugcuauaaacaccagccucccauuucagaauauacauccgaucacaauuggaaaauguccaaaauauguaaaaagcacaaaauugagacuggccacaggauugaggaaugucccgucuauucaaucuagaggccuauuuggggccauugccgguuucauugaagggggguggacagggaugguagauggaugguacgguuaucaccaucaaaaugagcaggggucaggauaugcagccgaccugaagagcacacagaaugccauugacaagauuacuaacaaaguaaauucuguuauugaaaagaugaauacacaguucacagcaguagguaaagaguucaaccaccuggaaaaaagaauagagaauuuaaauaaaaaaguugaugaugguuuccuggacauuuggacuuacaaugccgaacuguugguucuauuggaaaaugaaagaacuuuggacuaccacgauucaaaugugaagaacuuauaugaaaagguaagaagccaguuaaaaaacaaugccaaggaaauuggaaacggcugcuuugaauuuuaccacaaaugcgauaacacgugcauggaaagugucaaaaaugggacuuaugacuacccaaaauacucagaggaagcaaaauuaaacagagaagaaauagaugggguaaagcuggaaucaacaaggauuuaccagauuuuggcgaucuauucaacugucgccaguucauugguacugguagucucccugggggcaaucaguuucuggaugugcucuaaugggucucuacaguguagaauauguauuuaa

SEQ ID NO: 36287 - RNA, 1701 nt, Artificial Sequence
  derived and/or modified CDS sequence (wt) from hemagglutinin__InfluenzaA__ADD74578
augaaggcaauacuaguaguucugcuauauacauuugcaaccgcaaaugcagacacauuauguauagguuaucaugcgaacaauucaacagacacuguagacacaguacuagaaaagaauguaacaguaacacacucuguuaaccuucuagaagacaagcauaacgggaaacuaugcaaacuaagagggguagccccauugcauuuggguaaauguaacauugcuggcuggauccugggaaauccagagugugaaucacucuccacaucaagcucaugguccuacauuguggaaacaucuaguucagacaauggaacguguuacccaggagauuucaucgauuaugaggagcuaagagagcaauugagcucagugucaucauuugaaagguuugagauauuccccaagacaaguucauggcccaaucaugacucgaacaaagguguaacggcagcauguccucaugcuggagcaaaaagcuucuacaaaaauuuaauauggcuaguuaaaaaaggaaauucauacccaaagcucagcaaauccuacauuaaugauaaagggaaagaaguccucgugcuauggggcauucaccauccaucuacuaguacugaccaacaaagucucuaucagaaugcagaugcauauguuuuuguggggacaucaagauacagcaagaaguucaagccggaaauagcaauaagacccaaagugagggaucaagaagggagaaugaacuauuacuggacacuaguagagccgggagacaaaauaacauucgaagcaacuggaaaucuagugguaccgagauaugcauucgcaauggaaagaaaugcuggaucugguauuaucauuucagauacaccaguccacgauugcaauacaacuugucagacacccaagggugcuauaaacaccagccucccauuucagaauauacauccgaucacaauuggaaaauguccaaaauauguaaaaagcacaaaauugagacuggccacaggauugaggaaugucccgucuauucaaucuagaggccuauuuggggccauugccgguuucauugaagggggguggacagggaugguagauggaugguacgguuaucaccaucaaaaugagcaggggucaggauaugcagccgaccugaagagcacacagaaugccauugacgagauuacuaacaaaguaaauucuguuauugaaaagaugaauacacaguucacagcaguagguaaagaguucaaccaccuggaaaaaagaauagagaauuuaaauaaaaagguugaugaugguuuccuggacauuuggacuuacaaugccgaacuguugguucuauuggaaaaugaaagaacuuuggacuaccacgauucaaaugugaagaacuuauaugaaaagguaagaagccaguuaaaaaacaaugccaaggaaauuggaaacggcugcuuugaauuuuaccacaaaugcgauaacacgugcauggaaagugucaaaaaugggacuuaugacuacccaaaauacucagaggaagcaaaauuaaacagagaagaaauagaugggguaaagcuggaaucaacaaggauuuaccagauuuuggcgaucuauucaacugucgccaguucauugguacugguagucucccugggggcaaucaguuucuggaugugcucuaaugggucucuacaguguagaauauguauuuaa

SEQ ID NO: 36288 - RNA, 1701 nt, Artificial Sequence
  derived and/or modified CDS sequence (wt) from hemagglutinin__InfluenzaA__ADD74588
augaaggcaauacuaguaguucugcuauauacauuugcaaccgcaaaugcagacacauuauguauagguuaucaugcgaacaauucaacagacacuguagacacaguacuagaaaagaauguaacaguaacacacucuguuaaccuucuagaagacaagcauaacgggaaacuaugcaaacuaagagggguagccccauugcauuuggguaaauguaacauugcuggcuggauccugggaaauccagagugugaaucacucuccacagcaagcucaugguccuacauuguggaaacaucuaguucagacaauggaacguguuacccaggagauuucaucgauuaugaggagcuaagagagcaauugagcucagugucaucauuugaaagguuugagauauuccccaagacaaguucauggcccaaucaugacucgaacaaagguguaacggcagcauguccucaugcuggagcaaaaagcuucuacaaaaauuuaauauggcuaguuaaaaaaggaaauucauacccaaagcucagcaaauccuacauuaaugauaaagggaaagaaguccucgugcuauggggcauucaccauccaucuacuagugauggccaacaaagucucuaucagaaugcagaugcauauguuuuuguggggacaucaagauacagcaagaaguucaagccggaaauagcaauaagacccaaagugagggaucaagaagggagaaugaacuauuacuggacacuaguagagccgggagacaaaauaacauucgaagcaacuggaaaucuagugguaccgagauaugcauucgcaauggaaagaaaugcuggaucugguauuaucauuucagauacaccaguccacgauugcaauacaacuugucagacacccaagggugcuauaaacaccagccucccauuucagaauauacauccgaucacaauuggaaaauguccaaaauauguaaaaagcacaaaauugagacuggccacaggauugaggaaugucccgucuauucaaucuagaggccuauuuggggccauugccgguuucauugaagggggguggacagggaugguagauggaugguacgguuaucaccaucaaaaugagcaggggucaggauaugcagccgaccugaagagcacacagaaugccauugacgagauuacuaacaaaguaaauucuguuauugaaaagaugaauacacaguucacagcaguagguaaagaguucaaccaccuggaaaaaagaauagagaauuuaaauaaaaaaguugaugaugguuuccuggacauuuggacuuacaaugccgaacuguugguucuauuggaaaaugaaagaacuuuggacuaccacgauucaaaugugaagaacuuauaugaaaagguaagaagccaguuaaaaaacaaugccaaggaaauuggaaacggcugcuuugaauuuuaccacaaaugcgauaacacgugcauggaaagugucaaaaaugggacuuaugacuacccaaaguacucaaaggaagcaaaauuaaacagagaagaaauagaugggguaaagcuggaaucaacaaggauuuaccagauuuuggcgaucuauucaacugucgccaguucauugguacugguagucucccugggggcaaucaguuucuggaugugcucuaaugggucucuacaguguagaauauguauuuaa

SEQ ID NO: 36289 - RNA, 1701 nt, Artificial Sequence
  derived and/or modified CDS sequence (wt) from hemagglutinin__InfluenzaA__ADD74598
augaaggcaauacuaguaguucugcuauauacauuugcaaccgcaaaugcagacacauuauguauagguuaucaugcgaacaauucaacagacacuguagacacaguacuagaaaagaauguaacaguaacacacucuguuaaccuucuagaagacaagcauaacgggaaacuaugcaaacuaagagggguagccccauugcauuuggguaaauguaacauugcuggcuggauccugggaaauccagagugugaaucacucuccacagcaagcucaugguccuacauuguggaaacaucuaguucagacaauggaacguguuacccaggagauuucaucaauuaugaggagcuaagagagcaauugagcucagugucaucauuugaaagguuugagauauuccccaagacaaguucauggcccaaucaugacucgaacaaagguguaacggcugcauguccucaugcuggagcaaaaagcuucuacaaaaauuuaauauggcuaguuaaaaaaggaaauucauacccaaagcucagcaaauccuacauuaaugauaaagggaaagaaguccucgugcuauggggcauucaccauccaucuacuagugcugaccaacaaagucucuaucagaaugcagaugcauauguuuuuguggggacaucaagauauagcaagaaguucaagccggaaauagcaauaagacccaaagugagggaucaagaagggagaaugaacuauuacuggacacuaguagagccgggagacaaaauaacauucgaagcaacuggaaaucuagugguaccgagauaugcauucgcaauggaaagaaaugcuggaucugguauuaucaucucagauacaccaguccacgauugcaauacaacuugucagacacccaagggugcuauaaacaccagccucccauuucagaauauacauccgaucacaauuggaaaauguccaaaauauguaaaaagcacaaaauugagacuggccacaggauugaggaaugucccgucuauucaaucuagaggccuauuuggggccauugccgguuucauugaagggggguggacagggaugguagauggaugguacgguuaucaccaucaaaaugagcaggggucaggauaugcagccgaccugaagagcacacagaaugccauugacaagauuacuaacaaaguaaauucuguuauugaaaagaugaauacacaguucacagcaguagguaaagaguucaaccaccuggaaaaaagaauagagaauuuaaauaaaaaaguugaugaugguuuccuggacauuuggacuuacaaugccgaacuguugguucuauuggaaaaugaaagaacuuuggacuaccacgauucaaaugugaagaacuuauaugaaaagguaagaagccaguuaaaaaacaaugccaaggaaauuggaaacggcugcuuugaauuuuaccacaaaugcgauaacacgugcauggaaagugucaaaaaugggacuuaugacuacccaaaauacucagaggaagcaaaauuaaacagagaagaaauagaugggguaaagcuggaaucaacaaggauuuaccagauuuuggcgaucuauucaacugucgccaguucauugguacugguagucucccugggggcaaucaguuucuggaugugcucuaaugggucucuacaguguagaauauguauuuaa

SEQ ID NO: 36290 - RNA, 1701 nt, Artificial Sequence; identical to SEQ ID NO: 36239
  derived and/or modified CDS sequence (wt) from hemagglutinin__InfluenzaA__ADD74608

SEQ ID NO: 36291 - RNA, 1701 nt, Artificial Sequence; identical to SEQ ID NO: 35845
  derived and/or modified CDS sequence (wt) from hemagglutinin__InfluenzaA__ADD74618

SEQ ID NO: 36292 - RNA, 1701 nt, Artificial Sequence
  derived and/or modified CDS sequence (wt) from hemagglutinin__InfluenzaA__ADD74628
augaaggcaauacuaguaguucugcuauauacauuugcaaccgcaaaugcagacacauuauguauagguuaucaugcgaacaauucaacagacacuguagacacaauacuagaaaagaauguaacaguaacacacucuguuaaccuucuagaagacaagcauaacgggaaacuaugcaaacuaagagggguagccccauugcauuuggguaaauguaacauugcuggcuggauccugggaaauccagagugugaaucacucuccacagcaagcucaugguccuacauuguggaaacaucuaguucagacaauggaacguguuacccaggagauuucaucgauuaugaggagcuaagagagcaauugagcucagugucaucauuugaaagguuugagauauuccccaagacaaguucauggcccaaucaugacucgaacaaagguguaacggcagcauguccucaugcuggagcaaaaagcuucuacaaaaauuuaauauggcuaguuaaaaagggaaauucauacccaaagcucagcaaauccuacauuaaugauaaagggaaagaaauccucgugcuauggggcauucaccauccaucuacuagugcugaccaacaaagucucuaucagaaugcagaugcauauguuuuuguggggacaucaagauacagcaagaaguucaagccggaaauagcaauaagacccaaagugagggaucaagaagggagaaugaacuauuacuggacacuaguagagccgggagacaaaauaacauucgaagcaacuggaaaucuagugguaccgagauaugcauucgcaauggaaaaaaaugcuggaucugguauuaucauuucagauacaccaguccacgauugcaauacaacuugucagacacccaagggugcuauaaacaccagccucccauuucagaauauacauccgaucacaauuggaaaauguccaaaauauguaaaaagcacaaaauugagacuggccacaggauugaggaaugucccgucuauucaaucuagaggccuauuuggggccauugccgguuucauugaagggggguggacagggaugguagauggaugguacgguuaucaccaucaaaaugagcaggggucaggauaugcagccgaccugaagagcacacagaaugccauugacgagauuacuaacaaaguaaauucuguuauugaaaagaugaauacacaguucacagcaguagguaaagaguucaaccaccuggaaaaaagaauagagaauuuaaauaaaaagguugaugaugguuuccuggacauuuggacuuacaaugccgaacuguugguucuauuggaaaaugaaagaacuuuggacuaccacgauucaaaugugaagaacuuauaugaaaagguaagaagccaguuaaaaaacaaugccaaggaaauuggaaacggcugcuuugaauuuuaccacaaaugcgauaacacgugcauggaaagugucaaaaaugggacuuaugacuacccaaaauacucagaggaagcaaaauuaaacagagaagaaauagaugggguaaagcuggaaucaacaaggauuuaccagauuuuggcgaucuauucaacugucgccaguucauugguacugguagucucccugggggcaaucaguuucuggaugugcucuaaugggucucuacaguguagaauauguauuuaa

SEQ ID NO: 36293 - RNA, 1701 nt, Artificial Sequence
  derived and/or modified CDS sequence (wt) from hemagglutinin__InfluenzaA__ADD74648
augaaggcaauacuaguaguucugcuauauacauuugcaaccgcaaaugcagacacauuauguauagguuaucaugcgaacaauucaacagacacuguagacacaguacuagaaaagaauguaacaguaacacacucuguuaaccuucuagaagacaaacauaacgggaaacuaugcaaacuaagagggguagccccauugcauuuggguaaauguaacauugcuggcuggauccugggaaauccagagugugaaucacucuccacagcaagcucaugguccuacauuguggaaacaucuaguucagacaauggaacguguuacccaggagauuucaucgauuaugaggagcuaagagagcaauugagcucagugucaucauuugaaagguuugagauauuccccaagacaaguucauggcccaaucaugauucgaacaaagguguaacggcagcauguccucaugcuggagcaaaaagcuucuacaaaaauuuaauauggcuaguuaaaaaaggaaauucauacccaaagcucagcaaauccuacauuaaugauaaagggaaagaaguccucgugcuauggggcauucaccauccaucuacuagugcugaccaacaaagucucuaucagaaugcagaugcauauguuuuuguggggacaucaagauacagcaagaaguucaagccggaaauagcaauaagacccaaagugagggaucaagaagggagaaugaacuauuacuggacacuaguagagccgggagacaaaauaacauucgaagcaacuggaaaucuagugguaccgagauaugcauucgcaauggaaagaaaugcuggaucugguauuaucauuucagauacaccaguccacgauugcaauacaacuugucagacacccaagggugcuauaaacaccagccucccauuucagaauauacauccgaucacaauuggaaaauguccaaaauauguaaaaagcacaaaauugagacuggccacaggauugaggaauaucccgucuauucaaucuagaggccuauuuggggccauugccgguuucauugaagggggguggacagggaugguagauggaugguacgguuaucaccaucaaaaugagcaggggucaggauaugcagccgaccugaagagcacacagaaugccauugacgagauuacuaacaaaguaaauucuguuauugaaaagaugaauacacaguucacagcaguagguaaagaguucaaccaccuggaaaaaagaauagagaauuuaaauaaaaagguugaugaugguuuccuggacauuuggacuuacaaugccgaacuguugguucuauuagaaaaugaaagaacuuuagacuaccacgauucaaaugugaagaacuuauaugaaaagguaagaagccaguuaaaaaacaaugccaaggaaauuggaaacggcugcuuugaauuuuaccacaaaugcgauaacacgugcauggaaagugucaaaaaugggacuuaugacuacccaaaauacucagaggaagcaaaauuaaacagagaagaaauagaugggguaaagcuggaaucaacaaggauuuaccagauuuuggcgaucuauucaacugucgccaguucauugguacugguagucucccugggggcaaucaguuucuggaugugcucuaaugggucucuacaguguagaauauguauuuaa

SEQ ID NO: 36294 - RNA, 1701 nt, Artificial Sequence
  derived and/or modified CDS sequence (wt) from hemagglutinin__InfluenzaA__ADD74658
augaaggcaauacuaguaguucugcuauauacauuugcaaccgcaaaugcagacacauuauguauagguuaucaugcgaacaauucaacagacacuguagacacaguacuagaaaagaauguaacaguaacacacucuguuaaccuucuagaagacaagcauaacgggaaacuaugcaaacuaagagggguagccccauugcauuuggguaaauguaacauugcuggcuggauccugggaaauccagagugugaaucacucuccacagcaagcucaugguccuacauuguggaaacaucuaguucagacaauggaacguguuacccaggagauuucaucgauuaugaggagcuaagagagcaauugagcucagugucaucauuugaaagguuugagauauuccccaagacaaguucauggcccaaucaugacucgaacaaagguguaacggcagcauguccucaugcuggagcaaaaagcuucuacaaaaauuuaauauggcuaguuaaaaaaggaaauucauacccaaagcucagcaaauccuacaucaaugauaaagggaaagaaguccucgugcuauggggcauucaccauccaucuacuagugcugaccaacaaagucucuaucagaaugcagauucauauguuuuuguggggacaucaagauacagcaagaaguucaagccggaaauagcaauaagacccaaagugagggaucaagaagggagaaugaacuauuacuggacacuaguagagccgggagacaaaauaacauucgaagcaacuggaaaucuagugguaccgagauaugcauucgcaauggaaagaaaugcuggaucugguauuaucauuucagauacaccaguccacgauugcaauacaacuugucagacacccgagggugcuauaaacaccagccucccauuucagaauauacauccgaucacaauuggaaaauguccaaaauauguaaaaagcacaaaauugagacuggccacaggauugaggaaugucccgucuauucaaucuagaggccuauuuggggccauugccgguuucauugaagggggguggacagggaugguagauggaugguacgguuaucaccaucaaaaugagcaggggucaggauaugcagccgaccugaagagcacacagaaugccauugacgagauuacuaacaaaguaaauucuguuauugaaaagaugaauacacaguucacagcaguagguaaagaguucaaccaccuggaaaaaagaauagagaauuuaaauaaaaaaguugaugaugguuuccuggacauuuggacuuacaaugccgaacuguugguucuauuggaaaaugaaagaacuuuggacuaccacgauucaaaugugaagaacuuauaugaaaagguaagaagccaguuaaaaaacaaugcaaaggaaauuggaaacggcugcuuugaauuuuaccacaaaugcgauaacacgugcauggaaagugucaaaaaugggacuuaugacuacccaaaauacucagaggaagcaaaauuaaacagagaagaaauagaugggguaaagcuggaaucaacaaggauuuaccagauuuuggcgaucuauucaacugucgccaguucauugguacugguagucucccugggggcaaucaguuucuggaugugcucuaaugggucucuacaguguagaauauguauuuaa

SEQ ID NO: 36295 - RNA, 1701 nt, Artificial Sequence; identical to SEQ ID NO: 36239
  derived and/or modified CDS sequence (wt) from hemagglutinin__InfluenzaA__ADD74668

SEQ ID NO: 36296 - RNA, 1701 nt, Artificial Sequence
  derived and/or modified CDS sequence (wt) from hemagglutinin__InfluenzaA__ADD74678
augaaagcaauacuaguaguucugcuauauacauuugcaaccgcaaaugcagacacauuauguauagguuaucaugcgaacaauucaacagacacuguagacacaguacuagaaaagaauguaacaguaacacacucuguuaaccuucuagaagacaagcauaacgggaaacuaugcaaacuaagagggguagccccauugcauuuggguaaauguaacauugcuggcuggauccugggaaauccagagugugaaucacucuccacagcaagcucaugguccuacauuguggaaacaucuaguucagacaauggaacguguuacccaggagauuucaucaauuaugaggagcuaagagagcaauugagcucagugucaucauuugaaagguuugagauauuccccaagacaaguucauggcccaaucaugacucgaacaaagguguaacggcagcauguccucaugcuggagcaaaaagcuucuacaaaaauuuaauauggcuaguuaaaaaaggaaauucauacccaaagcucagcaaauccuacauuaaugauaaagggaaagaaguccucgugcuauggggcauucaccauccaucuacuagugcugaccaacaaagucucuaucagaaugcagaugcauauguuuuuguggggacaucaagauacagcaagaaguucaagccagaaauagcaauaagacccaaagugagggaucaagaagggagaaugaacuauuacuggacacuaguaaagccgggagacaaaauaacauucgaagcaacuggaaaucuagugguaccgagauaugcauucgcaauggaaagaaaugcuggaucugguauuaucaucucagauacaccaguccacgauugcaauacaacuugucagacacccaagggugcuauaaacaccagccucccauuucagaauauacauccgaucacaauuggaaaauguccaaaauauguaaaaagcacaaaauugagacuggccacaggauugaggaaugucccgucuauucaaucuagaggccuauuuggggccauugccgguuucauugaagggggguggacagggaugguagauggaugguacgguuaucaccaucaaaaugagcaggggucaggauaugcagccgaccugaagagcacacagaaugccauugacaagauuacuaacaaaguaaauucuguuauugaaaagaugaauacacaguucacagcaguagguaaagaguucaaccaccuggaaaaaagaauagagaauuuaaauaaaaaaguugaugaugguuuccuggacauuuggacuuacaaugccgaacuguugguucuauuggaaaaugaaagaacuuuggacuaccacgauucaaaugugaagaacuuauaugaaaagguaagaagccaguuaaaaaacaaugccaaggaaauuggaaacggcugcuuugaauuuuaccacaaaugcgauaacacgugcauggaaagugucaaaaaugggacuuaugacuacccaaaauacucagaggaagcaaaauuaaacagagaagaaauagaugggguaaagcuggaaucaacaaggauuuaccagauuuuggcgaucuauucaacugucgccaguucguugguacugguagucucccugggggcaaucaguuucuggaugugcucuaaugggucucuacaguguagaauauguauuuaa

SEQ ID NO: 36297 - RNA, 1701 nt, Artificial Sequence
  derived and/or modified CDS sequence (wt) from hemagglutinin__InfluenzaA__ADD74688
augaaggcaauacuaguaguucugcuauauacauuugcaaccgcaaaugcagacacauuauguauagguuaucaugcgaacaauucaacagacacuguagacacaguacuagaaaagaauguaacaguaacacacucuguuaaccuucuagaagacaagcauaacgggaaacuaugcaaacuaagagggguagccccauugcauuuggguaaauguaacauugcuggcuggauccugggaaauccagagugugaaucacucuccacagcaagcucaugguccuacauuguggaaacaucuaguucagacaauggaacguguuacccaggagauuucaucaauuaugaggagcuaagagagcaauugagcucagugucaucauuugaaagguuugagauauuccccaagacaaguucauggcccaaucaugacucgaacaaagguguaacggcagcauguccucaugcuggagcaaaaagcuucuacaaaaauuuaauauggcuaguuaaaaaaggaaauucauacccaaagcucagcaaauccuacauuaaugauaaagggaaagaaguccucgugcuauggggcauucaccauccaucuacuagugcugaccaacaaagucucuaucagaaugcagaugcauauguuuuuguggggacaucaagauacagcaagaaguucaagccggaaauagcaauaagacccaaagugagggaucaagaagggagaaugaacuauuacuggacacuaguagagccgggagacaaaauaacauucgaagcaacuggaaaucuagugguaccgagauaugcauucgcaauggaaagaaaugcuggaucugguauuaucaucucagauacaccaguccacgauugcaauacaacuugucagacacccaagggugcuauaaacaccagccucccauuucagaauauacauccgaucacaauuggaaaauguccaaaauauguaaaaagcacaaaauugagacuggccacaggauugaggaaugucccgucuauucaaucuagaggccuauuuggggccauugccgguuucauugaagggggguggacaggaaugguagauggaugguacgguuaucaccaucaaaaugagcaggggucaggauaugcagccgaccugaagagcacacagaaugccauugacaagauuacuaacaaaguaaauucuguuauugaaaagaugaauacacaguucacagcaguagguaaagaguucaaccaccuggaaaaaagaauagagaauuuaaauaaaaaaguugaugaugguuuccuggacauuuggacuuacaaugccgaacuguugguucuauuggaaaaugaaagaacuuuggacuaccacgauucaaaugugaagaacuuauaugaaaagguaagaagccaguuaaaaaacaaugccaaggaaauuggaaacggcugcuuugaauuuuaccacaaaugcgauaacacgugcauggaaagugucaaaaaugggacuuaugacuacccaaaauacucagaggaagcaaaauuaaacagagaagaaauagaugggguaaagcuggaaucaacaaggauuuaccagauuuuggcgaucuauucaacugucgccaguucacugguacugguagucucccugggggcaaucaguuucuggaugugcucuaaugggucucuacaguguagaauauguauuuaa

SEQ ID NO: 36298 - RNA, 1701 nt, Artificial Sequence
  derived and/or modified CDS sequence (wt) from hemagglutinin__InfluenzaA__ADD74698
augaaggcaauacuaguaguucugcuauauacauuugcaaccgcaaaugcagacacauuauguauagguuaucaugcgaacaauucaacagacacuguagacacaguacuagaaaagaauguaacaguaacacacucuguuaaccuucuagaagacaagcauaacgggaaacuaugcaaacuaagagggguagccccauugcauuuggguaaauguaacauugcuggcuggauccugggaaauccagagugugaaucacucuccacagcaagcucaugguccuacauuguggaaacaucuaguucagacaauggaacguguuacccaggagauuucaucaauuaugaggagcuaagagagcaauugagcucagugucaucauuugaaagguuugagauauuccccaagacaaguucauggcccaaucaugacucgaacaaagguguaacggcugcauguccucaugcuggagcaaaaagcuucuacaaaaauuuaauauggcuaguuaaaaaaggaaauucauacccaaagcucagcaaauccuacauuaaugauaaagggaaagaaguccucgugcuauggggcauucaccauccaucuacuagugcugaccaacaaagucucuaucagaaugcagaugcauauguuuuuguggggacaucaagauacagcaagaaguucaagccggaaauagcaauaagacccaaagugagggaucaagaagggagaaugaacuauuacuggacacuaguagagccgggagacaaaauaacauucgaagcaacuggaaaucuagugguaccgagauaugcauucgcaauggaaagaaaugcuggaucugguauuaucaucucagauacaccaguccacgauugcaauacaacuugucagacacccaagggugcuauaaacaccagccucccauuucagaauauacauccgaucacaauuggaaaauguccaaaauauguaaaaagcacaaaauugagacuggccacaggauugaggaaugucccgucuauucaaucuagaggccuauuuggggccauugccgguuucauugaagggggguggacagggaugguagauggaugguacgguuaucaccaucaaaaugagcaggggucaggauaugcagccgaccugaagagcacacagaaugccauugacaagauuacuaacaaaguaaauucuguuauugaaaagaugaauacacaguucacagcaguagguaaagaguucaaccaccuggaaaaaagaauagagaauuuaaauaaaaaaguugaugaugguuuccuggacauuuggacuuacaaugccgaacuguugguucuauuggaaaaugaaagaacuuuggacuaccacgauucaaaugugaagaacuuauaugaaaagguaagaaaccaguuaaaaaacaaugccaaggaaauuggaaacggcugcuuugaauuuuaccacaaaugcgauaacacgugcauggaaagugucaaaaaugggacuuaugacuacccaaaauacucagaggaagcaaaauuaaacagagaagaaauagaugggguaaagcuggaaucaacaaggauuuaccagauuuuggcgaucuauucaacugucgccaguucauugguacugguagucucccugggggcaaucaguuucuggaugugcucuaaugggucucuacaguguagaauauguauuuaa

SEQ ID NO: 36299 - RNA, 1701 nt, Artificial Sequence; identical to SEQ ID NO: 36239
  derived and/or modified CDS sequence (wt) from hemagglutinin__InfluenzaA__ADD74708

SEQ ID NO: 36300 - RNA, 1701 nt, Artificial Sequence
  derived and/or modified CDS sequence (wt) from hemagglutinin__InfluenzaA__ADD74728
augaaggcaauacuaguaguucugcuauauacauuugcaaccgcaaaugcagacacauuauguauagguuaucaugcgaacaauucaacagacacuguagacacaguacuagaaaagaauguaacaguaacacacucuguuaaccuucuagaagacaagcauaacgggaaacuaugcaaacuaagagggguagccccauugcauuuggguaaauguaacauugcuggcuggauccugggaaauccagagugugaaucacucuccacagcaagcucaugguccuacauuguggaaacaucuaguucagacaauggaacguguuacccaggagauuucaucgauuaugaggagcuaagagagcaauugagcucagugucaucauuugaaagguuugagauauuccccaagacaaguucauggcccgaucaugacucgaacaaagguguaacggcagcauguccucaugcuggagcaaaaagcuucuacaaaaauuuaauauggcuaguuaaaaaaggaaauucauacccaaagcucagcaaauccuacauaaaugauaaagggaaagaaguccucgugcuauggggcauucaccauccaucuacuagugcugaccaacaaagucucuaucagaaugcagaugcauauguuuuuguggggacaucaagauacagcaagaaguucaagccggaaauagcaauaagacccaaagugagggaucaagaagggagaaugaacuauuacuggacacuaguagagccgggagacaaaauaacauucgaagcaacuggaaaucuagugguaccgagauaugcauucgcaauggaaagaaaugcuggaucugguauuaucauuucagauacaccaguccacgauugcaauacaacuugucagacacccaagggugcuauaaacaccagccucccauuucagaauauacauccgaucacaauuggaaaauguccaaaauauguaaaaagcacaaaauugagacuggccacaggauugaggaaugucccgucuauucaaucuagaggccuauuuggggccauugccgguuucauugaagggggguggacagggaugguagauggaugguacgguuaucaccaucaaaaugagcaggggucaggauaugcagccgaccugaagagcacacagaaugccauugacaagauuacuaacaaaguaaauucuguuauugaaaagaugaauacacaguucacagcaguagguaaagaguucaaccaccuggaaaaaagaauagagaauuuaaauaaaaaaguugaugaugguuuccuggacauuuggacuuacaaugccgaacuguugguucuauuggaaaaugaaagaacuuuggacuaccacgauucaaaugugaagaacuuauaugaaaagguaagaagccaguuaaaaaacaaugccaaggaaauuggaaacggcugcuuugaauuuuaccacaaaugcgauaacacgugcauggaaagugucaaaaaugggacuuaugacuacccaaaauacucagaggaagcaaaauuaaacagagaagaaauagaugggguaaagcuggaaucaacaaggauuuaccagauuuuggcgaucuauucaacugucgccaguucagugguacugguagucucccugggggcaaucaguuucuggaugugcucuaaugggucucuacaguguagaauauguauuuaa

SEQ ID NO: 36301 - RNA, 1701 nt, Artificial Sequence
  derived and/or modified CDS sequence (wt) from hemagglutinin__InfluenzaA__ADD74738
augaaggcaauacuaguaguucugcuauauacauuugcaaccgcaaaugcagacacauuauguauagguuaucaugcgaacaauucaacagacacuguagacacaguacuagaaaagaauguaacaguaacacacucuguuaaccuucuagaagacaagcauaacgggaaacuaugcaaacuaagagggguagccccauugcauuuggguaaauguaacauugcuggcuggauccugggaaauccagagugugaaucacucuccacagcaagaucaugguccuacauuguggaaacaucuaguucagacaauggaacguguuacccaggagauuucaucgauuaugaggagcuaagagagcaauugagcucagugucaucauuugaaagguuugagauauuccccaagacaaguucauggcccaaucaugacucgaacaaagguguaacggcagcauguccucaugcuggagcaaaaagcuucuacaaaaauuuaauauggcuaguuaaaaaaggaaauucauacccaaagcucagcaaauccuacauuaaugauaaagggaaagaaguccucgugcuauggggcauucaccauccaucuacuagugcugaccaacaaagucucuaucagaaugcagaugcauauguuuuuguggggacaucaggauacagcaagaaguucaagccggaaauagcaauaagacccaaagugagggaucaagaagggagaaugaacuauuacuggacacuaguagagccgggagacaaaauaacauucgaagcaacuggaaaucuagugguaccgagauaugcauucgcaauggaaagaaaugcuggaucugguauuaucauuucagauacaccaguccacgauugcaauacaacuugucagacacccaagggugcuauaaacaccagccucccauuucagaauauacauccgaucacaauuggaaaauguccaaaauauguaaaaagcacaaaauugagacuggccacaggauugaggaaugucccgucuauucaaucuagaggccuauuuggggccauugccgguuucauugaagggggguggacagggaugguagauggaugguacgguuaucaccaucaaaaugagcaggggucaggauaugcagccgaccugaagagcacacagaaugccauugacaagauuacuaacaaaguaaauucuguuauugaaaagaugaauacacaguucacagcaguagguaaagaguucaaccaccuggaaaaaagaauagagaauuuaaauaaaaaaguugaugaugguuuccuggacauuuggacuuacaaugccgaacuguugguucuauuggaaaaugaaagaacuuuggacuaccacgauucaaaugugaagaacuuauaugaaaagguaagaagccaguuaaaaaacaaugccaaggaaauuggaaacggcugcuuugaauuuuaccacaaaugcgauaacacgugcauggaaaguguaaaaaaugggacuuaugacuacccaaaauacucagaggaagcaaaauuaaacagagaagaaauagaugggguaaagcuggaaucaacaaggauuuaccagauuuuggcgaucuauucaacugucgccaguucauugguacugguagucucccugggggcaaucaguuucuggaugugcucuaaugggucucuacaguguagaauauguauuuaa

SEQ ID NO: 36302 - RNA, 1701 nt, Artificial Sequence; identical to SEQ ID NO: 35845
  derived and/or modified CDS sequence (wt) from hemagglutinin__InfluenzaA__ADD74748

SEQ ID NO: 36303 - RNA, 1701 nt, Artificial Sequence
  derived and/or modified CDS sequence (wt) from hemagglutinin__InfluenzaA__ADD74758
augaaggcaauacuaguaguucugcuauauacauuugcaaccgcaaaugcagacacauuauguauagguuaucaugcgaacaauucaacagacacuguagacacaguacuagaaaagaauguaacaguaacacacucuguuaaccuucuagaagacaagcauaacgggaaacuaugcaaacuaagagggguagccccauugcauuuggguaaauguaacauugcuggcuggauccugggaaauccagagugugaaucacucuccacagcaagcucaugguccuacauuguggaaacaucuaguucagacaauggaacguguuacccaggagauuucaucgauuaugaggagcuaagagagcaauugagcucagugucaucauuugaaagguuugagauauuccccaagacaaguucauggcccaaucaugacucgaacaaagguguaacggcagcauguccucaugcuggagcaaaaagcuucuacaaaaauuuaauauggcuaguuaaaaaaggaaauucauacccaaagcucagcaaauccuacauaaaugauaaagggaaagaaguccucgugcuauggggcauucaccauccaucuacuagugcugaccaacaaagucucuaucagaaugcagaugcauauguuuuuguggggacaucaagauacagcaagaaguucaagccggaaauagcaauaagacccaaagugagggaucaagaagggagaaugaacuauuacuggacacuaguagagccgggagacaaaauaacauucgaagcaacuggaaaucuagugguaccgagauaugcauucgcaauggaaagaaaugcuggaucugguauuaucauuucagauacaccaguccacgauugcaauacaacuugucagacacccaagggugcuauaaacaccagccucccauuucagaauauacauccgaucacaauuggaaaauguccaaaauauguaaaaagcacaaaauugagacuggccacaggauugaggaaugucccgucuauucaaucuagaggccuauuuggggccauugccgguuucauugaagggggguggacagggaugguagauggaugguacgguuaucaccaucaaaaugagcaggggucaggauaugcagccgaccugaagagcacacagaaugccauugacaagauuacuaacaaaguaaauucuguuauugaaaagaugaauacacaguucacagcaguagguaaagaguucaaccaccuggaaaaaagaauagagaauuuaaauaaaaaaguugaugaugguuuccuggacauuuggacuuacaaugccgaacuguugguucuauuggaaaaugaaagaacuuuggacuaccacgauucaaaugugaagaacuuauaugaaaagguaagaagccaguuaaaaaacaaugccaaggaaauuggaaacggcugcuuugaauuuuaccacaaaugcgauaacacgugcauggaaagugucaaaaaugggacuuaugacuacccaaaauacucagaggaagcaaaauuaaacagagaagaaauagaugggguaaagcuggaaucaacaaggauuuaccagauuuuggcgaucuauucaacugucgccaguucauugguacugguagucucccugggggcaaucaguuucuggaugugcucuaaugggucucuacaguguagaauauguauuuaa

SEQ ID NO: 36304 - RNA, 1701 nt, Artificial Sequence
  derived and/or modified CDS sequence (wt) from hemagglutinin__InfluenzaA__ADD74768
augaaggcaauacuaguaguucugcuauauacauuugcaaccgcaaaugcagacacauuauguauagguuaucaugcgaacaauucaacagacacuguagacacaguacuagaaaagaauguaacaguaacacacucuguuaaccuucuagaagacaagcauaacgggaaacuaugcaaacuaagagggguagccccauugcauuuggguaaauguaacauugcuggcuggauccugggaaauccagagugugaaucacucuccacagcaagcucaugguccuacauuguggaaacaucuaguucagacaauggaacguguuacccaggagauuucaucgauuaugaggagcuaagagagcaauugagcucagugucaucauuugaaagguuugagauauuccccaagacaaguucauggcccaaucaugacucgaacaaagguguaacggcagcauguccucaugcuggagcaaaaagcuucuacaaaaauuuaauauggcuaguuaaaaaaggaaauucauacccaaagcucagcaaauccuacauuaaugauaaagggaaagaaguccucgugcuauggggcauucaccauccaucuacuagugcugaccaacaaagucucuaucagaaugcagaugcauauguuuuuguggggacaucaagauacagcaagaaguucaagccggaaauagcaauaagacccaaagugagggaucaagaagggagaaugagcuauuacuggacacuaguagagccgggagacaaaauaacauucgaagcaacuggaaaucuagugguaccgagauaugcauucgcaauggaaagaaaugcuggaucugguauuaucauuucagauacaccaguccacgauugcaauacaacuugucagacacccaagggugcuauaaacaccagccucccauuucagaauauacauccgaucacaauuggaaaauguccaaaauauguaaaaagcacaaaauugagacuggccacaggauugaggaaugucccgucuauucaaucuagaggccuauuuggggccauugccgguuucauugaagggggguggacagggaugguagauggaugguacgguuaucaccaucaaaaugagcaggggucaggauaugcagccgaccugaagagcacacagaaugccauugacaagauuacuaacaaaguaaauucuguuauugaaaagaugaauacacaguucacagcaguagguaaagaguucaaccaccuggaaaaaagaauagagaauuuaaauaaaaaaguugaugaugguuuccuggacauuuggacuuacaaugccgaacuguugguucuauuggaaaaugaaagaacuuuggacuaccacgauucaaaugugaagaacuuauaugaaaagguaagaagccaguuaaaaaacaaugccaaggaaauuggaaacggcugcuuugaauuuuaccacaaaugcgauaacacgugcauggaaagugucaaaaaugggacuuaugacuacccaaaauacucagaggaagcaaaauuaaacagagaagaaauagaugggguaaagcuggaaucaacaaggauuuaccagauuuuggcgaucuauucaacugucgccaguucauugguacugguagucucccugggggcaaucaguuucuggaugugcucuaaugggucucuacaguguagaauauguauuuaa

SEQ ID NO: 36305 - RNA, 1701 nt, Artificial Sequence
  derived and/or modified CDS sequence (wt) from hemagglutinin__InfluenzaA__ADD74778
augaaggcaauacuaguaguucugcuauauacauuugcaaccgcaaaugcagacacauuauguauagguuaucaugcgaacaauucaacagacacuguagacacaguacuagaaaagaauguaacaguaacacacucuguuaaccuucuagaagacaagcauaacgggaaacuaugcaaacuaagagggguagccccauugcauuuggguaaauguaacauugcuggcuggauccugggaaauccagagugugaaucacucuccacagcaagcucaugguccuacauuguggaaacaucuaguucagacaauggaacguguuacccaggagauuucaucgauuaugaggagcuaagagagcaauugagcucagugucaucauuugaaagguuugagauauuccccaagacaaguucauggcccaaucaugacucgaacaaagguguaacggcagcauguccucaugcuggggcaaaaagcuucuacaaaaauuuaauauggcuaguuaaaaaaggaaauucauacccaaagcucagcaaauccuacauuaaugauaaagggaaagaaguccucgugcuauggggcauucaccauccaucuacuagugcugaccaacaaagucucuaucagaaugcagaugcauauguuuuuguggggacaucaagauacagcaagaaguucaagccggaaauagcaauaagacccaaagugagggaucaagaagggagaaugaacuauuacuggacacuaguagagccgggagacaaaauaacauucgaagcaacuggaaaucuagugguaccgagauaugcauucgcaauggaaagaaaugcuggaucugguauuaucauuucagauacaccaguccacgauugcaauacaacuugucagacacccaagggugcuauaaacaccagccucccauuucagaauauacauccgaucacaauuggaaaauguccaaaauauguaaaaagcacaaaauugagacuggccacaggauugaggaaugucccgucuauucaaucuagaggccuauuuggggccauugccgguuucauugaagggggguggacagggaugguagauggaugguacgguuaucaccaucaaaaugagcaggggucaggauaugcagccgaccugaagagcacacagaaugccauugacaagauuacuaacaaaguaaauucuguuauugaaaagaugaauacacaguucacagcaguagguaaagaguucaaccaccuggaaaaaagaauagagaauuuaaauaaaaaaguugaugaugguuuccuggacauuuggacuuacaaugccgaacuguugguucuauuggaaaaugaaagaacuuuggacuaccacgauucaaaugugaagaacuuauaugaaaagguaagaagccaguuaaaaaacaaugccaaggaaauuggaaacggcugcuuugaauuuuaccacaaaugcgauaacacgugcauggaaagugucaaaaaugggacuuaugacuacccaaaauacucagaggaagcaaaauuaaacagagaagaaauagaugggguaaagcuggaaucaacaaggauuuaccagauuuuggcgaucuauucaacugucgccaguucauugguacugguagucucccugggggcaaucaguuucuggaugugcucuaaugggucucuacaguguagaauauguauuuaa

SEQ ID NO: 36306 - RNA, 1701 nt, Artificial Sequence
  derived and/or modified CDS sequence (wt) from hemagglutinin__InfluenzaA__ADD74788
augaaggcaauacuaguaguucugcuauauacauuugcaaccgcaaaugcagacacauuauguauagguuaucaugcgaacaauucaacagacacuguagauacaguacuagaaaagaauguaacaguaacacacucuguuaaccuucuagaagacaagcauaacgggaaacuaugcaaacuaagagggguagccccauugcauuuggguaaauguaacauugcuggcuggauccugggaaauccagagugugaaucacucuccacagcaagcucaugguccuacauuguggaaacaucuaguucagacaauggaacguguuacccaggagauuucaucaauuaugaggagcuaagagagcaauugagcucagugucaucauuugaaagguuugagauauuccccaagacaaguucauggcccaaucaugacucgaacaaagguguaacggcagcauguccucaugcuggagcaaaaagcuucuacaaaaauuuaauauggcuaguuaaaaaaggaaauucauacccaaagcucagcaaauccuacauuaaugauaaagggaaagaaguccucgugcuauggggcauucaccauccaucuacuagugcugaccaacaaagucucuaucagaaugcagaugcauauguuuuuguggggacaucaagauacagcaagaaguucaagccggaaauagcaauaagacccaaagugagggaucaagaagggagaaugaacuauuacuggacacuaguagagccgggagacaaaauaacauucgaagcaacuggaaaucuagugguaccgagauaugcauucgcaauggaaagaaaugcuggaucugguauuaucaucucagauacaccaguccacgauugcaauacaacuugucagacacccaagggugcuauaaacaccagccucccauuucagaauauacauccgaucacaauuggaaaauguccaaaauauguaaaaagcacaaaauugagacuggccacaggauugaggaaugucccgucuauucaaucuagaggccuauuuggggccauugccgguuucauugaagggggguggacagggaugguagauggaugguacgguuaucaccaucaaaaugagcaggggucaggauaugcagccgaccugaagagcacacagaaugccauugacaagauuacuaacaaaguaaauucuguuauugaaaagaugaauacacaguucacagcaguagguaaagaguucaaccaccuggaaaaaagaauagagaauuuaaauaaaaaaguugaugaugguuuccuggacauuuggacuuacaaugccgaacuguugguucuauuggaaaaugaaagaacuuuggacuaccacgauucaaaugugaagaacuuauaugaaaagguaagaagccaguuaaaaaacaaugccaaggaaauuggaaacggcugcuuugaauuuuaccacaaaugcgauaacacgugcauggaaagugucaaaaaugggacuuaugacuacccaaaauacucagaggaagcaaaauuaaacagagaagaaauagaugggguaaagcuggaaucaacaaggauuuaccagauuuuggcgaucuauucaacugucgccaguucauugguacugguagucucccugggggcaaucaguuucuggaugugcucuaaugggucucuacaguguagaauauguauuuaa

SEQ ID NO: 36307 - RNA, 1701 nt, Artificial Sequence
  derived and/or modified CDS sequence (wt) from hemagglutinin__InfluenzaA__ADD74798
augaaggcaauacuaguaguucugcuauauacauuugcaaccgcaaaugcagacacauuauguauagguuaucaugcgaacaauucaacagacacuguagacacaguacuagaaaagaauguaacaguaacacacucuguuaaccuucuagaagacaagcauaacgggaaacuaugcaaacuaagagggguagccccauugcauuuggguaaauguaacauugcuggcuggauccugggaaauccagagugugaaucacucuccacagcaagcucaugguccuacauuguggaaacaucuaguucagacaauggaacguguuacccaggagauuucaucaauuaugaggagcuaagagagcaauugagcucagugucaucauuugaaagguuugagauauuccccaagacaaguucauggcccaaucaugacucgaacaaagguguaacggcugcauguccucaugcuggagcaaaaagcuucuacaaaaauuuaauauggcuaguuaaaaaaggaaauucauacccaaagcucagcaaauccuacauuaaugauaaagggaaagaaguccucgugcuauggggcauucaccauccaucuacuagugcugaccaacaaagucucuaucagaaugcagaugcauauguuuuuguggggacaucaagauacagcaagaaguucaagccggaaauagcaauaagacccaaagugagggaucaagaagggagaaugaacuauuacuggacacuaguagagccgggagacaaaauaacauucgaagcaacuggaaaucuagugguaccgagauaugcauucgcaauggaaagaaaugcuggaucugguauuaucaucucagauacaccaguccacgauugcaauacaacuugucagacacccaagggugcuauaaacaccagccucccauuucagaauauacauccgaucacaauuggaaaauguccaaaauauguaaaaagcacaaaauugagacuggccacaggauugaggaaugucccgucuauucaaucuagaggccuauuuggggccauugccgguuucauugaagggggguggacagggaugguagauggaugguacgguuaucaccaucaaaaugagcaggggucaggauaugcagccgaccugaagagcacacagaaugccauugacaagauuacuaacaaaguaaauucuguuauugaaaagaugaauacacaguucacagcaguagguaaagaguucaaccaccuggaaaaaagaauagagaauuuaaauaaaaaaguugaugaugguuuccuggacauuuggacuuacaaugccgaacuguugguucuauuggaaaaugaaagaacuuuggacuaccacgauucaaaugugaagaacuuauaugaaaagguaagaagccaguuaaaaaauaaugccaaggaaauuggaaacggcugcuuugaauuuuaccacaaaugcgauaacacgugcauggaaagugucaaaaaugggacuuaugacuacccaaaauacucagaggaagcaaaauuaaacagagaagaaauagaugggguaaagcuggaaucaacaaggauuuaccagauuuuggcgaucuauucaacugucgccaguucauugguacugguagucucccugggggcaaucaguuucuggaugugcucuaaugggucucuacaguguagaauauguauuuaa

SEQ ID NO: 36308 - RNA, 1701 nt, Artificial Sequence
  derived and/or modified CDS sequence (wt) from hemagglutinin__InfluenzaA__ADD74808
augaaggcaauacuaguaguucugcuauauacauuugcaaccgcaaaugcagacacauuauguauagguuaucaugcgaacaauucaacagacacuguagacacaguacuagaaaagaauguaacagugacacacucuguuaacauucuagaagacaagcauaacgggaaacuaugcaaacuaagagggguagccccauugcauuuggguaaauguaacauugcuggcuggauccugggaaauccagagugugaaucacucuccacagcaagcucaugguccuacauuguggaaacaucuaguucagacaauggaacguguuacccaggagauuucaucgauuaugaggagcuaagagagcaauugagcucagugucaucauuugaaagguuugagauauuccccaagacaaguucauggcccaaucaugacucgaacaaagguguaacggcagcauguccucaugcuggagcaaaaagcuucuacaaaaauuuaauuuggcuaguuaaaaaaggaaauucauacccaaagcucagcaaauccuacauuaaugauaaagggaaagaaguccucgugcuauggggcauucaccauccaucuacuagugcugaccaacaaagucucuaucagaaugcagaugcauauguuuuugugggaucaucaagauacagcaagaaguucaagccggaaauagcaauuagacccaaagugagggaucaagaagggagaaugaacuauuacuggacacuaguagagccgggagacaaaauaacauucgaagcaacuggaaaucuagugguaccgagauaugcauucgcaauggaaagaaaugcuggaucugguauuaucauuucagauacaccaguccaugauugcaauacaacuugucagacacccaagggugcuauaaacaccagccucccauuucagaauauacauccgaucacaauuggaaaauguccaaaauauguaaaaagcacaaaauugagacuggccacaggauugaggaaugucccgucuauucaaucuagaggccuauuuggggccauugccgguuucauugaagggggguggacagggaugguagauggaugguacgguuaucaccaucaaaaugagcaggggucaggauaugcagccgaccugaagagcacacagaaugccauugacgagauuacuaacaaaguaaauucuguuauugaaaagaugaauacacaguucacagcaguagguaaagaguucaaccaccuggaaaaaagaauagagaauuuaaauaaaaaaguugaugaugguuuccuggacauuuggacuuacaaugccgaacuguugguucuauuggaaaaugaaagaacuuuggacuaccacgauucaaaugugaagaacuuauaugaaaagguaagaagccagcuaaaaaacaaugccaaggaaguuggaaacggcugcuuugaauuuuaccacaaaugcgauaacacgugcauggaaagugucaaaaaugggacuuaugacuaccccaaauacucagaggaagcaaaauuaaacagagaagaaauagaugggguaaagcuggaaucaacaaggauuuaccagauuuuggcgaucuauucaacugccgccaguucauugguacugguagucucccugggggcaaucaguuucuggaugugcucuaaugggucucuacaguguagaauauguauuuaa

SEQ ID NO: 36309 - RNA, 1701 nt, Artificial Sequence
  derived and/or modified CDS sequence (wt) from hemagglutinin__InfluenzaA__ADD74818
augaaggcaauacuaguaguucugcuauauacauuugcaaccgcaaaugcagacacauuauguauagguuaucaugcgaacaauucaacagacacuguagacacaguacuagaaaagaauguaacaguaacacacucuguuaacauucuagaagacaagcauaacgggaaacuaugcaaacuaagagggguagccccauugcauuuggguaaauguaacauugcuggcuggauccugggaaauccagagugugaaucacucuccacagcaagcucaugguccuacauuguggaaacaucuaguucagacaauggaacguguuacccaggagauuucaucgauuaugaggagcuaagagagcaauugagcucagugucaucauuugaaagguuugagauauuccccaagacaaguucauggcccaaucaugacucgaacaaagguguaacggcagcauguccucaugcuggagcaaaaagcuucuacaaaaauuuaauauggcuaguuaaaaaaggaaauucauacccaaagcucagcaaauccuacauuaaugauaaagggaaagaaguccucgugcuauggggcauucaccauccaucuacuagugcugaccaacaaagucucuaucagaaugcagaugcauauguuuuuguggggacaucaagauacagcaagaaguucaagccggaaauagcaauaagacccaaagugagggaucaagaagggagaaugaacuaucacuggacacuaguagagccgggagacaaaauaacauucgaagcaacuggaaaucuagugguaccgagauaugcauucgcaauggaaagaaaugcuggaucugguauuaucauuucagauacaccaguccacgauugcaauacaacuugucagacacccaagggugcuauaaacaccagccucccauuucagaauauacauccgaucacaauuggaaaauguccaaaauauguaaaaagcacaaaauugagacuggccacaggauugaggaaugucccgucuauucaaucuagaggccuauuuggggccauugccgguuucauugaagggggguggacagggaugguagauggaugguacgguuaucaccaucaaaaugagcaggggucaggauaugcagccgaccugaagagcacacagaaugccauugacgagauuacuaacaaaguaaauucuguuauugaaaagaugaauacacaguucacagcaguagguaaagaguucaaccaccuggaaaaaagaauagagaauuuaaauaaaaaaguugaugaugguuuccuggacauuuggacuuacaaugccgaacuguugguucuauuggaaaaugaaagaacuuuggacuaccacgauucaaaugugaagaacuuauaugaaaagguaagaagccaguuaaaaaacaaugccaaggaaauuggaaacggcugcuuugaauuuuaccacaaaugcgauaacacgugcauggaaagugucaaaaaugggacuuaugacuacccaaaauacucagaggaagcaaaauuaaacagagaagaaauagaugggguaaagcuggaaucaacaaggauuuaccagauuuuggcgaucuauucaacugucgccaguucauugguacugguagucucccugggggcaaucaguuucuggaugugcucuaaugggucucuacaguguagaauauguauuuaa

SEQ ID NO: 36310 - RNA, 1701 nt, Artificial Sequence
  derived and/or modified CDS sequence (wt) from hemagglutinin__InfluenzaA__ADD74838
augaaggcaauacuaguaguucugcuauauacauuugcaaccgcaaaugcagacacauuauguauagguuaucaugcgaacaauucaacagacacuguagacacaguacuagaaaagaauguaacaguaacacacucuguuaaccuucuagaagacaagcauaacgggaaacuaugcaaacuaagagggguagccccauugcauuuggguaaauguaacauugcuggcuggauccugggaaauccagagugugaaucacucuccacagcaagcucaugguccuacauuguggaaacaucuaguucagacaauggaacguguuacccaggagauuucaucaauuaugaggagcuaagagagcaauugagcucagugucaucauuugaaagguuugagauauuccccaagacaaguucauggcccaaucaugacucgaacaaagguguaacggcagcauguccucaugcuggagcaaaaagcuucuacaaaaauuuaauauggcuaguuaaaaaaggaaauucauacccaaagcucagcaaauccuacauuaaugauaaagggaaagaaguccucgugcuauggggcauucaccauccaucuacuagugcugaccaacaaagucucuaucagaaugcagaugcauauguuuuugugggaacaucaagauacagcaagaaguucaagccggaaauagcaauaagacccaaagugagggaucaagaagggagaaugaacuauuacuggacacuaguagagccgggagacaaaauaacauucgaagcaacuggaaaucuagugguaccgagauaugcauucgcaauggaaagaaaugcuggaucugguauuaucaucucagauacaccaguccacgauugcaauacaacuugucagacacccaagggugcuauaaacaccagccucccauuucagaauguacauccgaucacaauuggaaaauguccaaaauauguaaaaagcacaaaauugagacuggccacaggauugaggaaugucccgucuauucaaucuaggggccuauuuggggccauugccgguuucauugaagggggguggacagggaugguagauggaugguacgguuaucaccaucaaaaugagcaggggucaggauaugcagccgaccugaagagcacacagaaugccauugacaagauuacuaacaaaguaaauucuguuauugaaaagaugaauacacaguucacagcaguagguaaagaguucaaccaccuggaaaaaagaauagagaauuuaaauaaaaaaguugaugaugguuuccuggacauuuggacuuacaaugccgaacuguugguucuauuggaaaaugaaagaacuuuggacuaccacgauucaaaugugaagaacuuauaugaaaagguaagaagccaguuaaaaaacaaugccaaggaaauuggaaacggcugcuuugaauuuuaccacaaaugcgauaacacgugcauggaaagugucaaaaaugggacuuaugacuacccaaaauacucagaggaagcaaaauuaaacagagaagaaauagaugggguaaagcuggaaucaacaaggauuuaccagauuuuggcgaucuauucaacugucgccaguucauugguacugguagucucccugggggcaaucaguuucuggaugugcucuaaugggucucuacaguguagaauauguauuuaa

SEQ ID NO: 36311 - RNA, 1701 nt, Artificial Sequence
  derived and/or modified CDS sequence (wt) from hemagglutinin__InfluenzaA__ADD74848
augaaggcaauacuaguaguucugcuauauacauuugcaaccgcaaaugcagacacauuauguauagguuaucaugcgaacaauucaacagacacuguagacacaguacuagaaaagaauguaacaguaacacacucuguuaaccuucuagaagacaagcauaacgggaaacuaugcaaacuaagagggguagccccauugcauuuggguaaauguaacauugcuggcuggauccugggaaauccagagugugaaucacucuccacagcaagcucaugguccuacauuguggaaacaucuaguucagacaauggaacguguuacccaggagauuucaucgauuaugaggagcuaagagagcaauugagcucagugucaucauuugaaagguuugagauauuccccaagacaaguucauggcccaaucaugacucgaacaaagguguaacggcagcauguccucaugcuggagcaaaaagcuucuacaaaaauuuaauauggcuaguuaaaaaaggaaauucauacccaaagcucagcaaauccuacauuaaugauaaagggaaagaaguccucgugcuauggggcauucaccauccaucuacuagugcugaccaacaaagucucuaucagaaugcagaugcauauguuuuuguggggacaucaagauacagcaagaaguucaagccggaaauagcaauaagacccaaagugagggaucaagaagggagaaugaacuauuacuggacacuaguagagccgggagacaaaauaacauucgaagcaacuggaaaucuagugguaccgagauaugcauucgcaauggaaagaaaugcuggaucugguauuaucauuucagauacaccaguccacgauugcaauacaacuugucagacacccaagggugcuauaaacaccagccucccauuucagaauauacauccgaucacaauuggaaaauguccaaaauauguaaaaagcacaaaauugagacuggccacaggauugaggaaugucccgucuauucaaucuagaggccuauuuggggccauugccgguuucauugaagggggguggacagggaugguagauggaugguacgguuaucaccaucaaaaugagcaggggucaggauaugcagccgaccugaagagcacacagaaugccauugacaagauuacuaacaaaguaaauucuguuauugaaaagaugaauacacaguucacagcaguagguaaagaguucaaccaccuggaaaaaagaauagagaauuuaaauaaaaaaguugaugaugguuuccuggacauuuggacuuacaaugccgaacuguugguucuauuggaaaaugaaagaacuuuggacuaccacgauucaaaugugaagaacuuauaugaaaagguaagaagccaguuaaaaaacaaugccaaggaaauuggaaacgguugcuuugaauuuuaccacaaaugcgauaacacgugcauggaaagugucaaaaaugggacuuaugacuacccaaaauacucagaggaagcaaaauuaaacagagaagaaauagaugggguaaagcuggaaucaacaaggauuuaccagauuuuggcgaucuauucaacugucgccaguucauugguacugauagucucccugggggcaaucaguuucuggaugugcucuaaugggucucuacaguguagaauauguauuuga

SEQ ID NO: 36312 - RNA, 1701 nt, Artificial Sequence
  derived and/or modified CDS sequence (wt) from hemagglutinin__InfluenzaA__ADD74858
augaaggcaauacuaguaguucugcuauauacauuugcaaccgcaaaugcagacacauuauguauagguuaucaugcgaacaauucaacagacacuguagacacaguacuagaaaagaauguaacaguaacacacucuguuaaccuucuagaagacaagcauaacgggaaacuaugcaaacuaagagggguagccccauugcauuuggguaaauguaacauugcuggcuggauccugggaaauccagagugugaaucacucuccacagcaagcucaugguccuacauuguggaaacaucuaguucagacaauggaacguguuacccaggagauuucaucaauuaugaggagcuaagagagcaauugagcucagugucaucauuugaaagguuugagauauuccccaagacaaguucauggcccaaucaugacucgaacaaagguguaacggcugcauguccucaugcuggaacaaaaagcuucuacaaaaauuuaauauggcuaguuaaaaaaggaaauucauacccaaagcucagcaaauccuacauuaaugauaaagggaaagaaguccucgugcuauggggcauucaccauccaucuacuagugcugaccaacaaagucucuaucagaaugcagaugcauauguuuuuguggggacaucaagauacagcaagaaguucaagccggaaauagcaauaagacccaaagugagggaucaagaagggagaaugaacuauuacuggacacuaguagagccgggagacaaaauaacauucgaagcaacuggaaaucuagugguaccgagauaugcauucgcaauggaaagaaaugcuggaucugguauuaucaucucagauacaccaguccacgauugcaauacaacuugucagacacccaagggugcuauaaacaccagccucccauuucagaauauacauccgaucacaauuggaaaauguccaaaauauguaaaaagcacaaaauugagacuggccacaggauugaggaaugucccgucuauucaaucuagaggccuauuuggggccauugccgguuucauugaagggggguggacagggaugguagauggaugguacgguuaucaccaucaaaaugagcaggggucaggauaugcagccgaccugaagagcacacagaaugccauugacaagauuacuaacaaaguaaauucuguuauugaaaagaugaauacacaguucacagcaguagguaaagaguucaaccaccuggaaaaaagaauagagaauuuaaauaaaaaaguugaugaugguuuccuggacauuuggacuuacaaugccgaacuguugguucuauuggaaaaugaaagaacuuuggacuaccacgauucaaaugugaagaacuuauaugaaaagguaagaagccaguuaaaaaacaaugccaaggaaauuggaaacggcugcuuugaauuuuaccacaaaugcgauaacacgugcauggaaagugucaaaaaugggacuuaugacuacccaaaauacucagaggaagcaaaauuaaacagagaagaaauagaugggguaaagcuggaaucaacaaggauuuaccagauuuuggcgaucuauucaacugucgccaguucauugguacugguagucucccugggggcaaucaguuucuggaugugcucuaaugggucucuacaguguagaauauguauuuaa

SEQ ID NO: 36313 - RNA, 1701 nt, Artificial Sequence
  derived and/or modified CDS sequence (wt) from hemagglutinin__InfluenzaA__ADD74868
augaaggcaauacuaguaguucugcuauauacauuugcaaccgcaaaugcagacacauuauguauagguuaucaugcaaacaauucaacagacacuguagacacaguacuagaaaagaauguaacaguaacacacucuguuaaccuucuagaagacaagcauaacgggaaacuaugcaaacuaagagggguagccccauugcauuuggguaaauguaacauugcuggcuggauccugggaaauccagagugugaaucacucuccacagcaagcucaugguccuacauuguggaaacaucuaguucagacaauggaacguguuacccaggagauuucaucaauuaugaggagcuaagagagcaauugagcucagugucaucauuugaaagguuugagauauuccccaagacaaguucauggcccaaucaugacucgaacaaagguguaacggcugcauguccucaugcuggagcaaaaagcuucuacaaaaauuuaauauggcuaguuaaaaaagggaauucauacccaaagcucagcaaauccuacauuaaugauaaagggaaagaaguccucgugcuauggggcauucaccauccaucuacuagugcugaccaacaaagucucuaucagaaugcagaugcauauguuuuuguggggacaucaagauacagcaagaaguucaagccggaaauagcaauaagacccaaagugagggaucaagaagggagaaugaacuauuacuggacacuaguagagccgggagacaaaauaacauucgaagcaacuggaaaucuagugguaccgagauaugcauucgcaauggaaagaaaugcuggaucugguauuaucaucucagauacaccaguccacgauugcaauacaacuugucagacacccaagggugcuauaaacaccagccucccauuucagaauauacauccgaucacaauuggaaaauguccaaaauauguaaaaagcacaaaauugagacuggccacaggauugaggaaugucccgucuauucaaucuagaggccuauuuggggccauugccgguuucauugaagggggguggacagggaugguagauggaugguacgguuaucaccaucaaaaugagcaggggucaggauaugcagccgaccugaagagcacacagaaugccauugacaagauuacuaacaaaguaaauucuguuauugaaaagaugaauacacaguucacagcaguagguaaagaguucaaccaccuggaaaaaagaauagagaauuuaaauaaaaaaguugaugaugguuuccuggacauuuggacuuacaaugccgaacuguugguucuauuggaaaaugaaagaacuuuggacuaccacgauucaaaugugaagaacuuauaugaaaagguaagaagccaguuaaaaaacaaugccaaggaaauuggaaacggcugcuuugaauuuuaccacaaaugcgauaacacgugcauggaaagugucaaaaaugggacuuaugacuacccaaaauacucagaggaagcaaaauuaaacagagaagaaauagaugggguaaagcuggaaucaacaaggauuuaccagauuuuggcgaucuauucaacugucgccaguucauugguacugguagucucccugggggcaaucaguuucuggaugugcucuaaugggucucuacaguguagaauauguauuuaa

SEQ ID NO: 36314 - RNA, 1701 nt, Artificial Sequence
  derived and/or modified CDS sequence (wt) from hemagglutinin__InfluenzaA__ADD74878
augaaggcaauacuaguaguucugcuauauacauuugcaaccgcaaaugcagacacauuauguauagguuaucaugcgaacaauucaacagacacuguagauacaguacuagaaaagaauguaacaguaacacacucuguuaaccuucuagaagacaagcauaacgggaaacuaugcaaacuaagagggguagccccauugcauuuggguaaauguaacauugcuggcuggauccugggaaauccagagugugaaucacucuccacagcaagcucaugguccuacauuguggaaacaucuaguucagacaauggaacguguuacccaggagauuucaucaauuaugaggagcuaagagagcaauugagcucagugucaucauuugaaagguuugagauauuccccaagacaaguucauggcccaaucaugacucgaacaaagguguaacggcagcaugcccucaugcuggagcaaaaagcuucuacaaaaauuuaauauggcuaguuaaaaaaggaaauucauacccaaagcucagcaaauccuacauuaaugauaaagggaaagaaguccucgugcuauggggcauucaccauccaucuacuagugcugaccaacaaagucucuaucagaaugcagaugcauauguuuuuguggggacaucaagauacagcaagaaguucaagccggaaauagcaauaagacccaaagugagggaucaagaagggagaaugaacuauuacuggacacuaguagagccgggagacaaaauaacauucgaagcaacuggaaaucuagugguaccgagauaugcauucgcaauggaaagaaaugcuggaucugguauuaucaucucagauacaccaguccacgacugcaauacaacuugucagacacccaagggugcuauaaacaccagccucccauuucagaauauacauccgaucacaauuggaaaauguccaaaauauguaaaaagcacaaaauugagacuggccacaggauugaggaaugucccgucuauucaaucuagaggccuauuuggggccauugccgguuucauugaagggggguggacagggaugguagauggaugguacgguuaucaccaucaaaaugagcaggggucaggauaugcagccgaccugaagagcacacagaaugccauugacaagauuacuaacaaaguaaauucuguuauugaaaagaugaauacacaguucacagcaguagguaaagaguucaaccaccuggaaaaaagaauagagaauuuaaauaaaaaaguugaugaugguuuccuggacauuuggacuuacaaugccgaacuguugguucuauuggaaaaugaaagaacuuuggacuaccacgauucaaaugugaagaacuuauaugaaaagguaagaagccaguuaaaaaacaaugccaaggaaauuggaaacggcugcuuugaauuuuaccacaaaugcgauaacacgugcauggaaagugucaaaaaugggacuuaugacuacccaaaauacucagaggaagcaaaauuaaacagagaagaaauagaugggguaaagcuggaaucaacaaggauuuaccagauuuuggcgaucuauucaacugucgccaguucauugguacugguagucucccugggggcaaucaguuucuggaugugcucuaaugggucucuacaguguagaauauguauuuaa

SEQ ID NO: 36315 - RNA, 1701 nt, Artificial Sequence
  derived and/or modified CDS sequence (wt) from hemagglutinin__InfluenzaA__ADD74888
augaaggcaauacuaguaguucugcuauauacauuugcaaccgcaaaugcagacacauuauguauagguuaucaugcgaacaauucaacagacacuguagacacaguacuagaaaagaauguaacaguaacacacucuguugaccuucuagaagacaagcauaacgggaaacuaugcaaacuaagagggguagccccauugcauuuggguaaauguaacauugcuggcuggauccugggaaauccagagugugaaucacucuccacagcaagcucaugguccuacauuguggaaacaucuaguucagacaauggaacguguuacccaggagauuucaucgauuaugaggagcuaagagagcaauugagcucagugucaucauuugaaagguuugagauauuccccaagacaaauucauggcccaaucaugacucgaacaaagguguaacggcagcauguccucaugcuggagcaaaaagcuucuacaaaaauuuaauauggcuaguuaaaaaaggaaauucauacccaaagcucagcaaauccuacauuaaugauaaagggaaagaaguccucgugcuauggggcauucaccauccaucuacuagugcugaccaacaaagucucuaucagaaugcagaugcauauguuuuuguggggacaucaagauacagcaagaaguucaagccggaaauagcaauaagacccaaagugagggaucaagaagggagaaugaacuauuacuggacacuaguagagccgggagacaaaauaacauucgaagcaacuggaaaucuagugguaccgagauaugcauucgcaauggaaagaaaugcuggaucugguauuaucauuucagauacaccaguccacgauugcaauacaacuugucagacacccaagggugcuauaaacaccagccucccauuucagaauauacauccgaucacaauuggaaaauguccaaaauauguaaaaagcacaaaauugagacuggccacaggauugaggaaugucccgucuauucaaucuagaggccuauuuggggccauugccggcuucauugaagggggguggacagggaugguagauggaugguacgguuaucaccaucaaaaugagcaggggucaggauaugcagccgaccugaagagcacacagaaugccauugacgagauuacuaacaaaguaaauucuguuauugaaaagaugaauacacaguucacagcaguagguaaagaguucaaccaccuggaaaaaagaauagagaauuuaaauaaaaaaguugaugaugguuuccuggacauuuggacuuacaaugccgaacuguugguucuauuggaaaaugaaagaacuuuggacuaccacgauucaaaugugaagaacuuauaugaaaagguaagaagccaguuaaaaaacaaugccaaggaaauuggaaacggcugcuuugaauuuuaccacaaaugcgauaacacgugcauggaaagugucaaaaaugggacuuaugacuacccaaaauacucagaggaagcaaaauuaaacagagaagaaauagaugggguaaagcuggaaucaacaaggauuuaccagauuuuggcgaucuauucaacugucgccaguucauugguacugguagucucccugggggcaaucaguuucuggaugugcucuaaugggucucuacaguguagaauauguauuuaa

SEQ ID NO: 36316 - RNA, 1701 nt, Artificial Sequence
  derived and/or modified CDS sequence (wt) from hemagglutinin__InfluenzaA__ADD74898
augaaggcaauacuaguaguucugcuauauacauuuacaaccgcaaaugcagacacauuauguauagguuaucaugcgaacaauucaacagacacuguagauacaguacuagaaaagaauguaacaguaacacacucuguuaaccuucuagaagacaagcauaacgggaaacuaugcaaacuaagagggguagccccauugcauuuggguaaauguaacauugcuggcuggauccugggaaauccagagugugaaucacucuccacagcaagcucaugguccuacauuguggaaacaucuaguucagacaauggaacguguuacccaggagauuucaucaauuaugaggagcuaagagagcaauugagcucagugucaucauuugaaagguuugagauauuccccaagacaaguucauggcccaaucaugacucgaacaaagguguaacggcagcauguccucaugcuggagcaaaaagcuucuacaaaaauuuaauauggcuaguuaaaaaaggaaauucauacccaaagcucagcaaauccuacauuaaugauaaagggaaagaaguccucgugcuauggggcauucaccauccaucuacuagugcugaccaacaaagucucuaucagaaugcagaugcauauguuuuuguggggacaucaagauacagcaagaaguucaagccggaaauagcaauaagacccaaagugagggaucaagaagggagaaugaacuauuacuggacacuaguagagccgggagacaaaauaacauucgaagcaacuggaaaucuagugguaccgagauaugcauucgcaauggaaagaaaugcuggaucugguauuaucaucucagauacaccaguccacgauugcaauacaacuugucagacacccaagggugcuauaaacaccagccucccauuucagaacauacauccgaucacaauuggaaaauguccaaaauauguaaaaagcacaaaauugagacuggccacaggauugaggaaugucccgucuauucaaucuagaggccuauuuggggccauugccgguuucauugaagggggguggacagggaugguagauggaugguacgguuaucaccaucaaaaugagcaggggucaggauaugcagccgaccugaagagcacacagaaugccauugacaagauuacuaacaaaguaaauucuguuauugaaaagaugaauacacaguucacagcaguagguaaagaguucaaccaccuggaaaaaagaauagagaauuuaaauaaaaaaguugaugaugguuuccuggacauuuggacuuacaaugccgaacuguugguucuauuggaaaaugaaagaacuuuggacuaccacgauucaaaugugaagaacuuauaugaaaagguaagaagccaguuaaaaaacaaugccaaggaaauuggaaacggcugcuuugaauuuuaccacaaaugcgauaacacgugcauggaaagugucaaaaaugggacuuaugacuacccaaaauacucagaggaagcaaaauuaaacagagaagaaauagaugggguaaagcuggaaucaacaaggauuuaccagauuuuggcgaucuauucaacugucgccaguucauugguacugguagucucccugggggcaaucaguuucuggaugugcucuaaugggucucuacaguguagaauauguauuuaa

SEQ ID NO: 36317 - RNA, 1701 nt, Artificial Sequence
  derived and/or modified CDS sequence (wt) from hemagglutinin__InfluenzaA__ADD74908
augaaggcaauacuaguaguucugcuauauacauuugcaaccgcaaaugcagacacauuauguauagguuaucaugcgaacaauucaacagacacuguagacacaguacuagaaaagaauguaacaguaacacacucuguuaaccuucuagaagacaagcauaacgggaaacuaugcaaacuaagagggguagccccauugcauuuggguaaauguaacauugcuggcuggauccugggaaauccagagugugaaucacucuccacagcaagcucaugguccuacauuguggaaacaucuaguucagacaauggaacguguuacccaggagauuucaucgauuaugaggagcuaagagagcaauugagcucagugucaucauuugaaagguuugagauauuccccaagacaaguucauggcccaaucaugacucgaacaaagguguaacggcagcauguccucaugcuggagcaaaaagcuucuacaaaaauuuaauauggcuaguuaaaaaaggaaauuccuacccaaagcucagcaaauccuacauuaaugauaaagggaaagaaguccucgugcuauggggcauucaccauccaucuacuagugcugaccaacaaagucucuaucagaaugcagaugcauauguuuuuguggggacaucaagauacagcaagaaguucaagccggaaauagcaauaagacccaaagugagggaucaagaagggagaaugaacuauuacuggacacuaguagagccgggagacaaaauaacauucgaggcaacuggaaaucuagugguaccgagauaugcauucacaauggaaagaaaugcuggaucugguauuaucauuucagauacaccaguccacgauugcaauacaacuugucagacacccaagggugcuauaaacaccagccucccauuucagaauauacauccgaucacaauuggaaaauguccaaaauauguaaaaagcacaaaauugagacuggccacaggauugaggaaugucccgucuauucaaucuagaggccuauuuggggccauugccgguuucauugaagggggguggacagggaugguagauggaugguacgguuaucaccaucaaaaugagcaggggucaggauaugcagccgaccugaagagcacacagaaugccauugacgagauuacuaacaaaguaaauucuguuauugaaaagaugaauacacaguucacagcaguagguaaagaguucaaccaccuggaaaaaagaauagagaauuuaaauaaaaaaguugaugaugguuuccuggacauuuggacuuacaaugccgaacuguugguucuauuggaaaaugaaagaacuuuggacuaccacgauucaaaugugaagaacuuauaugaaaagguaagaagccaguuaaaaaacaaugccaaggaaauuggaaacggcugcuuugaauuuuaccacaaaugcgauaacacgugcauggaaagugucaaaaaugggacuuaugacuacccaaaauacucagaggaagcaaaauuaaacagagaagaaauagaugggguaaagcuggaaucaacaaggauuuaccagauuuuggcgaucuauucaacugucgccaguucauugguacugguagucucccugggggcaaucaguuucuggaugugcucuaaugggucucuacaguguagaauauguauuuaa

SEQ ID NO: 36318 - RNA, 1701 nt, Artificial Sequence
  derived and/or modified CDS sequence (wt) from hemagglutinin__InfluenzaA__ADD74918
augaaggcaauacuaguaguucugcuauauacauuugcaaccgcaaaugcagacacauuauguauagguuaucaugcgaacaauucaacagacacuguagacacaguacuagaaaagaauguaacaguaacacacucuguuaaccuucuagaagacaagcauaacgggaaacuaugcaaacuaagagggguagccccauugcauuuggguaaauguaacauugcuggcuggauccugggaaauccagagugugaaucacucuccacagcaagcucaugguccuacauuguggaaacaucuaguucagacaauggaacguguuacccaggagauuucaucgauuaugaggagcuaagagagcaauugagcucagugucaucauuugaaagguuugagauauuccccaagacaaguucauggcccaaucaugacucgaacaaagguguaacggcagcauguccucaugcuggagcaaaaagcuucuacaaaaauuuaauauggcuaguuaaaaaaggaaauucauacccaaagcucagcaaauccuacauuaaugauaaagggaaagaaguccucgugcuauggggcauucaccauccaucuacuagugcugaccaacaaagucucuaucagaaugcagaugcauauguuuuuguggggacaucaagauacagcaagaaguucaagccggaaauagcaauaagacccaaagugagggaucaagaagggagaaugaacuauuacuggacacuaguagagccgggagacaaaauaacauucgaagcaacuggaaaucuagugguaccgagauaugcauucgcaauggaaagaaaugcuggaucugguauuaucauuucagauacaccaguccacgauugcaauacaacuugucagacacccaagggugcuauaaacaccagccucccauuucagaauauacauccgaucacaauuggaaaauguccaaaauauguaaaaagcacaaaauugagacuggccacaggauugaggaaugucccgucuauucaaucuagaggccuauuuggggccauugccgguuucauugaagggggguggacagggaugguagauggaugguacgguuaucaccaucaaaaugagcaggggucaggauaugcagccgaccugaagagcacacagaaugccauugacaagauuacuaacaaaguaaauucuguuauugaaaagaugaauacacaguucacagcaguagguaaagaguucaaccaccuggaaaaaagaauagagaauuuaaauaaaaaaguugaugaugguuuccuggacauuuggacuuacaaugccgaacuguugguucuauuggaaaaugaaagaacuuuggacuaccacgauucaaaugugaagaacuuauaugaaaagguaagaagccaguuaaaaaacaaugccaaggaaauuggaaacgguugcuuugaauuuuaccacaaaugcgauaacacgugcauggaaagugucaaaaaugggacuuaugacuacccaaaauacucagaggaagcaaaauuaaacagagaagaaauagaugggguaaagcuggaaucaacaaggauuuaccagauuuuggcgaucuauucaacugucgccaguucauugguacugauagucucccugggggcaaucaguuucuggaugugcucuaaugggucucuacaguguagaauauguauuuaa

SEQ ID NO: 36319 - RNA, 1701 nt, Artificial Sequence
  derived and/or modified CDS sequence (wt) from hemagglutinin__InfluenzaA__ADD74928
augaaggcaauacuaguaguucugcuauauacauuugcaaccgcaaaugcagacacauuauguauagguuaucaugcgaacaauucaacagacacuguagacacaguacuagaaaagaauguaacaguaacacacucuguuaaccuucuagaagacaagcauaacgggaaacuaugcaaacuaagagggguagccccauugcauuuggguaaauguaacauugcuggcuggauccugggaaauccagagugugaaucacucuccacagcaagcucaugguccuacauuguggaaacaucuaguucagacaauggaacguguuacccaggugauuucaucaauuaugaggagcuaagagagcaauugagcucagugucaucauuugaaagguuugagauauuccccaagacaaguucauggcccaaucaugacucgaacaaagguguaacggcugcauguccucaugcuggagcaaaaagcuucuacaaaaauuuaauauggcuaguuaaaaaaggaaauucauacccaaagcucagcaaauccuacauuaaugauaaagggaaagaaguccucgugcuauggggcauucaccauccaucuacuagugcugaccaacaaagucucuaucagaaugcagaugcauauguuuuuguggggacaucaagauacagcaagaaguucaagccggaaauagcaauaagacccaaagugagggaucaagaagggagaaugaacuauuacuggacacuaguagagccgggagacaaaauaacauucgaagcaacuggaaaucuagugguaccgagauaugcauucgcaauggaaagaaaugcuggaucugguauuaucaucucagauacaccaguccacgauugcaauacaacuugucagacacccaagggugcuauaaacaccagccucccauuucagaauauacauccgaucacaauuggaaaauguccaaaauauguaaaaagcacaaaauugagacuggccacaggauugaggaaugucccgucuauucaaucuagaggccuauuuggggccauugccgguuucauugaagggggguggacagggaugguagauggaugguacgguuaucaccaucaaaaugagcaggggucaggauaugcagccgaccugaagagcacacagaaugccauugacaagauuacuaacaaaguaaauucuguuauugaaaagaugaauacacaguucacagcaguagguaaagaguucaaccaccuggaaaaaagaauagagaauuuaaauaaaaaaguugaugaugguuuccuggacauuuggacuuacaaugccgaacuguugguucuauuggaaaaugaaagaacuuuggacuaccacgauucaaaugugaagaacuuauaugaaaagguaagaagccaguuaaaaaacaaugccaaggaaauuggaaacggcugcuuugaauuuuaccacaaaugcgauaacacgugcauggaaagugucaaaaaugggacuuaugacuacccaaaauacucagaggaagcaaaauuaaacagagaagaaauagaugggguaaagcuggaaucaacaaggauuuaccagauuuuggcgaucuauucaacugucgccaguucauugguacugguagucucccugggggcaaucaguuucuggaugugcucuaaugggucucuacaguguagaauauguauuuaa

SEQ ID NO: 36320 - RNA, 1701 nt, Artificial Sequence; identical to SEQ ID NO: 36318
  derived and/or modified CDS sequence (wt) from hemagglutinin__InfluenzaA__ADD74938

SEQ ID NO: 36321 - RNA, 1701 nt, Artificial Sequence
  derived and/or modified CDS sequence (wt) from hemagglutinin__InfluenzaA__ADD74958
augaaggcaauacuaguaguucugcuauauacauuugcaaccgcaaaugcagacacauuauguauagguuaucaugcgaacaauucaacagacacuguagacacaguacuagaaaagaauguaacaguaacacacucuguuaaccuucuagaaaacaagcauaacgggaaacuaugcaaacuaagagggguagccccauugcauuuggguaaauguaacauugcuggcuggauccugggaaauccagagugugaaucacucuccacagcaagcucaugguccuacauuguggaaacaucuaguucagacaauggaacguguuacccaggagauuucaucaauuaugaggagcuaagagagcaauugagcucagugucaucauuugaaagguuugagauauuccccaagacaaguucauggcccaaucaugacucgaacaaagguguaacggcugcauguccucaugcuggagcaaaaagcuucuacaaaaauuuaauauggcuaguuaaaaaaggaaauucauacccaaagcucagcaaauccuacauuaaugauaaagggaaagaaguccucgugcuauggggcauucaccauccaucuacuagugcugaccaacaaagucucuaucagaaugcagaugcauauguuuuuguggggacaucaagauacagcaagaaguucaagccggaaauagcaauaagacccaaagugagggaucaagaagggagaaugaacuauuacuggacacuaguagagccgggagacaaaauaacauucgaagcaacuggaaaucuagugguaccgagauaugcauucgcaauggaaagaaaugcuggaucugguauuaucaucucagauacaccaguccacgauugcaauacaacuugucagacacccaagggugcuauaaacaccagccucccauuucagaauauacauccgaucacaauuggaaaauguccaaaauauguaaaaagcacaaaauugagacuggccacaggauugaggaaugucccgucuauucaaucuagaggccuauuuggggccauugccgguuucauugaagggggguggacagggaugguagauggaugguacgguuaucaccaucaaaaugagcaggggucaggauaugcagccgaccugaagagcacacagaaugccauugacaagauuacuaacaaaguaaauucuguuauugaaaagaugaauacacaguucacagcaguagguaaagaguucaaccaccuggaaaaaagaauagagaauuuaaauaaaaaaguugaugaugguuuccuggacauuuggacuuacaaugccgaacuguugguucuauuggaaaaugaaagaacuuuggacuaccacgauucaaaugugaagaacuuauaugaaaagguaagaagccaguuaaaaaacaaugccaaggaaauuggaaacggcugcuuugaauuuuaccacaaaugcgauaacacgugcauggaaagugucaaaaaugggacuuaugacuacccaaaauacucagaggaagcaaaauuaaacagagaagaaauagaugggguaaagcuggaaucaacaaggauuuaccagauuuuggcgaucuauucaacugucgccaguucauugguacugguagucucccugggggcaaucaguuucuggaugugcucuaaugggucucuacaguguagaauauguauuuaa

SEQ ID NO: 36322 - RNA, 1701 nt, Artificial Sequence; identical to SEQ ID NO: 36226
  derived and/or modified CDS sequence (wt) from hemagglutinin__InfluenzaA__ADD74968

SEQ ID NO: 36323 - RNA, 1701 nt, Artificial Sequence
  derived and/or modified CDS sequence (wt) from hemagglutinin__InfluenzaA__ADD74998
augaaggcaauacuaguaguucugcuauauacauuugcaaccgcaaaugcagacacauuauguauagguuaucaugcgaacaauucaacagacacuguagacacaguacuagaaaagaauguaacaguaacacacucuguuaaccuucuagaagacaagcauaacgggaaacuaugcaaacuaagagggguagccccauugcauuuggguaaauguaacauugcuggcuggauccugggaaauccagagugugaaucacucuccacagcaagcucaugguccuacauuguggaaacaucuaguucagacaauggaacguguuacccaggagauuucaucgauuaugaggagcuaagagagcaauugagcucagugucaucauuugaaagguuugagauauuccccaagacaaguucauggcccaaucaugacucgaacaaagguguaacggcagcauguccucaugcuggagcaaagagcuucuauaaaaauuuaauauggcuaguuaaaaaaggaaauucauacccaaagcucagcaaauccuacauuaaugauaaagggaaagaaguccucgugcuauggggcauucaccauccaucuacuagugcugaccaacaaagucucuaucagaaugcagaugcauauguuuuuguggggacaucaagauacagcaagaaguucaagccggaaauagcaauaagacccaaagugagggaucaagaagggagaaugaacuauuacuggacacuaguagagccgggagacaaaauaacauucgaagcaacuggaaaucuagugguaccgagauaugcauucgcaauggaaagaaaugcuggaucugguauuaucauuucagauacaccaguccacgauugcaauacaacuugucagacacccaagggugcuauaaacaccagccucccauuucagaauauacauccgaucacaauuggaaaauguccaaaauauguaaaaagcacaaaauugagacuggccacaggauugaggaaugucccgucuauucaaucuagaggccuauuuggggccauugccgguuucauugaagggggguggacagggaugguagauggaugguacgguuaucaccaucaaaaugagcgggggucaggauaugcagccgaccugaagagcacacagaaugccauugacaagauuacuaacaaaguaaauucuguuauugaaaagaugaauacacaguucacagcaguagguaaagaguucaaccaccuggaaaaaagaauagagaauuuaaauaaaaaaguugaugaugguuuccuggacauuuggacuuacaaugccgaacuguugguucuauuggaaaaugaaagaacuuuggacuaccacgauucaaaugugaagaacuuauaugaaaagguaagaagccaguuaaaaaacaaugccaaggaaauuggaaacggcugcuuugaauuuuaccacaaaugcgauaacacgugcauggaaagugucaaaaaugggacuuaugacuacccaaaauacucagaggaagcaaaauuaaacagagaagaaauagaugggguaaagcuggaaucaacaaggauuuaccagauuuuggcgaucuauucaacugucgccaguucauugguacugguagucucccugggggcaaucaguuucuggaugugcucuaaugggucucuacaguguagaauauguauuuaa

SEQ ID NO: 36324 - RNA, 1701 nt, Artificial Sequence; identical to SEQ ID NO: 36222
  derived and/or modified CDS sequence (wt) from hemagglutinin__InfluenzaA__ADD75008

SEQ ID NO: 36325 - RNA, 1701 nt, Artificial Sequence; identical to SEQ ID NO: 35845
  derived and/or modified CDS sequence (wt) from hemagglutinin__InfluenzaA__ADD75018

SEQ ID NO: 36326 - RNA, 1701 nt, Artificial Sequence
  derived and/or modified CDS sequence (wt) from hemagglutinin__InfluenzaA__ADD75028
augaaggcaauacuaguaguucugcuauauacauuugcaaccgcaaaugcagacacauuauguauagguuaucaugcgaacaauucaacagacacuguagacacaguacuagaaaagaauguaacaguaacacacucuguuaaccuucuagaagacaagcauaacgggaaacuaugcaaacuaagagggguagccccauugcauuuggguaaauguaacauugcuggcuggauccugggaaauccagagugugaaucacucuccacagcaagcucaugguccuacauuguggaaacaucuaguucagacaauggaacguguuacccaggagauuucaucgauuaugaggagcuaagagagcaauugagcucagugucaucauuugaaagguuugagauauuccccaagacaaguucauggcccaaucaugacucgaacaaagguguaacggcagcauguccucaugcuggagcaaaaagcuucuacaaaaauuuaauauggcuaguuaaaaaaggaaauucauacccaaagcucagcaaauccuacauuaaugauaaagggaaagaaguccucgugcuauggggcauucaccauccaucuacuagugcugaccaacaaagucucuaucagaaugcagaugcauauguuuuuguggggacaucaagauacagcaagaaguucaagccggaaauagcaauaagacccaaagugagggaucaagaagggagaaugaacuauuacuggacacuaguagagccgggagacaaaauaacauucgaagcaacuggaaaucuagugguaccgagauacgcauucgcaauggaaagaaaugcuggaucugguauuaucauuucagauacaccaguccacgauugcaauacaacuugucaaacacccaagggugcuauaaacaccagccucccauuucagaauauacauccgaucacaauuggaaaauguccaaaauauguaaaaagcacaaaauugagacuggccacaggauugaggaaugucccgucuauucaaucuagaggccuauuuggggccauugccggcuucauugaagggggguggacagggaugguagauggaugguacgguuaucaccaucaaaaugagcaggggucaggauaugcagccgaccugaagagcacacagaaugccauugacaagauuacuaacaaaguaaauucuguuauugaaaagaugaauacacaguucacagcaguagguaaagaguucaaccaccuggaaaaaagaauagagaauuuaaauaaaaaaguugaugaugguuuccuggacauuuggacuuacaaugccgaacuguugguucuauuggaaaaugaaagaacuuuggacuaccacgauucaaaugugaagaacuuauaugaaaagguaagaagccaguuaaaaaacaaugccaaggaaauuggaaacggcugcuuugaauuuuaccacaaaugcgauaacacgugcauggaaagugucaaaaaugggacuuaugacuacccaaaauacucagaggaagcaaaauuaaacagagaagaaauagaugggguaaagcuggaaucaacaaggauuuaccagauuuuggcgaucuauucaacugucgccaguucauugguacugguagucucccugggggcaaucaguuucuggaugugcucuaaugggucucuacaguguagaauauguauuuaa

SEQ ID NO: 36327 - RNA, 1701 nt, Artificial Sequence
  derived and/or modified CDS sequence (wt) from hemagglutinin__InfluenzaA__ADD75058
augaaggcaauacuaguaguucugcuauauacauuugcaaccgcaaaugcagacacauuauguauagguuaucaugcgaacaauucaacagacacuguagacacaguacuagaaaagaauguaacaguaacacacucuguuaaccuucuagaagacaagcauaacgggaaacuaugcaaacuaagagggguagccccauugcauuuggguaaauguaacauugcuggcuggauccugggaaauccagagugugaaucacucuccacagcaagcucaugguccuacauuguggaaacaucuaguucagacaauggaacguguuacccaggagauuucaucgauuaugaggagcuaagagagcaauugagcucagugucaucauuugaaagguuugagauauuccccaagacaaguucauggcccaaucaugacucgaacaaagguguaacggcagcauguccucaugcuggagcaaaaagcuucuacaaaaauuuaauauggcuaguuaaaaaaggaaauucauacccaaagcucagcaaauccuacauuaaugauaaagggaaagaaguccuagugcuauggggcauucaccauccaucuacuagugcugaccaacaaagucucuaucagaaugcagaugcauauguuuuuguggggacaucaagauacagcaagaaguucaagccggaaauagcaauaagacccaaagugagggaucaagaagggagaaugaacuauuacuggacacuaguagagccgggagacaaaauaacauucgaagcaacuggaaaucuagugguaccgagauaugcauucgcaauggaaagaaaugcuggaucugguauuaucauuucagauacaccaguccacgauugcaauacaacuugucagacacccaagggugcuauaaacaccagccucccauuucagaauauacauccgaucacaauuggaaaauguccaaaauauguaaaaagcacaaaauugagacuggccacaggauugaggaauaucccgucuauucaaucuagaggccuauuuggggccauugccgguuucauugaagggggguggacagggaugguagauggaugguacgguuaucaccaucaaaaugagcaggggucaggauaugcagccgaccugaagagcacacagaaugccauugacgagauuacuaacaaaguaaacucuguuauugaaaagaugaauacacaguucacagcaguagguaaagaguucaaccaccuggaaaaaagaauagagaauuuaaauaaaaagguugaugaugguuuccuggacauuuggacuuacaaugccgaacuguugguucuauuggaaaaugaaagaacuuuggacuaccacgauucaaaugugaagaacuuauaugaaaagguaagaagccaguuaaaaaacaaugccaaggaaauuggaaacggcugcuuugaauuuuaccacaaaugcgauaacacgugcauggaaagugucaaaaaugggacuuaugacuacccaaaauacucagaggaagcaaaauuaaacagagaagaaauagaugggguaaagcuggaaucaacaaggauuuaccagauuuuggcgaucuauucaacugucgccaguucauugguacugguagucucccugggggcaaucaguuucuggaugugcucuaaugggucucuacaguguagaauauguauuuaa

SEQ ID NO: 36328 - RNA, 1701 nt, Artificial Sequence
  derived and/or modified CDS sequence (wt) from hemagglutinin__InfluenzaA__ADD75088
augaaggcaauacuaguaguucugcuauauacauuugcaaccgcaaaugcagacacauuauguauagguuaucaugcgaacaauucaacagacacuguagacacaguacuagaaaagaauguaacaguaacacacucuguuaaccuucuagaagacaagcauaacgggaaacuaugcaaacuaagagggguagccccauugcauuuggguaaauguaacauugcuggcuggauccugggaaauccagagugugaaucacucuccacagcaagcucaugguccuacauuguggaaacaucuaguucagacaauggaacguguuacccaggagauuucaucgauuaugaggagcuaagagagcaauugagcucagugucaucauuugaaagguuugagauauuccccaagacaaguucauggcccaaucaugacucgaacaaagguguaacggcagcauguccucaugcuggagcaaaaagcuucuacaaaaauuuaauauggcuaguuaaaaaaggaaauucauacccaaagcucagcaaauccuacauuaaugauaaagggaaagaaguccucgugcuauggggcauucaccauccaucuacuagugcugaccaacaaagucucuaucagaaugcagaugcauauguuuuuguggggacaucaagauacagcaagaaguucaagccggaaauagcaauaagacccaaagugagggaucaagaagggagaaugaacuauuacuggacacuaguagagccgggagacaaaauaacauucgaagcaacuggaaaucuagugguaccgagauaugcauucgcaauggaaagaaaugcuggaucugguauuaucauuucagauacaccaguccaugauugcaauacaacuugucagacacccaagggugcuauaaacaccagccucccauuucagaauauacauccgaucacaauuggaaaauguccaaaauauguaaaaagcacaaaauugagacuggccacaggauugaggaaugucccgucuauucaaucuagaggccuauuuggggccauugccgguuucauugaagggggguggacagggaugguagauggaugguacgguuaucaccaucaaaaugagcaggggucaggauaugcagccgaccugaagagcacacagcaugccauugacgagauuacuaacaaaguaaauucuguuauugaaaagaugaauacacaguucacagcaguagguaaagaguucaaccaccuggaaaaaagaauagagaauuuaaauaaaaaaguugaugaugguuuccuggacauuuggacuuacaaugccgaacuguugguucuauuggaaaaugaaagaacuuuggacuaccacgauucaaaugugaagaacuuauaugaaaagguaagaagccaguuaaaaaacaaugccaaggaaauuggaaacggcugcuuugaauuuuaccacaaaugcgauaacacgugcauggaaagugucaaaaaugggacuuaugacuacccaaaauacucagaggaagcaaaauuaaacagagaagaaauagaugggguaaagcuggaaucaacaaggauuuaccagauuuuggcgaucuauucaacugucgccaguucauugguacugguagucucccugggggcaaucaguuucuggaugugcucuaaugggucucuacaguguagaauauguauuuaa

SEQ ID NO: 36329 - RNA, 1701 nt, Artificial Sequence; identical to SEQ ID NO: 34714
  derived and/or modified CDS sequence (wt) from hemagglutinin__InfluenzaA__ADD75098

SEQ ID NO: 36330 - RNA, 1701 nt, Artificial Sequence
  derived and/or modified CDS sequence (wt) from hemagglutinin__InfluenzaA__ADD75108
augaaggcaauacuaguaguucugcuauauacguuugcaaccgcaaaugcagacacauuauguauagguuaucaugcgaacaauucaacagacacuguagacacaguacuagaaaagaauguaacaguaacacacucuguuaaccuucuagaagacaagcauaacgggaaacuaugcaaacuaagagggguagccccauugcauuuggguaaauguaacauugcuggcuggauccugggaaauccagagugugaaucacucuccacagcaagcucaugguccuacauuguggaaacaucuaguucagacaauggaacguguuacccaggagauuucaucgauuaugaggagcuaagagagcaauugagcucagugucaucauuugaaagguuugagauauuccccaagacaaguucauggcccaaucaugacucgaacaaagguguaacggcagcauguccucaugcuggagcaaaaagcuucuacaaaaauuuaauauggcuaguuaaaaaaggaaauucauacccaaagcucagcaaauccuacauuaaugauaaagggaaagaaguccucgugcuauggggcauucaccauccaucuacuagugcugaccaacaaagucucuaucagaaugcagaugcauauguuuuuguggggacaucaagauacagcaagaaguucaagccggaaauagcaauaagacccaaagugagggaucaagaagggagaaugaacuauuacuggacacuaguagagccgggagacaaaauaacauucgaagcaacuggaaaucuagugguaccgagauaugcauucgcaauggaaagaaaugcuggaucugguauuaucauuucagauacaccaguccacgauugcaauacaacuugucagacacccaagggugcuauaaacaccagccucccauuucagaauauacauccgaucacaauuggaaaauguccaaaauauguaaaaagcacaaaauugagacuggccacaggauugaggaauaucccgucuauucaaucuagaggccuauuuggggccauugccgguuucauugaagggggguggacagggaugguagauggaugguacgguuaucaccaucaaaaugagcaggggucaggauaugcagccgaccugaagagcacacagaaugccauugacaagauuacuaacaaaguaaauucuguuauugaaaagaugaauacacaguucacagcaguagguaaagaguucaaccaccuggaaaaaagaauagagaauuuaaauaaaaagguugaugaugguuuccuggacauuuggacuuacaaugccgaacuguugguucuauuggaaaaugaaagaacuuuggacuaccacgauucaaaugugaagaacuuauaugaaaagguaagaagccaguuaaaaaacaaugccaaggaaauuggaaacggcugcuuugaauuuuaccacaaaugcgauaacacgugcauggaaagugucaaaaaugggacuuaugacuacccaaaauacucagaggaagcaaaauuaaacagagaagaaauagaugggguaaagcuggaaucaacaaggauuuaccagauuuuggcgaucuauucaacugucgccaguucauugguacugguagucucccugggggcaaucaguuucuggaugugcucuaaugggucucuacaguguagaauauguauuuaa

SEQ ID NO: 36331 - RNA, 1701 nt, Artificial Sequence
  derived and/or modified CDS sequence (wt) from hemagglutinin__InfluenzaA__ADD75118
augaaggcaauacuaguaguucugcuauauacauuugcaaccgcaaaugcagacacauuauguauagguuaucaugcgaacaauucaacagacacuguagacacaguacuagaaaagaauguaacaguaacacacucuguuaaccuccuagaagacaagcauaacgggaaacuaugcaaacuaagagggguagccccauugcauuuggguaaauguaacauugcuggcuggauccugggaaauccagagugugaaucacucuccacagcaagcucaugguccuacauuguggaaacaucuaguucagacaauggaacguguuacccaggagauuucaucgauuaugaggagcuaagagagcaauugagcucagugucaucauuugaaagguuugagauauuccccaaaacaaguucauggcccaaucaugacucgaacaaagguguaacggcagcauguccucaugcuggagcaaaaagcuucuacaaaaauuuaauauggcuaguuaaaaaaggaaauucauacccaaagcucagcaaauccuacauuaaugauaaagggaaagaaguccucgugcuauggggcauucaccauccaucuacuagugcugaccaacaaagucucuaucagaaugcagaugcauauguuuuuguggggacaucaagauacagcaagaaguucaagccggaaauagcaauaagacccaaagugagggaucaagaagggagaaugaacuauuacuggacacuaguagagccgggagacaaaauaacauucgaagcaacuggaaaucuagugguaccgagauaugcauucgcaauggaaagaaaugcuggaucugguauuaucauuucagauacaccaguccacgauugcaauacaacuugucagacacccaagggugcuauaaacaccagccucccauuucagaauauacauccgaucacaauuggaaaauguccaaaauauguaaaaagcacaaaauugagacuggccacaggauugaggaaugucccgucuauucaaucuagaggccuauuuggggccauugccgguuucauugaagggggguggacagggaugguagauggaugguacgguuaucaccaucaaaaugagcaggggucaggauaugcagccgaccugaagagcacacagaaugccauugacgagauuacuaacaaaguaaauucuguuauugaaaagaugaauacacaguucacagcaguagguaaagaguucaaccaccuggaaaaaagaauagagaauuuaaauaaaaagguugaugaugguuuccuggacauuuggacuuacaaugccgaacuguugguucuauuggaaaaugaaagaacuuuggacuaccacgauucaaaugugaagaacuuauaugaaaagguaagaagccaguuaaaaaacaaugccaaggaaauuggaaacggcugcuuugaauuuuaccacaaaugcgauaacacgugcauggaaagugucaaaaaugggacuuaugacuacccaaaauacucagaggaagcaaaauuaaacagagaagaaauagaugggguaaagcuggaaucaacaaggauuuaccagauuuuggcgaucuauucaacugucgccaguucauugguacugguagucucccugggggcaaucaguuucuggaugugcucuaaugggucucuacaguguagaauauguauuuaa

SEQ ID NO: 36332 - RNA, 1701 nt, Artificial Sequence
  derived and/or modified CDS sequence (wt) from hemagglutinin__InfluenzaA__ADD75128
augaaggcaauacuaguaguucugcuauauacauuugcaaccgcaaaugcagacacauuauguauagguuaucaugcgaacaauucaacagacacuguagacacaguacuagaaaagaauguaacaguaacacacucuguuaaccuucuagaagacaagcauaacgggaaacuaugcaaacuaagagggguagccccauugcauuuggguaaauguaacauugcuggcuggauccugggaaauccagagugugaaucacucuccacagcaagcucaugguccuacauuguggaaacaucuaguucagacaauggaacguguuacccaggagauuucaucgauuaugaggagcuaagagagcaauugagcucagugucaucauuugaaagguuugagauauuccccaagacaaguucauggcccaaucaugacucgaacaaagguguaacggcagcauguccucaugcuggggcaaaaagcuucuacaaaaauuuaauauggcuaguuaaaaaaggaaauucauacccaaagcucagcaaauccuacauuaaugauaaagggaaagaaguccucgugcuauggggcauucaccauccaucuacuagugcugaccaacaaagucucuaucagaaugcagaugcauauguuuuuguggggacaucaagauacagcaagaaguucaagccggaaauagcaauaagacccaaagugagggaacaagaagggagaaugaacuauuacuggacacuaguagagccgggagacaaaauaacauucgaagcaacuggaaaucuagugguaccgagauaugcauucgcaauggaaagaaaugcuggaucugguauuaucauuucagauacaccaguccacgauugcaauacaacuugucagacacccaagggugcuauaaacaccagucucccauuucagaauauacauucgaucacaauuggaaaauguccaaaauauguaaaaagcacaaaauugagacuggccacaggauugaggaaugucccgucuauucaaucuagaggccuauuuggggccauugccgguuucauugaagggggguggacagggaugguagauggaugguacgguuaucaccaucaaaaugagcaggggucaggauaugcagccgaccugaagagcacacagaaugccauugacgagauuacuaacaaaguaaauucuguuauugaaaagaugaauacacaguucacagcaguagguaaagaguucaaccaccuggaaaaaagaauagagaauuuaaauaaaaaaguugaugaugguuuccuggacauuuggacuuacaaugccgaacuguugguucuauuggaaaaugaaagaacuuuggacuaccacgauucaaaugugaagaacuuauaugaaaagguaagaagccaguuaaaaaacaaugccaaggaaauuggaaacggcugcuuugaauuuuaccacaaaugcgauaacacgugcauggaaagugucaaaaaugggacuuaugacuacccaaaauacucagaggaagcaaaauuaaacagagaagaaauagaugggguaaagcuggaaucaacaaggauuuaccagauuuuggcgaucuauucaacugucgccaguucauugguacugguagucucccugggggcaaucaguuucuggaugugcucuaaugggucucuacaguguagaauauguauuuaa

SEQ ID NO: 36333 - RNA, 1701 nt, Artificial Sequence; identical to SEQ ID NO: 34714
  derived and/or modified CDS sequence (wt) from hemagglutinin__InfluenzaA__ADD75138

SEQ ID NO: 36334 - RNA, 1701 nt, Artificial Sequence; identical to SEQ ID NO: 35845
  derived and/or modified CDS sequence (wt) from hemagglutinin__InfluenzaA__ADD75148

SEQ ID NO: 36335 - RNA, 1701 nt, Artificial Sequence; identical to SEQ ID NO: 35430
  derived and/or modified CDS sequence (wt) from hemagglutinin__InfluenzaA__ADD75158

SEQ ID NO: 36336 - RNA, 1701 nt, Artificial Sequence
  derived and/or modified CDS sequence (wt) from hemagglutinin__InfluenzaA__ADD84494
augaaggcaauacuaguaguucugcuauauacauuugcaaccgcaaaugcagacacauuauguauagguuaucaugcgaacaauucaacagacacuguagacacaguacuagaaaagaauguaacaguaacacacucuguuaaccuucuagaagacaagcauaacgggaaacuaugcaaacuaagagggguagccccauugcauuuggguaaauguaacauugcuggcuggauccugggaaauccagagugugaaucacucuccacagcaagcucaugguccuacauuguggaaacaucuaguucagacaauggaacguguuacccaggagauuucaucgauuaugaggagcuaagagagcaauugagcucagugucaucauuugaaagguuugagauauuccccaagauaaguucauggcccaaucaugacccgaacaaagguguaacggcagcauguccucaugcuggagcaaaaagcuucuacaaaaauuuaauauggcuaguuaaaaaaggaaauucauacccaaagcucagcaaauccuacauuaaugauaaagggaaagaaguccucgugcuauggggcauucaccauccaucuacuagugcugaccaacaaagucucuaucagaaugcagaugcauauguuuuuguggggacaucaagauacagcaagaaguucaagccggaaauagcaauaagacccaaagugagggaucaagaagggagaaugaacuauuacuggacacuaguagagccgggagacaaaauaacauucgaagcaacuggaaaucuagugguaccgagauaugcauucgcaauggaaagaaaugcuggaucugguauuaucauuucagauacaccaguccacgguugcaauacaacuugucagacacccaagggugcuauaaacaccagccucccauuucagaauauacauccgaucacaauuggaaaauguccaaaauauguaaaaagcacaaaauugagacuggccacaggauugaggaaugucccgucuauucaaucuagaggccuauuuggggccauugccgguuucauugaagggggguggacagggaugguagauggaugguacgguuaucaccaucaaaaugagcaggggucaggauaugcagccgaccugaagagcacacagaaugccauugacgagauuacuaacaaaguaaauucuguuauugaaaagaugaauacacaguucacagcaguagguaaagaguucaaccaccuggaaaaaagaauagagaauuuaaauaaaaaaguugaugaugguuuccuggacauuuggacuuacaaugccgaacuguugguucuauuggaaaaugaaagaacuuuggacuaccacgauucaaaugugaagaacuuauaugaaaagguaagaagccaguuaaaaaacaaugccaaggaaauuggaaacggcugcuuugaauuuuaccacaaaugcgauaacacgugcauggaaagugucaaaaaugggacuuaugacuacccaaaauacucagaggaagcaaaauuaaacagagaagaaauagaugggguaaagcuggaaucaacaaggauuuaccagauuuuggcgaucuauucaacugucgccaguucauugguacugguagucucccugggggcaaucaguuucuggaugugcucuaaugggucucuacaguguagaauauguauuuaa

SEQ ID NO: 36337 - RNA, 1701 nt, Artificial Sequence
  derived and/or modified CDS sequence (wt) from hemagglutinin__InfluenzaA__ADD84495
augaaggcaauacuaguaguucugcuauauacauuugcaaccgcaaaugcagacacauuauguauagguuaucaugcgaacaauucaacagacacuguagacacaguacuagaaaagaauguaacaguaacacacucuguuaaccuucuagaagacaagcauaacgggaaacuaugcaaacuaagagggguagccccauugcauuuggguaaauguaacauugcuggcuggauccugggaaauccagagugugaaucacucuccacagcaagcucaugguccuacauuguggaaacaucuaguucagacaauggaacguguuacccaggagauuucaucgauuaugaggagcuaagagagcaauugagcucagugucaucauuugaaagguuugagauauuccccaagauaaguucauggcccaaucaugacccgaacaaagguguaacggcagcauguccucaugcuggagcaaaaagcuucuacaaaaauuuaauauggcuaguuaaaaaaggaaauucauacccaaagcucagcaaauccuacauuaaugauaaagggaaagaaguccucgugcuauggggcauucaccauccaucuacuagugcugaccaacaaagucucuaucagaaugcagaugcauauguuuuuguggggacaucaagauacagcaagaaguucaagccggaaauagcaauaagacccaaagugagggaucaagaagggagaaugaacuauuacuggacacuaguagagccgggagacaaaauaacauucgaagcaacuggaaaucuagugguaccgagauaugcauucgcaauggaaagaaaugcuggaucugguauuaucauuucagauacaccaguccacgauugcaauacaacuugucagacacccaagggugcuauaaacaccagccucccauuucagaauauacauccgaucacaauuggaaaauguccaaaauauguaaaaagcacaaaauugagacuggccacaggauugaggaaugucccgucuauucaaucuagaggccuauuuggggccauugccgguuucauugaagggggguggacagggaugguagauggaugguacgguuaucaccaucaaaaugagcaggggucaggauaugcagccgaccugaagagcacacagaaugccauugacgagauuacuaacaaaguaaauucuguuauugaaaagaugaauacacaguucacagcaguagguaaagaguucaaccaccuggaaaaaagaauagagaauuuaaauaaaaaaguugaugaugguuuccuggacauuuggacuuacaaugccgaacuguugguucuauuggaaaaugaaagaacuuuggacuaccacgauucaaaugugaagaacuuauaugaaaagguaagaagccaguuaaaaaacaaugccaaggaaauuggaaacggcugcuuugaauuuuaccacaaaugcgauaacacgugcauggaaagugucaaaaaugggacuuaugacuacccaaaauacucagaggaagcaaaauuaaacagagaagaaauagaugggguaaagcuggaaucaacaaggauuuaccagauuuuggcgaucuauucaacugucgccaguucauugguacugguagucucccugggggcaaucaguuucuggaugugcucuaaugggucucuacaguguagaauauguauuuaa

SEQ ID NO: 36338 - RNA, 1701 nt, Artificial Sequence
  derived and/or modified CDS sequence (wt) from hemagglutinin__InfluenzaA__ADD84496
augaaggcaauacuaguaguucugcuauauacauuugcaaccgcaaaugcagacacauuauguauagguuaucaugcgaacaauucaacagacacuguagacacaguacuagaaaagaauguaacaguaacacacucuguuaaccuucuagaagacaagcauaacgggaaacuaugcaaacuaagagggguagccccauugcauuuggguaaauguaacauugcuggcuggauccugggaaauccagagugugaaucacucuccacagcaagcucaugguccuacauuguggaaacaucuaguucagacaauggaacguguuacccaggagauuucaucgauuaugaggagcuaagagagcaauugagcucagugucaucauuugaaagguuugagauauuccccaagauaaguucauggcccaaucaugacccgaacaaagguguaacggcagcauguccucaugcuggagcaaaaagcuucuacaaaaauuuaauauggcuaguuaaaaaaggaaauucauacccaaagcucagcaaauccuacauuaaugauaaagggaaagaaguccucgugcuauggggcauucaccauccaucuacuagugcugaccaacaaagucucuaucagaaugcagaugcauauguuuuuguggggucaucaagauacagcaagaaguucaagccggaaauagcaauaagacccaaagugagggaucaagaagggagaaugaacuauuacuggacacuaguagagccgggagacaaaauaacauucgaagcaacuggaaaucuagugguaccgagauaugcauucgcaauggaaagaaaugcuggaucugguauuaucauuucagauacaccaguccacgauugcaauacaacuugucagacacccaagggugcuauaaacaccagccucccauuucagaauauacauccgaucacaauuggaaaauguccaaaauauguaaaaagcacaaaauugagacuggccacaggauugaggaaugucccgucuauucaaucuagaggccuauuuggggccauugccgguuucauugaagggggguggacagggaugguagauggaugguacgguuaucaccaucaaaaugagcaggggucaggauaugcagccgaccugaagagcacacagaaugccauugacgagauuacuaacaaaguaaauucuguuauugaaaagaugaauacacaguucacagcaguagguaaagaguucaaccaccuggaaaaaagaauagagaauuuaaauaaaaaaguugaugaugguuuccuggacauuuggacuuacaaugccgaacuguugguucuauuggaaaaugaaagaacuuuggacuaccacgauucaaaugugaagaacuuauaugaaaagguaagaagccaguuaaaaaacaaugccaaggaaauuggaaacggcugcuuugaauuuuaccacaaaugcgauaacacgugcauggaaagugucaaaaaugggacuuaugacuacccaaaauacucagaggaagcaaaauuaaacagagaagaaauagaugggguaaagcuggaaucaacaaggauuuaccagauuuuggcgaucuauucaacugucgccaguucauugguacugguagucucccugggggcaaucaguuucuggaugugcucuaaugggucucuacaguguagaauauguauuuaa

SEQ ID NO: 36339 - RNA, 1701 nt, Artificial Sequence; identical to SEQ ID NO: 36337
  derived and/or modified CDS sequence (wt) from hemagglutinin__InfluenzaA__ADD84497

SEQ ID NO: 36340 - RNA, 1701 nt, Artificial Sequence
  derived and/or modified CDS sequence (wt) from hemagglutinin__InfluenzaA__ADD84498
augaaggcaauacuaguaguucugcuauauacauuugcaaccgcaaaugcagacacauuauguauagguuaucaugcgaacaauucaacagacacuguagucacaguacuagaaaagaauguaacaguaacacacucuguuaaccuucuagaagacaagcauaacgggaaacuaugcaaacuaagagggguagccccauugcauuuggguaaauguaacauugcuggcuggauccugggaaauccagagugugaaucacucuccacagcaagcucaugguccuacauuguggaaacaucuaguucagacaauggaacguguuacccaggagauuucaucgauuaugaggagcuaagagagcaauugagcucagugucaucauuugaaagguuugagauauuccccaagauaaguucauggcccaaucaugacccgaacaaagguguaacggcagcauguccucaugcuggagcaaaaagcuucuacaaaaauuuaauauggcuaguuaaaaaaggaaauucauacccaaagcucagcaaauccuacauuaaugauaaagggaaagaaguccucgugcuauggggcauucaccauccaucuacuagugcugaccaacaaagucucuaucagaaugcagaugcauauguuuuuguggggucaucaagauacagcaagaaguucaagccggaaauagcaauaagacccaaagugagggaucaagaagggagaaugaacuauuacuggacacuaguagagccgggagacaaaauaacauucgaagcaacuggaaaucuagugguaccgagauaugcauucgcaauggaaagaaaugcuggaucugguauuaucauuucagauacaccaguccacgauugcaauacaacuugucagacacccaagggugcuauaaacaccagccucccauuucagaauauacauccgaucacaauuggaaaauguccaaaauauguaaaaagcacaaaauugagacuggccacaggauugaggaaugucccgucuauucaaucuagaggccuauuuggggccauugccgguuucauugaagggggguggacagggaugguagauggaugguacgguuaucaccaucaaaaugagcaggggucaggauaugcagccgaccugaagagcacacagaaugccauugacgagauuacuaacaaaguaaauucuguuauugaaaagaugaauacacaguucacagcaguagguaaagaguucaaccaccuggaaaaaagaauagagaauuuaaauaaaaaaguugaugaugguuuccuggacauuuggacuuacaaugccgaacuguugguucuauuggaaaaugaaagaacuuuggacuaccacgauucaaaugugaagaacuuauaugaaaagguaagaagccaguuaaaaaacaaugccaaggaaauuggaaacggcugcuuugaauuuuaccacaaaugcgauaacacgugcauggaaagugucaaaaaugggacuuaugacuacccaaaauacucagaggaagcaaaauuaaacagagaagaaauagaugggguaaagcuggaaucaacaaggauuuaccagauuuuggcgaucuauucaacugucgccaguucauugguacugguagucucccugggggcaaucaguuucuggaugugcucuaaugggucucuacaguguagaauauguauuuaa

SEQ ID NO: 36341 - RNA, 1701 nt, Artificial Sequence
  derived and/or modified CDS sequence (wt) from hemagglutinin__InfluenzaA__ADD84499
augaaggcaauacuaguaguucugcuauauacauuugcaaccgcaaaugcagacacauuauguauagguuaucaugcuaacaauucaacagacacuguagacacaguacuagaaaagaauguaacaguaacacacucuguuaaccuucuagaagacaagcauaacgggaaacuaugcaaacuaagagggguagccccauugcauuuggguaaauguaacauugcuggcuggauccugggaaauccagagugugaaucacucuccacagcaagcucaugguccuacauuguggaaacaucuaguucagacaauggaacguguuacccaggagauuucaucgauuaugaggagcuaagagagcaauugagcucagugucaucauuugaaagguuugagauauuccccaagauaaguucauggcccaaucaugacccgaacaaagguguaacggcagcauguccucaugcuggagcaaaaagcuucuacaaaaauuuaauauggcuaguuaaaaaaggaaauucauacccaaagcucagcaaauccuacauuaaugauaaagggaaagaaguccucgugcuauggggcauucaccauccaucuacuagugcugaccaacaaagucucuaucagaaugcagaugcauauguuuuuguggggacaucaagauacagcaagaaguucaagccggaaauagcaauaagacccaaagugagggaucaagaagggagaaugaacuauuacuggacacuaguagagccgggagacaaaauaacauucgaagcaacuggaaaucuagugguaccgagauaugcauucgcaauggaaagaaaugcuggaucugguauuaucauuucagauacaccaguccacgauugcaauacaacuugucagacacccaagggugcuauaaacaccagccucccauuucagaauauacauccgaucacaauuggaaaauguccaaaauauguaaaaagcacaaaauugagacuggccacaggauugaggaaugucccgucuauucaaucuagaggccuauuuggggccauugccgguuucauugaagggggguggacagggaugguagauggaugguacgguuaucaccaucaaaaugagcaggggucaggauaugcagccgaccugaagagcacacagaaugccauugacgagauuacuaacaaaguaaauucuguuauugaaaagaugaauacacaguucacagcaguagguaaagaguucaaccaccuggaaaaaagaauagagaauuuaaauaaaaaaguugaugaugguuuccuggacauuuggacuuacaaugccgaacuguugguucuauuggaaaaugaaagaacuuuggacuaccacgauucaaaugugaagaacuuauaugaaaagguaagaagccaguuaaaaaacaaugccaaggaaauuggaaacggcugcuuugaauuuuaccacaaaugcgauaacacgugcauggaaagugucaaaaaugggacuuaugacuacccaaaauacucagaggaagcaaaauuaaacagagaagaaauagaugggguaaagcuggaaucaacaaggauuuaccagauuuuggcgaucuauucaacugucgccaguucauugguacugguagucucccugggggcaaucaguuucuggaugugcucuaaugggucucuacaguguagaauauguauuuaa

SEQ ID NO: 36342 - RNA, 1701 nt, Artificial Sequence
  derived and/or modified CDS sequence (wt) from hemagglutinin__InfluenzaA__ADD92535
augaaggcaauacuaguaguucugcuauauacauuugcaaccgcaaaugcagacacauuauguauagguuaucaugcgaacaauucaacagacacuguagacacaguacuagaaaagaauguaacaguaacacacucuguuaaccuucuagaagacaagcauaacgggaaacuaugcaaacuaagagggguagccccauugcauuuggguaaauguaacauugcuggcuggauccugggaaauccagagugugaaucacucuccacagcaagcucaugguccuacauuguggaaacaucuaguucagacaauggaacguguuacccaggagauuucaucgauuaugaggagcuaagagagcaauugagcucagugucaucauuugaaagguuugagauauuccccaagacaaguucauggcccaaucaugacucgaacaaagguguaacggcagcauguccucaugcuggagcaaaaagcuucuacaaaaauuuaauauggcuaguuaaaaaaggaaauucauacccaaagcucagcaaauccuacauuaaugauaaagggaaagaaguccucgugcuauggggcauucaccauccaucuacuagugcugaccaacaaagucucuaucagaaugcagaugcauauguuuuuguggggacaucaagauacagcaagaaguucaagccggaaauagcaauaagacccaaagugagggaucgagaagggagaaugaacuauuacuggacacuaguagagccgggagacaaaauaacauucgaagcaacuggaaaucuagugguaccgagauaugcauucgcaauggaaagaaaugcuggaucugguauuaucauuucagauacaccaguccacgauugcaacacaacuugucagacacccaagggugcuauaaacaccagccucccauuucagaauauacauccgaucacaauuggaaaauguccaaaauauguaaaaagcacaaaauugagacuggccacaggauugaggaaugucccgucuauucaaucuagaggccuauuuggggccauugccgguuucauugaagggggguggacagggaugguagauggaugguacgguuaucaccaucaaaaugagcaggggucaggauaugcagccgaccugaagagcacacagaaugccauugacgagauuacuaacagaguaaauucuguuauugaaaagaugaauacacaguucacagcaguagguaaagaguucaaccaccuggaaaaaagaauagagaauuuaaauaaaaaaguugauggugguuuccuggacauuuggacuuacaaugccgaacuguugguucuauuggaaaaugaaagaacuuuggacuaccacgauucaaaugugaagaacuuauaugaaaagguaagaagccaguuaaaaaacaaugccaaggaaauuggaaacggcugcuuugaauuuuaccacaaaugcgauaacacgugcauggaaagugucaaaaaugggacuuaugacuacccaaaauacucagaggaagcaaaauuaaacagagaagaaauagaugggguaaagcuggaaucaacaaggauuuaccagauuuuggcgaucuauucaacugucgccaguucauugguacugguagucucccugggggcaaucaguuucuggaugugcucuaaugggucucuacaguguagaauauguauuuaa

SEQ ID NO: 36343 - RNA, 1701 nt, Artificial Sequence; identical to SEQ ID NO: 36269
  derived and/or modified CDS sequence (wt) from hemagglutinin__InfluenzaA__ADD96766

SEQ ID NO: 36344 - RNA, 1701 nt, Artificial Sequence
  derived and/or modified CDS sequence (wt) from hemagglutinin__InfluenzaA__ADD96776
augaaggcaauacuaguaguucugcuauauacauuugcaaccgcaaaugcagacacauuauguauagguuaucaugcgaacaauucaacagacacuguagacacaguacuagaaaagaauguaacaguaacacacucuguuaacauucuagaagacaagcauaacgggaaacuaugcaaacuaagagggguagccccauugcauuuggguaaauguaacauugcuggcuggauccugggaaauccagagugugaaucacucuccacagcaagcucaugguccuacauuguggaaacaucuaguucagacaauggaacguguuacccaggagauuucaucgauuaugaggagcuaagagagcaauugagcucagugucaucauuugaaagguuugagauauuccccaagacaaguucauggcccaaucaugacucgaacaaagguguaacggcagcauguccucaugcuggagcaaaaagcuucuacaaaaauuuaauauggcuaguuaaaaaaggaaauucauacccaaagcucagcaaauccuacauuaaugauaaagggaaagaaguccucgugcuauggggcauucaccauccaucuacuagugcugaccaacaaagucucuaucagaaugcagaugcauauguuuuuguggggucaucaagauacagcaagaaguucaagccggaaauagcaauaagacccaaagugagggaucaagaagggagaaugaacuauuacuggacacuaguagagccgggagacaaaauaacauucgaagcaacuggaaaucuagugguaccgagauaugcauucgcaauggaaagaaaugcuggaucugguauuaucauuucagauacaccaguccacgauugcaacacaacuugucagacacccaagggugcuauaaacaccagccucccauuucagaauauacauccgaucacaauuggaaaauguccaaaauauguaaaaagcacaaaauugagacuggccacaggauugaggaaugucccgucuauucaaucuagaggccuauuuggggccauugccgguuucauugaagggggguggacagggaugguagauggaugguacgguuaucaccaucaaaaugagcaggggucaggauaugcagccgaccugaagagcacacagaaugccauugacgagauuacuaacaaaguaaauucuguuauugaaaagaugaauacacaguucacagcaguagguaaagaguucaaccaccuggaaaaaagaauagagaauuuaaauaaaaaaguugaugaugguuuccuggacauuuggacuuacaaugccgaacuguugguucuauuggaaaaugaaagaacuuuggacuaccacgauucaaaugugaagaacuuauaugaaaagguaagaagccagcuaaaaaacaaugccaaggaaauuggaaacggcugcuuugaauuuuaccacaaaugcgauaacacgugcauggaaagugucaaaaaugggacuuaugacuacccaaaauacucagaggaagcaaaauuaaacagagaagaaauagaugggguaaagcuggaaucaacaaggauuuaccagauuuuggcgaucuauucaacugucgccaguucauugguacugguagucucccugggggcaaucaguuucuggaugugcucuaaugggucucuacaguguagaauauguauuuaa

SEQ ID NO: 36345 - RNA, 1701 nt, Artificial Sequence; identical to SEQ ID NO: 34898
  derived and/or modified CDS sequence (wt) from hemagglutinin__InfluenzaA__ADD96786

SEQ ID NO: 36346 - RNA, 1701 nt, Artificial Sequence; identical to SEQ ID NO: 36166
  derived and/or modified CDS sequence (wt) from hemagglutinin__InfluenzaA__ADD96796

SEQ ID NO: 36347 - RNA, 1701 nt, Artificial Sequence
  derived and/or modified CDS sequence (wt) from hemagglutinin__InfluenzaA__ADD96806
augaaggcaauacuaguaguucugcuauauacacuugcaaccgcaaaugcagacacauuauguauagguuaucaugcgaacaauucaacagacacuguagacacaguacuagaaaagaauguaacaguaacacacucuguuaaccuucuagaagacaagcauaacgggaaacuaugcaaacuaagagggguagccccauugcauuuggguaaauguaacauugcuggcuggauccugggaaauccagagugugaaucacucuccacagcaagcucaugguccuacauuguggaaacaucuaguucagacaauggaacguguuacccaggagacuucaucgauuaugaggagcuaagagagcaauugagcucagugucaucauuugaaagguuugagauauuccccaagacaaguucauggcccaaucaugacucgaacaaagguguaacggcagcauguccucaugcuggagcaaaaagcuucuacaaaaauuuaauauggcuaguuaaaaaaggaaauucauacccaaagcucagcaaauccuacauuaaugauaaagggaaagaaguccucgugcuauggggcauucaccauccaucuacuagugcugaccaacaaagucucuaucagaaugcagaugcauauguuuuuguggggacaucaagauacagcaagaaguucaagccggaaauagcaauaagacccaaagugagggaucaagaagggagaaugaacuauuacuggacacuaguagagccgggagacaaaauaacauucgaagcaacuggaaaucuagugguaccgagauaugcauucgcaauggaaagaaaugcuggaucugguauuaucauuucagauacaccaguccacgauugcaauacaacuugucagacacccaagggugcuauaaacaccagccucccauuucaaaauauacauccgaucacaauuggaaaauguccaaaauauguaaaaagcacaaaauugagacuggccacaggauugaggaaugucccgucuauucaaucuagaggccuauuuggggccauugccgguuucauugaagggggguggacagggaugguagauggaugguacgguuaucaccaucaaaaugagcaggggucaggauaugcagccgaccugaagagcacacagaaugccauugacgagauuacuaacaaaguaaauucuguuauugaaaagaugaauacacaguucacagcaguagguaaagaguucaaccaccuggaaaaaagaauagagaauuuaaauaaaaaaguugaugaugguuuccuggacauuuggacuuacaaugccgaacuguugguucuauuggaaaaugaaagaacuuuggacuaccacgauucaaaugugaagaacuuauaugaaaagguaagaagccaguuaaaaaacaaugccaaggaaauugggaacggcugcuuugaauuuuaccacaaaugcgauaacacgugcauggaaagugucaaaaaugggacuuaugacuacccaaaauacucagaggaagcaaaauuaaacagagaagaaauagaugggguaaagcuggaaucaacaaggauuuaccagauuuuggcgaucuauucaacugucgccaguucauugguacugguagucucccugggggcaaucaguuucuggaugugcucuaaugggucucuacaguguagaauauguauuuaa

SEQ ID NO: 36348 - RNA, 1701 nt, Artificial Sequence; identical to SEQ ID NO: 35845
  derived and/or modified CDS sequence (wt) from hemagglutinin__InfluenzaA__ADD96816

SEQ ID NO: 36349 - RNA, 1701 nt, Artificial Sequence
  derived and/or modified CDS sequence (wt) from hemagglutinin__InfluenzaA__ADD96826
augaaggcaauacuaguaguucugcuauauacauuugcaaccgcaaaugcagacacauuauguauagguuaucaugcgaacaauucaacagacacuguagacacaguacuagaaaagaauguaacaguaacacacucuguuaaccuucuagaagacaagcauaacgggaaacuaugcaaacuaagagggguagccccauugcauuuggguaaauguaacauugcuggcuggauccugggaaauccagagugugaaucacucuccacagcaagcucaugguccuacauuguggaaacaucuaguucagacaauggaacguguuacccaggagauuucaucgauuaugaggagcuaagagagcaauugagcucagugucaucauuugaaagguuugagauauuccccaagacaaguucauggcccaaucaugacucgaacaaagguguaacggcagcauguccucaugcuggagcaaaaagcuucuacaaaaauuuaauauggcuaguuaaaaaaggaaauucauacccaaagcucagcaaauccuacauuaaugauaaagggaaagaaguccucgugcuauggggcauucaccauccaucuacuagugcugaccaacaaagucucuaucagaaugcagaugcauauguuuuuguggggacaucaagauacagcaagaaguucaagccggaaauagcaauaagacccaaagugauggaucaagaagggagaaugaacuauuacuggacacuaguagagccgggagacaaaauaacauucgaagcaacuggaaaucuagugguaccgagauaugcauucgcaauggaaagaaaugcuggaucugguauuaucauuucagauacaccaguccacgauugcaauacaacuugucagacacccaagggugcuauaaacaccagccucccauuucagaauauacauccgaucacaauuggaaaauguccaaaauauguaaaaagcacaaaauugagacuggccacaggauugaggaaugucccgucuauucaaucuagaggccuauuuggggccauugccggcuucauugaagggggguggacagggaugguagauggaugguacgguuaucaccaucaaaaugagcaggggucaggauaugcagccgaccugaagagcacacagaaugccauugacgagauuacuaacaaaguaaauucuguuauugaaaagaugaauacacaguucgcagcaguagguaaagaguucaaccaccuggaaaaaagaauagagaauuuaaauaaaaagguugaugaugguuuccuggacauuuggacuuacaaugccgaacuguugguucuauuggaaaaugaaagaacuuuggacuaccacgauucaaaugugaagaacuuauaugaaaagguaagaagccaguuaaaaaacaaugccaaggaaauuggaaacggcugcuuugaauuuuaccacaaaugcgauaacacgugcauggaaagugucaaaaaugggacuuaugacuacccaaaauacucagaggaagcaaaauuaaacagagaagaaauagaugggguaaagcuggaaucaacaaggauuuaccagauuuuggcgaucuauucaacugucgccaguucauugguacugguagucucccugggggcaaucaguuucuggaugugcucuaaugggucucuacaguguagaauauguauuuaa

SEQ ID NO: 36350 - RNA, 1701 nt, Artificial Sequence; identical to SEQ ID NO: 35871
  derived and/or modified CDS sequence (wt) from hemagglutinin__InfluenzaA__ADD96836

SEQ ID NO: 36351 - RNA, 1701 nt, Artificial Sequence; identical to SEQ ID NO: 35833
  derived and/or modified CDS sequence (wt) from hemagglutinin__InfluenzaA__ADD96846

SEQ ID NO: 36352 - RNA, 1701 nt, Artificial Sequence; identical to SEQ ID NO: 36239
  derived and/or modified CDS sequence (wt) from hemagglutinin__InfluenzaA__ADD96856

SEQ ID NO: 36353 - RNA, 1701 nt, Artificial Sequence
  derived and/or modified CDS sequence (wt) from hemagglutinin__InfluenzaA__ADD96886
augaaggcaauacuaguaguucugcuauauacauuugcaaccgcaaaugcagacacauuauguauagguuaucaugcgaacaauucaacagacacuguagacacaguacuagaaaagaauguaacaguaacacacucuguuaaccuucuagaagacaagcauaacgggaaacuaugcaaacuaagagggguagccccauugcauuuggguaaauguaacauugcuggcuggauccugggaaauccagagugugaaucacucuccacagcaagcucaugguccuacauuguggaaacaucuaguucagacaauggaacguguuacccaggagauuucaucgauuaugaggagcuaagagagcaauugagcucagugucaucauuugaaagguuugagauauuccccaagacaaguucauggcccaaucaugacucgaacaaagguguaacggcagcauguccucaugcuggagcaaaaagcuucuacaaaaauuuaauauggcuaguuaaaaaaggaaauucauacccaaagcucagcaaauccuacauuaaugauaaagggaaagaaguccucgugcuauggggcauucaccauccaucuacuagugcugaccaacaaagucucuaucagaaugcagaugcauauguuuuuguggggacaucaagauacagcaagaaguucaagccggaaauagcaauaagacccaaagugagggaacaagaagggagaaugaacuauuacuggacacuaguagagccgggagacaaaauaacauucgaagcaacuggaaaucuagugguaccgagauaugcauucgcaauggaaagaaaugcuggaucugguauuaucauuucagauacaccaguccacgauugcaauacaacuugucagacacccaagggugcuauaaacaccagccucccauuucagaauauacauccgaucacaauuggaaaauguccaaaauauguaaaaagcacaaaauugagacuggccacaggauugaggaaugucccgucuauucaaucuagaggccuauuuggggccauugccgguuucauugaagggggguggacagggaugguagauggaugguacgguuaucaccaucaaaaugagcaggggucaggauaugcagcagaccugaagagcacacagaaugccauugacgagauuacuaacaaaguaaauucuguuauugaaaagaugaauacacaguucacagcaguagguaaagaguucaaccaccuggaaaaaagaauagagaauuuaaauaaaaaaguugaugaugguuuccuggacauuuggacuuacaaugccgaacuguugguucuauuggaaaaugaaagaacuuuggacuaccacgauucaaaugugaagaacuuauaugaaaagguaagaagccaguuaaaaaacaaugccaaggaaauuggaaacggcugcuuugaauuuuaccacaaaugcgauaacacgugcauggaaagugucaaaaaugggacuuaugacuacccaaaauacucagaggaagcaaaauuaaacagagaagaaauagaugggguaaagcuggaaucaacaaggauuuaccagauuuuggcgaucuauucaacugucgccaguucauugguacugguagucucccugggggcaaucaguuucuggaugugcucuaaugggucucuacaguguagaauauguauuuaa

SEQ ID NO: 36354 - RNA, 1701 nt, Artificial Sequence
  derived and/or modified CDS sequence (wt) from hemagglutinin__InfluenzaA__ADD96896
augaaggcaauacuaguaguucugcuauauacauuugcaaccgcaaaugcagacacauuauguauagguuaucaugcgaacaauucaacagacacuguagacacaguacuagaaaagaauguaacaguaacacacucuguuaacauucuagaagacaagcauaacgggaaacuaugcaaacuaagagggguagccccauugcauuuggguaaauguaacauugcuggcuggauccugggaaauccagagugugaaucacucuccacagcaagcucaugguccuacauuguggaaacaucuaguucagacaauggaacguguuacccaggagauuucaucgauuaugaggagcuaagagagcaauugagcucagugucaucauuugaaagguuugagauauuccccaagacaaguucauggcccaaucaugacucgaacaaagguguaacggcagcauguccucaugcuggagcaaaaagcuucuacaaaaauuuaauuuggcuaguuaaaaaaggaaauucauacccaaagcucagcaaauccuacauuaaugauaaagggaaagaaguccucgugcuauggggcauucaccauccaucuacuagugcugaccaacaaagucucuaucagaaugcagaugcauauguuuuuguggggucaucaagauacagcaagaaguucaagccggaaauagcaauuagacccaaagugagggaucaagaagggagaaugaacuauuacuggacacuaguagagccgggagacaaaauaacauucgaagcaacuggaaaucuagugguaccgagauaugcauucgcaauggaaagaaaugcuggaucugguauuaucauuucagauacaccaguccaugauugcaauacaacuugucagacacccaagggugcuauaaacaccagccucccauuucagaauauacauccgaucacaauuggaaaauguccaaaauauguaaaaagcacaaaauugagacuggccacaggauugaggaaugucccgucuauucaaucuagaggccuauuuggggccauugccgguuucauugaagggggguggacagggaugguagauggaugguacgguuaucaccaucaaaaugagcaggggucaggauaugcagccgaccugaagagcacacagaaugccauugacgagauuacuaacaaaguaaauucuguuauugaaaagaugaauacacaguucacagcaguagguaaagaguucaaccaccuggaaaaaagaauagagaauuuaaauaaaaaaguugaugaugguuuccuggacauuuggacuuacaaugccgaacuguugguucuauuggaaaaugaaagaacuuuggacuaccacgauucaaaugugaagaacuuauaugaaaagguaagaagccagcuaaaaaacaaugccaaggaaguuggaaacggcugcuuugaauuuuaccacaaaugcgauaacacgugcauggaaagugucaaaaaugggacuuaugacuacccaaaauacucagaggaagcaaaauuaaacagagaagaaauagaugggguaaagcuggaaucaacaaggauuuaccagauuuuggcgaucuauucaacugccgccaguucauugguacugguagucucccugggggcaaucaguuucuggaugugcucuaaugggucucuacaguguagaauauguauuuaa

SEQ ID NO: 36355 - RNA, 1701 nt, Artificial Sequence
  derived and/or modified CDS sequence (wt) from hemagglutinin__InfluenzaA__ADD96906
augaaggcaauacuaguaguucugcuauauacauuugcaaccgcaaaugcagacacauuauguauagguuaucaugcgaacaauucaacagacacuguagacacaguacuagaaaagaauguaacaguaacacacucuguuaaccuucuagaagacaagcauaacgggaaacuaugcaaacuaagagggguagccccauugcauuuggguaaauguaacauugcuggcuggauccugggaaauccagagugugaaucacucuccacagcaagcucaugguccuacauuguggaaacaucuaguucagacaauggaacguguuacccaggagauuucaucgauuaugaggagcuaagagagcaauugagcucagugucaucauuugaaagguuugagauauuccccaagacaaguucauggcccaaucaugacucgaacaaagguguaacggcagcauguccucaugcuggagcaaaaagcuucuacaaaaauuuaauauggcuaguuaaaaaaggaaauucauacccaaagcucagcaaauccuacauaaaugauaaagggaaagaaguccucgugcuauggggcauucaccauccaucuacuagugcugaccaacaaagucucuaucagaaugcagaugcauauguuuuuguggggacaucaagauacagcaagaaguucaagccggaaauagcaauaagacccaaagugagggaucaagaagggagaaugaacuauuacuggacacuaguagagccgggagacaaaauaacauucgaagcaacuggaaaucuagugguaccgagauaugcauucgcaauggaaagaaaugcuggaucugguauuaucauuucagauacaccaguccacgauugcaauacaacuugucagacacccaagggugcuauaaacaccagccucccauuucagaauauacauccgaucacaauuggaaaauguccaaaauauguaaaaagcacaaaauugagacuggccacaggauugaggaaugucccgucuauucaaucuagaggccuauuuggggcuauugccgguuucauugaagggggguggacagggaugguagauggaugguacgguuaucaccaucaaaaugagcaggggucaggauaugcagccgaccugaagagcacacagaaugccauugacaagauuacuaacaaaguaaauucuguuauugaaaagaugaauacacaguucacagcaguagguaaagaguucaaccaccuggaaaaaagaauagagaauuuaaauaaaaaaguugaugaugguuuccuggacauuuggacuuacaaugccgaacuguugguucuauuggaaaaugaaagaacuuuggacuaccacgauucaaaugugaagaacuuauaugaaaagguaagaagccaguuaaaaaacaaugccaaggaaauuggaaacggcugcuuugaauuuuaccacaaaugcgauaacacgugcauggaaagugucaaaaaugggacuuaugacuacccaaaauacucagaggaagcaaaauuaaacagagaagaaauagaugggguaaagcuggaaucaacaaggauuuaccagauuuuggcgaucuauucaacugucgccaguucauugguacugguagucucccugggggcaaucaguuucuggaugugcucuaaugggucucuacaguguagaauauguauuuaa

SEQ ID NO: 36356 - RNA, 1701 nt, Artificial Sequence; identical to SEQ ID NO: 36303
  derived and/or modified CDS sequence (wt) from hemagglutinin__InfluenzaA__ADD96916

SEQ ID NO: 36357 - RNA, 1701 nt, Artificial Sequence; identical to SEQ ID NO: 36222
  derived and/or modified CDS sequence (wt) from hemagglutinin__InfluenzaA__ADD96926

SEQ ID NO: 36358 - RNA, 1701 nt, Artificial Sequence
  derived and/or modified CDS sequence (wt) from hemagglutinin__InfluenzaA__ADD96936
augaaggcaauacuaguaguucugcuauauacauuugcaaccgcaaaugcagacacauuauguauagguuaucaugcgaacaauucaacagacacuguagacacaguacuagaaaagaauguaacaguaacacacucuguuaacauucuagaagacaagcauaacgggaaacuaugcaaacuaagagggguagccccauugcauuuggguaaauguaacauugcuggcuggauccugggaaauccagagugugaaucacucuccacagcaagcucaugguccuacauuguggaaacaucuaguucagacaauggaacguguuacccaggagauuucaucgauuaugaggagcuaagagagcaauugagcucagugucaucauuugaaagguuugagauauuccccaagacaaguucauggcccaaucaugacucgaacaaagguguaacggcagcauguccucaugcuggagcaaaaagcuucuacaaaaauuuaauauggcuaauuaaaaaaggaaacucauacccaaagcucagcaaauccuacauuaaugauaaagggaaagaaguccucgugcuauggggcauucaccauccaucuacuagugcugaccaacaaagucucuaucagaaugcagaugcauauguuuuuguggggacaucaagauacagcaagaaguucaagccggaaauagcaauaagacccaaagugagggaucaagaagggagaaugaacuauuacuggacacuaguagagccgggagacaaaauaacauucgaagcaacuggaaaucuagugguaccgagauaugcauucgcaauggaaagaaaugcuggaucugguauuaucauuucagauacaccaguccacgauugcaauacaacuugucagacacccaagggugcuauaaacaccagccucccauuucagaauauacauccgaucacaauuggaaaauguccaaaauauguaaaaagcacaaaauugagacuggccacaggauugaggaaugucccgucuauucaaucuagaggccuauuuggggccauugccgguuucauugaagggggguggacagggaugguagauggaugguacgguuaucaccaucaaaaugagcaggggucaggauaugcagccgaccugaagagcacacagaaugccauugacgagauuacuaacaaaguaaauucuguuauugaaaagaugaauacacaguucacagcaguagguaaagaguucaaccaccuggaaaaaagaauagagaauuuaaauaaaaagguugaugaugguuuccuggacauuuggacuuacaaugccgaacuguugguucuauuggaaaaugaaagaacuuuggacuaccaugauucaaaugugaagaacuuauaugaaaaaguaagaagccaguuaaaaaacaaugccaaggaaauuggaaacggcugcuuugaauuuuaccacaaaugcgauaacacgugcauggaaagugucaaaaaugggacuuaugacuacccaaaauacucagaggaagcaaaauuaaacagagaagaaauagaugggguaaagcuggaaucaacaaggauuuaccagauuuuggcgaucuauucaacugucgccaguucauugguacugguagucucccugggggcaaucaguuucuggaugugcucuaaugggucucuacaguguagaauauguauuuaa

SEQ ID NO: 36359 - RNA, 1701 nt, Artificial Sequence
  derived and/or modified CDS sequence (wt) from hemagglutinin__InfluenzaA__ADD96946
augaaggcaauacuaguaguucugcuauauacauuugcaaccgcaaaugcagacacauuauguauagguuaucaugcgaacaauucaacagacacuguagacacaguacuagaaaagaauguaacaguaacacacucuguuaaccuucuagaagacaagcauaacgggaaacuaugcaaacuaagagggguagccccauugcauuuggguaaauguaacauugcuggcuggauccugggaaauccagagugugaaucacucuccacagcaagcucaugguccuacauuguggaaacaucuaguucagacaauggaacguguuacccaggagauuucaucgauuaugaggagcuaagagagcaauugagcucaguaucaucauuuaaaagguuugagauauuccccaagacaaguucauggcccaaucaugacucgaacaaagguguaacggcagcauguccucaugcuggagcaaaaagcuucuacaaaaauuuaauauggcuaguuaaaaaaggaaauucauacccaaagcucagcaaauccuacauuaaugauaaagggaaagaaguccucgugcuauggggcauucaccauccaucuacuagugcugaccaacaaagucucuaucagaaugcagaugcauauguuuuuguggggacaucaagauacagcaagaaguucaagccggaaauagcaauaagacccaaagugagggaucaagaagggagaaugaacuauuacuggacacuaguagagccgggagacaaaauaacauucgaagcaacuggaaaucuagugguaccgagauaugcauucgcaauggaaagaaaugcuggaucugguauuaucauuucagauacaccaguccacgauugcaauacaacuugucagacacccaagggugcuauaaacaccagccucccauuucagaauauacauccgaucacaauuggagaauguccaaaauauguaaaaagcacaaaauugagacuggccacaggauugaggaaugucccgucuauucaaucuagaggccuauuuggggccauugccgguuucauugaagggggguggacagggaugguagauggaugguacgguuaucaccaucaaaaugagcaggggucaggauaugcagccgaccugaagagcacacagaaugccauugacaagauuacuaacaaaguaaauucuguuauugaaaagaugaauacacaguucacagcaguagguaaagaguucaaccaccuggaaaaaagaauagagaauuuaaauaaaaaaguugaugaugguuuccuggacauuuggacuuacaaugccgaacuguugguucuauuggaaaaugaaagaacuuuggacuaccacgauucaaaugugaagaacuuauaugaaaagguaagaagccaguuaaagaacaaugccaaggaaauuggaaacggcugcuuugaauuuuaccacaaaugcgauaacacgugcauggaaagugucaaaaaugggacuuaugacuacccaaaauacucagaggaagcaaaauuaaacagagaagaaauagaugggguaaagcuggaaucaacaaggauuuaccagauuuuggcgaucuauucaacugucgccaguucauugguacugguagucucccugggggcaaucaguuucuggaugugcucuaaugggucucuacaguguagaauauguauuuaa

SEQ ID NO: 36360 - RNA, 1701 nt, Artificial Sequence
  derived and/or modified CDS sequence (wt) from hemagglutinin__InfluenzaA__ADD96956
augaaggcaauacuaguaguucugcuauauacauuugcaaccgcaaaugcagacacauuauguauagguuaucaugcgaacaauucaacagacacuguagacacaguacuagaaaagaauguaacaguaacacacucuguuaaccuucuagaagacaagcauaacgggaaacuaugcaaacuaagagggguagccccauugcauuuggguaaauguaacauugcuggcuggauccugggaaauccagagugugaaucacucuccacagcaagcucaugguccuacauuguggaaacaucuaguucagacaauggaacguguuacccaggagauuucaucgauuaugaggagcuaagagagcaauugagcucagugucaucauuugaaagguuugagauauuccccaagacaaguucauggcccaaucaugacucgaacaaagguguaacggcagcauguccucaugcuggggcaaaaagcuucuacaaaaauuuaauauggcuaguuaaaaaaggaaauucauacccaaagcucagcaaauccuacauuaaugauaaagggaaagaaguccucgugcuauggggcauucaccauccaucuacuagugcugaccaacaaagucucuaucagaaugcagaugcauauguuuuuguggggacaucaagauacagcaagaaguucaagccggaaauagcaauaagacccaaagugagggaacaagaagggagaaugaacuauuacuggacacuaguaaagccgggagacaaaauaacauucgaagcaacuggaaaucuagugguaccgagauaugcauucgcaauggaaagaaaugcuggaucugguauuaucauuucagauacaccaguccacgauugcaauacaacuugucagacacccaagggugcuauaaacaccagucucccauuucagaauauacauucgaucacaauuggaaaauguccaaaauauguaaaaagcacaaaauugagacuggccacaggauugaggaaugucccgucuauucaaucuagaggccuauuuggggccauugccgguuucauugaagggggguggacagggaugguagauggaugguacgguuaucaccaucaaaaugagcaggggucaggauaugcagccgaccugaagagcacacagaaugccauugacgagauuacuaacaaaguaaauucuguuauugaaaagaugaauacacaguucacagcaguagguaaagaguucaaccaccuggaaaaaagaauagagaauuuaaauaaaaaaguugaugaugguuuccuggacauuuggacuuacaaugccgaacuguugguucuauuggaaaaugaaagaacuuuggacuaccacgauucaaaugugaagaacuuauaugaaaagguaagaagccaguuaaaaaacaaugccaaggaaauuggaaacggcugcuuugaauuuuaccacaaaugcgauaacacgugcauggaaagugucaaaaaugggacuuaugacuacccaaaauacucagaggaagcaaaauuaaacagagaagaaauagaugggguaaagcuggaaucaacaaggauuuaccagauuuuggcgaucuauucaacugucgccaguucauugguacugguagucucccugggggcaaucaguuucuggaugugcucuaaugggucucuacaguguagaauauguauuuaa

SEQ ID NO: 36361 - RNA, 1701 nt, Artificial Sequence; identical to SEQ ID NO: 35430
  derived and/or modified CDS sequence (wt) from hemagglutinin__InfluenzaA__ADD96976

SEQ ID NO: 36362 - RNA, 1701 nt, Artificial Sequence; identical to SEQ ID NO: 35430
  derived and/or modified CDS sequence (wt) from hemagglutinin__InfluenzaA__ADD96986

SEQ ID NO: 36363 - RNA, 1701 nt, Artificial Sequence
  derived and/or modified CDS sequence (wt) from hemagglutinin__InfluenzaA__ADD97035
augaaggcaauacuaguaguucugcuauauacauuugcaaccgcaaaugcagacacauuauguauagguuaucaugcgaacaauucaacagacacuguagacacaguacuagaaaagaauguaacaguaacacacucuguuaaccuucuagaagacaagcauaacgggaaacuaugcaaacuaagagggguagccccauugcauuuggguaaauguaacauugcuggcuggauccugggaaauccagagugugaaucacucuccacagcaagcucaugguccuacauuguggaaacaucuaguucagacaauggaacguguuacccaggagauuucaucgauuaugaggagcuaagagagcaauugagcucagugucaucauuugaaagguuugagauauuccccaagacaaguucauggcccaaucaugacucgaacaaagguguaacggcagcauguccucaugcuggagcaaaaagcuucuacaaaaauuuaauauggcuaguuaaaaaaggaaauucauacccaaagcucagcaaauccuacauuaaugauaaagggaaagaaguccucgugcuauggggcauucaccauccaucuacuagugcugaccaacaaagucucuaucagaaugcagaugcauauguuuuuguggggacaucaagauacagcaagaaguucaagccggaaauagcaauaagacccaaagugagggaucaagaagggagaaugaacuauuacuggacacuaguagagccgggagacaaaauaacauucgaagcaacuggaaaucuagugguaccgagauaugcauucgcaauggaaagaaaugcuggaucugguauuaucauuucagauacaccaguccacgauugcaauacaacuugucagacacccaagggugcuauaaacaccagccucccauuucagaauauacauccgauuacaauuggaaaauguccaaaauauguaaaaagcacaaaauugagaauggccacaggauugaggaaugucccgucuauucaaucuagaggccuauuuggggccauugccgguuucauugaagggggguggacagggaugguagauggaugguacgguuaucaccaucaaaaugagcaggggucaggauaugcagccgaccugaagagcacacagaaugccauugacgagauuacuaacaaaguaaauucuguuauugaaaagaugaauacacaguucacagcaguagguaaagaguucaaccaccuggaaaaaagaauagagaauuuaaauaaaaaaguugaugaugguuuccuggacauuuggacuuacaaugccgaacuguugguucuauuggaaaaugaaagaacuuuggacuaccacgauucaaaugugaagaacuuauaugaaaagguaagaagccaguuaaaaaacaaugccaaggaaauuggaaacggcugcuuugaauuuuaccacaaaugcgauaacacgugcauggaaagugucaaaaaugggacuuaugacuacccaaaauacucagaggaagcaaaauuaaacagagaagaaauagaugggguaaagcuggaaucaacaaggauuuaccagauuuuggcgaucuauucaacugucgccaguucauugguacugguagucucccugggggcaaucaguuucuggaugugcucuaaugggucucuacaguguagaauauguauuuaa

SEQ ID NO: 36364 - RNA, 1701 nt, Artificial Sequence
  derived and/or modified CDS sequence (wt) from hemagglutinin__InfluenzaA__ADD97045
augaaggcaauacuaguaguucugcuauauacauuugcaaccgcaaaugcagacacauuauguauagguuaucaugcgaacaauucaacagacacuguagacacaguacuagaaaagaauguaacaguaacacacucuguuaaccuucuagaagacaagcauaacgggaaacuaugcaaacuaagagggguagccccauugcauuuggguaaauguaacauugcuggcuggauccugggaaauccagagugugaaucacucuccacagcaagcucaugguccuacauuguggaaacaucuaguucagacaauggaacguguuacccaggagauuucaccgauuaugaggagcuaagggagcaauugagcucagugucaucauuugaaagguuugagauauuccccaagacaaguucauggcccaaucaugacucgaacaaagguguaacggcagcauguccucaugcuggagcaaaaagcuucuacaaaaauuuaauauggcuaguuaaaaaaggaaauucauacccaaagcucagcaaauccuacauuaaugauaaagggaaagaaguccucgugcuauggggcauucaccauccaucuacuagugcugaccaacaaagucucuaucagaaugcagaugcauauguuuuuguggggacaucaagauacagcaagaaguucaagccggaaauagcaauaagacccaaagugagggaucaagaagggagaaugaacuauuacuggacacuaguagagccgggagacaaaauaacauucgaagcaacuggaaaucuagugguaccgagauaugcauucgcaauggaaagaaaugcuggaucugguauuaucauuucagauacaccaguccacgauugcaauacaacuugucagacacccaagggugcuauaaacaccagccucccauuucagaauauacauccgaucacaauuggaaaauguccaaaauauguaaaaagcacaaaauugagacuggccacaggauugaggaaugucccgucuauucaaucuagaggcuuauuuggggccauugccgguuucauugaagggggguggacagggaugguagauggaugguacgguuaucaccaucaaaaugagcaggggucaggauaugcagccgaccugaagagcacacagaaugccauugacgagauuacuaacaaaguaaauucuguuauugaaaagaugaauacacaguucacagcaguagguaaagaguucaaccaccuggaaaaaagaauagagaauuuaaauaaaaaaguugaugaugguuuccuggacauuuggacuuacaaugccgaacuguugguucuauuggaaaaugaaagaacuuuggacuaccacgauucaaaugugaagaacuuauaugaaaagguaagaagccaguuaaaaaacaaugccaaggaaauuggaaacggcugcuuugaauuuuaccacaaaugcgauaacacgugcauggaaagugucaaaaaugggacuuaugacuacccaaaauacucagaggaagcaaaauuaaacagagaagaaauagaugggguaaagcuggaaucaacaaggauuuaccagauuuuggcgaucuauucaacugucgccaguucauugguacugguagucucccugggggcaaucaguuucuggaugugcucuaaugggucucuacaguguagaauauguauuuaa

SEQ ID NO: 36365 - RNA, 1701 nt, Artificial Sequence; identical to SEQ ID NO: 36364
  derived and/or modified CDS sequence (wt) from hemagglutinin__InfluenzaA__ADD97055

SEQ ID NO: 36366 - RNA, 1701 nt, Artificial Sequence; identical to SEQ ID NO: 36364
  derived and/or modified CDS sequence (wt) from hemagglutinin__InfluenzaA__ADD97123

SEQ ID NO: 36367 - RNA, 1701 nt, Artificial Sequence
  derived and/or modified CDS sequence (wt) from hemagglutinin__InfluenzaA__ADD97161
augaaggcaauacuaguaguucugcuauauacauuugcaaccgcaaaugcagacacauuauguauagguuaucaugcgaacaauucaacagacacuguagacacaguacuagaaaagaauguaacaguaacacacucuguuaaccuucuagaagacaagcauaacgggaaacuaugcaaacuaagagggguagccccacugcauuuagguaaauguaacauugcuggcuggauccugggaaauccagagugugaaucacucuccacagcaagcucaugguccuacauuguggaaacaucuaguucagacaauggaacguguuacccaggagauuucaucgauuaugaggagcuaagagagcaauugagcucagugucaucauuugaaagguuugagauauuccccaagacaaguucauggcccaaucaugacucgaacaaagguguaacggcagcauguccucaugcuggagcaaaaagcuucuacaaaaauuuaauauggcuaguuaaaaaaggaaaaucauacccaaagcucagcaaauccuacauuaaugauaaagggaaaaaaguccucgugcuauggggcauucaccauccaucuacuagugcugaccaacaaagucucuaucagaaugcagaugcauauguuuuuguggggacaucaagauacagcaagaaguucaagccggaaauagcaauaagacccaaagugagggaucaagaagggagaaugaacuauuacuggacacuaguagagccgggagacaaaauaacauucgaagcaacuggaaaucuagugguaccgagauaugcauucgcaauggaaagaaaugcuggaucugguauuaucauuucagauacaccaguccacgauugcaauacaacuugucagacacccaagggugcuauaaacaccagccucccauuucagaauauacauccgaucacaauuggaaaauguccaaaauauguaaaaagcacaaaauugagacuggccacaggauugaggaaugucccgucuauucaaucuagaggccuauuuggggccauugccgguuucauugaagggggguggacagggaugguagauggaugguacgguuaucaccaucaaaaugagcaggggucaggauaugcagccgaccugaagagcacacagaaugccauugacgagauuacuaacaaaguaaauucuguuauugaaaagaugaauacacaguucacagcaguagguaaagaguucaaccaccuggaaaaaagaauagagaauuuaaauaaaaaaguugaugaugguuuccuggacauuuggacuuacaaugccgaacuguugguucuauuggaaaaugaaagaacuuuggacuaccacgauucaaaugugaagaacuuauaugaaaagguaagaagccaguuaaaaaacaaugccaaggaaauuggaaacggcugcuuugaauuuuaccacaaaugcgauaacacgugcauggaaagugucaaaaaugggacuuaugacuacccaaaauacucagaggaagcaaaauuaaacagagaagaaauagaugggguaaagcuggaaucaacaaggauuuaccagauuuuggcgaucuauucaacugucgccaguucauugguacugguagucucccugggggcaaucaguuucuggaugugcucuaaugggucucuacaguguagaauauguauuuaa

SEQ ID NO: 36368 - RNA, 1701 nt, Artificial Sequence
  derived and/or modified CDS sequence (wt) from hemagglutinin__InfluenzaA__ADD97171
augaaggcaauacuaguaguucugcuauauacauuugcaaccgcaaaugcagacacauuauguauagguuaucaugcaaacaauucaacagacacuguagacacaguacuagaaaagaauguaacaguaacacacucuguuaaccuucuagaagacaagcauaacgggaaacuaugcaaacuaagagggguagccccauugcauuuggguaaauguaacauugcuggcuggauccugggaaauccagagugugaaucacucuccacagcaagcucaugguccuacauuguggaaacaucuaguucagacaauggaacguguuacccaggagauuucaucgauuaugaggagcuaagagagcaauugagcucagugucaucauuugaaagguuugagauauuccccaagacaaguucauggcccaaucaugacucgaacaaagguguaacggcagcauguccucaugcuggagcaaaaagcuucuacaaaaauuuaauauggcuaguuaaaaaaggaaauucauacccaaagcucagcaaauccuacauuaaugauaaagggaaagaaguccucgugcuauggggcauucaccauccaucuacuagugcugaccaacaaagucucuaucagaaugcagaugcauauguuuuuguggggacaucaagauacagcaagaaguucaagccggaaauagcaauaagacccaaagugagggaucaagaagggagaaugaacuauuacuggacacuaguagagccgggagacaaaauaacauucgaagcaacuggaaaucuagugguaccgagauaugcauucgcaauggaaagaaaugcuggaucugguauuaucauuucagauacaccaguccacgauugcaauacaacuugucagacacccaagggugcuauaaacaccagccucccauuucagaauauacauccgaucacaauuggaaaauguccaaaauauguaaaaagcacaaaauugagacuggccacaggauugaggaaugucccgucuauucaaucuagaggccuauuuggggccauugccgguuucauugaagggggguggacagggaugguagauggaugguacgguuaucaccaucaaaaugagcaggggucaggauaugcagccgaccugaagagcacacagaaugccauugacgagauuacuaacaaaguaaauucuguuauugaaaagaugaauacacaguucacagcaguagguaaagaguucaaccaccuggagaaaagaauagagaauuuaaauaaaaaaguugaugaugguuuccuggacauuuggacuuacaaugccgaacuguugguucuauuggaaaaugaaagaacuuuggacuaccacgauucaaaugugaagaacuuauaugaaaagguaagaagccaguuaaaaaacaaugccaaggaaauuggaaacggcugcuuugaauuuuaccacaaaugcgauaacacgugcauggaaagugucaaaaaugggacuuaugacuacccaaaauacucagaggaagcaaaauuaaacagagaagaaauagaugggguaaagcuggaaucaacaaggauuuaccagauuuuggcgaucuauucaacugucgccaguucauugguacugguagucucccugggggcagucaguuucuggaugugcucuaaugggucucuacaguguagaauauguauuuaa

SEQ ID NO: 36369 - RNA, 1701 nt, Artificial Sequence
  derived and/or modified CDS sequence (wt) from hemagglutinin__InfluenzaA__ADD97181
augaaggcaauacuaguaguucugcuauauacauuugcaaccgcaaaugcagacacauuauguauagguuaucaugcgaacaauucaacagacacuguagacacaguacuagaaaagaauguaacaguaacacacucuguuaaccuucuagaagacaagcauaacgggaaacuaugcaaacuaagagggguagccccauugcauuuggguaaauguaacauugcuggcuggauccugggaaauccagagugugaaucacucuccacagcaagcucaugguccuacauuguggaaacaucuaguucagacaauggaacguguuacccaggagauuucaucgauuaugaggagcugagagagcaauugagcucagugucaucauuugaaagguuugagauauuccccaagacaaguucauggcccaaucaugacucgaacaaagguguaacggcagcauguccucaugcuggagcaaaaagcuucuacaaaaauuuaauauggcuaguuaaaaaaggaaauucauacccaaagcucagcaaauccuacauuaaugauaaagggaaagaaguccucgugcuauggggcauucaccauccaucuacuagugcugaccaacaaagucucuaucagaaugcagaugcauauguuuuuguggggacaucaagauacagcaagaaguucaagccggaaauagcaauaagacccaaagugagggaucaagaagggagaaugaacuauuacuggacacuaguagagccgggagacaaaauaacauucgaagcaacuggaaaucuagugguaccgagauaugcauucgcaauggaaagaaaugcuggaucugguauuaucauuucagauacaccaguccacgauugcaauacaacuugucagacacccaagggugcuauaaacaccagccucccauuucagaauauacauccgaucacaauuggaaaauguccaaaauauguaaaaagcacaaaauugagacuggccacaggauugaggaaugucccgucuauucaaucuagaggccuauuuggggccauugccgguuucauugaagggggguggacagggaugguagauggaugguacgguuaucaccaucaaaaugagcaggggucaggauaugcagccgaccugaagagcacacagaaugccauugacgagauuacuaacaaaguaaauucuguuauugaaaagaugaauacacaguucacagcaguagguaaagaguucaaccaccuggaaaaaagaauagagaauuuaaauaaaaaaguugaugaugguuuccuggacauuuggacuuacaaugccgaacuguugguucuauuggaaaaugaaagaacuuuggacuaccacgauucaaaugugaagaacuuauaugaaaagguaagaagccaguuaaaaaacaaugccaaggaaauuggaaacggcugcuuugaauuuuaccacaaaugcgauaacacgugcauggaaagugucaaaaaugggacuuaugacuacccaaaauacucagaggaagcaaaauuaaacagagaagaaauagaugggguaaagcuggaaucaacaaggauuuaccagauuuuggcgaucuauucaacugucgccaguucauugguacugguagucucccugggggcaaucaguuucuggaugugcucuaaugggucucuacaguguagaauauguauuuaa

SEQ ID NO: 36370 - RNA, 1701 nt, Artificial Sequence; identical to SEQ ID NO: 35430
  derived and/or modified CDS sequence (wt) from hemagglutinin__InfluenzaA__ADD97201

SEQ ID NO: 36371 - RNA, 1701 nt, Artificial Sequence
  derived and/or modified CDS sequence (wt) from hemagglutinin__InfluenzaA__ADD97211
augaaggcaauacuaguaguucugcuauauacauuugcaaccgcaaaugcagacacauuauguauagguuaucaugcgaacaauucaacagacacuguagacacaguacuagaaaagaauguaacaguaacacacucuguuaaccuucuagaagacaagcauaacgggaaacuaugcaaacuaagagggguagccccauugcauuuggguaaauguaacauugcuggcuggauccugggaaauccagagugugaaucacucuccacagcaagcucaugguccuacauuguggaaacaucuaguucagacaauggaacguguuacccaggagauuucaccgauuaugaggagcuaagggagcaauugagcucagugucaucauuugaaagguuugagauauuccccaagacaaguucauggcccaaucaugacucgaacaaagguguaacggcagcauguccucaugcuggagcaaaaagcuucuacaaaaauuuaauauggcuaguuaaaaaagggaauucauacccaaagcucagcaaauccuacauuaaugauaaagggaaagaaguccucgugcuauggggcauucaccauccaucuacuagugcugaccaacaaagucucuaucagaaugcagaugcauauguuuuuguggggacaucaagauacagcaagaaguucaagccggaaauagcaauaagacccaaagugagggaucaagaagggagaaugaacuauuacuggacacuaguagagccgggagacaaaauaacauucgaagcaacuggaaaucuagugguaccgagauaugcauucgcaauggaaagaaaugcuggaucugguauuaucauuucagauacaccaguccacgauugcaauacaacuugucagacacccaagggugcuauaaacaccagccucccauuucagaauauacauccgaucacaauuggaaaauguccaaaauauguaaaaagcacaaaauugagacuggccacaggauugaggaaugucccgucuauucaaucuagaggcuuauuuggggccauugccgguuucauugaagggggguggacagggaugguagauggaugguacgguuaucaccaucaaaaugagcaggggucaggauaugcagccgaccugaagagcacacagaaugccauugacgagauuacuaacaaaguaaauucuguuauugaaaagaugaauacacaguucacagcaguagguaaagaguucaaccaccuggaaaaaagaauagagaauuuaaauaaaaaaguugaugaugguuuccuggacauuuggacuuacaaugccgaacuguugguucuauuggaaaaugaaagaacuuuggacuaccacgauucaaaugugaagaacuuauaugaaaagguaagaagccaguuaaaaaacaaugccaaggaaauuggaaacggcugcuuugaauuuuaccacaaaugcgauaacacgugcauggaaagugucaaaaaugggacuuaugacuacccaaaauacucagaggaagcaaaauuaaacagagaagaaauagaugggguaaagcuggaaucaacaaggauuuaccagauuuuggcgaucuauucaacugucgccaguucauugguacugguagucucccugggggcaaucaguuucuggaugugcucuaaugggucucuacaguguagaauauguauuuaa

SEQ ID NO: 36372 - RNA, 1701 nt, Artificial Sequence; identical to SEQ ID NO: 34714
  derived and/or modified CDS sequence (wt) from hemagglutinin__InfluenzaA__ADD97231

SEQ ID NO: 36373 - RNA, 1701 nt, Artificial Sequence
  derived and/or modified CDS sequence (wt) from hemagglutinin__InfluenzaA__ADD97241
augaaggcaauacuaguaguucugcuauauacauuugcaaccgcaaaugcagacacauuauguauagguuaucaugcgaacaauucaacagacacuguagacacaguacuagaaaagaauguaacaguaacacacucuguuaaccuucuagaagacaagcauaacgggaaacuaugcaaacuaagagggguagccccauugcauuuggguaaauguaacauugcuggcuggauccugggaaauccagagugugaaucacucuccacagcaagcucaugguccuacauuguggaaacaucuaguucagacaauggaacguguuacccaggagauuucaccgauuaugaggagcuaagggagcaauugagcucagugucaucauuugaaagguuugagauauuccccaagacaaguucauggcccaaucaugacucgaacaaagguguaacggcagcauguccucaugcuggagcaaaaagcuucuacaaaaauuuaauauggcuaguuaaaaaaggaaauucauacccaaagcucagcaaauccuacauuaaugauaaagggaaagaaguccucgugcuauggggcauucaccauccaucuacuagugcugaccaacaaagucucuaucagaaugcagaugcauauguuuuuguggggacaucaagauacagcaagaaguucaagccggaaauagcaauaagacccaaagugagggaucaagaagggagaaugaacuauuacuggacacuaguagagccgggagacaaaauaacauucgaagcaacuggaaaucuagugguaccgagauaugcauucgcaauggaaagaaaugcuggaucugguauuaucauuucagauacaccaguccacaauugcaauacaacuugucagacacccaagggugcuauaaacaccagccucccauuucagaauauacauccgaucacaauuggaaaauguccaaaauauguaaaaagcacaaaauugagacuggccacaggauugaggaaugucccgucuauucaaucuagaggcuuauuuggggccauugccgguuucauugaagggggguggacagggaugguagauggaugguacgguuaucaccaucaaaaugagcaggggucaggauaugcagccgaccugaagagcacacagaaugccauugacgagauuacuaacaaaguaaauucuguuauugaaaagaugaauacacaguucacagcaguagguaaagaguucaaccaccuggaaaaaagaauagagaauuuaaauaaaaaaguugaugaugguuuccuggacauuuggacuuacaaugccgaacuguugguucuauuggaaaaugaaagaacuuuggacuaccacgauucaaaugugaagaacuuauaugaaaagguaagaagccaguuaaaaaacaaugccaaggaaauuggaaacggcugcuuugaauuuuaccacaaaugcgauaacacgugcauggaaagugucaaaaaugggacuuaugacuacccaaaauacucagaggaagcaaaauuaaacagagaagaaauagaugggguaaagcuggaaucaacaaggauuuaccagauuuuggcgaucuauucaacugucgccaguucauugguacugguagucucccugggggcaaucaguuucuggaugugcucuaaugggucucuacaguguagaauauguauuuaa

SEQ ID NO: 36374 - RNA, 1701 nt, Artificial Sequence; identical to SEQ ID NO: 36364
  derived and/or modified CDS sequence (wt) from hemagglutinin__InfluenzaA__ADD97251

SEQ ID NO: 36375 - RNA, 1701 nt, Artificial Sequence; identical to SEQ ID NO: 36369
  derived and/or modified CDS sequence (wt) from hemagglutinin__InfluenzaA__ADD97261

SEQ ID NO: 36376 - RNA, 1701 nt, Artificial Sequence
  derived and/or modified CDS sequence (wt) from hemagglutinin__InfluenzaA__ADD97271
augaaggcaauacuaguaguucugcuauauacauuugcaaccgcaaaugcagacacauuauguauagguuaucaugcgaacaauucaacagacacuguagacacaguacuagaaaagaauguaacaguaacacacucuguuaaccuucuagaagacaagcauaacgggaaacuaugcaaacuaagagggguaaccccauugcauuuggguaaauguaacauugcuggcuggauccugggaaauccagagugugagucacucuccacagcaagcucaugguccuacauuguggaaacaucuaguucagacaauggaacguguuacccaggagauuucaucgauuaugaggagcuaagagagcaauugagcucagugucaucauuugaaagguuugagauauuccccaagacaaguucauggcccaaucaugacucgaacaaagguguaacggcagcauguccucaugcuggagcaaaaagcuucuacaaaaauuuaauauggcuaguuaaaaaaggaaauucauacccaaagcucagcaaauccuacauuaaugauaaagggaaagaaguccucgugcuauggggcauucaccauccaucuacuagugcugaccaacaaagucuuuaucagaaugcagaugcauauguuuuuguggggacaucaagauacagcaagaaguucaagccggaaauagcaauaagacccaaagugagggaucaagaagggagaaugaacuauuacuggacacuaguagagccgggagacaaaauaacauucgaagcaacugggaaucuagugguaccgagauaugcauucgcaauggaaagaaaugcuggaucugguauuaucauuucagauacaccaguccacgauugcaauacaacuugucagacacccaagggugcuauaaacaccagccucccauuucagaauauacauccgaucacaauuggaaaauguccaaaauauguaaaaagcacaaaauugagacuggccacaggauugaggaauaucccgucuauucaaucuagaggccuauuuggggccauugccgguuucauugaagggggguggacagggaugguagauggaugguacgguuaucaccaucaaaaugagcaggggucaggauaugcggccgaccugaagagcacacagaaugccauugacgagauuacuaacaaaguaaauucuguuauugaaaagaugaauacacaguucacagcaguagguaaagaguucaaccaccuggaaaaaagaauagagaauuuaaauaaaaaaguugaugaugguuuccuggacauuuggacuuacaaugccgaacuguugguucuauuggaaaaugaaagaacuuuggacuaccacgauucaaaugugaagaacuuauaugaaaagguaagaagccaguuaaaaaacaaugccaaggaaauuggaaacggcugcuuugaauuuuaccacaaaugcgauaacacgugcauggaaagugucaaaaaugggacuuaugacuacccaaaauacucagaggaagcaaaauuaaacagagaagaaauagaugggguaaagcuggaaucaacaaggauuuaccagauuuuggcgaucuauucaacugucgccaguucauugguacugguagucucccugggggcaaucaguuucuggaugugcucuaaugggucucuacaguguagaauauguauuuaa

SEQ ID NO: 36377 - RNA, 1701 nt, Artificial Sequence; identical to SEQ ID NO: 36368
  derived and/or modified CDS sequence (wt) from hemagglutinin__InfluenzaA__ADD97281

SEQ ID NO: 36378 - RNA, 1701 nt, Artificial Sequence
  derived and/or modified CDS sequence (wt) from hemagglutinin__InfluenzaA__ADD97291
augaaggcaauacuaguaguucugcuauauacauuugcaaccgcaaaugcagacacauuauguauagguuaucaugcgaacaauucaacagacacuguagacacaguacuagaaaagaauguaacaguaacacacucuguuaaccuucuagaagacaagcauaacgggaaacuaugcaaacuaagagggguagccccauugcauuuggguaaauguaacauugcuggcuggauccugggaaauccagagugugaaucacucuccacagcaagcucaugguccuacauuguggaaacaucuaguucagacaauggaacguguuacccaggagauuucaucgauuaugaggagcuaagagagcaauugagcucagugucaucauuugaaagguuugagauauuccccaagacaaguucauggcccaaucaugacucgaacaaagguguaacggcagcauguccucaugcuggagcaaaaagcuucuacaaaaauuuaauauggcuaguuaaaaaaggaaauucauacccaaagcucagcaaauccuacauuaaugauaaagggaaagaaguccucgugcuauggggcauucaccauccaucuacuagugcugaccaacaaagucucuaucagaaugcagaugcauauguuuuuguggggacaucaagauacagcaagaaguucaagccggaaauagcaauaagacccaaagugagggaucaagaagggagaaugaacuauuacuggacacuaguagagccgggagacaaaauaacauucgaagcaacuggaaaucuagugguaccgagauaugcauucgcaauggaaagaaaugcuggaucugguauuaucauuucagauacaccaguccacgauugcaauacaacuugucagacacccaagggugcuauaaacaccagccucccauuucagaauauacauccgaucacaauugggaaauguccaaaauauguaaaaagcacaaaauugagacuggccacaggauugaggaaugucccgucuauucaaucuagaggccuauuuggggccauugccgguuucauugaagggggguggacagggaugguagauggaugguacgguuaucaccaucaaaaugagcaggggucaggauaugcagccgaccugaagagcacacagaaugccauugacgagauuacuaacaaaguaaauucuguuauugaaaagaugaauacacaguucacagcaguagguaaagaguucaaccaccuggaaaaaagaauagagaauuuaaauaaaaagguugaugaugguuuccuggacauuuggacuuacaaugccgaacuguugguucuauuggaaaaugaaagaacuuuggacuaccacgauucaaaugugaagaacuuauaugaaaagguaagaagccaguuaaaaaacaaugccaaggaaauuggaaacggcugcuuugaauuuuaccacaaaugcgauaacacgugcauggaaagugucaaaaaugggacuuaugacuacccaaaauacucagaggaagcaaaauuaaacagagaagaaauagaugggguaaagcuggaaucaacaaggauuuaccagauuuuggcgaucuauucaacugucgccaguucauugguacugguagucucccugggggcaaucaguuucuggaugugcucuaaugggucucuacaguguagaauauguauuuaa

SEQ ID NO: 36379 - RNA, 1701 nt, Artificial Sequence
  derived and/or modified CDS sequence (wt) from hemagglutinin__InfluenzaA__ADD97311
augaaggcaauacuaguaguucugcuauauacauuugcaaccgcaaaugcagacacauuauguauagguuaucaugcgaacaauucaacagacacuguagacacaauacuagaaaagaauguaacaguaacacacucuguuaaccuucuagaagacaagcauaacgggaaacuaugcaaacuaagagggguagccccauugcauuuggguaaauguaacauugcuggcuggauccugggaaauccagagugugaaucacucuccacagcaagcucaugguccuacauuguggaaacaucuaguucagacaauggaacguguuacccaggagauuucaucgauuaugaggagcuaagagagcaauugagcucagugucaucauuugaaagguuugagauauuccccaagacaaguucauggcccaaucaugacucgaacaaagguguaacggcagcauguccucaugcuggagcaaaaagcuucuacaaaaauuuaauauggcuaguuaaaaagggaaauucauacccaaagcucagcaaauccuacauuaaugauaaagggaaagaaauccucgugcuauggggcauucaccauccaucuacuauugcugaccaacaaagucucuaucagaaugcagaugcauauguuuuuguggggacaucaagauacagcaagaaguucaagccggaaauagcaauaagacccaaagugagggaucaagaagggagaaugaaauauuacuggacacuaguagagccgggagacaaaauaacauucgaagcaacuggaaaucuagugguaccgagauaugcauucgcaauggaaagaaaugcuggaucugguauuaucauuucagauacaccaguccacaauugcaauacaacuugucagacauccaagggugcuauaaacaccagccucccauuucagaauauacauccgaucacaauuggaaaauguccaaaauauguaaaaagcacaaaauugagacuggccacaggauugaggaaugucccgucuauucaaucuagaggccuauuuggggccauugccgguuucauugaagggggguggacagggaugguagauggaugguacgguuaucaccaucaaaaugagcaggggucaggauaugcagccgaccugaagagcacacagaaugccauugacgagauuacuaacaaaguaaauucuguuauugaaaagaugaauacacaguucacagcaguagguaaagaguucaaccaccuggaaaaaagaauagagaauuuaaauaaaaagguugaugaugguuuccuggacauuuggacuuacaaugccgaacuguugguucuauuggaaaaugaaagaacuuuggacuaccacgauucaaaugugaagaacuuauaugaaaagguaagaagccaguuaaaaaacaaugccaaggaaauuggaaacggcugcuuugaauuuuaccacaaaugcgauaacacgugcauggaaagugucaaaaaugggacuuaugacuacccaaaauacucagaggaagcaaaauuaaacagagaagaaauagaugggguaaagcuggaaucaacaaggauuuaccagauuuuggcgaucuauucaacugucgccaguucauugguacugguagucucccugggggcaaucaguuucuggaugugcucuaaugggucucuacaguguagaauauguauuuaa

SEQ ID NO: 36380 - RNA, 1701 nt, Artificial Sequence
  derived and/or modified CDS sequence (wt) from hemagglutinin__InfluenzaA__ADD97321
augaaggcaauacuaguaguucugcuauauacauuugcaaccgcaaaugcagacacauuauguauagguuaucaugcgaacaauucaacagacacuguagacacaguacuagaaaagaauguaacaguaacacacucuguuaaccuucuagaagacaagcauaacgggaaacuaugcaaacuaagagggguagccccauugcauuuggguaaauguaacauugcuggcuggauccugggaaauccagagugugaaucacucuccacagcaagcucaugguccuacauuguggaaacaucuaguucagacaauggaacguguuacccaggagauuucaccgauuaugaggagcuaagggagcaauugagcucagugucaucauuugaaagguuugagauauuccccaagacaaguucauggcccaaucaugacucgaacaaagguguaacggcagcauguccucaugcuggagcaaaaagcuucuacaaaaauuuaauauggcuaguuaaaaaagggaauucauacccaaagcucagcaaauccuacaucaaugauaaagggaaagaaguccucgugcuauggggcauucaccauccaucuacuagugcugaccaacaaagucucuaucagaaugcagaugcauauguuuuuguggggacaucaagauacagcaagaaguucaagccggaaauagcaauaagacccaaagugagggaucaagaagggagaaugaacuauuacuggacacuaguagagccgggagacaaaauaacauucgaagcaacuggaaaucuagugguaccgagauaugcauucgcaauggaaagaaaugcuggaucugguauuaucauuucagauacaccaguccacgauugcaauacaacuugucagacacccaagggugcuauaaacaccagccucccauuucagaauauacauccgaucacaauuggaaaauguccaaaauauguaaaaagcacaaaauugagacuggccacaggauugaggaaugucccgucuauucaaucuagaggcuuauuuggggccauugccgguuucauugaagggggguggacagggaugguagauggaugguacgguuaucaccaucaaaaugagcaggggucaggauaugcagccgaccugaagagcacacagaaugccauugacgagauuacuaacaaaguaaauucuguuauugaaaagaugaauacacaguucacagcaguagguaaagaguucaaccaccuggaaaaaagaauagagaauuuaaauaaaaaaguugaugaugguuuccuggacauuuggacuuacaaugccgaacuguugguucuauuggaaaaugaaagaacuuuggacuaccacgauucaaaugugaagaacuuauaugaaaagguaagaagccaguuaaaaaacaaugccaaggaaauuggaaacggcugcuuugaauuuuaccacaaaugcgauaacacgugcauggaaagugucaaaaaugggacuuaugacuacccaaaauacucagaggaagcaaaauuaaacagagaagaaauagaugggguaaagcuggaaucaacaaggauuuaccagauuuuggcgaucuauucaacugucgccaguucauugguacugguagucucccugggggcaaucaguuucuggaugugcucuaaugggucucuacaguguagaauauguauuuaa

SEQ ID NO: 36381 - RNA, 1701 nt, Artificial Sequence; identical to SEQ ID NO: 35845
  derived and/or modified CDS sequence (wt) from hemagglutinin__InfluenzaA__ADD97331

SEQ ID NO: 36382 - RNA, 1701 nt, Artificial Sequence
  derived and/or modified CDS sequence (wt) from hemagglutinin__InfluenzaA__ADD97341
augaaggcaauacuaguaguucugcuauauacauuugcaaccguaaaugcagacacauuauguauagguuaucaugcgaacaauucaacagacacuguagacacaguacuagaaaagaauguaacaguaacacacucuguuaaccuucuagaagacaagcauaacgggaaacuaugcaaacuaagagggguagccccauugcauuuggguaaauguaacauugcuggcuggauccugggaaauccagagugugaaucacucuccacagcaagcucaugguccuacauuguggaaacaucuaguucagacaauggaacguguuacccaggagauuucaucgauuaugaggagcuaagagagcaauugagcucagugucaucauuugaaagguuugagauauuccccaagacaaguucauggcccaaucaugacucgaacaaagguguaacggcagcauguccucaugcuggagcaaaaagcuucuacaaaaauuuaauauggcuaguuaaaaaaggaaauucauacccaaagcucagcaaauccuacauuaaugauaaagggaaagaaguccucgugcuauggggcauucaccauccaucuacuaguacugaccaacaaagucucuaucagaaugcagaugcauauguuuuuguggggacaucaagauacagcaagaaguucaagccggaaauagcaauaagacccaaagugagggaucaagaagggagaaugaacuauuacuggacacuaguagagccgggagacaaaauaacauucgaagcaacuggaaaucuagugguaccgagauaugcauucgcaauggaaagaaaugcuggaucugguauuaucauuucagauacaccaguccacgauugcaauacaacuugucagacacccaagggugcuauaaacaccagccucccauuucagaauauacauccgaucacaauuggaaaauguccaaaauauguaaaaagcacaaaauugagacuggccacaggauugaggaauaucccgucuauucaaucuagaggccuauuuggggccauugccgguuucauugaagggggguggacagggaugguagauggaugguacgguuaucaccaucaaaaugagcaggggucaggauaugcagccgaccugaagagcacacagaaugccauugacgagauuacuaacaaaguaaauucuguuauugaaaagaugaauacacaguucacagcaguagguaaagaguucaaccaccuggaaaaaagaauagagaauuuaaauaaaaagguugaugaugguuuccuggacauuuggacuuacaaugccgaacuguugguucuauuggaaaaugaaagaacuuuggacuaccacgauucaaaugugaagaacuuauaugaaaagguaagaagccaguuaaaaaacaaugccaaggaaauuggaaacggcugcuuugaauuuuaccacaaaugcgauaacacgugcauggaaagugucaaaaaugggacuuaugacuacccaaaauacucagaggaagcaaaauuaaacagagaagaaauagaugggguaaagcuggaaucaacaaggauuuaccagauuuuggcgaucuauucaacugucgccaguucauugguacugguagucucccugggggcaaucaguuucuggaugugcucuaaugggucucuacaguguagaauauguauuuaa

SEQ ID NO: 36383 - RNA, 1701 nt, Artificial Sequence
  derived and/or modified CDS sequence (wt) from hemagglutinin__InfluenzaA__ADD97351
augaaggcaauacuaguaguucugcuauauacauuugcaaccgcaaaugcagacacauuauguauagguuaucaugcgaacaauucaacagacacuguagacacaguacuagaaaagaauguaacaguaacacacucuguuaaccuucuagaagacaagcauaacgggaaacuaugcaaacuaagagggguagccccauugcauuuggguaaauguaacauugcuggcuggauccugggaaauccagagugugaaucacucuccacagcaagcucaugguccuacauuguggaaacaucuaguucagacaauggaacguguuacccaggagauuucaucgauuaugaggagcuaagagagcaauugagcucagugucaucauuugaaagguuugagauauuccccaagacaaguucauggcccaaucaugacucgaacaaagguguaacggcagcauguccucaugcuggagcaaaaagcuucuacaaaaauuuaauauggcuaguuaaaaaaggaaauucauacccaaagcucagcaaauccuacauuaaugauaaagggaaagaaguccucgugcuauggggcauucaccauccaucuacuagugcugaccaacaaagucucuaucagaaugcagaugcauauguuuuuguggggacaucaagauacagcaagaaguucaagccggaaauagcaauaagacccaaagugagggaucaagaagggagaaugaacuauuacuggacacuaguagagccgggagacaaaauaacauucgaagcaacuggaaaucuagugguaccgagauaugcauucgcaauggaaagaaaugcuggaucugguauuaucauuucagauacaccaguccacgauugcaauacaacuugucagacacccaagggugcuauaaacaccagccucccauuucagaauauacauccgaucacaauuggaaaauguccaaaauauguaaaaagcacaaaauugagacuggccacaggauugaggaaugucccgucuauucaaucuagaggccuauuuggggccauugccgguuucauugaagggggguggacagggaugguagauggaugguacgguuaucaccaucaaaaugagcaggggucaggauaugcagccgaccugaagagcacacagaaugccauugacaagauuacuaacaaaguaaauucuguuauugaaaagaugaauacacaguucacagcaguagguaaagaguucaaccaccuggaaaaaagaauagagaauuuaaauaaaaaaguugaugaugguuuccuggacauuuggacuuacaaugccgaacuguugguucuauuggaaaaugaaagaacuuuggacuaccacgauucaaaugugaagaacuuauaugaaaagguaagaagccaguuaaaaaacaaugccaaggaaauuggaaacggcugcuuugaauuuuaccacaaaugcgauaacacgugcauggaaagugucaaaaaugggacuuaugacuacccaaaauacucagaggaagcaaaauuaaacagagaagaaauagaugggguaaagcuagaaucaacaaggauuuaccagauuuuggcgaucuauucaacugucgccaguucauugguacugguagucucccugggggcaaucaguuucuggaugugcucuaaugggucucuacaguguagaauauguauuuaa

SEQ ID NO: 36384 - RNA, 1701 nt, Artificial Sequence
  derived and/or modified CDS sequence (wt) from hemagglutinin__InfluenzaA__ADD97361
augaaggcaauacuaguaguucugcuauauacauuugcaaccgcaaaugcagacacauuauguauagguuaucaugcgaacaauucaacagacacuguagacacaguacuagaaaagaauguaacaguaacacacucuguuaaccuucuagaagacaagcauaacgggaaacuaugcaaacuaagagggguagccccauugcauuuggguaaauguaacauugcuggcuggauccugggaaauccagagugugaaucacucuccacagcaagcucaugguccuacauuguggaaacaucuaguucagacaauggaacguguuacccaggagauuucaucgauuaugaggagcuaagagagcaauugagcucagugucaucauuugaaagguuugagauauuccccaagacaaguucauggcccaaucaugacucgaacaaagguguaacggcagcauguccucaugcuggagcaaaaagcuucuacaaaaauuugauauggcuaguuaaaaaaggaaauucauacccaaagcucagcaaauccuacauuaaugauaaagggaaagaaguccucgugcuauggggcauucaccauccaucuacuagugcugaccaacaaagucucuaucagaaugcagaugcauauguuuuuguggggacaucaagauacagcaagaaguucaagccggaaauagcaauaagacccaaagugagggaucaagaagggagaaugaacuauuacuggacacuaguagagccgggagacaaaauaacauucgaagcaacuggaaaucuagugguaccgagauaugcauucgcaauggaaagaaaugcuggaucugguauuaucauuucagauacaccaguccacgauugcaauacaacuugucagacacccaagggugcuauaaacaccagccucccauuucagaauauacauccgaucacaauuggaaaauguccaaaauauguaaaaagcacaaaauugagacuggccacaggauugaggaaugucccgucuauucaaucuagaggccuauuuggggccauugccgguuucauugaagggggguggacagggaugguagauggaugguacgguuaucaccaucaaaaugagcaggggucaggauaugcagccgaccugaagagcacacagaaugccauugacaagauuacuaacaaaguaaauucuguuauugaaaagaugaauacacaguucacagcaguagguaaagaguucaaccaccuggaaaaaagaauagagaauuuaaauaaaaaaguugaugaugguuuccuggacauuuggacuuacaaugccgaacuguugguucuauuggaaaaugaaagaacuuuggacuaccacgauucaaaugugaagaacuuauaugaaaagguaagaagccaguuaaaaaacaaugccaaggaaauuggaaacggcugcuuugaauuuuaccacaaaugcgauaacacgugcauggaaagugucaaaaaugggacuuaugacuacccaaaauacucagaggaagcaaaauuaaacagagaagaaauagaugggguaaagcuagaaucaacaaggauuuaccagauuuuggcgaucuauucaacugucgccaguucauugguacugguagucucccugggggcaaucaguuucuggaugugcucuaaugggucucuacaguguagaauauguauuuaa

SEQ ID NO: 36385 - RNA, 1701 nt, Artificial Sequence
  derived and/or modified CDS sequence (wt) from hemagglutinin__InfluenzaA__ADD97371
augaaggcaauacuaguaguucugcuauauacauuugcaaccgcaaaugcagacacauuauguauagguuaucaugcgaacaauucaacagacacuguagacacaguacuagaaaagaauguaacaguaacacacucuguuaaccuucuagaagacaagcauaacgggaaacuaugcaaacuaagagggguagccccauugcauuuggguaaauguaacauugcuggcuggauccugggaaauccagagugugaaucacucuccacagcaagcucaugguccuacauuguggaaacaucuaguucagacaauggaacguguuacccaggagauuucaucgauuaugaggagcuaagagagcaauugagcucagugucaucauuugaaagguuugagauauuccccaagacaaguucauggcccaaucaugacucgaacaaagguguaacggcagcauguccucaugcuggagcaaaaagcuucuacaaaaauuuaauauggcuaguuaaaaaaggaaauucauacccaaagcucagcaaauccuacauuaaugauaaagggaaagaaguccucgugcuauggggcauucaccauccaucuacuagugcugaccaacaaagucucuaucagaaugcagaugcauauguuuuuguggggacaucaagauacagcaagaaguucaagccggaaauagcaauaagacccaaagugagggaacaagaagggagaaugaacuauuacuggacacuaguagagccgggagacaaaauaacauucgaagcaacuggaaaucuagugguaccgagauaugcauucgcaauggaaagaaaugcuggaucugguauuaucauuucagauacaccaguccacgauugcaauacaacuugucagacacccaagggugcuauaaacaccagccucccauuucagaauauacauccgaucacaauuggaaaauguccaaaauauguaaaaagcacaaaauugagacuggccacaggauuaaggaaugucccgucuauucaaucuagaggccuauuuggggccauugccgguuucauugaagggggguggacagggaugguagauggaugguacgguuaucaccaucaaaaugagcaggggucaggauaugcagccgaccugaagagcacacagaaugccauugacgagauuacuaacaaaguaaauucuguuauugaaaagaugaauacacaguucacagcaguagguaaagaguucaaccaccuggaaaaaagaauagagaauuuaaauaaaaaaguugaugaugguuuccuggacauuuggacuuacaaugccgaacuguugguucuauuggaaaaugaaagaacuuuggacuaccacgauucaaaugugaagaacuuauaugaaaagguaagaagccaguuaaaaaacaaugccaaggaaauuggaaacggcugcuuugaauuuuaccacaaaugcgauaacacgugcauggaaagugucaaaaaugggacuuaugacuacccaaaauacucagaggaagcaaaauuaaacagagaagaaauagaugggguaaagcuggaaucaacaaggauuuaccagauuuuggcgaucuauucaacugucgccaguucauugguacugguagucucccugggggcaaucaguuucuggaugugcucuaaugggucucuacaguguagaguaugcauuuaa

SEQ ID NO: 36386 - RNA, 1701 nt, Artificial Sequence
  derived and/or modified CDS sequence (wt) from hemagglutinin__InfluenzaA__ADD97381
augaaggcaauacuaguaguucugcuauauacauuugcaaccgcaaaugcagacacauuauguauagguuaucaugcgaacaauucaacagacacuguagacacaguacuagaaaagaauguaacaguaacacacucuguuaaccuucuagaagacaagcauaacgggaaacuaugcaaacuaagagggguagccccauugcauuuggguaaauguaacauugcuggauggauccugggaaauccagagugugaaucacucuccacagcaagcucaugguccuacauuguggaaacaucuaguucagacaauggaacguguuacccaggagauuucaucgauuaugaggagcuaagagagcaauugagcucagugucaucauuugaaagguuugagauauuccccaagacaaguucauggcccaaucaugacucgaacaaagguguaacggcagcauguccucaugcuggagcaaaaagcuucuacaaaaauuugauauggcuaguuaaaaaaggaaauucauacccaaagcucagcaaauccuacauuaaugauaaagggaaagaaguccucgugcuauggggcauucaccauccaucuacuagugcugaccaacaaagucucuaucagaaugcagaugcauauguuuuuguggggacaucaagauacagcaagaaguucaagccggaaauagcaauaagacccaaagugagggaucaagaagggagaaugaacuauuacuggacacuaguagagccgggagacaaaauaacauucgaagcaacuggaaaucuagugguaccgagauaugcauucgcaauggaaagaaaugcuggaucugguauuaucauuucagauacaccaguccacgauugcaauacaacuugucagacacccaagggugcuauaaacaccagccucccauuucagaauauacauccgaucacaauuggaaaauguccaaaauauguaaaaagcacaaaauugagacuggccacaggauugaggaaugucccgucuauucaaucuagaggccuauuuggggccauugccgguuucauugaagggggguggacagggaugguagauggaugguacgguuaucaccaucaaaaugagcaggggucaggauaugcagccgaccugaagagcacacagaaugccauugacaagauuacuaacaaaguaaauucuguuauugaaaagaugaauacacaguucacagcaguagguaaagaguucaaccaccuggaaaaaagaauagagaauuuaaauaaaaaaguugaugaugguuuccuggacauuuggacuuacaaugccgaacuguugguucuauuggaaaaugaaagaacuuuggacuaccacgauucaaaugugaagaacuuauaugaaaagguaagaagccaguuaaaaaacaaugccaaggaaauuggaaacggcugcuuugaauuuuaccacaaaugcgauaacacgugcauggaaagugucaaaaaugggacuuaugacuacccaaaauacucagaggaagcaaaauuaaacagagaagaaauagaugggguaaagcuagaaucaacaaggauuuaccagauuuuggcgaucuauucaacugucgccaguucauugguacugguagucucccugggggcaaucaguuucuggaugugcucuaaugggucucuacaguguagaauauguauuuaa

SEQ ID NO: 36387 - RNA, 1701 nt, Artificial Sequence
  derived and/or modified CDS sequence (wt) from hemagglutinin__InfluenzaA__ADD97391
augaaggcaauacuaguaguucugcuauauacauuugcaaccgcaaaugcagacacauuauguauagguuaucaugcgaacaauucaacagacacuguagacacaguacuagaaaagaauguaacaguaacacacucuguuaaccuucuagaagacaagcauaacgggaaacuaugcaaacuaagagggguagccccauugcauuuggguaaauguaacauugcuggcuggauccugggaaauccagagugugaaucacucuccacagcaagcucaugguccuacauuguggaaacaucuaguucagacaauggaacguguuacccaggagauuucaucgauuaugaggagcuaagagagcaauugagcucagugucaucauuugaaagguuugagauauuccccaagacaaguucauggccuaaucaugacucgaacaaagguguaacggcagcauguccucaugcuggagcaaaaagcuucuacaaaaauuuaauauggcuaguuaaaaaaggaaauucauacccaaagcucagcaaauccuacauuaaugauaaagggaaagaaguccucgugcuauggggcauucaccauccaucuacuagugcugaccaacaaagucucuaucagaaugcagaugcauauguuuuuguggggacaucaagauacagcaagaaguucaagccggaaauagcaauaagacccaaagugagggaucaagaagggagaaugaacuauuacuggacacuaguagagccgggagacaaaauaacauucgaagcaacuggaaaucuagugguaccgagauaugcauucgcaauggaaagaaaugcuggaucugguauuaucauuucagauacaccaguccacgauugcaauacaacuugucagacacccaagggugcuauaaacaccagccucccauuucagaauauacauccgaucacaauuggaaaauguccaaaauauguaaaaagcacaaaauugagacuggccacaggauugaggaaugucccgucuauucaaucuagaggccuauuuggggccauugccgguuucauugaagggggguggacagggaugguagauggaugguacgguuaucaccaucaaaaugagcaggggucaggauaugcagccgaccugaagagcacacagaaugccauugacgagauuacuaacaaaguaaauucuguuauugaaaagaugaauacacaguucacagcaguagguaaagaguucaaccaccuggaaaaaagaauagagaauuuaaauaaaaaaguugaugaugguuuccuggacauuuggacuuacaaugccgaacuguugguucuauuggaaaaugaaagaacuuuggacuaccacgauucaaaugugaagaacuuauaugaaaagguaagaagccaguuaaaaaacaaugccaaggaaauuggaaacggcugcuuugaauuuuaccacaaaugcgauaacacgugcauggaaagugucaaaaaugggacuuaugacuacccaaaauacucagaggaagcaaaauuaaacagagaagaaauagaugggguaaagcuggaaucaacaaggauuuaccagauuuuggcgaucuauucaacugucgccaguucauugguacugguagucucccugggggcaaucaguuucuggaugugcucuaaugggucucuacaguguagaauauguauuuga

SEQ ID NO: 36388 - RNA, 1701 nt, Artificial Sequence
  derived and/or modified CDS sequence (wt) from hemagglutinin__InfluenzaA__ADD97411
augaaggcaauacuaguaguucugcuauauacauuugcaaccgcaaaugcagacacauuauguauagguuaucaugcgaacaauucaacagacacuguagacacaguacuagaaaagaauguaacaguaacacacucuguuaaccuucuagaagacaagcauaacgggaaacuaugcaaacuaagagggguagccccauugcauuuggguaaauguaacauugcuggcuggauccugggaaauccagagugugaaucacucuccacagcaagcucaugguccuacauuguggaaacaucuaguucagacaauggaacguguuacccaggagauuucaucgauuaugaggagcuaagagagcaauugagcucagugucaucauuugaaagguuugagauauuccccaagacaaguucauggcccaaucaugacucgaacaaagguguaacggcagcauguccucaugcuggagcaaaaagcuucuacaaaaauuuaauauggcuaguuaaaaaaggaaauucauacccaaagcucagcaaauccuacauuaaugauaaagggaaagaaguccucgugcuauggggcauucaccauccaucuacuagugcugaccaacaaagucucuaucagaaugcagaugcauauguuuuuguggggacaucaagauacagcaagaaguucaagccggaaauagcaauaagacccaaagugagggaucaagaagggagaaugaacuauuacuggacacuaguagagccgggagacaaaauaacauucgaagcaacuggaaaucuagugguaccgagauaugcauucgcaauggaaagaaaugcuggaucugguauuaucauuucagauacaccaguccacgauugcaauacaacuugucagacacccaagggugcuauaaacaccagccucccauuucagaauauacauccgaucacaauuggaaaauguccaaaauauguaaaaagcacaaaauugagacuggccacaggauugaggaaugucccgucuauucaaucuagaggccuauuuggggccauugccgguuucauugaagggggguggacagggaugguagauggaugguacgguuaucaccaucaaaaugagcaggggucaggauaugcagccgaccugaagagcacacagaaugccauugacaagauuacuaacaaaguaaauucuguuauugaaaagaugaauacacaguucacagcaguagguaaagaguucaaccaccuggaaaaaagaauagagaauuuaaauaaaaaaguugaugaugguuuccuggacauuuggacuuacaaugccgaacuguugguucuauuggaaaaugaaagaacuuuggacuaccacgauucaaaugugaagaacuuauaugaaaagguaagaagccaguuaaaaaacaaugccaaggaaauuggaaacggcugcuuugaauuuuaccacaaaugcgauaacacgugcauggaaagugucaaaaaugggacuuaugacuacccaaaauauucagaggaagcaaaauuaaacagagaagaaauagaugggguaaagcuagaaucaacaaggauuuaccagauuuuggcgaucuauucaacugucgccaguucauugguacugguagucucccugggggcaaucaguuucuggaugugcucuaaugggucucuacaguguagaauauguauuuaa

SEQ ID NO: 36389 - RNA, 1701 nt, Artificial Sequence; identical to SEQ ID NO: 36388
  derived and/or modified CDS sequence (wt) from hemagglutinin__InfluenzaA__ADD97421

SEQ ID NO: 36390 - RNA, 1701 nt, Artificial Sequence
  derived and/or modified CDS sequence (wt) from hemagglutinin__InfluenzaA__ADD97431
augaaggcaauacuaguaguucugcuauauacauuugcaaccgcaaaugcagacacauuauguauagguuaucaugcgaacaauucaacagacacuguagacacaguacuagaaaagaauguaacaguaacacacucuguuaaccuucuagaagacaagcauaacgggaaacuaugcaaacuaagagggguagccccauugcauuuggguaaauguaacauugcuggcuggauccugggaaauccagagugugaaucacucuccacagcaagcucaugguccuacauuguggaaacaucuaguucagacaauggaacguguuacccaggagauuucaucgauuaugaggagcuaagagagcaauugagcucagugucaucauuugaaagguuugagauauuccccaagacaaguucauggcccaaucaugacucgaacaaaggugugacggcagcauguccucaugcuggagcaaaaagcuucuacaaaaauuuaauauggcuaguuaaaaaaggaaauucauacccaaagcucagcaaauccuacauuaaugauaaagggaaagaaguccucgugcuauggggcauucaccauccaucuacuagugcugaccaacaaagucucuaucagaaugcagaugcauauguuuuuguggggacaucaagauacagcaagaaguucaagccggaaauagcaauaagacccaaagugagggaucaagaagggagaaugaacuauuacuggacacuaguagagccgggagacaaaauaacauucgaagcaacuggaaaucuagugguaccgagauaugcauucgcaauggaaagaaaugcuggaucugguauuaucauuucagauacaccaguccacgauugcaauacaacuugucagacacccaagggugcuauaaacaccagccucccauuucagaauauacauccgaucacaauuggaaaauguccaaaauauguaaaaagcacaaaauugagacuggccacaggauugaggaaugucccgucuauucaaucuagaggccuauuuggggccauugccgguuucauugaagggggguggacagggaugguagauggaugguacgguuaucaccaucaaaaugagcaggggucaggauaugcagccgaccugaagagcacacagaaugccauugacgagauuacuaacaaaguaaauucuguuauugaaaagaugaauacacaguucacagcaguagguaaagaguucaaccaccuggaaaaaagaauagagaauuuaaauaaaaaaguugaugaugguuuccuggacauuuggacuuacaaugccgaacuguugguucuauuggaaaaugaaagaacuuuggacuaccacgauucaaaugugaagaacuuauaugaaaagguaagaagccaguuaaaaaacaaugccaaggaaauuggaaacggcugcuuugaauuuuaccacaaaugcgauaacacgugcauggaaagugucaaaaaugggacuuaugacuacccaaaauacucagaggaagcaaaauuaaacagagaagaaauagaugggguaaagcuggaaucaacaaggauuuaccagauuuuggcgaucuauucaacugucgccaguucauugguacugguagucucccugggggcaaucaguuucuggaugugcucuaaugggucucuacaguguagaauauguauuuaa

SEQ ID NO: 36391 - RNA, 1701 nt, Artificial Sequence
  derived and/or modified CDS sequence (wt) from hemagglutinin__InfluenzaA__ADD97441
augaaggcaauacuaguaguucugcuauauacauuugcaaccgcaaaugcagacacauuauguauagguuaucaugcgaacaauucaacagacacuguagacacaauacuagaaaagaauguaacaguaacacacucuguuaaccuucuagaagacaagcauaacgggaaacuaugcaaacuaagagggguagccccauugcauuuggguaaauguaacauugcuggcuggauccugggaaauccagagugugaaucacucuccacagcaagcucaugguccuacauuguggaaacaucuaguucagacaauggaacguguuacccaggagauuucaucgauuaugaggagcuaagagagcaauugagcucagugucaucauuugaaagguuugagauauuccccaagacaaguucauggcccaaucaugacucgaacaaagguguaacggcagcauguccucaugcuggagcaaaaagcuucuacaaaaauuuaauauggcuaguuaaaaagggaaauucauacccaaagcucagcaaauccuacauuaaugauaaagggaaagaaauccucgugcuauggggcauucaccauccaucuacuagugcugaccaacaaagucucuaucaaaaugcagaugcauauguuuuuguggggacaucaagauacagcaagaaguucaagccggaaauagcaauaagacccaaagugagggaucaagaagggagaaugaacuauuacuggacacuaguagagccgggagacaaaauaacauucgaagcaacuggaaaucuagugguaccgagauaugcauucgcaauggaaagaaaugcuggaucugguauuaucauuucagauacaccaguccacgauugcaauacaacuugucagacacccaagggugcuauaaacaccagccucccauuucagaauauacauccgaucacaauuggaaaauguccaaaauauguaaaaagcacaaaauugagacuggccacaggauugaggaaugucccgucuauucaaucuagaggccuauuuggggccauugccgguuucauugaagggggguggacagggaugguagauggaugguacgguuaucaccaucaaaaugagcaggggucaggauaugcagccgaccugaagagcacacagaaugccauugacgagauuacuaacaaaguaaauucuguuauugaaaagaugaauacacaguucacagcaguagguaaagaguucaaccaccuggaaaaaagaauagagaauuuaaauaaaaagguugaugaugguuuccuggacauuuggacuuacaaugccgaacuguugguucuauuggaaaaugaaagaacuuuggacuaccacgauucaaaugugaagaacuuauaugaaaagguaagaagccaguuaaaaaacaaugccaaggaaauuggaaacggcugcuuugaauuuuaccacaaaugcgauaacacgugcauggaaagugucaaaaaugggacuuaugacuacccaaaauacucagaggaagcaaaauuaaacagagaagaaauagaugggguaaagcuggaaucaacaaggauuuaccagauuuuggcgaucuauucaacugucgccaguucauugguacugguagucucccugggggcaaucaguuucuggaugugcucuaaugggucucuacaguguagaauauguauuuaa

SEQ ID NO: 36392 - RNA, 1701 nt, Artificial Sequence
  derived and/or modified CDS sequence (wt) from hemagglutinin__InfluenzaA__ADD97451
augaaggcaauacuaguaguucugcuauauacauuugcaaccgcaaaugcagacacauuauguauagguuaucaugcgaacaauucaacagacacuguagacacaguacuagaaaagaauguaacaguaacacacucuguuaaccuucuagaagacaagcauaacgggaaacuaugcaaacuaagagggguagccccauugcauuuggguaaauguaacauugcuggcuggauccugggaaauccagagugugaaucacucuccacagcaagcucaugguccuacauuguggaaacaucuaguucagacaauggaacguguuacccaggagauuucaucgauuaugaggagcuaagagagcaauugagcucagugucaucauuugaaagguuugagauauuccccaagacaaguucauggcccaaucaugacucgaacaaagguguaacggcagcauguccucaugcuggagcaaaaagcuucuacaaaaauuuaauauggcuaguuaaaaaaggaaauucauacccaaagcucagcaaauccuacauuaaugauaaagggaaagaaguccucgugcuauggggcauucaccauccaucuacuagugcugaccaacaaagucucuaucagaaugcagaugcauauguuuuuguggggacaucaagauacagcaagaaguucaagccggaaauagcaauaagacccaaagugagggaacaagaagggagaaugaacuauuacuggacacugguagagccgggagacaaaauaacauucgaagcaacuggaaaucuagugguaccgagauaugcauucgcaauggaaagaaaugcuggaucugguauuaucauuucagauacaccaguccacgauugcaauacaacuugucagacacccaagggugcuauaaacaccagccucccauuucagaauauacauccgaucacaauuggaaaauguccaaaauauguaaaaagcacaaaauugagacuggccacaggauuaaggaaugucccgucuauucaaucuagaggccuauuuggggccauugccgguuucauugaagggggguggacagggaugguagauggaugguacgguuaucaccaucaaaaugagcaggggucaggauaugcagccgaccugaagagcacacagaaugccauugacgagauuacuaacaaaguaaauucuguuauugaaaagaugaauacacaguucacagcaguagguaaagaguucaaccaccuggaaaaaagaauagagaauuuaaauaaaaaaguugaugaugguuuccuggacauuuggacuuacaaugccgaacuguugguucuauuggaaaaugaaagaacuuuggacuaccacgauucaaaugugaagaacuuauaugaaaagguaagaagccaguuaaaaaacaaugccaaggaaauuggaaacggcugcuuugaauuuuaccacaaaugcgauaacacgugcauggaaagugucaaaaaugggacuuaugacuacccaaaauacucagaggaagcaaaauuaaacagagaagaaauagaugggguaaagcuggaaucaacaaggauuuaccagauuuuggcgaucuauucaacugucgccaguucauugguacugguagucucccugggggcaaucaguuucuggaugugcucuaaugggucucuacaguguagaguaugcauuuaa

SEQ ID NO: 36393 - RNA, 1701 nt, Artificial Sequence; identical to SEQ ID NO: 36385
  derived and/or modified CDS sequence (wt) from hemagglutinin__InfluenzaA__ADD97461

SEQ ID NO: 36394 - RNA, 1701 nt, Artificial Sequence; identical to SEQ ID NO: 36286
  derived and/or modified CDS sequence (wt) from hemagglutinin__InfluenzaA__ADD97471

SEQ ID NO: 36395 - RNA, 1701 nt, Artificial Sequence
  derived and/or modified CDS sequence (wt) from hemagglutinin__InfluenzaA__ADD97481
augaaggcaauacuaguaguucugcuauauacauuugcaaccgcaaaugcagacacauuauguauagguuaucaugcgaacaauucaacagacacuguagacacaguacuagaaaagaauguaacaguaacacacucuguuaaccuucuagaagacaagcauaacgggaaacuaugcaaacuaagagggguagccccauugcauuuggguaaauguaacauugcuggcuggauccugggaaauccagagugugaaucacucuccacagcaagcucaugguccuacauuguggaaacaucuaguucagacaauggaacguguuacccaggagauuucaucaauuaugaggagcuaagagagcaauugagcucagugucaucauuugaaagguuugagauauuccccaagacaaguucauggcccaaucaugacucgaacaaagguguaacggcagcauguccucaugcuggagcaaaaagcuucuacaaaaauuuaauauggcuaguuaaaaaaggaaauucauacccaaagcucagcaaauccuacauuaaugauaaagggaaagaaguccucgugcuauggggcauucaccauccaucuacuagugcugaccaacaaagucucuaucagaaugcagaugcauauguuuuuguggggacaucaagauacagcaagaaguucaagccggaaauagcaauaagacccaaagugagggaucaagaagggagaaugaacuauuacuggacacuaguagagccgggagacaaaauaacauucgaagcaacuggaaaucuagugguaccgagauaugcauucgcaauggaaagaaaugcuggaucugguauuaucaucucagauacaccaguccacgauugcaauacaacuugucagacacccaagggugcuauaaacaccagccucccauuucagaauauacauccgaucacaauuggaaaauguccaaaauauguaaaaagcacaaaauugagacuggccacaggauugaggaaugucccgucuauucaaucuagaggccuauuuggggccauugccgguuucauugaagggggguggacagggaugguagauggaugguacgguuaucaccaucaaaaugagcaggggucaggauaugcagccgaccugaagagcacacagaaugccauugacaagauuacuaacaaaguaaauucuguuauugaaaagaugaauacacaguucacagcaguagguaaagaguucaaccaccuggaaaaaagaauagagaauuuaaauaaaaaaguugaugaugguuuccuggacauuuggacuuacaaugccgaacuguugguucuauuggaaaaugaaagaacuuuggacuaccacgauucaaaugugaagaacuuauaugaaaagguaagaagccaguuaaaaaacaaugccaaagaaauuggaaacggcugcuuugaauuuuaccacaaaugcgauaacacgugcauggaaagugucaaaaaugggacuuaugacuacccaaaauacucagaggaagcaaaauuaaacagagaagaaauagaugggguaaagcuggaaucaacaaggauuuaccagauuuuggcgaucuauucaacugucgccaguucauugguacugguagucucccugggggcaaucaguuucuggaugugcucuaaugggucucuacaguguagaauauguauuuaa

SEQ ID NO: 36396 - RNA, 1701 nt, Artificial Sequence
  derived and/or modified CDS sequence (wt) from hemagglutinin__InfluenzaA__ADD97491
augaaggcaauacuaguaguucugcuauauacauuugcaaccgcaaaugcagacacauuauguauagguuaucaugcgaacaauucaacagacacuguagacacaguacuagaaaagaauguaacaguaacacacucuguuaaccuucuagaagacaagcauaacgggaaacuaugcaaacuaagaggggaagccccauugcauuuggguaaauguaacauugcuggcuggauccugggaaauccagagugugaaucacucuccacagcaagcucaugguccuacauuguggaaacaucuaguucagacaauggaacguguuacccaggagauuucaucaauuaugaggagcuaagagagcaauugagcucagugucaucauuugaaagguuugagauauuccccaagacaaguucauggcccaaucaugacucgaacaaagguguaacggcagcauguccucaugcuggagcaaaaagcuucuacaaaaauuuaauauggcuaguuaaaaaaggaaauucauacccaaagcucagcaaauccuacauuaaugauaaagggaaagaaguccucgugcuauggggcauucaccauccaucuacuagugcugaccaacaaagucucuaucagaaugcagaugcauauguuuuuguggggacaucaagauacagcaagaaguucaagccggaaauagcaauaagacccaaagugagggaucaagaagggagaaugaacuauuacuggacacuaguagagccgggagacaaaauaacauucgaagcaacuggaaaucuagugguaccgagauaugcauucgcaauggaaagaaaugcuggaucugguauuaucaucucagauacaccaguccacgauugcaauacaacuugucagacacccaagggugcuauaaacacaagccucccauuucagaauauacauccgaucacaauuggaaaauguccaaaauauguaaaaagcacaaaauugagacuggccacaggauugaggaaugucccgucuauucaaucuagaggccuauuuggggccauugccgguuucauugaagggggguggacagggaugguagauggaugguacgguuaucaccaucaaaaugagcaggggucaggauaugcagccgaccugaagagcacacagaaugccauugacaagauuacuaacaaaguaaauucuguuauugaaaagaugaauacacaauucacagcaguagguaaagaguucaaccaccuggaaaaaagaauagagaauuuaaauaaaaaaguugaugaugguuuccuggacauuuggacuuacaaugccgaacuguugguucuauuggaaaaugaaagaacuuuggacuaccacgauucaaaugugaagaacuuauaugaaaagguaagaagccaguuaaaaaacaaugccaaggaaauuggaaacggcugcuuugaauuuuaccacaaaugcgauaacacgugcauggaaagugucaaaaaugggacuuaugacuacccaaaauacucagaggaagcaaaauuaaacagagaagaaauagaugggguaaagcuggaaucaacaaggauuuaccagauuuuggcgaucuauucaacugucgccaguucauugguacugguagucucccugggggcaaucaguuucuggaugugcucuaaugggucucuacaguguagaauauguauuuaa

SEQ ID NO: 36397 - RNA, 1701 nt, Artificial Sequence
  derived and/or modified CDS sequence (wt) from hemagglutinin__InfluenzaA__ADD97501
augaaggcaauacuaguaguucugcuauauacauuugcaaccgcaaaugcagacacauuauguauagguuaucaugcgaacaauucaacagacacuguagacacaguacuagaaaagaauguaacaguaacacacucuguuaaccuucuagaagacaagcauaacgggaaacuaugcaaacuaagaggggaagccccauugcauuuggguaaauguaacauugcuggcuggauccugggaaauccagagugugaaucacucuccacagcaagcucaugguccuacauuguggaaacaucuaguucagacaauggaacguguuacccaggagauuucaucaauuaugaggagcuaagagagcaauugagcucagugucaucauuugaaagguuugagauauuccccaagacaaguucauggcccaaucaugacucgaacaaagguguaacggcagcauguccucaugcuggagcaaaaagcuucuacaaaaauuuaauauggcuaguuaaaaaaggaaauucauacccaaagcucagcaaauccuacauuaaugauaaagggaaagaaguccucgugcuauggggcauucaccauccaucuacuagugcugaccaacaaagucucuaucagaaugcagaugcauauguuuuuguggggacaucaagauacagcaagaaguucaagccggaaauagcaauaagacccaaagugagggaucaagaagggagaaugaacuauuacuggacacuaguagagccgggagacaaaauaacauucgaagcaacuggaaaucuagugguaccgagauaugcauucgcaauggaaagaaaugcuggaucugguauuaucaucucagauacaccaguccacgauugcaauacaacuugucagacacccaagggugcuauaaacacaagccucccauuucagaauauacauccgaucacaauuggaaaauguccaaaauauguaaaaagcacaaaauugagacuggccacaggauugaggaaugucccgucuauucaaucuagaggccuauuuggggccauugccgguuucauugaagggggguggacagggaugguagauggaugguacgguuaucaccaucaaaaugagcaggggucaggauaugcagccgaccugaagagcacacagaaugccauugacaagauuacuaacaaaguaaauucuguuauugaaaagaugaauacacaguucacagcaguagguaaagaguucaaccaccuggaaaaaagaauagagaauuuaaauaaaaaaguugaugaugguuuccuggacauuuggacuuacaaugccgaacuguugguucuauuggaaaaugaaagaacuuuggacuaccacgauucaaaugugaagaacuuauaugaaaagguaagaagccaguuaaaaaacaaugccaaggaaauuggaaacggcugcuuugaauuuuaccacaaaugcgauaacacgugcauggaaagugucaaaaaugggacuuaugacuacccaaaauacucagaggaagcaaaauuaaacagagaagaaauagaugggguaaagcuggaaucaacaaggauuuaccagauuuuggcgaucuauucaacugucgccaguucauugguacugguagucucccugggggcaaucaguuucuggaugugcucuaaugggucucuacaguguagaauauguauuuaa

SEQ ID NO: 36398 - RNA, 1701 nt, Artificial Sequence; identical to SEQ ID NO: 35772
  derived and/or modified CDS sequence (wt) from hemagglutinin__InfluenzaA__ADD97511

SEQ ID NO: 36399 - RNA, 1701 nt, Artificial Sequence
  derived and/or modified CDS sequence (wt) from hemagglutinin__InfluenzaA__ADD97531
augaaggcaauacuaguaguucugcuauauacauuugcaaccgcaaaugcagacacauuauguauagguuaucaugcgaacaauucaacagacacuguagacacaauacuagaaaagaauguaacaguaacacacucuguuaaccuucuagaagacaagcauaacgggaaacuaugcaaacuaagagggguagccccauugcauuuggguaaauguaacauugcuggcuggauccugggaaauccagagugugaaucacucuccacagcaagcucaugguccuacauuguggaaacaucuaguucagacaauggaacguguuacccaggagauuucaucgauuaugaggagcuaagagagcaauugagcucagugucaucauuugaaagguuugagauauuccccaagacaaguucauggcccaaucaugacucgaacaaagguguaacggcagcauguccucaugcuggagcaaaaagcuucuacaaaaauuuaauauggcuaguuaaaaagggaaauucauacccaaagcucagcaaauccuacauuaaugauaaagggaaagaaauccucgugcuauggggcauucaccauccaucuacuauugcugaccaacaaagucucuaucagaaugcagaugcauauguuuuuguggggacaucaagauacagcaagaaguucaagccggaaauagcaauaagacccaaagugagggaucaagaagggagaaugaaauauuacuggacacuaguagagccgggagacaaaauaacauucgaagcaacuggaaaucuagugguaccgagauaugcauucgcaauggaaagaaaugcuggaucugguauuaucauuucagauacaccaguccacaauugcaauacaacuugucagacacccaagggugcuauaaacaccagccucccauuucagaauauacauccgaucacaauuggaaaauguccaaaauauguaaaaagcacaaaauugagacuggccacaggauugaggaaugucccgucuauucaaucuagaggccuauuuggggccauugccgguuucauugaagggggguggacagggaugguagauggaugguacgguuaucaccaucaaaaugagcaggggucaggauaugcagccgaccugaagagcacacagaaugccauugacgagauuacuaacaaaguaaauucuguuauugaaaagaugaauacacaguucacagcaguagguaaagaguucaaccaccuggaaaaaagaauagagaauuuaaauaaaaagguugaugaugguuuccuggacauuuggacuuacaaugccgaacuguugguucuauuggaaaaugaaagaacuuuggacuaccacgauucaaaugugaagaacuuauaugaaaagguaagaagccaguuaaaaaacaaugccaaggaaauuggaaacggcugcuuugaauuuuaccacaaaugcgauaacacgugcauggaaagugucaaaaaugggacuuaugacuacccaaaauacucagaggaagcaaaauuaaacagagaagaaauagaugggguaaagcuggaaucaacaaggauuuaccagauuuuggcgaucuauucaacugucgccaguucauugguacugguagucucccugggggcaaucaguuucuggaugugcucuaaugggucucuacaguguagaauauguauuuaa

SEQ ID NO: 36400 - RNA, 1701 nt, Artificial Sequence
  derived and/or modified CDS sequence (wt) from hemagglutinin__InfluenzaA__ADD97541
augaaggcaauacuaguaguucugcuauauacauuugcaaccgcaaaugcagacacauuauguauagguuaucaugcgaacaauucaacagacacuguagacacaguacuagaaaagaauguaacaguaacacacucuguuaaccuucuagaagacaagcauaacgggaaacuaugcaaacuaagagggguagccccauugcauuuggguaaauguaacauugcuggcuggauccugggaaauccagagugugaaucacucuccacagcaagcucaugguccuacauuguggaaacaucuaguucagacaauggaacguguuacccaggagauuucaucgauuaugaggagcuaagagagcaauugagcucagugucaucauuugaaagguuugagauauuccccaagacaaguucauggcccaaucaugacucgaacaaagguguaacggcagcauguccucauacuggagcaaaaagcuucuacaaaaauuuaauauggcuaguuaaaaaaggaaauucauacccaaagcucagcaaauccuacauuaaugauaaagggaaagaaguccucgugcuauggggcauucaccauccaucuacuaguacugaccaacaaagucucuaucagaaugcagaugcacauguuuuuguggggacaucaagauacagcaagaaguucaagccggaaauagcaauaagacccaaagugagggaucaagaagggagaaugaacuauuacuggacacuaguagagccgggagacaaaauaacauucgaagcaacuggaaaucuagugguaccgagauaugcauucgcaauggaaagaaaugcuggaucugguauuaucauuucagauacaccaguccacgauugcaauacaacuugucagacacccaagggugcuauaaacaccagccucccauuucagaauauacauccgaucacaauuggaaaauguccaaaauauguaaaaagcacaaaauugagacuggccacaggauugaggaauaucccgucuauucaaucuagaggccuauuuggggccauugccgguuucauugaagggggguggacagggaugguagauggaugguacgguuaucaccaucaaaaugagcaggggucaggauaugcagccgaccugaagagcacacagaaugccauugacgagauuacuaacaaaguaaauucuguuauugaaaagaugaauacacaguucacagcaguagguaaagaguucaaccaccuggaaaaaagaauagagaauuuaaauaaaaaaguugaugaugguuuccuggacauuuggacuuacaaugccgaacuguugguucuauuggaaaaugaaagaacuuuggacuaccacgauucaaaugugaagaacuuauaugaaaagguaagaagccaguuaaaaaacaaugccaaggaaauuggaaacggcugcuuugaauuuuaccacaaaugcgauaacacgugcauggaaagugucaaaaaugggacuuaugacuacccaaaauacucagaggaagcaaaauuaaacagagaagaaauagaugggguaaagcuggaaucaacaaggauuuaccagauuuuggcgaucuauucaacugucgccaguucauugguacugguagucucccugggggcaaucaguuucuggaugugcucuaaugggucucuacaguguagaauauguauuuaa

SEQ ID NO: 36401 - RNA, 1701 nt, Artificial Sequence; identical to SEQ ID NO: 36286
  derived and/or modified CDS sequence (wt) from hemagglutinin__InfluenzaA__ADD97551

SEQ ID NO: 36402 - RNA, 1701 nt, Artificial Sequence; identical to SEQ ID NO: 36384
  derived and/or modified CDS sequence (wt) from hemagglutinin__InfluenzaA__ADD97561

SEQ ID NO: 36403 - RNA, 1701 nt, Artificial Sequence
  derived and/or modified CDS sequence (wt) from hemagglutinin__InfluenzaA__ADD97571
augaaggcaauacuaguaguucugcuauauacauuugcaaccgcaaaugcagacacauuauguauagguuaucaugcgaacaauucaacagacacuguagacacaguacuagaaaagaauguaacaguaacacacucuguuaaccuucuagaagacaagcauaacgggaaacuaugcaaacuaagagggguagccccauugcauuuggguaaauguaacauugcuggcuggauccugggaaauccagagugugaaucacucuccacagcaagcucaugguccuacauuguggaaacaucuaguucagacaauggaacguguuacccaggagauuucaucaauuaugaggagcuaagagagcaauugagcucagugucacuauuugaaagguuugagauauuccccaagacaaguucauggcccaaucaugacucgaacaaagguguaacggcagcauguccucaugcuggagcaaaaagcuucuacaaaaauuuaauauggcuaguuaaaaaaggaaauucauacccaaagcucagcaaauccuacauuaaugauaaagggaaagaaguccucgugcuauggggcauucaccauccaucuacuagugcugaccaacaaagucucuaucagaaugcagaugcauauguuuuuguggggacaucaagauacagcaagaaguucaagccggaaauagcaauaagacccaaagugagggaucaagaagggagaaugaacuauuacuggacacuaguagagccgggagacaaaauaacauucgaagcaacuggaaaucuagugguaccgagauaugcauucgcaauggaaagaaaugcuggaucugguauuaucaucucagauacaccaguccacgauugcaauacaacuugucagacacccaagggugcuauaaacaccagccucccauuucagaauauacauccgaucacaauuggaaaauguccaaaauauguaaaaagcacaaaauugagacuggccacaggauugaggaaugucccgucuauucaaucuagaggccuauuuggggccauugccgguuucauugaagggggguggacagggaugguagauggaugguacgguuaucaccaucaaaaugagcagggaucaggauaugcagccgaccugaagagcacacagaaugccauugacaagauuacuaacaaaguaaauucuguuauugaaaagaugaauacacaguucacagcaguagguaaagaguucaaccaccuggaaaaaagaauagagaauuuaaauaaaaaaguugaugaugguuuccuggacauuuggacuuacaaugccgaacuguugguuuuauuggaaaaugaaagaacuuuggacuaccacgauucaaaugugaagaacuuauaugaaaagguaagaagccaguuaaaaaacaaugccaaggaaauuggaaacggcugcuuugaauuuuaccacaaaugcgauaacacgugcauggaaagugucaaaaaugggacuuaugacuacccaaaauacucagaggaagcaaaauuaaacagagaagaaauagaugggguaaagcuggaaucaacaaggauuuaccagauuuuggcgaucuauucaacugucgccaguucauugguacugguagucucccugggggcaaucaguuucuggaugugcucuaaugggucucuacaguguagaauauguauuuaa

SEQ ID NO: 36404 - RNA, 1701 nt, Artificial Sequence; identical to SEQ ID NO: 34714
  derived and/or modified CDS sequence (wt) from hemagglutinin__InfluenzaA__ADD97581

SEQ ID NO: 36405 - RNA, 1701 nt, Artificial Sequence; identical to SEQ ID NO: 34714
  derived and/or modified CDS sequence (wt) from hemagglutinin__InfluenzaA__ADD97591

SEQ ID NO: 36406 - RNA, 1701 nt, Artificial Sequence
  derived and/or modified CDS sequence (wt) from hemagglutinin__InfluenzaA__ADD97688
augaaggcaauacuaguaguucugcuauauacauuugcaaccgcaaaugcagacacauuauguauagguuaucaugcgaacaauucaacagacacuguagacacaguacuagaaaagaauguaacaguaacacacucuguuaaccuucuagaagacaagcauaacgggaaacuaugcaaacuaagagggguagccccauugcauuuggguaaauguaacauugcuggcuggauccugggaaauccagagugugaaucacucuccacagcaagcucaugguccuacauuguggaaacaucuaguucagacaauggaacguguuacccaggagauuucaucgauuaugaggagcuaagagagcaauugagcucagugucaucauuugaaagguuugagauauuccccaagacaaguucauggcccaaucaugacucgaacaaagguguaacggcagcauguccucaugcuggagcaaaaagcuucuacaaaaauuuaauauggcuaguuaaaaaaggaaauucauacccaaagcucagcaaauccuacauuaaugauaaagggaaagaaguccucgugcuauggggcauucaccauccaucuacuagugcugaccaacaaagucucuaucagaaugcagaugcauauguuuuuguggggacaucaagauacagcaagaaguucaagccggaaauagcaauaagacccaaagugagggaucaagaagggagaaugaacuauuacuggacacuaguagagccgggagacaaaauaacauucgaagcaacuggaaaucuagugguaccgagauaugcauucgcaauggaaagaaaugcuggaucugguauuaucauuucagauacaccaguccacgauugcaauacaacuugucagacacccaagggugcuauaaacaccagccucccauuucagaauauacauccgaucacaauuggaaaauguccaaaauauguaaaaagcacaaaauugagacuggccacaggauugaggaaugucccgucuauucaaucuagaggccuauuuggggccauugccgguuucauugaagggggguggacagggaugguagauggaugguacgguuaucaccaucaaaaugagcaagggucaggauaugcagccgaccugaagagcacacagaaugccauugacgagauuacuaacaaaguaaauucuguuauugaaaagaugaauacacaguucacagcaguagguaaagaguucaaccaccuggaaaaaagaauagagaauuuaaauaaaaaaguugaugaugguuuccuggacauuuggacuuacaaugccgaacuguugguucuauuggaaaaugaaagaacuuuggacuaccacgauucaaaugugaagaacuuauaugaaaagguaagaagccaguuaaaaaacaaugccaaggaaauuggaaacggcugcuuugaauuuuaccacaaaugcgauaacacgugcauggaaagugucaaaaaugggacuuaugacuacccaaaauacucagaggaagcaaaauuaaacagagaagaaauagauggaguaaagcuggaaucaacaaggauuuaccagauuuuggcgaucuauucaacugucgccaguucauugguacugguagucucccugggggcaaucaguuucuggaugugcucuaaugggucucuacaguguagaauauguauuuaa

SEQ ID NO: 36407 - RNA, 1701 nt, Artificial Sequence; identical to SEQ ID NO: 36286
  derived and/or modified CDS sequence (wt) from hemagglutinin__InfluenzaA__ADD97698

SEQ ID NO: 36408 - RNA, 1701 nt, Artificial Sequence; identical to SEQ ID NO: 36286
  derived and/or modified CDS sequence (wt) from hemagglutinin__InfluenzaA__ADD97888

SEQ ID NO: 36409 - RNA, 1701 nt, Artificial Sequence
  derived and/or modified CDS sequence (wt) from hemagglutinin__InfluenzaA__ADD97898
augaaggcaauacuaguaguucugcuauauacauuugcaaccgcaaaugcagacacauuauguauagguuaucaugcgaacaauucaacagacacuguagacacaguacuagaaaagaauguaacaguaacacacucuguuaaccuucuagaagacaagcauaacgggaaacuaugcaaacuaagagggguagccccauugcauuuggguaaauguaacauugcuggcuggauccugggaaauccagagugugaaucacucuccacagcaagcucaugguccuacauuguggaaacaucuaguucagacaauggaacguguuacccaggagauuucaucgauuaugaggagcuaagagagcaauugagcucagugucaucauuugaaagguuugagauauuccccaagacaaguucauggcccaaucaugacucgaacaaagguguaacggcagcauguccucaugcuggagcaaaaagcuucuacaaaaauuuaauauggcuaguuaaaaaaggaaauucauacccaaagcucagcaaauccuacauuaaugauaaagggaaagaaguccucgugcuauggggcauucaccauccaucuacuaguacugaccaacaaagucucuaucagaaugcagaugcauauguuuuuguggggacaucaagauacagcaagaaguucaagccggaaauagcaauaagacccaaagugagggaucaagaagggagaaugaacuauuacuggacacuaguagagccgggagacaaaauaacauucgaagcaacuggaaaucuagugguaccgagauaugcauucgcaauggaaagaaaugcuggaucugguauuaucauuucagauacaccaguccacgauugcaauacaacuugucagacacccaagggugcuauaaacaccagccucccauuucagaauauacauccgaucacaauuggaaaauguccaaaauauguaaaaagcacaaaauugagacuggccacaggauugaggaauaucccgucuauucaaucuagaggccuauuuggggccauugccgguuucauugaagggggguggacagggaugguagauggaugguacgguuaucaccaucaaaaugagcaggggucaggauaugcagccgaccugaagagcacacagaaugccauugacgagauuacuaacaaaguaaauucuguuauugaaaagaugaauacacaguucacagcaguagguaaagaguucaaccaccuggaaaaaagaauagagaauuuaaauaaaaaaguugaugaugguuuccuggacauuuggacuuacaaugccgaacuguugguucuauuggaaaaugaaagaacuuuggacuaccacgauucaaaugugaagaacuuauaugaaaagguaagaagccaguuaaaaaacaaugccaaggaaauuggaaacggcugcuuugaauuuuaccacaaaugcgauaacacgugcauggaaagugucaaaaaugggacuuaugacuacccaaaauacucagaggaagcaaaauuaaacagagaagaaauagaugggguaaagcuggaaucaacaaggauuuaccagauuuuggcgaucuauucaacugucgccaguucauugguacugguagucucccugggggcaaucaguuucuggaugugcucuaaugggucucuacaguguagaauauguauuuaa

SEQ ID NO: 36410 - RNA, 1701 nt, Artificial Sequence; identical to SEQ ID NO: 35772
  derived and/or modified CDS sequence (wt) from hemagglutinin__InfluenzaA__ADD97908

SEQ ID NO: 36411 - RNA, 1701 nt, Artificial Sequence
  derived and/or modified CDS sequence (wt) from hemagglutinin__InfluenzaA__ADD97918
augaaggcaauacuaguaguucugcuauauacauuugcaaccgcaaaugcagacacauuauguauagguuaucaugcaaacaauucaacagacacuguagacacaguacuagaaaagaauguaacaguaacacacucuguuaaccuucuagaagacaagcauaacgggaaacuaugcaaacuaagagggguagccccauugcauuuggguaaauguaacauugcuggcuggauccugggaaauccagagugugaaucacucuccacagcaagcucaugguccuacauuguggaaacaucuaguucagacaauggaacguguuacccaggagauuucaucgauuaugaggagcuaagagagcaauugagcucagugucaucauuugaaagguuugagauauuccccaagacaaguucauggcccaaucaugacucgaacaaagguguaacggcagcauguccucaugcuggagcaaaaagcuucuacaaaaauuuaauauggcuaguuaaaaaaggaaauucauacccaaagcucagcaaauccuacauuaaugauaaagggaaagaaguccucgugcuauggggcauucaccauccaucuacuagugcugaccaacaaagucucuaucagaaugcagaugcauauguuuuuguggggacaucaagauacagcaagaaguucaagccggaaauagcaauaagacccaaagugagggaucaagaagggagaaugaacuauuacuggacacuaguagagccgggagacaaaauaacauucgaagcaacuggaaaucuagugguaccgagauaugcauucgcaauggaaagaaaugcuggaucugguauuaucauuucagauacaccaguccacgauugcaauacaacuugucagacacccaagggugcuauaaacaccagccucccauuucagaauauacauccgaucacaauuggaaaauguccaaaauauguaaaaagcacaaaauugagacuggccacaggauugaggaaugucccgucuauucaaucuagaggccuauuuggggccauugccgguuucauugaagggggguggacagggaugguagauggaugguacgguuaucaccaucaaaaugagcaggggucaggauaugcagccgaccugaagagcacacagaaugccauugacaagauuacuaacaaaguaaauucuguuauugaaaagaugaauacacaguucacagcaguagguaaagaguucaaccaccuggaaaaaagaauagagaauuuaaauaaaaaaguugaugaugguuuccuggacauuuggacuuacaaugccgaacuguugguucuauuggaaaaugaaagaacuuuggacuaccacgauucaaaugugaagaacuuauaugaaaagguaagaagccaguuaaaaaacaaugccaaggaaauuggaaacggcugcuuugaauuuuaccacaaaugcgauaacacgugcauggaaagugucaaaaaugggacuuaugacuacccaaaauacucagaggaagcaaaauuaaacagagaagaaauagaugggguaaagcuagaaucaacaaggauuuaccagauuuuggcgaucuauucaacugucgccaguucauugguacugguagucucccugggggcaaucaguuucuggaugugcucuaaugggucucuacaguguagaauauguauuuaa

SEQ ID NO: 36412 - RNA, 1701 nt, Artificial Sequence
  derived and/or modified CDS sequence (wt) from hemagglutinin__InfluenzaA__ADD97928
augaaggcaauacuaguaguucugcuauauacauuugcaaccgcaaaugcagacacauuauguauagguuaucaugcgaacaauucaacagacacuguagacacaguacuagaaaagaauguaacaguaacacacucuguuaaccuucuagaagacaagcauaacgggaaacuaugcaaacuaagagggguagccccauugcauuuggguaaauguaacauugcuggcuggauccugggaaauccagagugugaaucacucuccacagcaagcucaugguccuacauuguggaaacaucuaguucaggcaauggaacguguuacccaggagauuucaucgauuaugaggagcuaagagagcaauugagcucagugucaucauuugaaagguuugagauauuccccaagacaaguucauggcccaaucaugacucgaacaaagguguaacggcagcauguccucaugcuggagcaaaaagcuucuacaaaaauuuaauauggcuaguuaaaaaaggaaacucauacccaaagcucagcaaauccuacauuaaugauaaagggaaagaaguccucgugcuauggggcauucaccauccaucuacuagugcugaccaacaaagucucuaucagaaugcagaugcauauguuuuuguggggacaucaagauacagcaagaaguucaagccggaaauagcaauaagacccaaagugagggaucaagaagggagaaugaacuauuacuggacacuaguagagccgggagacaaaauaacauucgaagcaacuggaaaucuagugguaccgagauaugcauucgcaauggaaagaaaugcuggaucugguauuaucauuucagauacaccaguccacgauugcaauacaacuugucagacacccaagggugcuauaaacaccagccucccauuucagaacauacauccgaucacaauuggaaaauguccaaaauauguaaaaagcacaaaauugagacuggccacaggauugaggaaugucccgucuauucaaucuagaggccuauuuggggccauugccgguuucauugaaggggguuggacagggaugguagauggaugguacgguuaucaccaucaaaaugagcaggggucaggauaugcagccgaccugaagagcacacagaaugccauugacgggauuacuaacaaaguaaauucuguuauugaaaagaugaauacacaguucacagcaguagguaaagaguucaaccaccuggaaaaaagaauagagaauuuaaauaaaaaaguugaugaugguuuccuggacauuuggacuuacaaugccgaacuguugguucuauuggaaaaugaaagaacuuuggacuaccacgauucaaaugugaagaacuuauaugaaaagguaagaagccaguuaaaaaacaaugccaaggaaauuggaaacggcugcuuugaauuucaccacaaaugcgauaacacgugcauggaaagugucaaaaaugggacuuaugacuacccaaaauacucagaggaagcaaaauuaaacagagaagaaauagaugggguaaagcuggaaucaacaaggauuuaccagauuuuggcgaucuauucaacugucgccaguucauugguacugguagucucccugggggcaaucaguuucuggaugugcucuaaugggucucuacaguguagaauauguauuuaa

SEQ ID NO: 36413 - RNA, 1701 nt, Artificial Sequence
  derived and/or modified CDS sequence (wt) from hemagglutinin__InfluenzaA__ADD97938
augaaggcaauacuaguaguucugcuauauacauuugcaaccgcaaaugcagacacauuauguauagguuaucaugcgaacaauucaacagacacuguagacacaauacuagaaaagaauguaacaguaacacacucuguuaaccuucuagaagacaagcauaacgggaaacuaugcaaacuaagagggguagccccauugcauuuggguaaauguaacauugcuggcuggauccugggaaauccagagugugaaucacucuccacagcaagcucaugguccuacauuguggaaacaucuaguucagacaauggaacguguuacccaggagauuucaucgauuaugaggagcuaagagagcaauugagcucagugucaucauuugaaagguuugagauauuccccaugacaaguucauggcccaaucaugacucgaacaaagguguaacggcagcauguccucaugcuggagcaaaaagcuucuacaaaaauuuaauauggcuaguuaaaaagggaaauucauacccaaagcucagcaaauccuacauuaaugauaaagggaaagaaauccucgugcuauggggcauucaccauccaucuacuagugcugaccaacaaagucucuaucaaaaugcagaugcauauguuuuuguggggacaucaagauacagcaagaaguucaagccggaaauagcaauaagacccaaagugagggaucaagaagggagaaugaacuauuacuggacacuaguagagccgggagacaaaauaacauucgaagcaacuggaaaucuagugguaccgagauaugcauucgcaauggaaagaaaugcuggaucugguauuaucauuucagauacaccaguccacgauugcaauacaacuugucagacacccaagggugcuauaaacaccagccucccauuucagaauauacauccgaucacaauuggaaaauguccaaaauauguaaaaagcacaaaauugagacuggccacaggauugaggaaugucccgucuauucaaucuagaggccuauuuggggccauugccgguuucauugaagggggguggacagggaugguagauggaugguacgguuaucaccaucaaaaugagcaggggucaggauaugcagccgaccugaagagcacacagaaugccauugacgagauuacuaacaaaguaaauucuguuauugaaaagaugaauacacaguucacagcaguagguaaagaguucaaccaccuggaaaaaagaauagagaauuuaaauaaaaagguugaugaugguuuccuggacauuuggacuuacaaugccgaacuguugguucuauuggaaaaugaaagaacuuuggacuaccacgauucaaaugugaagaacuuauaugaaaagguaagaagccaguuaaaaaacaaugccaaggaaauuggaaacggcugcuuugaauuuuaccacaaaugcgauaacacgugcauggaaagugucaaaaaugggacuuaugacuacccaaaauacucagaggaagcaaaauuaaacagagaagaaauagaugggguaaagcuggaaucaacaaggauuuaccagauuuuggcgaucuauucaacugucgccaguucauugguacugguagucucccugggggcaaucaguuucuggaugugcucuaaugggucucuacaguguagaauauguauuuaa

SEQ ID NO: 36414 - RNA, 1701 nt, Artificial Sequence
  derived and/or modified CDS sequence (wt) from hemagglutinin__InfluenzaA__ADD97948
augaaggcaauacuauuaguucugcuauauacauuugcaaccgcaaaugcagacacauuauguauagguuaucaugcgaacaauucaacagacacuguagacacaguacuagaaaagaauguaacaguaacacacucuguuaaccuucuagaagacaagcauaacgggaaacuaugcaaacuaagagggguagccccauugcauuuggguaaauguaacauugcuggcuggauccugggaaauccagagugugaaucacucuccacagcaagcucaugguccuacauuguggaaacaucuaguucagacaauggaacguguuacccaggagauuucaucgauuaugaggagcuaagagagcaauugagcucagugucaucauuugaaagguuugagauguuccccaagacaaguucauggcccaaucaugacucgaacaaagguguaacggcagcauguccucaugcuggagcaaaaagcuucuacaaaaauuuaauauggcuaguuaaaaaaggaaauucauacccaaagcucagcaaauccuacauuaaugauaaagggaaagaaguccucgugcuauggggcauucaccauccaucuacuagugcugaccaacaaagucucuaucagaaugcagaugcauauguuuuuguggggacaucaagauacagcaagaaguucaagccggaaauagcaauaagacccaaagugagggaucaagaggggagaaugaacuauuacuggacacuaguagagccgggagacaaaauaacauucgaagcaacuggaaaucuagugguaccgagauaugcauucgcaauggaaagaaaugcuggaucugguauuaucauuucagauacaccaguccacgauugcaauacaacuugucagacacccaagggugcuauaaacaccagccucccauuucagaauauacauccgaucacaauuggaaaauguccaaaauauguaaaaagcacaaaauugagacuggccacaggauugaggaaugucccgucuauucaaucuagaggccuauuuggggccauugccgguuucauugaagggggguggacagggaugguagauggaugguacgguuaucaccaucaaaaugagcaggggucaggauaugcagccgaccugaagagcacacagaaugccauugacgagauuacuaacaaaguaaauucuguuauugaaaagaugaauacacaguucacagcaguagguaaagaguucaaccaccuggaaaaaagaauagagaauuuaaauaaaaaaguugaugaugguuuccuggacauuuggacuuacaaugccgaacuguugguucuauuggaaaaugaaagaacuuuggacuaccacgauucaaaugugaagaacuuauaugaaaagguaagaagccaguuaaaaaacaaugccaaggaaauuggaaacggcugcuuugaauuuuaccacaaaugcgauaacacgugcauggaaagugucaaaaaugggacuuaugacuacccaaaauacucagaggaagcaaaauuaaacagagaagaaauagaugggguaaagcuggaaucaacaaggauuuaccagauuuuggcgaucuauucaacugucgccaguucauugguacugguagucucccugggggcaaucaguuucuggaugugcucuaaugggucucuacaguguagaauauguauuuaa

SEQ ID NO: 36415 - RNA, 1701 nt, Artificial Sequence
  derived and/or modified CDS sequence (wt) from hemagglutinin__InfluenzaA__ADD97958
augaaggcaauacuaguaguucugcuauauacauuugcaaccgcaaaugcagacacauuauguauagguuaucaugcgaacaauucaacagacacuguagacacaguacuagaaaagaauguaacaguaacacacucuguuaaccuucuagaagacaagcauaacgggaaacuaugcaaacuaagagggguagccccauugcauuuggguaaauguaacauugcuggcuggauccugggaaauccagagugugaaucacucuccacagcaagcucaugguccuacauuguggaaacaucuaguucagacaauggaacguguuacccaggagauuucaucgauuaugaggagcuaagagagcaauugagcucagugucaucauuugaaagguuugagauauuccccaagacaaguucauggcccaaucaugacucgaacaaagguguaacggcagcauguccucaugcuggagcaaaaagcuucuacaaaaauuuaauauggcuaguuaaaaaaggaaauucauacccaaagcucagcaaauccuacauuaaugauaaagggaaagaaguccucgugcuauggggcauucaccauccaucuacuagugcugaccaacaaagucucuaucagaaugcagaugcauauguuuuuguggggacaucaagauacagcaagaaguuccagccggaaauagcaauaagacccaaagugagggaucaagaagggagaaugaacuauuacuggacacuauuagagccgggagacaaaauaacauucgaagcaacuggaaaucuagugguaccgagauaugcauucgcaauggaaagaaaugcuggaucugguauuaucauuucagauacaccaguccacgauugcaauacaacuugucagacacccaagggugcuauaaacaccagccucccauuucagaauauacauccgaucacaauuggaaaauguccaaaauauguaaaaagcacaaaauugagacuggccacaggauugaggaaugucccgucuauucaaucuagaggccuauuuggggccauugccgguuucauugaagggggguggacagggaugguagauggaugguacgguuaucaccaucaaaaugagcaggggucaggguaugcagccgaccugaagagcacacagaaugccauugacgagauuacuaacaaaguaaauucuguuauugaaaagaugaauacacaguucacagcaguagguaaagaguucaaccaccuggaaaaaagaauagagaauuuaaauaaaaaaguugaugaugguuuccuggacauuuggacuuacaaugccgaacuguugguucuauuggaaaaugaaagaacuuuggacuaccacgauucaaaugugaagaacuuauaugaaaagguaagaagccaguuaaaaaacaaugccaaggaaauuggaaacggcugcuuugaauuuuaccacaaaugcgauaacacgugcauggaaagugucaaaaaugggacuuaugacuacccaaaauacucagaggaagcaaaauuaaacagagaagaaauagaugggguaaagcuggaaucaacaaggauuuaccagauuuuggcgaucuauucaacugucgccaguucauugguacugguagucucccugggggcaaucaguuucuggaugugcucuaaugggucucuacaguguagaauauguauuuaa

SEQ ID NO: 36416 - RNA, 1701 nt, Artificial Sequence; identical to SEQ ID NO: 36406
  derived and/or modified CDS sequence (wt) from hemagglutinin__InfluenzaA__ADD97968

SEQ ID NO: 36417 - RNA, 1701 nt, Artificial Sequence
  derived and/or modified CDS sequence (wt) from hemagglutinin__InfluenzaA__ADD97978
augaaggcaauacuaguaguucugcuauauacauuugcaaccgcaaaugcagacacauuauguauagguuaucaugcgaacaauucaacagacacuguagacacaguacuagaaaagaauguaacaguaacacacucuguuaaccuucuagaagacaagcauaacgggaaacuaugcaaacuaagagggguagccccauugcauuuggguaaauguaacauugcuggcuggauccugggaaauccagagugugaaucacucuccacagcaagcucaugguccuacauuguggaaacaucuaguucagacaauggaacguguuacccaggagauuucaucgauuaugaggagcuaagagagcaauugagcucagugucaucauuugaaagguuugagauauuccccaagacaaguucauggcccaaucaugacucgaacaaagguguaacggcagcauguccucaugcuggagcaaaaagcuucuacaaaaauuuaauauggcuaguuaaaaaaggaaauucauacccaaagcucagcaaauccuacauuaaugauaaagggaaagaaguccucgugcuauggggcauucaccauccaucuacuaguacugaccaacaaagucucuaucagaaugcagaugcauauguuuuuguggggacaucaagauacagcaagaaguucaagccggaaauagcaauaagacccaaagugagggaucaagaagggagaaugaacuauuacuggacacuaguagagccgggagacaaaauaacauucgaagcaacuggaaaucuagugguaccgagauaugcauucgcaauggaaagaaaugcuggaucugguauuaucauuucagauacaccaguccacgauugcaauacaacuugucagacacccaagggugcuauaaacaccagccucccauuucagaauauacauccgaucacaauuggaaaauguccaaaauauguaaaaagcacaaaauugagacuggccacaggauugaggaauaucccgucuauucaaucuagaggccuauuuggggccauugccgguuucauugaagggggguggacagggaugguagauggaugguacgguuaucaccaucaaaaugagcaggggucaggauaugcagccgaccugaagagcacacagaaugccauugacgagauuacuaacaaaguaaauucuguuauugaaaagaugaauacacaguucacagcaguagguaaagaguucaaccaccuggaaaaaagaauagagaauuuaaauaaaaagguugaugaugguuuccuggacauuuggacuuacaaugccgaacuguugguucuauuggaaaaugaaagaacuuuggacuaccacgauucaaaugugaagaacuuauaugaaaagguaagaagccaguuaaaaaacaaugccaaggaaauuggaaacggcugcuuugaauuuuaccacaaaugcgauaacacgugcauggaaagugucaaaaaugggacuuaugacuacccaaaauacucagaggaagcaaaauuaaacagagaagaaauagaugggguaaagcuggaaucaacaaggauuuaccagauuuuggcgaucuauucaacugucgccaguucauugguacugguagucucccugggggcaaucaguuucuggaugugcucuaaugggucucuacaguguagaauauguauuuaa

SEQ ID NO: 36418 - RNA, 1701 nt, Artificial Sequence; identical to SEQ ID NO: 36363
  derived and/or modified CDS sequence (wt) from hemagglutinin__InfluenzaA__ADD97988

SEQ ID NO: 36419 - RNA, 1701 nt, Artificial Sequence
  derived and/or modified CDS sequence (wt) from hemagglutinin__InfluenzaA__ADD97998
augaaggcaauacuaguaguucugcuauauacauuugcaaccgcaaaugcagacacauuauguauagguuaucaugcgaacaauucaacagacacuguagacacaguacuagaaaagaauguaacaguaacacacucuguuaaccuucuagaagacaagcauaacgggaaacuaugcaaacuaagagggguagccccauugcauuuggguaaauguaacauugcuggcuggauccugggaaauccagagugugaaucacucuccacagcaagcucaugguccuacauuguggaaacaucuaguucagacaauggaacguguuacccaggagauuucaucgauuaugaggagcuaagagagcaauugagcucagugucaucauuugaaagguuugagauauuccccaaggcaaguucauggcccaaucaugacucgaacaaagguguaacggcagcauguccucaugcuggagcaaaaagcuucuacaaaaauuuaauauggcuaguuaaaaaaggaaauucauacccaaagcucagcaaauccuacauuaaugauaaagggaaagaaguccucgugcuauggggcauucaccauccaucuacuagugcugaccaacaaagucucuaucagaaugcagaugcauauguuuuuguggggacaucaagauacagcaagaaguucaagccggaaauagcaauaagacccaaagugagggaucaagaagggagaaugaacuauuacuggacacuaguagagccgggagacaaaauaacauucgaagcaacuggaaaucuagugguaccgagauaugcauucgaaauggaaagaaaugcuggaucugguauuaucauuucagauacaccaguccacgauugcaauacaacuugucagacacccaagggugcuauaaacaccagccucccauuucagaauauacauccgaucacaauuggaaaauguccaaaauauguaaaaagcacaaaauugagacuggccacaggauugaggaaugucccgucuauucaaucuagaggccuauuuggggccauugccgguuucauugaagggggguggacagggaugguagauggaugguacgguuaucaccaucaaaaugagcaggggucaggauaugcagccgaccugaagagcacacagaaugccauugacgagauuacuaacaaaguaaauucuguuauugaaaagaugaauacacaguucacagcaguagguaaagaguucaaccaccuggaaaaaagaauagagaauuuaaauaaaaaaguugaugaugguuuccuggacauuuggacuuacaaugccgaacuguugguucuauuggaaaaugaaagaacuuuggacuaccacgauucaaaugugaagaacuuauaugaaaagguaagaagccaguuaaaaaacaaugccaaggaaauuggaaacggcugcuuugaauuuuaccacaaaugcgauaacacgugcauggaaagugucaaaaaugggacuuaugacuacccaaaauacucagaggaagcaaaauuaaacagagaagaaauagaugggguaaagcuggaaucaacaaggauuuaccagauuuuggcgaucuauucaacugucgccaguucauugguacugguagucucccugggggcaaucaguuucuggaugugcucuaaugggucucuacaguguagaauauguauuuaa

SEQ ID NO: 36420 - RNA, 1701 nt, Artificial Sequence; identical to SEQ ID NO: 36286
  derived and/or modified CDS sequence (wt) from hemagglutinin__InfluenzaA__ADD98008

SEQ ID NO: 36421 - RNA, 1701 nt, Artificial Sequence
  derived and/or modified CDS sequence (wt) from hemagglutinin__InfluenzaA__ADD98018
augaaggcaauacuaguaguucugcuauauacauuugcaaccgcaaaugcagacacauuauguauagguuaucaugcgaacaauucaacagacacuguagacacaguacuagaaaagaauguaacaguaacacacucuguuaaccuucuagaagacaagcauaacgggaaacuaugcaaacuaagagggguagccccauugcauuuggguaaauguaacauugcuggcuggauccugggaaauccagagugugaaucacucuccacagcaagcucaugguccuacauuguggaaacaucuaguucagacaauggaacguguuacccaggagauuucaucgauuaugaggagcuaagagagcaauugagcucagugucaucauuugaaagguuugagauauuccccaagacaaguucauggcccaaucaugacucgaacaaagguguaacggcagcauguccucaugcuggagcaaaaagcuucuacaaaaauuuaauauggcuaguuaaaaaaggaaauucauacccaaagcucagcaaauccuacauuaaugauaaagggaaagaaauccucgugcuauggggcauucaccauccaucuacuagugcugaccaacaaagucucuaucagaaugcagaugcauauguuuuuguggggacaucaagauacagcaagaaguucaagccggaaauagcaacaagacccaaagugagggaacaagaagggagaaugaacuauuacuggacacuaguagagccgggagacaaaauaacauucgaagcaacuggaaaucuagugguaccgagauaugcauucgcaauggaaagaaaugcuggaucugguauuaucauuucagauacaccaguccacgauugcaauacaacuugucagacacccaagggugcuauaaacaccagccucccauuucagaauauacauucgaucacaauuggaaaauguccaaaauauguaaaaagcacaaaauugagacuggccacaggauugaggaaugucccgucuauucaaucuagaggccuauuuggggccauugccgguuucauugaagggggguggacagggaugguagauggaugguacgguuaucaccaucaaaaugagcaggggucaggauaugcagccgaccugaagagcacacagaaugccauugacgagauuacuaacaaaguaaauucuguuauugaaaagaugaauacacaguucacagcaguagguaaagaguucaaccaccuggaaaaaagaauagagaauuuaaauaaaaaaguugaugaugguuuccuggacauuuggacuuacaaugccgaacuguugguucuauuggaaaaugaaagaacuuuggacuaccacgauucaaaugugaagaacuuauaugaaaagguaagaagccaguuaaaaaacaaugccaaggaaauuggaaacggcugcuuugaauuuuaccacaaaugcgauaacacgugcauggaaagugucaaaaaugggacuuaugacuacccaaaauacucagaggaagcaaaauuaaacagagaagaaauagaugggguaaagcuggaaucaacaaggauuuaccagauuuuggcgaucuauucaacugucgccaguucauugguacugguagucucccugggggcaaucaguuucuggaugugcucuaaugggucucuacaguguagaauauguauuuaa

SEQ ID NO: 36422 - RNA, 1701 nt, Artificial Sequence
  derived and/or modified CDS sequence (wt) from hemagglutinin__InfluenzaA__ADD98028
augaaggcaauacuaguaguucugcuauauacauuugcaaccgcaaaugcagacacauuauguauagguuaucaugcgaacaauucaacagacacuguagacacaguacuagaaaagaauguaacaguaacacacucuguuaaccuucuagaagacaagcauaacgggaaacuaugcaaacuaagagggguagccccauugcauuuggguaaauguaacauugcuggcuggauccugggaaauccagagugugaaucacucuccacagcaagcucaugguccuacauuguggaaacaucuaguucagacaauggaacguguuacccaggagauuucaucgauuaugaggagcuaagagagcaauugagcucagugucaucauuugaaagguuugagauauuccccaagacaaguucauggcccaaucaugacucgaacaaagguguaacggcagcauguccucaugcuggagcaaaaagcuucuacaaaaauuuaauauggcuaguuaaaaaaggaaauucauacccaaagcucagcaaauccuacauuaaugauaaagggaaagaaguccucgugcuauggggcauucaccauccaucuacuagugcugaccaacaaagucucuaucagaaugcagaugcauauguuuuuguggggacaucaagauacagcaagaaguucaagccggaaauagcaauaagacccaaagugagggaacaagaagggagaaugaacuauuacuggacacuaguagagccgggagacaaaauaacauucgaagcaacugggaaucuagugguaccgagauaugcauucgcaauggaaagaaaugcuggaucugguauuaucauuucagauacaccaguccacgauugcaauacaacuugucagacacccaagggugcuauaaacaccagccucccauuucagaauauacauccgaucacaauuggaaaauguccaaaauauguaaaaagcacaaaauugagacuggccacaggauuaaggaaugucccgucuauucaaucuagaggccuauuuggggccauugccgguuucauugaagggggguggacagggaugguagauggaugguacgguuaucaccaucaaaaugagcaggggucaggauaugcagccgaccugaagagcacacagaaugccauugacgagauuacuaacaaaguaaauucuguuauugaaaagaugaauacacaguucacagcaguagguaaagaguucaaccaccuggaaaaaagaauagagaauuuaaauaaaaaaguugaugaugguuuccuggacauuuggacuuacaaugccgaacuguugguucuauuggaaaaugaaagaacuuuggacuaccacgauucaaaugugaagaacuuauaugaaaagguaagaagccaguuaaaaaacaaugccaaggaaauuggaaacggcugcuuugaauuuuaccacaaaugcgauaacacgugcauggaaagugucaaaaaugggacuuaugacuacccaaaauacucagaggaagcaaaauuaaacagagaagaaauagaugggguaaagcuggaaucaacaaggauuuaccagauuuuggcgaucuauucaacugucgccaguucauugguacugguagucucccugggggcaaucaguuucuggaugugcucuaaugggucucuacaguguagaguauguauuuaa

SEQ ID NO: 36423 - RNA, 1701 nt, Artificial Sequence
  derived and/or modified CDS sequence (wt) from hemagglutinin__InfluenzaA__ADD98038
augaaggcaauacuaguaguucugcuauauacauuugcaaccgcaaaugcagacacauuauguauagguuaucaugcgaacaauucaacagacacuguagacacaguacuagaaaagaauguaacaguaacacacucuguuaaccuucuagaagacaagcauaacgggaaacuaugcaaacuaagagggguagccccauugcauuuggguaaauguaacauugcuggcuggauccugggaaauccagagugugaaucaaucuccacagcaagcucaugguccuacauuguggaaacaucuaguucagacaauggaacguguuacccaggagauuucaucgauuaugaggagcuaagagagcaauugagcucagugucaucauuugaaagguuugagauauuccccaaggcaaguucauggcccaaucaugacucgaacaaagguguaacggcagcauguccucaugcuggagcaaaaagcuucuacaaaaauuuaauauggcuaguuaaaaaaggaaauucauacccaaagcucagcaaauccuacauuaaugauaaagggaaagaaguccucgugcuauggggcauucaccauccaucuacuagugcugaccaacaaagucucuaucagaaugcagaugcauauguuuuuguggggacaucaagauacagcaagaaguucaagccggaaauagcaauaagacccaaagugagggaucaagaagggagaaugaacuauuacuggacacuaguagagccgggagacaaaauaacauucgaagcaacuggaaaucuagugguaccgagauaugcauucgaaauggaaagaaaugcuggaucugguauuaucauuucagauacaccaguccacgauugcaauacaacuugucagacacccaagggugcuauaaacaccagccucccauuucagaauauacauccgaucacaauuggaaaauguccaaaauauguaaaaagcacaaaauugagacuggccacaggauugaggaaugucccgucuauucaaucuagaggccuauuuggggccauugccgguuucauugaagggggguggacagggaugguagauggaugguacgguuaucaccaucaaaaugagcaggggucaggauaugcagccgaccugaagagcacacagaaugccauugacgagauuacuaacaaaguaaauucuguuauugaaaagaugaauacacaguucacagcaguagguaaagaguucaaccaccuggaaaaaagaauagagaauuuaaauaaaaaaguugaugaugguuuccuggacauuuggacuuacaaugccgaacuguugguucuauuggaaaaugaaagaacuuuggacuaccacgauucaaaugugaagaacuuauaugaaaagguaagaagccaguuaaaaaacaaugccaaggaaauuggaaacggcugcuuugaauuuuaccacaaaugcgauaacacgugcauggaaagugucaaaaaugggacuuaugacuacccaaaauacucagaggaagcaaaauuaaacagagaagaaauagaugggguaaagcuggaaucaacaaggauuuaccagauuuuggcgaucuauucaacugucgccaguucauugguacugguagucucccugggggcaaucaguuucuggaugugcucuaaugggucucuacaguguagaauauguauuuaa

SEQ ID NO: 36424 - RNA, 1701 nt, Artificial Sequence
  derived and/or modified CDS sequence (wt) from hemagglutinin__InfluenzaA__ADD98048
augaaggcaauacuaguaguucugcuauauacauuugcaaccgcaaaugcagacacauuauguauagguuaucaugcaaacaauucaacagacacuguagacacaguacuagaaaagaauguaacaguaacacacucuguuaaccuucuagaagacaagcauaacgggaaacuaugcaaacuaagagggguagccccauugcauuuggguaaauguaacauugcuggcuggauccugggaaauccagagugugaaucacucuccacagcaagcucaugguccuacauuguggaaacaucuaguucagacaauggaacguguuacccaggagauuucaucgauuaugaggagcuaagagagcaauugagcucagugucaucauuugaaagguuugagauauuccccaagacaaguucauggcccaaucaugacucgaacaaagguguaacggcagcauguccucaugcuggagcaaaaagcuucuacaaaaauuuaauauggcuaguuaaaaaaggaaauucauacccaaagcucagcaaauccuacauuaaugauaaagggaaagaaguccucgugcuauggggcauucaccauccaucuacuaguacugaccaacaaagccucuaucagaaugcagaugcauauguuuuuguggggacaucaagauacagcaagaaguucaagccggaaauagcaauaagacccaaagugagggaucaagaagggagaaugaacuauuacuggacacuaguagagccgggagacaaaauaacauucgaagcaacuggaaaucuagugguaccgagauaugcauucgcaauggaaagaaaugcuggaucugguauuaucauuucagauacaccaguccacgauugcaauacaacuugucagacacccaagggugcuauaaacaccagccucccauuucagaauauacauccgaucacaauuggaaaauguccaaaauauguaaaaagcacaaaauugagacuggccacaggauugaggaauaucccgucuauucaaucuagaggccuauuuggggccauugccgguuucauugaagggggguggacagggaugguagauggaugguacgguuaucaccaucaaaaugagcaggggucaggauaugcagccgaccugaagagcacacagaaugccauugacgagauuacuaacaaaguaaauucuguuauugaaaagaugaauacacaguucacagcaguagguaaagaguucaaccaccuggaaaaaagaauagagaauuuaaauaaaaaaguugaugaugguuuccuggacauuuggacuuacaaugccgaacuguugguucuauuggaaaaugaaagaacuuuggacuaccacgauucaaaugugaagaacuuauaugaaaagguaagaagccaguuaaaaaacaaugccaaggaaauuggaaacggcugcuuugaauuuuaccacaaaugcgauaacacgugcauggaaagugucaaaaaugggacuuaugacuacccaaaauacucagaggaagcaaaauuaaacagagaagaaauagaugggguaaagcuggaaucaacaaggauuuaccagauuuuggcgaucuauucaacugucgccaguucauugguacugguagucucccugggggcaaucaguuucuggaugugcucuaaugggucucuacaguguagaauauguauuuaa

SEQ ID NO: 36425 - RNA, 1701 nt, Artificial Sequence; identical to SEQ ID NO: 34714
  derived and/or modified CDS sequence (wt) from hemagglutinin__InfluenzaA__ADD98058

SEQ ID NO: 36426 - RNA, 1701 nt, Artificial Sequence; identical to SEQ ID NO: 34714
  derived and/or modified CDS sequence (wt) from hemagglutinin__InfluenzaA__ADD98068

SEQ ID NO: 36427 - RNA, 1701 nt, Artificial Sequence
  derived and/or modified CDS sequence (wt) from hemagglutinin__InfluenzaA__ADD98078
auggaggcaauacuaguaguucugcuauauacauuugcaaccgcaaaugcagacacauuauguauagguuaucaugcgaacaacucaacagacacuguagacacaguacuagaaaagaauguaacaguaacacacucuguuaaccuucuagaagacaagcauaacgggaaacuaugcaaacuaagagggguagccccauugcauuuggguaaauguaacauugcuggcuggauccugggaaauccagagugugaaucacucuccacagcaagcucaugguccuacauuguggaaacaucuaguucagacaauggaacguguuacccaggagauuucaucgacuaugaggagcuaagagagcaauugagcucagugucaucauuugaaagguuugagauauuccccaagacaaguucauggcccaaucaugacucgaacaaagguguaacggcagcauguccucaugcuggagcaaaaagcuucuacaaaaauuuaauauggcuaguuaaaaaaggaaauucauacccaaagcucagcaaauccuacauuaaugauaaagggaaagaaguccucgugcuauggggcauucaccauccaucgacuagugcugaccaacaaagucucuaucagaaugcagaugcauauguuuuuguggggucaucaagauacagcaagaaguucaagccggaaauagcaauaagacccaaagugagggaucaagaagggagaaugaacuauuacuggacacuaguagagccgggagacaaaauaacauucgaagcaacuggaaaucuagugguaccgagauaugcauucgcaauggaaagaaaugcuggaucugguauuaucauuucagauacaccaguccacgauugcaauacaacuugucagacacccaagggugcuauaaacaccagccucccauuucauaauauacauccgaucacaauuggaaaauguccaaaauauguaaaaagcacaaaauugagacuggccacaggauugaggaaugucccgucuauucaaucuagaggccuauuuggggccauugccgguuucauugaagggggguggacagggaugguagauggaugguacgguuaucaccaucaaaaugagcaggggucaggauaugcagccgaccugaagagcacacagaaugccauugacgagauuacuaacaaaguaaauucuguuauugaaaagaugaauacacaguucacagcaguagguaaagaguucaaccaccuggaaaaaagaauagagaauuuaaauaaaaaaguugaugaugguuuccuggacauuuggacuuacaaugccgaacuguugguucuauuggaaaaugaaagaacuuuggacuaccacgauucaaaugugaagaacuuauaugaaaagguaagaagccaguuaaaaaacaaugccaaggaaauuggaaacggcugcuuugaauuuuaccacaaaugcgauaacacgugcauggaaagugucaaaaaugggacuuaugacuacccaaaauacucagaggaagcaaaauuaaacagagaagaaauagaugggguaaagcuggaaucaacaaggauuuaccagauuuuggcgaucuauucaacugucgccaguucauuaguacugguagucucccugggggcaaucaguuucuggaugugcucuaaugggucucuacaguguagaauauguauuuaa

SEQ ID NO: 36428 - RNA, 1701 nt, Artificial Sequence
  derived and/or modified CDS sequence (wt) from hemagglutinin__InfluenzaA__ADD98098
augaaggcaauacuaguaguucugcuauauacauuugcaaccgcaaaugcagacacauuauguauagguuaucaugcgaacaauucaacagacacuguagacacaauacuagaaaagaauguaacaguaacacacucuguuaaccuucuagaagacaagcauaacgggaaacuaugcaaacuaagagggguagccccauugcauuuggguaaauguaacauugcuggcuggauccugggaaauccagagugugaaucacucuccacagcaagcucaugguccuacauuguggaaacaucuaguucagacaauggaacguguuacccaggagauuucaucgauuaugaggagcuaagagagcaauugagcucagugucaucauuugaaagguuugagauauuccccaagacaaguucauggcccaaucaugacucgaacaaagguguaacggcagcauguccucaugcuggagcaaaaagcuucuacaaaaauuuaauauggcuaguuaaaaaaggaaauucauacccaaagcucagcaaauccuacauuaaugauaaagggaaagaaguccucgugcuauggggcauucaccauccaucuacuaguucugaccaacaaagucucuaucagaaugcagaugcauauguuuuuguggggacaucaagauacagcaagaaguucaagccggaaauagcaauaagacccaaagugagggaucaagaagggagaaugaacuauuacuggacacuaguagagccgggagacaaaauaacauucgaagcaacuggaaaucuagugguaccgagauaugcauucgcaguggaaagaaaugcuggaucugguauuaucauuucagauacaccaguccacgauugcaauacaacuugucagacacccaagggugcuauaaacaccagccucccauuucagaauauacauccgaucacaauuggaaaauguccaaaauauguaaaaagcacaaaauugagacuggccacaggauugaggaaugucccgucuauucaaucuagaggccuauuuggggccauugccgguuucauugaagggggguggacagggaugguagauggaugguacgguuaucaccaucaaaaugagcaggggucaggauaugcagccgaccugaagagcacacagaaugccauugacgagauuacuaacaaaguaaauucuguuauugaaaagaugaauacacaguucacagcaguagguaaagaguucaaccaccuggaaaaaagaauagagaauuuaaauaaaaagguugaugaugguuuccuggacauuuggacuuacaaugccgaacuguugguucuauuggaaaaugaaagaacuuuggacuaccacgauucaaaugugaagaacuuauaugaaaagguaagaagccaguuaaaaaacaaugccaaggaaauuggaaacggcugcuuugaauuuuaccacaaaugcgauaacacaugcauggaaagugucaaaaaugggacuuaugacuacccaaaauacucagaggaagcaaaauuaaacagagaagaaauagaugggguaaagcuggaaucaacaaggauuuaucagauuuuggcgaucuauucaacugucgccaguucauugguacugguagucucccugggggcaaucaguuucuggaugugcucuaaugggucucuacaguguagaauauguauuuaa

SEQ ID NO: 36429 - RNA, 1701 nt, Artificial Sequence; identical to SEQ ID NO: 36397
  derived and/or modified CDS sequence (wt) from hemagglutinin__InfluenzaA__ADD98118

SEQ ID NO: 36430 - RNA, 1701 nt, Artificial Sequence; identical to SEQ ID NO: 36397
  derived and/or modified CDS sequence (wt) from hemagglutinin__InfluenzaA__ADD98128

SEQ ID NO: 36431 - RNA, 1701 nt, Artificial Sequence
  derived and/or modified CDS sequence (wt) from hemagglutinin__InfluenzaA__ADD98138
augaaggcaauacuaguaguucugcuauauacauuugcaaccgcaaaugcagacacauuauguauagguuaucaugcgaacaauucaacagacacuguagacacaguacuagaaaagaauguaacaguaacacacucuguuaaccuucuagaagacaagcauaacgggaaacuaugcaaacuaagagggguagccccauugcauuuggguaaauguaacauugcuggcuggauccugggaaauccagagugugaaucacucuccacagcaagcucaugguccuacauuguggaaacaucuaguucagacaauggaacguguuacccaggagauuucaucaauuaugaggagcuaagagagcaauugagcucagugucaucauuugaaagguuugagauauuccccaagacaaguucauggcccaaucaugacucgaacaaagguguaacggcagcauguccucaugcuggagcaaaaagcuucuacaaaaauuuaauauggcuaguuaaaaaaggaaauucauacccaaagcucagcaaauccuacauuaaugauaaagggaaagaaguccucgugcuauggggcauucaccauccaucuacuaguacugaccaacaaagucucuaucagaaugcagaugcauauguuuuuguggggacaucaagauacagcaagaaguucaagccggaaauagcaauaagacccaaagugagggaucaagaagggagaaugaacuauuacuggacacuaguagagccgggagacaaaauaacauucgaagcaacuggaaaucuagugguaccgagauaugcauucgcaauggaaagaaauacuggaucugguauuaucaucucagauacaccaguccacgauugcaauacaacuugucagacacccaauggugcuauaaacaccagccucccauuucagaauauacauccgaucacaauuggaaaauguccaaaauauguaaaaagcacaaaauugagacuggccacaggauugaggaaugucccgucuauucaaucuagaggccuauuuggggccauugccgguuucauugaagggggguggacagggaugguagauggaugguacgguuaucaccaucaaaaugagcaggggucaggauaugcagcugaccugaagagcacacagaaugccauugacaagauuacuaacaaaguaaauucuguuauugaaaagaugaauacacaguucacagcaguagguaaagaguucaaccaccuggaaaaaagaauagagaauuuaaauaaaaaaguugaugaugguuuccuggacauuuggacuuacaaugccgaacuguugguucuauuggaaaaugaaagaacuuuggacuaccacgauucaaaugugaagaacuuauaugaaaagguaagaagccaguuaaaaaacaaugccaaggaaauuggaaacggcugcuuugaauuuuaccacaaaugcgauaacacgugcauggaaagugucaaaaaugggacuuaugacuacccaaaauacucagaggaagcaaaauuaaacagagaagaaauagaugggguaaagcuggaaucaacaaggauuuaccagauuuuggcgaucuauucaacugucgccaguucauugguacugguagucucccugggggcaaucaguuucuggaugugcucuaaugggucucuacaguguagaauauguauuuaa

SEQ ID NO: 36432 - RNA, 1701 nt, Artificial Sequence
  derived and/or modified CDS sequence (wt) from hemagglutinin__InfluenzaA__ADD98148
augaaggcaauacuaguaguucugcuauauacauuugcaaccgcaaaugcagacacauuauguauagguuaucaugcgaacaauucaacagacacuguagacacaguacuagaaaagaauguaacaguaacacacucuguuaaccuucuagaagacaagcauaacgggaaacuaugcaaacuaagagggguagccccauugcauuuggguaaauguaacauugcuggcuggauccugggaaauccagagugugaaucacucuccacagcaagcucaugguccuacauuguggaaacaucuaguucagacaauggaacguguuacccaggagauuucaucgauuaugaggagcuaagagagcaauugagcucagugucaucauuugaaagguuugagauauuccccaagacaaguucauggcccaaucaugacucgaacaaagguguaacggcagcauguccucaugcuggagcaaaaagcuucuacaaaaauuuaauauggcuaguuaaaaaaggaaauucauacccaaagcucagcaaauccuacauuaaugauaaagggaaagaaguccucgugcuauggggcauucaccauccaucuacuagugcugaccaacaaagucucuaucagaaugcagaugcauauguuuuugugggaacaucaagauacagcaagaaguucaagccggaaauagcaauaagacccaaagugagggaucaagaagggagaaugaacuauuacuggacacuaguagagccgggagacaaaauaacauucgaagcaacuggaaaucuagugguaccgagauaugcauucgcaauggaaagaaaugcuggaucugguauuuucauuucagauacaccaguccacgauugcaauacaacuugucagacacccaagggugcuauaaacaccagccucccauuucagaauauacauccgaucacaauuggaaaauguccaaaauauguaaaaagcacaaaauugagacuggccacaggauugaggaaugucccgucuauucaaucuagaggccuauuuggggccauugccgguuucauugaagggggguggacagggaugguagauggaugguacgguuaucaccaucaaaaugagcaggggucaggauaugcagccgaccugaagagcacacagaaugccauugacaagauuacuaacaaaguaaauucuguuauugaaaagaugaauacacaguucacagcaguagguaaagaguucaaccaccuggaaaaaagaauagagaauuuaaauaaaaaaguugaugaugguuuccuggacauuuggacuuacaaugccgaacuguugguucuauuggaaaaugaaagaacuuuggacuaccacgauucaaaugugaagaacuuauaugaaaagguaagaagccaguuaaaaaacaaugccaaggaaauuggaaacggcugcuuugaauuuuaccacaaaugcgauaacacgugcauggaaagugucaaaaaugggacuuaugacuacccaaaauacucagaggaagcaaaauuaaacagagaagaaauagaugggguaaagcuagaaucaacaaggauuuaccagauuuuggcgaucuauucaacugucgccaguucauugguacugguagucucccugggggcaaucaguuucuggaugugcucuaaugggucucuacaguguagaauauguauuuaa

SEQ ID NO: 36433 - RNA, 1701 nt, Artificial Sequence
  derived and/or modified CDS sequence (wt) from hemagglutinin__InfluenzaA__ADD98158
augaaggcaauacuaguaguucugcuauauacauuugcaaccgcaaaugcagacacauuauguauagguuaucaugcgaacaauucaacagacacuguagacacaguacuagaaaagaauguaacaguaacacacucuguuaaccuucuagaagacaagcauaacgggaaacuaugcgaacuaagagggguagccccauugcauuuggguaaauguaacauugcuggcuggauccugggaaauccagagugugaaucacucuccacagcaagcucaugguccuacauuguggaaacaucuaguucagacaauggaacguguuacccaggagauuucaucgauuaugaggagcuaagagagcaauugagcucagugucaucauuugaaagguuugagauauuucccaagacaaguucauggcccaaucaugacucgaacaaagguguaacggcagcauguccucaugcuggagcaaaaagcuucuacaaaaauuugauauggcuaguuaaaaaaggaaauucauauccaaagcucagcaaauccuacauuaaugauaaagggaaagaaguccucgugcuauggggcauucaccauccaucuacuagugcugaccaacaaagucucuaucagaaugcagaugcauauguuuuuguggggacaucaagauacagcaagaaguucaagccggaaauagcaauaagacccaaagugagggaucaagaagggagaaugaacuauuacuggacacuaguagagccgggagacaaaauaacauucgaagcaacuggaaaucuagugauaccgagauaugcauucgcaauggaaagaaaugcuggaucugguauuaucauuucagauacaccaguccacgauugcaauacaacuugucagacacccaagggugcuauaaacaccagccucccauuucagaauauacauccgaucacaauuggaaaauguccaaaauauguaaaaagcacaaaauugagacuggccacaggauugaggaaugucccgucuauucaaucuagaggccuauuuggggccauugccgguuucauugaagggggguggacagggaugguagauggaugguacgguuaucaccaucaaaaugagcaggggucaggauaugcagccgaccugaagagcacacagaaugccauugacaagauuacuaacaaaguaaauucuguuauugaaaagaugaauacacaguucacagcaguagguaaagaguucaaccaccuggaaaaaagaauagagaauuuaaauaaaaaaguugaugaugguuuccuggacauuuggacuuacaaugccgaacuguugguucuauuggaaaaugaaagaacuuuggacuaccacgauucaaaugugaagaacuuauaugaaaagguaagaagccaguuaaaaaacaaugccaaggaaauuggaaacggcugcuuugaauuuuaccacaaaugcgauaacacgugcauggaaagugucaaaaaugggacuuaugacuacccaaaauacucagaggaagcaaaauuaaacagagaagaaauagaugggguaaagcuagaaucaacaaggauuuaccagauuuuggcgaucuauucaacugucgccaguucauugguacugguagucucccugggggcaaucaguuucuggaugugcucuaaugggucucuacaguguagaauauguauuuaa

SEQ ID NO: 36434 - RNA, 1701 nt, Artificial Sequence
  derived and/or modified CDS sequence (wt) from hemagglutinin__InfluenzaA__ADD98168
augaaggcaauacuaguaguucugcuauauacauuugcaaccgcaaaugcagacacauuauguauagguuaucaugcgaacaauucaacagacacuguagacacaguacuagaaaagaauguaacaguaacacacucuauuaacauucuagaagacaagcauaacgggaaacuaugcaaacuaagagggguagccccauugcauuuggguaaauguaacauugcuggcuggauccugggaaauccagagugugaaucacucuccacagcaagcucaugguccuacauuguggaaacaucuaguucagacaauggaacguguuacccaggagauuucaucgauuaugaggagcuaagagagcaauugagcucagugucaucauuugaaagguuugagauauuccccaagacaaguucauggcccaaucaugacucaaacaaagguguaacggcagcauguccucaugcuggagcaaaaagcuucuacaaaaauuuaauauggcuaguuaaaaaaggaaauucauacccaaagcucagcaaauccuacauuaaugauaaagggaaagaaguccucgugcuauggggcauucaccauccaucuacuagugcugaccaacaaagucucuaucagaaugcagaugcauauguuuuuguggggacaucaagauacagcaagaaguucaagccggaaauagcaauaagacccaaagugagggaucaagaagggagaaugaacuauuacuggacacuaguagagccgggcgacaaaauaacauucgaagcaacuggaaaucuagugguaccgaaauaugcauucgcaauggaaagaaaugcuggaucugguauuaucauuucagauacaccaguucacgauugcaauacaacuugucagacacccaagggugcuauaaacaccagccucccauuucagaauauacauccgaucacaauuggaaaauguccaaaauauguaaaaagcacaaaauugagacuggccacaggauugaggaaugucccgucuauucaaucuagaggccuauuuggggccauugccgguuucauugaagggggguggacagggaugguagauggaugguacgguuaucaccaucaaaaugagcaggggucaggauaugcagccgaccugaagagcacacagaaugccauugacgagauuacuaauaaaguaaauucuguuauugaaaagaugaauacacaguucacagcaguagguaaagaguucaaccaccuggaaaaaagaauagagaauuuaaauaaaaaaguugaugaugguuuccuggacauuuggacuuacaaugccgaacuguugguucuauuggaaaaugaaagaacuuuggacuaccacgauucaaaugugaagaacuuauaugaaaagguaagaagccaguuaaaaaacaaugccaaggaaauuggaaacggcugcuuugaauuuuaccacaaaugcgauaacacgugcauggaaagugucaaaaaugggacuuaugacuacccaaaauacucagaggaagcaaaauuaaacagagaagaaauagaugggguaaagcuggaaucaacaaggauuuaccagauuuuggcgaucuauucaacugucgccaguucauugguacugguagucucccugggggcaaucaguuucuggaugugcucuaaugggucucuacaguguagaauauguauuuaa

SEQ ID NO: 36435 - RNA, 1701 nt, Artificial Sequence; identical to SEQ ID NO: 35853
  derived and/or modified CDS sequence (wt) from hemagglutinin__InfluenzaA__ADD98188

SEQ ID NO: 36436 - RNA, 1701 nt, Artificial Sequence
  derived and/or modified CDS sequence (wt) from hemagglutinin__InfluenzaA__ADD98198
augaaggcaauacuaguaguucugcuauauacauuugcaaccgcaaaugcagacacauuauguauagguuaucaugcgaacaauucaacagacacuguagacacaguacuagaaaagaauguaacaguaacacacucuguuaaccuucuagaagacaagcauaacgggaaacuaugcaaacuaagagggguagccccauugcauuuggguaaauguaacauugcuggcuggauccugggaaauccagagugugaaucacucuccacagcaagcucaugguccuacauuguggaaacaucuaguucagacaauggaacguguuacccaggagauuucaucgauuaugaggagcuaagagagcaauugagcucagugucaucauuugaaagguuugagauauuccccaagacaaguucauggcccaaucaugacucgaacaaagguguaacggcagcauguccucaugcuggagcaaaaagcuucuacaaaaauuuaauauggcuaguuaaaaaaggaaauucauacccaaagcucagcaaauccuacauuaaugauaaagggaaagaaguccucgugcuauggggcauucaccauccaucuacuagugcugaccagcaaagucucuaucagaaugcagaugcauauguuuuuguggggacaucaagauacagcaagaaguucaagccggaaauagcaauaagacccaaagugagggaucaagaagggagaaugaacuauuacuggacacuaguagagccgggagacaaaauaacauucgaagcaacuggaaaucuagugguaccgagauaugcauucgcaauggaaagaaaugcuggaucugguauuaucauuucagauacaccaguccacgauugcaauacaacuugucagacacccaagggugcuauaaacaccagccucccauuucagaauauacauccgaucacaauuggaaaauguccaaaauauguaaaaagcacaaaaaugagacuggccacaggauugaggaaugucccgucuauucaaucuagaggccuauuuggggccauugccgguuucauugaagggggguggacagggaugguagauggaugguacgguuaucaccaucaaaaugagcaggggucaggguaugcagccgaccugaagagcacacagaaugccauugacgagauuacuaacaaaguaaauucuguuauugaaaagaugaauacacaguucacagcaguagguaaagaguucaaccaccuggaaaaaagaauagagaauuuaaauaaaaaaguugaugaugguuuccuggacauuuggacuuacaaugccgaacuguugguucuauuggaaaaugaaagaacuuuggacuaccacgauucaaaugugaagaacuuauaugaaaagguaagaagccaguuaaaaaacaaugccaaggaaauuggaaacggcugcuuugaauuuuaccacaaaugcgauaacacgugcauggaaagugucaaaaaugggacuuaugacuacccaaaauacucagaggaagcaaaauuaaacagagaagaaauagaugggguaaagcuggaaucaacaaggauuuaccagauuuuggcgaucuauucaacugucgccaguucauugguacugguagucucccugggggcaaucaguuucuggaugugcucuaaugggucucuacaguguagaauauguauuuaa

SEQ ID NO: 36437 - RNA, 1701 nt, Artificial Sequence; identical to SEQ ID NO: 34681
  derived and/or modified CDS sequence (wt) from hemagglutinin__InfluenzaA__ADD98208

SEQ ID NO: 36438 - RNA, 1701 nt, Artificial Sequence; identical to SEQ ID NO: 34898
  derived and/or modified CDS sequence (wt) from hemagglutinin__InfluenzaA__ADE20321

SEQ ID NO: 36439 - RNA, 1701 nt, Artificial Sequence; identical to SEQ ID NO: 34898
  derived and/or modified CDS sequence (wt) from hemagglutinin__InfluenzaA__ADE20331

SEQ ID NO: 36440 - RNA, 1701 nt, Artificial Sequence
  derived and/or modified CDS sequence (wt) from hemagglutinin__InfluenzaA__ADE20341
augaaggcaauacuaguaguucugcuauauacauuugcaaccgcaaaugcagacacauuauguauagguuaucaugcgaacaauucaacagacacuguagacacaguacuagaaaagaauguaacaguaacacacucuguuaacauucuagaagacaagcauaacgggaaacuaugcaaacuaagagggguagccccauugcauuuggguaaauguaacauugcuggcuggauccugggaaauccagagugugaaucacucuccacagcaagcucaugguccuacauuguggaaacaucuaguucagacaauggaacguguuacccaggagauuucaucgauuaugaggagcuaagagagcaauugagcucagugucaucauuugaaagguuugagauauuccccaagacaaguucauggcccaaucaugacucaaacaaagguguaacggcagcauguccucaugcuggagcaaaaagcuucuacaaaaauuuaauauggcuaguuaaaaaaggaaauucauacccaaagcucagcaaauccuacauuaaugauaaagggaaagaaguccucgugcuauggggcauucaccauccaucuacuagugcugaccaacaaagucucuaucagaaugcagaugcauauguuuuuguggggucaucaagauacagcaagaaguucaagccggaaauagcaauaagacccaaagugagggaucaagaagggagaaugaacuauuacuggacacuaguagagccgggagacaaaauaacauucgaagcaacuggaaaucuagugguaccgagauaugcauucgcaauggaaagaaaugcuggaucugguauuaucauuucagauacaccaguccacgauugcaauacaacuugucagacacccaagggugcuauaaacaccagccucccauuucagaauauacauccgaucacaauuggaaaauguccaaaauauguaaaaagcacaaaauugagacuggccacaggauugaggaaugucccgucuauucaaucuagaggccuauuuggggccauugccgguuucauugaagggggguggacagggaugguagauggaugguacgguuaucaccaucaaaaugagcaggggucaggauaugcagccgaccugaagagcacacagaaugccauugacgagauuacuaacaaaguaaauucuguuauugaaaagaugaauacacaguucacagcaguagguaaagaguucaaccaccuggaaaaaagaauagagaauuuaaauaaaaaaguugaugaugguuuccuggacauuuggacuuacaaugccgaacuguugguucuauuggaaaaugaaagaacuuuggacuaccacgauucaaaugugaagaacuuauaugaaaagguaagaagccagcuaaaaaacaaugccaaggaaauuggaaacggcugcuuugaauuuuaccacaaaugcgauaacacgugcauggaaagugucaaaaaugggacuuaugacuacccaaaauacucagaggaagcaaaauuaaacagagaagaaauagaugggguaaagcuggaaucaacaaggauuuaccagauuuuggcgaucuauucaacugucgccaguucauugguacugguagucucccugggggcaaucaguuucuggaugugcucuaaugggucucuacaguguagaauauguauuuaa

SEQ ID NO: 36441 - RNA, 1701 nt, Artificial Sequence; identical to SEQ ID NO: 36269
  derived and/or modified CDS sequence (wt) from hemagglutinin__InfluenzaA__ADE20351

SEQ ID NO: 36442 - RNA, 1701 nt, Artificial Sequence
  derived and/or modified CDS sequence (wt) from hemagglutinin__InfluenzaA__ADE20375
augaaggcaauacuaguaguucugcuauauacauuugcaaccgcaaaugcagacacauuauguauagguuaucaugcgaacaauucaacagacacuguagacacaguacuagaaaagaauguaacaguaacacacucuguuaacauucuagaagacaagcauaacgggaaacuaugcaaacuaagagggguagccccauugcauuugggcaaauguaacauugcuggcuggauccugggaaauccagagugugaaucacucuccacagcaagcucaugguccuacauuguggaaacaucuaguucagacaauggaacguguuacccaggagauuucaucgauuaugaggagcuaagagagcaauugagcucagugucaucauuugaaagguuugagauauuccccaagacaaguucauggcccaaucaugacucgaacaaagguguaacggcagcauguccucaugcuggagcaaaaagcuucuacaaaaauuuaauauggcuaguuaaaaaagggaauucauacccaaagcucagcaaauccuacauuaaugauaaagggaaagaaguccucgugcuauggggcauucaccauccaucuacuagugcugaccaacaaagucucuaucagaaugcagaugcauauguuuuuguggggucaucaagauacagcaagaaguucaagccggaaauagcaauaagacccaaagugagggaucaagaagggagaaugaacuauuacuggacacuaguagagccgggagacaaaauaacauucgaagcaacuggaaaucuagugguaccgagauaugcauucgcaauggaaagaaaugcuggaucugguauuaucauuucagauacaccaguccacgauugcaauacaacuugucagacacccaagggugcuauaaacaccagccucccauuucagaauauacauccgaucacaauuggaaaauguccaaaauauguaaaaagcacaaaauugagacuggccacaggauugaggaaugucccgucuauucaaucuagaggccuauuuggggccauugccgguuucauugaagggggguggacagggaugguagauggaugguacgguuaucaccaucaaaaugagcaggggucaggauaugcagccgaccugaagagcacacagaaugccauugacgagauuacuaacaaaguaaauucuguuauugaaaagaugaauacacaguucacagcaguagguaaagaguucaaccaccuggaaaaaagaauagagaauuuaaauaaaaaaguugaugaugguuuccuggacauuuggacuuacaaugccgaacuguugguucuauuggaaaaugaaagaacuuuggacuaccacgauucaaaugugaagaacuuauaugaaaagguaagaagccagcuaaaaaacaaugccaaggaaauuggaaacggcugcuuugaauuuuaccacaaaugcgauaacacgugcauggaaagugucaaaaaugggacuuaugacuacccaaaauacucagaggaagcaaaauuaaacagagaagaaauagaugggguaaagcuggaaucaacaaggauuuaccagauuuuggcgaucuauucaacugucgccaguucauugguacugguagucucccugggggcaaucaguuucuggaugugcucuaaugggucucuacaguguagaauauguauuuaa

SEQ ID NO: 36443 - RNA, 1701 nt, Artificial Sequence; identical to SEQ ID NO: 36269
  derived and/or modified CDS sequence (wt) from hemagglutinin__InfluenzaA__ADE20388

SEQ ID NO: 36444 - RNA, 1701 nt, Artificial Sequence
  derived and/or modified CDS sequence (wt) from hemagglutinin__InfluenzaA__ADE20628
augaaggcaauacuaguaguucugcuauauacauuugcaaccgcaaaugcagacacauuauguauagguuaucaugcgaacaauucaacagacacuguagacacaguacuagaaaagaauguaacaguaacacacucuguuaacauucuagaagacaagcauaacgggaaacuaugcaaacuaagagggguagccccauugcauuuggguaaauguaacauugcuggcuggauccugggaaauccagagugugaaucacucuccacagcaagcucaugguccuacauuguggaaacaucuaguucagacaauggaacguguuacccaggagauuucaucgauuaugaggagcuaagagagcaauugagcucagugucaucauuugaaagguuugagauauuccccaagacaaguucauggcccaaucaugacucgaacaaagguguaacggcagcauguccucaugcuggagcaaaaagcuucuacaaaaauuuaauauggcuaguuaaaaaagggaauucauacccaaagcucagcaaauccuacauuaaugauaaagggaaagaaguccucgugcuauggggcauucaccauccaucuacuagugcugaccaacaaagucucuaucagaaugcagaugcauauguuuuuguggggucaucaagauacagcaagaaguucaagccggaaauagcaauaagacccaaagugagggaucaagaagggagaaugaacuauuacuggacacuaguagagccgggagacaaaauaacauucgaagcaacuggaaaucuagugguaccgagauaugcauucgcaauggaaagaaaugcuggaucugguauuaucauuucagauacaccaguccacgauugcaauacaacuugucagacacccaagggugcuauaaacaccagccucccauuucagaauauacauccgaucacaauuggaaaauguccaaaauauguaaaaagcacaaaauugagacuggccacaggauugaggaaugucccgucuauucaaucuagaggccuauuuggggccauugccgguuucauugaagggggguggacagggaugguagauggaugguacgguuaucaccaucaaaaugagcaggggucaggauaugcagccgaccugaagagcacacagaaugccauugacgagauuacuaacaaaguaaauucuguuauugaaaagaugaauacacaguucacagcaguagguaaagaguucaaccaccuggaaaaaagaauagagaauuuaaauaaaaaaguugaugaugguuuccuggacauuuggacuuacaaugccgaacuguugguucuauuggaaaaugaaagaacuuuggacuaccacgauucaaaugugaagaacuuauaugaaaagguaagaagccagcuaaaaaacaaugccaaggaaauuggaaacggcugcuuugaauuuuaccacaaaugcgauaacacgugcauggaaagugucaaaaaugggacuuaugacuacccaaaauacucagaggaagcaaaauuaaacagagaagaaauagaugggguaaagcuggaaucaacaaggauuuaccagauuuuggcgaucuauucaacugucgccaguucauugguacugguagucucccugggggcaaucaguuucuggaugugcucuaaugggucucuacaguguagaauauguauuuaa

SEQ ID NO: 36445 - RNA, 1701 nt, Artificial Sequence; identical to SEQ ID NO: 36269
  derived and/or modified CDS sequence (wt) from hemagglutinin__InfluenzaA__ADE20638

SEQ ID NO: 36446 - RNA, 1701 nt, Artificial Sequence; identical to SEQ ID NO: 34898
  derived and/or modified CDS sequence (wt) from hemagglutinin__InfluenzaA__ADE20648

SEQ ID NO: 36447 - RNA, 1701 nt, Artificial Sequence; identical to SEQ ID NO: 36442
  derived and/or modified CDS sequence (wt) from hemagglutinin__InfluenzaA__ADE20658

SEQ ID NO: 36448 - RNA, 1701 nt, Artificial Sequence
  derived and/or modified CDS sequence (wt) from hemagglutinin__InfluenzaA__ADE20668
augaaggcaauacuaguaguucugcuauauacauuugcaaccgcaaaugcagacacauuauguauagguuaucaugcgaacaauucaacagacacuguagacacaguacuagaaaagaauguaacaguaacacacucuguuaacauucuagaagacaagcauaacgggaaacuaugcaaacuaagagggguagccccauugcauuuggguaaauguaacauugcuggcuggauccugggaaauccagagugugaaucacucuccacagcaagcucaugguccuacauuguggaaacaucuaguucagacaauggaacguguuacccaggagauuucaucgauuaugaggagcuaagagagcaauugagcucagugucaucauuugaaagguuugagauauuccccaagacaaguucauggcccaaucaugacucgaacaaagguguaacagcagcauguucucaugcuggagcaaaaagcuucuacaaaaauuuaauauggcuaguuaaaaaaggaaauucauacccaaagcucagcaaauccuacauuaaugauaaagggaaagaaguccucgugcuauggggcauucaccauccaucuacuagugcugaccaacaaagucucuaucagaaugcagaugcauauguuuuuguggggucaucaagauacagcaagaaguucaagccggaaauagcaauaagacccaaagugagggaucaagaagggagaaugaacuauuacuggacacuaguagagccgggagacaaaauaacauucgaagcaacuggaaaucuagugguaccgagauaugcauucgcaauggaaagaaaugcuggaucugguauuaucauuucagauacaccaguccacgauugcaauacaacuugucagacacccaagggugcuauaaacaccagccucccauuucagaauauacauccgaucacaauuggaaaauguccaaaauauguaaaaagcacaaaauugagacuggccacaggauugaggaaugucccgucuauucaaucuagaggccuauuuggggccauugccgguuucauugaagggggguggacagggaugguagauggaugguacgguuaucaccaucaaaaugagcaggggucaggauaugcagccgaccugaagagcacacagaaugccauugacgagauuacuaacaaaguaaauucuguuauugaaaagaugaauacacaguucacagcaguagguaaagaguucaaccaccuggaaaaaagaauagagaauuuaaauaaaaaaguugaugaugguuuccuggacauuuggacuuacaaugccgaacuguugguucuauuggaaaaugaaagaacuuuggacuaccacgauucaaaugugaagaacuuauaugaaaagguaagaagccagcuaaaaaacaaugccaaggaaauuggaaacggcugcuuugaauuuuaccacaaaugcgauaacacgugcauggaaagugucaaaaaugggacuuaugacuacccaaaauacucagaggaagcaaaauuaaacagagaagaaauagaugggguaaagcuggaaucaacaaggauuuaccagauuuuggcgaucuauucaacugucgccaguucauugguacugguagucucccugggggcaaucaguuucuggaugugcucuaaugggucucuacaguguagaauauguauuuaa

SEQ ID NO: 36449 - RNA, 1701 nt, Artificial Sequence; identical to SEQ ID NO: 36269
  derived and/or modified CDS sequence (wt) from hemagglutinin__InfluenzaA__ADE20678

SEQ ID NO: 36450 - RNA, 1701 nt, Artificial Sequence; identical to SEQ ID NO: 36344
  derived and/or modified CDS sequence (wt) from hemagglutinin__InfluenzaA__ADE20688

SEQ ID NO: 36451 - RNA, 1701 nt, Artificial Sequence; identical to SEQ ID NO: 36344
  derived and/or modified CDS sequence (wt) from hemagglutinin__InfluenzaA__ADE20708

SEQ ID NO: 36452 - RNA, 1701 nt, Artificial Sequence; identical to SEQ ID NO: 36440
  derived and/or modified CDS sequence (wt) from hemagglutinin__InfluenzaA__ADE20718

SEQ ID NO: 36453 - RNA, 1701 nt, Artificial Sequence
  derived and/or modified CDS sequence (wt) from hemagglutinin__InfluenzaA__ADE20728
augaaggcaauacuaguaguucugcuauauacauuugcaaccgcaaaugcagacacauuauguauagguuaucaugcgaacaauucaacagacacuguagacacaguacuagaaaagaauguaacaguaacacacucuguuaacauucuagaagacaagcauaacgggaaacuaugcaaacuaaaagggguagccccauugcauuuggguaaauguaacauugcuggcuggauccugggaaauccagagugugaaucacucuccacagcaagcucaugguccuacauuguggaaacaucuaguucagacaauggaacguguuacccaggagauuucaucgauuaugaggagcuaagagagcaauugagcucagugucaucauuugaaagguuugagauauuccccaagacaaguucauggcccaaucaugacucgaacaaagguguaacggcagcauguccucaugcuggagcaaaaagcuucuacaaaaauuuaauauggcuaguuaaaaaaggaaauucauacccaaagcucagcaaauccuacauuaaugauaaagggaaagaaguccucgugcuauggggcauucaccauccaucuacuagugcugaccaacaaagucucuaucagaaugcagaugcauauguuuuuguggggucaucaaaauacagcaagaaguucaagccggaaauagcaauaagacccaaagugagggaucaagaagggagaaugaacuauuacuggacacuaguagagccgggagacaaaauaacauucgaagcaacuggaaaucuagugguaccgagauaugcauucgcaauggaaagaaaugcuggaucugguauuaucauuucagauacaccaguccacgauugcaauacaacuugucagacacccaagggugcuauaaacaccagccucccauuucagaauauacauccgaucacaauuggaaaauguccaaaauauguaaaaagcacaaaauugagacuggccacaggauugaggaaugucccgucuauucaaucuagaggccuauuuggggccauugccgguuucauugaagggggguggacagggaugguagauggaugguacgguuaucaccaucaaaaugagcaggggucaggauaugcagccgaccugaagagcacacagaaugccauugacgagauuacuaacaaaguaaauucuguuauugaaaagaugaauacacaguucacagcaguagguaaagaguucaaccaccuggaaaaaagaauagagaauuuaaauaaaaaaguugaugaugguuuccuggacauuuggacuuacaaugccgaacuguugguucuauuggaaaaugaaagaacuuuggacuaccacgauucaaaugugaagaacuuauaugaaaagguaagaagccagcuaaaaaacaaugccaaggaaauuggaaacggcugcuuugaauuuuaccacaaaugcgauaacacgugcauggaaagugucaaaaaugggacuuaugacuacccaaaauacucagaggaagcaaaauuaaacagagaagaaauagaugggguaaagcuggaaucaacaaggauuuaccagauuuuggcgaucuauucaacugucgccaguucauugguacugguagucucccugggggcaaucaguuucuggaugugcucuaaugggucucuacaguguagaauauguauuuaa

SEQ ID NO: 36454 - RNA, 1701 nt, Artificial Sequence; identical to SEQ ID NO: 36344
  derived and/or modified CDS sequence (wt) from hemagglutinin__InfluenzaA__ADE20738

SEQ ID NO: 36455 - RNA, 1701 nt, Artificial Sequence; identical to SEQ ID NO: 36442
  derived and/or modified CDS sequence (wt) from hemagglutinin__InfluenzaA__ADE20748

SEQ ID NO: 36456 - RNA, 1701 nt, Artificial Sequence; identical to SEQ ID NO: 36453
  derived and/or modified CDS sequence (wt) from hemagglutinin__InfluenzaA__ADE20758

SEQ ID NO: 36457 - RNA, 1701 nt, Artificial Sequence; identical to SEQ ID NO: 35334
  derived and/or modified CDS sequence (wt) from hemagglutinin__InfluenzaA__ADE20768

SEQ ID NO: 36458 - RNA, 1701 nt, Artificial Sequence
  derived and/or modified CDS sequence (wt) from hemagglutinin__InfluenzaA__ADE20778
augaaggcaauacuaguaguucugcuauauacauuugcaaccgcaaaugcagacacauuauguauagguuaucaugcgaacaauucaacagacacuguagacacaguacuagaaaagaauguaacaguaacacacucuguuaacauucuagaagacaagcauaacgggaaacuaugcaaacuaaaagggguagccccauugcauuuggguaaauguaacauugcuggcuggauccugggaaauccagagugugaaucacucuccacagcaagcucaugguccuacauuguggaaacaucuaguucagacaauggaacguguuacccaggagauuucaucgauuaugaggagcuaagagagcaauugagcucagugucaucauuugaaagguuugagauauuccccaagacaaguucauggcccaaucaugacucgaacaaagguguaacggcagcauguccucaugcuggagcaaaaagcuucuacaaaaauuuaauauggcuaguuaaaaaaggaaauucauacccaaagcucagcaaauccuacauuaaugauaaagggaaaaaaguccucgugcuauggggcauucaccauccaucuacuagugcugaccaacaaagucucuaucagaaugcagaugcauauguuuuuguggggucaucaaaauacagcaagaaguucaagccggaaauagcaauaagacccaaagugagggaucaagaagggagaaugaacuauuacuggacacuaguagagccgggagacaaaauaacauucgaagcaacuggaaaucuagugguaccgagauaugcauucgcaauggaaagaaaugcuggaucugguauuaucauuucagauacaccaguccacgauugcaauacaacuugucagacacccaagggugcuauaaacaccagccucccauuucagaauauacauccgaucacaauuggaaaauguccaaaauauguaaaaagcacaaaauugagacuggccacaggauugaggaaugucccgucuauucaaucuagaggccuauuuggggccauugccgguuucauugaagggggguggacagggaugguagauggaugguacgguuaucaccaucaaaaugagcaggggucaggauaugcagccgaccugaagagcacacagaaugccauugacgagauuacuaacaaaguaaauucuguuauugaaaagaugaauacacaguucacagcaguagguaaagaguucaaccaccuggaaaaaagaauagagaauuuaaauaaaaaaguugaugaugguuuccuggacauuuggacuuacaaugccgaacuguugguucuauuggaaaaugaaagaacuuuggacuaccacgauucaaaugugaagaacuuauaugaaaagguaagaagccagcuaaaaaacaaugccaaggaaauuggaaacggcugcuuugaauuuuaccacaaaugcgauaacacgugcauggaaagugucaaaaaugggacuuaugacuacccaaaauacucagaggaagcaaaauuaaacagagaagaaauagaugggguaaagcuggaaucaacaaggauuuaccagauuuuggcgaucuauucaacugucgccaguucauugguacugguagucucccugggggcaaucaguuucuggaugugcucuaaugggucucuacaguguagaauauguauuuaa

SEQ ID NO: 36459 - RNA, 1701 nt, Artificial Sequence
  derived and/or modified CDS sequence (wt) from hemagglutinin__InfluenzaA__ADE20788
augaaggcaauacuaguaguucugcuauauacauuugcaaccgcaaaugcagacacauuauguauagguuaucaugcgaacaauucaacagacacuguagacacaguacuagaaaagaauguaacaguaacacacucuguuaaccuucuagaagacaagcauaacgggaaacuaugcaaacuaagagggguagccccauugcauuuggguaaauguaacauugcuggcuggauccugggaaauccagagugugaaucacucuccacagcaagcucaugguccuacauuguggaaacaucuaguucagacaauggaacguguuacccaggagauuucaucgauuaugaggagcuaagagagcaauugagcucagugucaucauuugaaagguuugagauauuccccaagacaaguucauggcccaaucaugacucgaacaaagguguaacggcagcauguccucaugcuggagcaaaaagcuucuacaaaaauuuaauauggcuaguuaaaaaaggaaauucauacccaaagcucagcaaauccuacauuaaugauaaagggaaagaaguccucgugcuauggggcauucaccauccaucuacuagugcugaccaacaaagucucuaucagaaugcagaugcauauguuuuuguggggacaucaagauacagcaagaaguucaagccggaaauagcaauaagacccaaagugagggaucaagaagggagaaugaacuauuacuggacacuaguagagccgggagacaaaauaacauucgaagcaacuggaaaucuagugguaccgagauaugcauucgcaauggaaagaaaugcuggaucugguauuaucauuucagauacaccaguccacgauugcaauacaacuugucagacacccaagggugcuauaaacaccagccucccauuucagaauauacauccgaucacaauuggaaaauguccaaaauauguaaaaagcacaaaauugagacuggccacaggauugaggaaugucccgucuauucaaucuagaggccuauuuggggccauugccgguuucauugaagggggguggacagggaugguagauggaugguacgguuaucaccaucaaaaugagcaggggucaggauaugcagccgaccugaagagcacacagaaugccauugacaagauuacuaacaaaguaaauucuguuauugaaaagaugaauacacaguucacagcaguagguaaagaguucaaccaccuggaaaaaagaauagagaauuuaaauaaaaaaguugaugaugguuuccuggacaucuggacuuacaaugccgaacuguugguucuauuggaaaaugaaagaacuuuggacuaccacgauucaaaugugaagaacuuauaugaaaagguaagaagccaguuaaaaaacaaugccaaggaaauuggaaacggcugcuuugaauuuuaccacaaaugcgauaacacgugcauggaaagugucaaaaaugggacuuaugacuacccaaaauacucagaggaagcaaaauuaaacagagaagaaauagaugggguaaagcuggaaucaacaaggauuuaccagauuuuggcgaucuauucaacugucgccaguucauugguacugguagucucccugggggcaaucaguuucuggaugugcucuaaugggucucuacaguguagaauauguauuuaa

SEQ ID NO: 36460 - RNA, 1701 nt, Artificial Sequence
  derived and/or modified CDS sequence (wt) from hemagglutinin__InfluenzaA__ADE20808
augaaggcaauacuaguaguucugcuauauacauuugcaaccgcaaaugcagacacauuauguauagguuaucaugcgaacaauucaacagacacuguagacacaguacuagaaaagaauguaacaguaacacacucuguuaaccuucuagaagacaagcauaacgggaaacuaugcaaacuaagagggguagccccauugcauuuggguaaauguaacauugcuggcuggauccugggaaauccagagugugaaucacucuccacagcaagcucaugguccuacauuguggaaacaucuaguucagacaauggaacguguuacccaggagauuucaucgauuaugaggaguuaagagagcaauugagcucagugucaucauuugaaagguuugagauauuccccaagacaaguucauggcccaaucaugacucgaacaaagguguaacggcagcauguccucaugcuggagcaaaaagcuucuacaaaaauuuaauauggcuaguuaaaaaaggaaauucauacccaaagcucagcaaauccuacauuaaugauaaagagaaagaaguccucgugcuauggggcauucaccauccaucuacuagugcugaccaacaaagucucuaucagaaugcagaugcauauguuuuuguggggacaucaagauacagcaagaaguucaagccggaaauagcaauaagacccaaagugagggaucaagaagggagaaugaacuauuacuggacacuaguagagccgggagacaaaauaacauucgaagcaacuggaaaucuagugguaccgagauaugcauucgcaauggaaagaaaugcuggaucugguauuaucauuucagauacaccaguccacgauugcaauacaacuugucagacacccaagggugcuauaaacaccagccucccauuucagaauauacauccgaucacaauuggaaaauguccaaaauauguaaaaagcacaaaauugagacuggccacaggauugaggaaugucccgucuauucaaucuagaggccuauuuggggccauugccgguuucauugaagggggguggacagggaugguagauggaugguacgguuaucaccaucaaaaugagcaggggucaggauaugcagccgaccugaagagcacacagaaugccauugacaagauuacuaacaaaguaaauucuguuauugaaaagaugaauacacaguucacagcaguagguaaagaguucaaccaccuggaaaaaagaauagagaauuuaaauaaaaaaguugaugaugguuuccuggacauuuggacuuacaaugccgaacuguugguucuauuggaaaaugaaagaacuuuggacuaccacgauucaaaugugaagaacuuauaugaaaagguaagaagccaguuaaaaaacaaugccaaggaaauuggaaacggcugcuuugaauuuuaccacaaaugcgauaacacgugcauggaaagugucaaaaaugggacuuaugacuacccaaaauacucagaggaagcaaaauuaaacagagaagaaauagaugggguaaagcuggaaucaacaaggauuuaccagauuuuggcgaucuauucaacugucgccaguucauugguacugguagucucccugggggcaaucaguuucuggaugugcucuaaugggucucuacaguguagaauauguauuuaa

SEQ ID NO: 36461 - RNA, 1701 nt, Artificial Sequence
  derived and/or modified CDS sequence (wt) from hemagglutinin__InfluenzaA__ADE20818
augaaggcaauacuaguaguucugcuauauacauuugcaaccgcaaaugcagacacauuauguauagguuaucaugcgaacaauucaacagacacuguagacacaguacuagaaaagaauguaacaguaacacacucuguuaaccuucuagaagacaagcauaacgggaaacuaugcaaacuaagagggguagccccauugcauuuggguaaauguaacauugcuggcuggauccugggaaauccagagugugaaucacucuccacagcaagcucaugguccuacauuguggaaacaucuaguucagacaauggaacguguuacccaggagauuucaucgauuaugaggagcuaagagagcaauugagcucagugucaucauuugaaagguuugagauauuccccaagacaaguucauggcccaaucaugacucgaacaaagguguaacggcagcauguccucaugcuggagcaaaaagcuucuacaaaaauuuaauauggcuaguuaaaaaaggaaauucauacccaaagcucagcaaauccuacauuaaugauaaagggaaagaaguccucgugcuauggggcauucaccauccaucuacuagugcugaccaacaaagucucuaucagaaugcagaugcauauguuuuuguggggacaucaagauacagcaagaaguucaagccggaaauagcaauaagacccaaagugagggaucaagaagggagaaugaacuauuacuggacacuaguagagccgggagacaaaauaacauucgaagcaacuggaaaucuagugguaccgagauaugcauucgcaauggaaagaaaugcuggaucugguauuaucauuucagauacaccaguccacgauugcaauacaacuugucagacacccaagggugcuauaaacaccagccucccauuucagaauauacauccgaucacaauuggaaaauguccaaaauauguaaaaagcacaaaauugagacuggccacaggauugaggaaugucccgucuauucaaucuagaggccuauuuggggccauugccgguuucauugaagggggguggacagggaugguagauggaugguacgguuaucaccaucaaaaugagcaggggucaggauaugcagccgaccugaagagcacacagaaugccauugacaagauuacuaacaaaguaaauucuguuauugaaaagaugaauacacaguucacagcaguagguaaagaguucaaccaucuggaaaaaagaauagagaauuuaaauaaaaaaguugaugaugguuuccuggacauuuggacuuacaaugccgaacuguugguucuauuggaaaaugaaagaacuuuggacuaccacgauucaaaugugaagaacuuauaugaaaagguaagaagccaguuaaaaaacaaugccaaggaaauuggaaacggcugcuuugaauuuuaccacaaaugcgauaacacgugcauggaaagugucaaaaaugggacuuaugacuacccaaaauacucagaggaagcaaaauuaaacagagaagaaauagaugggguaaagcuagaaucaacaaggauuuaccagauuuuggcgaucuauucaacugucgccaguucauugguacugguagucucccugggggcaaucaguuucuggaugugcucuaaugggucucuacaguguagaauauguauuuaa

SEQ ID NO: 36462 - RNA, 1701 nt, Artificial Sequence; identical to SEQ ID NO: 36403
  derived and/or modified CDS sequence (wt) from hemagglutinin__InfluenzaA__ADE20828

SEQ ID NO: 36463 - RNA, 1701 nt, Artificial Sequence
  derived and/or modified CDS sequence (wt) from hemagglutinin__InfluenzaA__ADE20848
augaaggcaauacuaguaguucugcuauauacauuugcaaccgcaaaugcagacacauuauguauagguuaucaugcgaacaauucaacagacacuguagacacaguacuagaaaagaauguaacaguaacacacucuguuaaccuucuagaagacaagcauaacgggaaacuaugcaaacuaagagggguagccccauugcauuuggguaaauguaacauugcuggcuggauccugggaaauccagagugugaaucacucuccacagcaagcucaugguccuacauuguggaaacaucuaguucagacaauggaacguguuacccaggagauuucaucaauuaugaggagcuaagagagcaauugagcucagugucaucauuugaaagguuugagauauuccccaagacaaguucauggcccaaucaugacucgaacaaagguguaacggcagcauguccucaugcuggagcaaaaagcuucuacaaaaauuuaauauggcuaguuaaaaaaggaaauucauacccaaagcucagcaaauccuacauuaaugauaaagggaaagaaguccucgugcuauggggcauucaccauccaucuacuagugcugaccaacaaagucucuaucagaaugcagaugcauauguuuuuguggggacaucaagauacagcaagaaguucaagccggaaauagcaauaagacccaaagugagggaucaagaagggagaaugaacuauuacuggacacuaguagagccgggagacaaaauaacauucgaagcaacuggaaaucuagugguaccgagauaugcauucgcaauggaaagaaaugcuggaucugguauuaucaucucagauacaccaguccacgauugcaauacaacuugucagacacccaagggugcuauaaacaccagccucccauuucagaauauacauccgaucacaauuggaaaauguccaaaauauguaaaaagcacaaaauugagacuggccacaggauugaggaaugucccgucuauucaaucuagaggccuauuuggggccauugccgguuucauugaagggggguggacagggaugauagauggaugguacgguuaucaccaucaaaaugagcaggggucaggauaugcagccgaccugaagagcacacagaaugccauugacaagauuacuaacaaaguaaauucuguuauugaaaagaugaauacacaguucacagcaguagguaaagaguucaaccaccuggaaaaaagaauagagaauuuaaauaaaaaaguugaugaugguuuccuggacauuuggacuuacaaugccgaacuguugguucuauuggaaaaugaaagaacuuuggacuaccacgauucaaaugugaagaacuuauaugaaaagguaagaagccaguuaaaaaacaaugccaaggaaauuggaaacggcugcuuugaauuuuaccacaaaugcgauaacacgugcauggaaagugucaaaaaugggacuuaugacuacccaaaauacucagaggaagcaaaauuaaacagagaagaaauagaugggguaaagcuggaaucaacaaggauuuaccagauuuuggcgaucuauucaacugucgccaguucauugguacugguagucucccugggggcaaucaguuucuggaugugcucuaaugggucucuacaguguagaauauguauuuaa

SEQ ID NO: 36464 - RNA, 1701 nt, Artificial Sequence; identical to SEQ ID NO: 36384
  derived and/or modified CDS sequence (wt) from hemagglutinin__InfluenzaA__ADE20858

SEQ ID NO: 36465 - RNA, 1701 nt, Artificial Sequence
  derived and/or modified CDS sequence (wt) from hemagglutinin__InfluenzaA__ADE20868
augaaggcaauacuaguaguucugcuauauacauuugcaaccgcaaaugcagacacauuauguauagguuaucaugcgaacaauucaacagacacuguagacacaguacuagaaaagaauguaacaguaacacacucuguuaaccuucuagaaggcaagcauaacgggaaacuaugcaaacuaagagggguagccccauugcauuuggguaaauguaacauugcuggcuggauccugggaaauccagagugugaaucacucaccacagcaagcucaugguccuacauuguggaaacaucuaguucagacaauggaacguguuacccaggagauuucaucgauuaugaggagcuaagagagcaauugagcucagugucaucauuugaaagguuugagauguuccccaagacaaguucauggcccaaucaugacucgaacaaagguguaacggcagcauguccucaugcuggagcaaaaagcuucuacaaaaauuuaauauggcuaguuaaaaaaggaaauucauacccaaagcucagcaaauccuacauuaaugauaaagggaaagaaguccucgugcuauggggcauucaccauccaucuacuagugcugaccaacaaagucucuaucagaaugcagaugcauauguuuuuguggggacaucaagauacagcaagaaguucaagccggaaauagcaauaagacccaaagugagggaucaagaagggagaaugaacuauuacuggacacuaguagagccgggagacaaaauaacauucgaagcaacuggaaaucuagugguaccgagauaugcauucgcaauggaaagaaaugcuggaucugguauuaucauuucagauacaccaguccacgauugcaauacaacuugucagacacccaagggugcuauaaacaccagccucccauuucagaauauacauccgaucacaauuggaaaauguccaaaauauguaaaaagcacaaaauugagacuggccacaggauugaggaaugucccgucuauucaaucuagaggccuauuuggggccauugccgguuucauugaagggggguggacagggaugguagauggaugguacgguuaucaccaucaaaaugagcaggggucaggauaugcagccgaccugaagagcacacagaaugccauugacgagauuacuaacaaaguaaauucuguuauugaaaagaugaauacacaguucacagcaguagguaaagaguucaaccaccuggaaaaaagaauagagaauuuaaauaaaaaaguugaugaugguuuccuggacauuuggacuuacaaugccgaacuguugguucuauuggaaaaugaaagaacuuuggacuaccacgauucaaaugugaagaacuuauaugaaaagguaagaagccaguuaaaaaacaaugccaaggaaauuggaaacggcugcuuugaauuuuaccacaaaugcgauaacacgugcauggaaagugucaaaaaugggacuuaugacuacccaaaauacucagaggaagcaaaauuaaacagagaagaaauagaugggguaaagcuggaaucaacaaggauuuaccagauuuuggcgaucuauucaacugucgccaguucauugguacugguagucucccugggggcaaucaguuucuggaugugcucuaaugggucucuacaguguagaauauguauuuaa

SEQ ID NO: 36466 - RNA, 1701 nt, Artificial Sequence
  derived and/or modified CDS sequence (wt) from hemagglutinin__InfluenzaA__ADE20878
augaaggcaauacuaguaguucugcuauauacauuugcaaccgcaaaugcagacacauuauguauagguuaucaugcgaacaauucaacagacacuguagacacaauacuagaaaagaauguaacaguaacacacucuguuaaccuucuagaagacaagcauaacgggaaacuaugcaaacuaagagggguagccccauugcauuuggguaaauguaacauugcuggcuggauccugggaaauccagagugugaaucacucuccacagcaagcucaugguccuacauuguggaaacaucuaguucagacaauggaacguguuacccaggagauuucaucgauuaugaggagcuaagagagcaauugagcucagugucaucauuugaaagguuugagauauuccccaagacaaguucauggcccaaucaugacucgaacaaagguguaacggcagcauguccucaugcuggagcaaaaagcuucuacaaaaauuuaauauggcuaguuaaaaagggaaauucauacccaaagcucagcaaauccuacauuaaugauaaagggaaagaaauccucgugcuauggggcauucaccauccaucuacuauugcugaccaacaaagucucuaucagaaugcagaugcauauguuuuuguggggacaucaagauacagcaagaaguucaagccggaaauagcaauaagacccaaagugagggaucaagaagggagaaugaaauauuacuggacacuaguagagccgggagacaaaauaacauucgaagcaacuggaaaucuagugguaccgagauaugcauucgcaauggaaagaaaugcuggaucugguauuaucauuucagauacaccaguccacaauugcaauacaacuugucagacacccaagggugcuauaaacaccagccucccauuucagaauauacauccgaucacaauuggaaaauguccaaaauauguaaaaagcacaaaauugagacuggccacaggauugaggaaugucccgucuauucaaucuagaggccuauuuggggccauugccgguuucauugaagggggguggacagggaugguagauggaugguacgguuaucaccaucaaaaugagcaggggucaggauaugcagcugaccugaagagcacacagaaugccauugacgagauuacuaacaaaguaaauucuguuauugaaaagaugaauacacaguucacagcaguagguaaagaguucaaccaccuggaaaaaagaauagagaauuuaaauaaaaagguugaugaugguuuccuggacauuuggacuuacaaugccgaacuguugguucuauuggaaaaugaaagaacuuuggacuaccacgauucaaaugugaagaacuuauaugaaaagguaagaagccaguuaaaaaacaaugccaaggaaauuggaaacggcugcuuugaauuuuaccacaaaugcgauaacacgugcauggaaagugucaaaaaugggacuuaugacuacccaaaauacucagaggaagcaaaauuaaacagagaagaaauagaugggguaaagcuggaaucaacaaggauuuaccagauuuuggcgaucuauucaacugucgccaguucauugguacugguagucucccugggggcaaucaguuucuggaugugcucuaaugggucucuacaguguagaauauguauuuaa

SEQ ID NO: 36467 - RNA, 1701 nt, Artificial Sequence
  derived and/or modified CDS sequence (wt) from hemagglutinin__InfluenzaA__ADE20888
augaaggcaauacuaguaguucugcuauauacauuugcaaccgcaaaugcagacacauuauguauagguuaucaugcgaacaauucaacagacacuguagacacaguacuagaaaagaauguaacaguaacacacucuguuaaccuucuagaagacaagcauaacgggaaacuaugcaaacuaagagggguagccccauugcauuuggguaaauguaacauugcuggcuggauccugggaaauccagagugugaaucacucuccacagcaagcucaugguccuacauuguggaaacaucuaguucaggcaauggaacguguuacccaggagauuucaucgauuaugaggagcuaagagagcaauugagcucagugucaucauuugaaagguuugagauauuucccaagacaaguucauggcccaaucaugacucgaacaaagguguaacggcagcauguccucaugcuggagcaaaaagcuucuacaaaaauuuaauauggcuaguuaaaaaaggaaauucauacccaaagcucagcaaauccuacauuaaugauaaagggaaagaaguccucgugcuauggggcauucaccauccaucuacuagugcugaccaacaaagucucuaucagaaugcagaugcauauguuuuuguggggacaucaagauacagcaagaaguucaagccggaaauagcaauaagacccaaagugagggaucaagaagggagaaugaacuauuacuggacacuaguagagccgggagacaaaauaacauucgaagcaacuggaaaucuagugguaccgagauaugcauucgcaauggaaagaaaugcuggaucugguauuaucauuucagauacaccaguccacgauugcaauacaacuugucagacacccaagggugcuauaaacaccagccucccauuucagaauauacauccgaucacaauuggaaaauguccaaaauauguaaaaagcacaaaauugagacuggccacaggauugaggaaugucccgucuauucaaucuagaggccuauuuggggccauugccgguuucauugaagggggguggacagggaugguagauggaugguacgguuaucaccaucaaaaugagcaggggucaggauaugcagccgaccugaagagcacacagaaugccauugacgagauuacuaacaaaguaaauucuguuauugaaaagaugaauacacaguucacagcaguagguaaagaguucaaccaccuggaaaaaagaauagagaauuuaaauaaaaaaguugaugaugguuuccuggacauuuggacuuacaaugccgaacuguugguucuauuggaaaaugaaagaacuuuggacuaccacgauucaaaugugaagaacuuauaugaaaagguaagaagccaguuaaaaaacaaugccaaggaaauuggaaacggcugcuuugaauuuuaccacaaaugcgauaacacgugcauggaaagugucaaaaaugggacuuaugacuacccaaaauacucagaggaagcaaaauuaaacagagaagaaauagaugggguaaagcuggaaucaacaaggauuuaccagauuuuggcgaucuauucaacugucgccaguucacugguacugguagucucccugggggcaaucaguuucuggaugugcucuaaugggucucuacaguguagaauauguauuuaa

SEQ ID NO: 36468 - RNA, 1701 nt, Artificial Sequence
  derived and/or modified CDS sequence (wt) from hemagglutinin__InfluenzaA__ADE20898
augaaggcaauacuaguaguucugcuauauacauuugcaaccgcaaaugcagacacauuauguauagguuaucaugcgaacaauucaacagacacuguagacacaauacuagaaaagaauguaacaguaacacacucuguuaaccuucuagaagacaagcauaacgggaaacuaugcaaacuaagagggguagccccauugcauuuggguaaauguaacauugcuggcuggauccugggaaauccagagugugaaucacucuccacagcaagcucaugguccuacauuguggaaacaucuaguucagacaauggaacguguuacccaggagauuucaucgauuaugaggagcuaagagagcaauugagcucagugucaucauuugaaagguuugagauauuccccaagacaaguucauggcccaaucaugacucgaacaaagguguaacggcagcauguccucaugcuggagcaaaaagcuucuacaaaaauuuaauauggcuaguuaaaaagggaaauucauacccaaagcucagcaaauccuacauuaaugauaaagggaaagaaauccucgugcuauggggcauucaccauccaucuacuagugcugaccaacaaagucucuaucaaaaugcagaugcauauguuuuuguggggacaucaagauacagcaagaaguucaagccggaaauagcaauaagacccaaagugagggaucaagaagggagaaugaacuauuacuggacacuaguagagccgggagacaaaauaacauucgaagcaacuggaaaucuagugguaccgagauaugcauucgcaauggaaagaaaugcuggaucugguauuaucauuucagauacaccaguccacgauugcaauacaacuugucagacacccaagggugcuauaaacaccagccucccauuucagaauauacauccgaucacaauuggaaaauguccaaaauauguaaaaagcacaaaauugagacuggccacaggauugaggaaugucccgucuauucaaucuagaggccuauuuggggccauugccgguuucauugaagggggguggacagggaugguagauggaugguacgguuaucaccaucaaaaugagcaggggucaggauaugcagccgaccugaagagcacacagaaugccauugacgagauuacuaacaaaguaaauucuguuauugaaaagaugaauacacaguucacagcaguagguaaagaguucaaccaccuggaaaaaagaauagagaauuuaaauaaaaagguugaugaugguuuccuggacauuuggacuuacaaugccgaacuguugguucuauuggaaaaugaaagaacuuuggacuaccacgauucaaaugugaagaacuuauaugaaaagguaagaagccaguuaaaaaacaaugccaaggaaauuggaaacggcugcuuugaauuuuaccacaaaugcgauaacacgugcauggaaggugucaaaaaugggacuuaugacuacccaaaauacucagaggaagcaaaauuaaacagagaagaaauagaugggguaaagcuggaaucaacaaggauuuaccagauuuuggcgaucuauucaacugucgccaguucauugguacugguagucucccugggggcaaucaguuucuggaugugcucuaaugggucucuacaguguagaauauguauuuaa

SEQ ID NO: 36469 - RNA, 1701 nt, Artificial Sequence; identical to SEQ ID NO: 36432
  derived and/or modified CDS sequence (wt) from hemagglutinin__InfluenzaA__ADE20908

SEQ ID NO: 36470 - RNA, 1701 nt, Artificial Sequence
  derived and/or modified CDS sequence (wt) from hemagglutinin__InfluenzaA__ADE20918
augaaggcaauacuaguaguucugcuauauacauuugcaaccgcaaaugcagacacauuauguauagguuaucaugcgaacaauucaacagacacuguagacacaguacuagaaaagaauguaacaguaacacacucuguuaacauucuagaagacaagcauaacgggaaacuaugcaaacuaagagggguagccccauugcauuuggguaaauguaacauugcuggcuggauccugggaaauccagagugugaaucacucuccacagcaagcucaugguccuacauuguggaaacaucuaguucagacaauggaacguguuacccaggagauuucaucgauuaugaggagcuaagagagcaauugagcucagugucaucauuugaaagguuugagauauuccccaagacaaguucauggcccaaucaugacucgaacaaagguguaacggcagcauguccucaugcuggagcaaaaagcuucuacaaaaauuuaauauggcuaguuaaaaaaggaaauucauacccaaagcucagcaaauccuacauuaaugauaaagggaaagaaguccucgugcuauggggcauucaccauccaucuacuagugcugaccaacaaagucucuaucagaaugcagaugcauauguuuuuguggggacaucaagauacagcaagaaguucaagccggaaauagcaauaagacccaaagugagggaucaagaagggagaaugaacuauuacuggauacuaguagagccgggagacaaaauaacauucgaagcaacuggaaaucuagugguaccgagauaugcauucgcaauggaaagaaaugcuggaucugguauuaucauuucagauacaccaguucacgauugcaauacaacuugucagacacccaagggugcuauaaacaccagccucccauuucagaauauacauccgaucacaauuggaaaauguccaaaauauguaaaaagcacaaaauugagacuggccacaggauugaggaaugucccgucuauucaaucuagaggccuauuuggggccauugccgguuucauugaagggggguggacagggaugguagauggaugguacgguuaucaccaucaaaaugagcaggggucaggauaugcagccgaccugaagagcacacagaaugccauugacgagauuacuaauaaaguaaauucuguuauugaaaagaugaauacacaguucacagcaguagguaaagaguucaaccaccuggaaaaaagaauagagaauuuaaauaaaaaaguugaugaugguuuccuggacauuuggacuuacaaugccgaacuguugguucuauuggaaaaugaaagaacuuuggacuaccacgauucaaaugugaagaacuuauaugaaaagguaagaagccaguuaaaaaacaaugccaaggaaauuggaaacggcugcuuugaauuuuaccacaaaugcgauaacacgugcauggaaagugucaaaaaugggacuuaugacuacccaaaauacucagaggaagcaaaauuaaacagagaagaaauagaugggguaaagcuggaaucaacaaggauuuaccagauuuuggcgaucuauucaacugucgccaguucauugguacugguagucucccugggggcaaucaguuucuggaugugcucuaaugggucucuacaguguagaauauguauuuaa

SEQ ID NO: 36471 - RNA, 1701 nt, Artificial Sequence; identical to SEQ ID NO: 35772
  derived and/or modified CDS sequence (wt) from hemagglutinin__InfluenzaA__ADE20928

SEQ ID NO: 36472 - RNA, 1701 nt, Artificial Sequence
  derived and/or modified CDS sequence (wt) from hemagglutinin__InfluenzaA__ADE20948
augaaggcaauacuaguaguucugcuauauacauuugcaaccgcaaaugcagacacauuauguauagguuaucaugcgaacaauucaacagacacuguagacacaguacuagaaaagaauguaacaguaacacacucuguuaaccuucuagaagacaagcauaacgggaaacuaugcaaacuaagagggguagccccauugcauuuggguaaauguaacauugcuggcuggauccugggaaauccagagugugaaucacucuccacagcaagcucaugguccuacauuguggaaacaucuaguucagacaauggaacguguuacccaggagauuucaucaauuaugaggagcuaagagagcaauugagcucagugucaucauuugaaagguuugagauauuccccaagacaaguucauggcccaaucaugacucgaacaaagguguaacggcagcauguccucaugcuggagcaaaaagcuucuacaaaaauuuaauauggcuaguuaaaaaaggaaauucauacccaaagcucagcaaauccuacauuaaugauaaagggaaagaaguccucgugcuauggggcauucaccauccaucuacuagugcugaccaacaaagucucuaucagaaugcagauucauauguuuuuguggggacaucaagauacagcaagaaguucaagccggaaauagcaauaagaccaaaagugagggaucaagaagggagaaugaacuauuacuggacacuaguagagccgggagacaaaauaacauucgaagcaacuggaaaucuagugguaccgagauaugcauucgcaauggaaagaaaugcuggaucugguauuaucaucucagauacaccaguccacgauugcaauacaacuugucagacacccaagggugcuauaaacaccagccucccauuucagaauauacauccgaucacaauuggaaaauguccaaaauauguaaaaagcacaaaauugagacuggccacaggauugaggaaugucccgucuauucaaucuagaggccuauuuggggccauugccgguuucauugaagggggguggacagggaugguagauggaugguacgguuaucaccaucaaaaugagcaggggucaggauaugcagccgaccugaagagcacacagaaugccauugacaagauuacuaacaaaguaaauucuguuauugaaaagaugaauacacaguucacagcaguagguaaagaguucaaccaccuggaaaaaagaauagagaauuuaaauaaaaaaguugaugaugguuuccuggacauuuggacuuacaaugccgaacuguugguucuauuggaaaaugaaagaacuuuggacuaccacgauucaaaugugaagaacuuauaugaaaagguaagaagccaguuaaaaaacaaugccaaggaaauuggaaacggcugcuuugaauuuuaccacaaaugcgauaacacgugcauggaaagugucaaaaaugggacuuaugacuacccaaaauacucagaggaagcaaaauuaaacagagaagaaauagaugggguaaagcuggaaucaacaaggauuuaccagauuuuggcgaucuauucaacugucgccaguucauugguacugguagucucccugggggcaaucaguuucuggaugugcucuaaugggucucuacaguguagaauauguauuuaa

SEQ ID NO: 36473 - RNA, 1701 nt, Artificial Sequence
  derived and/or modified CDS sequence (wt) from hemagglutinin__InfluenzaA__ADE20968
augaaggcaauacuaguaguucugcuauauacauuugcaaccgcaaaugcagacacauuauguauagguuaucaugcgaacaauucaacagacacuguagacacaguacuagaaaagaauguaacaguaacacacucuguuaaccuucuagaagacaagcauaacgggaaacuaugcaaacuaagaggggaagccccauugcauuuggguaaauguaacauugcuggcuggauccugggaaauccagagugugaaucacucuccacagcaagcucaugguccuacauuguggaaacaucuaguucagacaauggaacguguuacccaggagauuucaucaauuaugaggagcuaagagagcaauugagcucagugucaucauuugaaagguuugagauauuccccaagacaaguucauggcccaaucaugacucgaacaaagguguaacggcagcauguccucauucuggagcaaaaagcuucuacaaaaauuuaauauggcuaguuaaaaaaggaaauucauacccaaagcucagcaaauccuacauuaaugauaaagggaaagaaguccucgugcuauggggcauucaccauccaucuacuagugcugaccaacaaagucucuaucagaaugcagaugcauauguuuuuguggggacaucaagauacagcaagaaguucaagccggaaauagcaauaagacccaaagugagggaucaagaagggagaaugaacuauuacuggacacuaguagagccgggagacaaaauaacauucgaagcaacuggaaaucuagugguaccgagauaugcauucgcaauggaaagaaaugcuggaucugguauuaucaucucagauacaccaguccacgauugcaauacaacuugucagacacccaagggugcuauaaacacaagccucccauuucagaauauacauccgaucacaauuggaaaauguccaaaauauguaaaaagcacaaaauugagacuggccacaggauugaggaaugucccgucuauucaaucuagaggccuauuuggggccauugccgguuucauugaagggggguggacagggaugguagauggaugguacgguuaucaccaucaaaaugagcaggggucaggauaugcagccgaccugaagagcacacagaaugccauugacaagauuacuaacaaaguaaauucuguuauugaaaagaugaauacacaguucacagcaguagguaaagaguucaaccaccuggaaaaaagaauagagaauuuaaauaaaaaaguugaugaugguuuccuggacauuuggacuuacaaugccgaacuguugguucuauuggaaaaugaaagaacuuuggacuaccacgauucaaaugugaagaacuuauaugaaaagguaagaagccaguuaaaaaacaaugccaaggaaauuggaaacggcugcuuugaauuuuaccacaaaugcgauaacacgugcauggaaagugucaaaaaugggacuuaugacuacccaaaauacucagaggaagcaaaauuaaacagagaagaaauagaugggguaaagcuggaaucaacaaggauuuaccagauuuuggcgaucuauucaacugucgccaguucauugguacugguagucucccugggggcaaucaguuucuggaugugcucuaaugggucucuacaguguagaauauguauuuaa

SEQ ID NO: 36474 - RNA, 1701 nt, Artificial Sequence
  derived and/or modified CDS sequence (wt) from hemagglutinin__InfluenzaA__ADE20978
augaaggcaauacuaguaguucugcuauauacauuugcaaccgcaaaugcagacacauuauguauagguuaucaugcgaacaauucaacagacacuguagacacaguacuagaaaagaauguaacaguaacacacucuguuaaccuucuagaagacaagcauaacgggaaacuaugcaaacuaagagggguagccccauugcauuuggguaaauguaacauugcuggcuggauccugggaaauccagagugugaaucacucuccacagcaagcucaugguccuacauuguggaaacaucuaguucagacaauggaacguguuacccaggagauuucaucgauuaugaggagcuaagagagcaauugagcucagugucaucauuugaaagguuugagauauuccccaagacaaguucauggcccaaucaugacucgaacaaagguguaacggcagcauguccucaugcuggagcaaaaagcuucuacaaaaauuugauauggcuaguuaaaaaaggaaauucauacccaaagcucagcaaauccuacauuaaugauaaagggaaagaaguccucgugcuauggggcauucaccauccaucuacuagugcugaccaacaaagucucuaucagaaugcagaugcauauguuuuuguggggacaucaagauacagcaagaaguucaagccggaaauagcaauaagacccaaagugagggaucaagaagggagaaugaacuauuacuggacacuaguagagccgggagacaaaauaacauucgaagcaacuggaaaucuagugguaccgagauaugcauucgcaauggaaagaaaugcuggaucugguauuaucauuucagauacaccaguccacgauugcaauacaacuugucagacacccaagggugcuauaaacaccagccucccauuucagaauauacauccgaucacaauuggaaaauguccaaaauauguaaaaagcacaaaauugagacuggccacaggauugaggaaugucccgucuauucaaucuagaggccuauuuggggccauugccgguuucauugaagggggguggacagggaugguagauggaugguacgguuaucaccaucaaaaugagcaggggucaggauaugcagccgaccugaagagcacacagaaugccauugacaagauuacuaacaaaguaaauucuguuauugaaaagaugaauacacaguucacagcaguagguaaagaguucaaccaccuggaaaaaagaauagagaauuuaaauaaaaaaguugaugaugguuuccuggacauuuggacuuacaaugccgaacuguugguucuauuggaaaaugaaagaacuuuggacuaccacgauucaaaugugaagaacuuauaugaaaagguaagaagccaguuaaaaaacaaugccaaggaaauuggaaacggcuguuuugaauuuuaccacaaaugcgauaacacgugcauggaaagugucaaaaaugggacuuaugacuacccaaaauacucagaggaagcaaaauuaaacagagaagaaauagaugggguaaagcuagaaucaacaaggauuuaccagauuuuggcgaucuauucaacugucgccaguucauugguacugguagucucccugggggcaaucaguuucuggaugugcucuaaugggucucuacaguguagaauauguauuuaa

SEQ ID NO: 36475 - RNA, 1701 nt, Artificial Sequence
  derived and/or modified CDS sequence (wt) from hemagglutinin__InfluenzaA__ADE20988
augaaggcaauacuaguaguucugcuauauacauuugcaaccgcaaaugcagacacauuauguauagguuaucaugcgaauaauucaacagacacuguagacacaguacuagaaaagaauguaacaguaacacacucaguuaaccuucuagaagacaagcauaacgggaaacuaugcaaacuaagagggguagccccauugcauuuggguaaauguaacauugcuggcuggauccugggaaauccagagugugaaucacucuccacagcaagcucaugguccuacauuguggaaacaucuaguucagacaauggaacguguuacccaggagauuucaucgauuaugaggagcuaagagagcaauugagcucagugucaucauuugaaagguuugagauauuccccaagacaaguucauggcccaaucaugacucgaacaaagguguaacggcagcauguccucaugcuggagcaaaaagcuucuacaaaaauuuaauauggcuaguuaaaaaaggaaauucauacccaaagcucagcaaauccuacauuaaugauaaagggaaagaaguccucgugcuauggggcauucaccauccaucuacuaguacugaccaacaaagucucuaucagaaugcagaugcauauguuuuuguggggacaucaagauacagcaagaaguucaagccggaaauagcaauaagacccaaagugagggaucaagaagggagaaugaacuauuacuggacacuaguagagccgggagacaaaauaacauucgaagcaacuggaaaucuagugguaccgagauaugcauucgcaauggaaagaaaugcuggaucugguauuaucauuucagauacaccaguccacgauugcaauacaacuugucagacacccaagggugcuauaaacaccagccucccauuucagaauauacauccgaucacaauuggaaaauguccaaaauauguaaaaagcacaaaauugagacuggccacaggauugaggaauaucccgucuauucaaucuagaggccuauuuggggccauugccgguuucauugaagggggguggacagggaugguagauggaugguacgguuaucaccaucaaaaugagcaggggucaggauaugcagccgaccugaagagcacacagaaugccauugacgagauuacuaacaaaguaaauucuguuauugaaaagaugaauacacaguucacagcaguagguaaagaguucaaccaccuggaaaaaagaauagagaauuuaaauaaaaagguugaugaugguuuccuggacauuuggacuuacaaugccgaacuguugguucuauuggaaaaugaaagaacuuuggacuaccacgauucaaaugugaagaacuuauaugaaaagguaagaagccaguuaaaaaacaaugccaaggaaauuggaaacggcugcuuugaauuuuaccacaaaugugauaacacgugcauggaaagugucaaaaaugggacuuaugacuacccaaaauacucagaggaagcaaaauuaaaaagagaagaaauagaugggguaaagcuggaaucaacaaggauuuaccagauuuuggcgaucuauucaacugucgccaguucauugguacugguagucucccugggggcaaucaguuucuggaugugcucuaaugggucucuacaguguagaauauguauuuaa

SEQ ID NO: 36476 - RNA, 1701 nt, Artificial Sequence
  derived and/or modified CDS sequence (wt) from hemagglutinin__InfluenzaA__ADE20998
augaaggcaauacuaguaguucugcuguauacauuugcaaccgcaaaugcagacacauuauguauagguuaucaugcgaacaauucaacagacacuguagacacaguacuagaaaagaauguaacaguaacacacucuguuaaccuucuagaagacaagcauaacgggaaacuaugcaaacuaagagggguagccccauugcauuuggguaaauguaacauugcuggcuggauccugggaaauccagagugugaaucacucuccacagcaagcucaugguccuacauuguggaaacaucuaguucagacaauggaacguguuacccaggagauuucaucgauuaugaggagcuaagagagcaauugagcucagugucaucauuugaaagguuugagauauuccccaagacaaguucauggcccaaucaugacucgaacaaagguguaacggcagcauguccucaugcuggagcaaaaagcuucuacaaaaauuugauauggcuaguuaaaaaaggaaauucauacccaaagcucagcaaauccuacauuaaugauaaagggaaagaaguccucgugcuauggggcauucaccauccaucuacuagugcugaccaacaaagucucuaucagaaugcagaugcauauguuuuuguggggacaucaagauacagcaagaaguucaagccggaaauagcaauaagacccaaagugagggaucaagaagggagaaugaacuauuacuggacacuaguagagccgggagacaaaauaacauucgaagcaacuggaaaucuagugguaccgagauaugcauucgcaauggaaagaaaugcuggaucugguauuaucauuucagauacaccaguccacgauugcaauacaacuugucagacacccaagggugcuauaaacaccagccucccauuucagaauauacauccgaucacaauuggaaaauguccaaaauauguaaaaagcacaaaauugagacuggccacaggauugaggaaugucccgucuauucaaucuagaggccuauuuggggccauugccgguuucauugaagggggguggacagggaugguagauggaugguacgguuaucaccaucaaaaugagcaggggucaggauaugcagccgaccugaagagcacacagaaugccauugacaagauuacuaacaaaguaaauucuguuauugaaaagaugaauacacaguucacagcaguagguaaagaguucaaccaccuggaaaaaagaauagagaauuuaaauaaaaaaguugaugaugguuuccuggacauuuggacuuacaaugccgaacuguugguucuauuggaaaaugaaagaacuuuggacuaccacgauucaaaugugaagaacuuauaugaaaagguaagaagccaguuaaaaaacaaugccaaggaaauuggaaacggcugcuuugaauuuuaccacaaaugcgauaacacgugcauggaaagugucaaaaaugggacuuaugacuacccaaaauacucagaggaagcaaaauuaaacagagaagaaauagaugggguaaagcuagaaucaacaaggauuuaccagauuuuggcgaucuauucaacugucgccaguucauugguacugguagucucccugggggcaaucaguuucuggaugugcucuaaugggucucuacaguguagaauauguauuuaa

SEQ ID NO: 36477 - RNA, 1701 nt, Artificial Sequence; identical to SEQ ID NO: 36009
  derived and/or modified CDS sequence (wt) from hemagglutinin__InfluenzaA__ADE21008

SEQ ID NO: 36478 - RNA, 1701 nt, Artificial Sequence
  derived and/or modified CDS sequence (wt) from hemagglutinin__InfluenzaA__ADE21018
augaaggcaauacuaguaguucugcuauauacauuugcaaccgcaaaugcagacacauuauguauagguuaucaugcgaacaauucaacagacacuguagacacaguacuagaaaagaauguaacaguaacacacucuguuaaccuucuagaagacaagcauaacgggaaacuaugcaaacuaagagggguagccccauugcauuuggguaaauguaacauugcuggcuggauccugggaaauccagagugugaaucacucuccacagcaagcucaugguccuacauuguggaaacaucuaguucagacaauggaacguguuacccaggagauuucaucgauuaugaggagcuaagagagcaauugagcucagugucaucauuugaaagguuugagauauuccccaagacaaguucauggcccaaucaugacucgaacaaagguguaacgacagcauguccucaugcuggagcaaaaagcuucuacaaaaauuuaauauggcuaguuaaaaaaggaaauucauacccaaagcucagcaaauccuacauuaaugauaaagggaaagaaguccucgugcuauggggcauucaccauccaucuacuaguacugaccaacaaagccucuaucagaaugcagaugcauauguuuuuguggggacaucaagauacagcaagaaguucaagccggaaauagcaauaagacccaaagugagggaucaagaagggagaaugaacuauuacuggacacuaguagagccgggagacaaaauaacauucgaagcaacuggaaaucuagugguaccgagauaugcauucgcaauggaaagaaaugcuggaucugguauuaucauuucagauacaccaguccacgauugcaauacaacuugucagacacccaagggugcuauaaacaccagccucccauuucagaauauacauccgaucacaauuggaaaauguccaaaauauguaaaaagcacaaaauugagacuggccacaggauugaggaauaucccgucuauucaaucuagaggccuauuuggggccauugccgguuucauugaagggggguggacagggaugguagauggaugguacgguuaucaccaucaaaaugagcaggggucaggauaugcagccgaccugaagagcacacagaaugccauugacgagauuacuaacaaaguaaauucuguuauugaaaagaugaauacacaguucacagcaguagguaaagaguucaaccaccuggaaaaaagaauagagaauuuaaauaaaaaaguugaugaugguuuccuggacauuuggacuuacaaugccgaacuguugguucuauuggaaaaugaaagaacuuuggacuaccacgauucaaaugugaagaacuuauaugaaaagguaagaagccaguuaaaaaacaaugccaaggaaauuggaaacggcugcuuugaauuuuaccacaaaugcgauaacacgugcauggaaagugucaaaaaugggacuuaugacuacccaaaauacucagaggaagcaaaauuaaacagagaagaaauagaugggguaaagcuggaaucaacaaggauuuaccagauuuuggcgaucuauucaacugucgccaguucauugguacugguagucucccugggggcaaucaguuucuggaugugcucuaaugggucucuacaguguagaauauguauuuaa

SEQ ID NO: 36479 - RNA, 1701 nt, Artificial Sequence; identical to SEQ ID NO: 36419
  derived and/or modified CDS sequence (wt) from hemagglutinin__InfluenzaA__ADE21028

SEQ ID NO: 36480 - RNA, 1701 nt, Artificial Sequence
  derived and/or modified CDS sequence (wt) from hemagglutinin__InfluenzaA__ADE21038
augaaggcaauacuaguaguucugcuauauacauuugcaaccgcaaaugcagacacauuauguauagguuaucaugcgaacaauucaacagacacuguagacacaguacuagaaaagaauguaacaguaacacacucuguuaaccuucuagaagacaagcauaacgggaaacuaugcaaacuaagagggguagccccauugcauuuggguaaauguaacauugcuggcuggauccugggaaauccagagugugaaucacucuccacagcaagcucaugguccuacauuguggaaacaucuaguucagacaauggaacguguuacccaggagauuucaucgauuaugaggagcuaagagagcaauugagcucagugucaucauuugaaagguuugagauauuccccaagacaaguucauggcccaaucaugacucgaacaaagguguaacggcagcauguccucaugcuggagcaaaaagcuucuacaaaaauuuaauauggcuaguuaaaaaaggaaauucauacccaaagcucagcaaauccuacauuaaugauaaagggaaagaaguccucgugcuauggggcauucaccauccaucuacuaguacugaccaacaaagccucuaucagaaugcagaugcauauguuuuuguggggacaucaagauacagcaagaaguucaagccggaaauagcaauaagacccaaagugagggaucaagaagggagaaugaacuauuacuggacacuaguagagccgggagacaaaauaacauucgaagcaacuggaaaucuagugguaccgagauaugcauucgcaauggaaagaaaugcuggaucugguauuaucauuucagauacaccaguucacgauugcaauacaacuugucagacacccaagggugcuauaaacaccagccucccauuucagaauauacauccgaucacaauuggaaaauguccaaaauauguaaaaagcacaaaauugagacuggccacaggauugaggaauaucccgucuauucaaucuagaggccuauuuggggccauugccgguuucauugaagggggguggacagggaugguagauggaugguacgguuaucaccaucaaaaugagcaggggucaggauaugcagccgaccugaagagcacacagaaugccauugacgagauuacuaacaaaguaaauucuguuauugaaaagaugaauacacaguucacagcaguagguaaagaguucaaccaccuggaaaaaagaauagagaauuuaaauaaaaaaguugaugaugguuuccuggacauuuggacuuacaaugccgaacuguugguucuauuggaaaaugaaagaacuuuggacuaccacgauucaaaugugaagaacuuauaugaaaagguaagaagccaguuaaaaaacaaugccaaggaaauuggaaacggcugcuuugaauuuuaccacaaaugcgauaacacgugcauggaaagugucaaaaaugggacuuaugacuacccaaaauacucagaggaagcaaaauuaaacagagaagaaauagaugggguaaagcuggaaucaacaaggauuuaccagauuuuggcgaucuauucaacugucgccaguucauugguacugguagucucccugggggcaaucaguuucuggaugugcucuaaugggucucuacaguguagaauauguauuuaa

SEQ ID NO: 36481 - RNA, 1701 nt, Artificial Sequence; identical to SEQ ID NO: 36432
  derived and/or modified CDS sequence (wt) from hemagglutinin__InfluenzaA__ADE21048

SEQ ID NO: 36482 - RNA, 1701 nt, Artificial Sequence
  derived and/or modified CDS sequence (wt) from hemagglutinin__InfluenzaA__ADE21058
augaaggcaauacuaguaguucugcuauauacauuugcaaccgcaaaugcagacacauuauguauagguuaucaugcgaacaauucaacagacacuguagacacaguacuagaaaagaauguaacaguaacacacucuguuaaccuucuagaagacaagcauaacgggaaacuaugcaaacuaagagggguagccccauugcauuuggguaaauguaacauugcuggcuggauccugggaaauccagagugugaaucacucuccacagcaagcucaugguccuacauuguggaaacaucuaguucagacaauggaacguguuacccaggagauuucaucgauuaugaggagcuaagagagcaauugagcucagugucaucauuugaaagguuugagauauuccccaagacaaguucauggcccaaucaugacucgaacaaagguguaacggcagcauguccucaugcuggagcaaaaagcuucuacaaaaauuuaauauggcuaguuaaaaaaggaaauucauacccaaagcucagcaaauccuacauuaaugauaaagggaaagaaguccucgugcuauggggcauucaccauccaucuacuagugcugaccaacaaagucucuaucagaaugcagaugcauauguuuuuguggggacaucaagauacagcaagaaguucaagccggaaauagcaauaagacccaaagugagggaucaagaagggagaauaaacuauuacuggacacuaguagagccgggagacaaaauaacauucgaagcaacuggaaaucuagugguaccgagauaugcauucgcaauggaaagaaaugcuggaucugguauuaucauuucagauacaccagcccacgauugcaauacaacuugucagacacccaagggugcuauaaacaccagccucccauuucagaauauacauccgaucacaauuggaaaauguccaaaauauguaaaaagcacaaaauugagacuggccacaggauugaggaaugucccgucuauucaaucuagaggccuauuuggggccauugccgguuucauugaagggggguggacagggaugguagauggaugguacgguuaucaccaucaaaaugagcaggggucaggauaugcagccgaccugaagagcacacagaaugccauugacaagauuacuaacaaaguaaauucuguuauugaaaagaugaauacacaguucacagcaguagguaaagaguucaaccaccuggaaaaaagaauagagaauuuaaauaaaaaaguugaugaugguuuccuggacauuuggacuuacaaugccgaacuguugguucuauuggaaaaugaaagaacuuuggacuaccacgauucaaaugugaagaacuuauaugaaaagguaagaagccaguuaaaaaacaaugccaaggaaauuggaaacggcugcuuugaauuuuaccacaaaugcgauaacacgugcauggaaagugucaaaaaugggacuuaugacuacccaaaauacucagaggaagcaaaauuaaacagagaagaaauagaugggguaaagcuggaaucaacaaggauuuaccagauuuuggcgaucuauucaacugucgccaguucauugguacugguagucucccugggggcaaucaguuucuggaugugcucuaaugggucucuacaguguagaauauguauuuaa

SEQ ID NO: 36483 - RNA, 1701 nt, Artificial Sequence
  derived and/or modified CDS sequence (wt) from hemagglutinin__InfluenzaA__ADE21068
augaaggcaauacuaguaguucugcuauauacauuugcaaccgcaaaugcagacacauuauguauagguuaucaugcgaacaauucaacagacacuguagacacaguacuagaaaagaauguaacaguaacacacucuguuaaccuucuagaagacaagcauaacgggaaacuaugcaaacuaagagggguagccccauugcauuuggguaaauguaacauugcuggcuggauccugggaaauccagagugugaaucacucuccacagcaagcucaugguccuacauuguggaaacaucuaguucagacaauggaacguguuacccaggagauuucaucgauuaugaggagcuaagagagcaauugagcucagugucaucauuugaaagguuugagaucuucccuaagacaaguucauggcccaaucaugacucgaauaaagguguaacggcagcauguccucaugcuggagcaaaaagcuucuacaaaaauuuaauauggcuaguuaaaaaaggaaauucauacccaaagcucagcaaauccuacauuaaugauaaagggaaagaaguccucgugcuauggggcauucaccauccaucuacuagugcugaccaacaaagucucuaucagaaugcagaugcauauguuuuuguggggacaucaagauacagcaagaaguucaagccggaaauagcaauaagacccaaagugagggaacaagaagggagaaugaacuauuacuggacacuaguagaaccgggagacaaaauaacauucgaagcaacuggaaaucuagugguaccgagauaugcauucgcaauggaaagaaaugcuggaucugguauuaucauuucagauacaccaguccacgauugcaauacaacuugucagacacccaagggugcuauaaacaccagccucccauuucagaauauacauucgaucacaauuggaaaauguccaaaauauguaaaaagcacaaaauugagacuggccacaggauugaggaaugucccgucuauucaaucuagaggccuauuuggggccauugccgguuucauugaagggggguggacagggaugguagauggaugguacgguuaucaccaucaaaaugagcaggggucaggauaugcagccgaccugaagagcacacagaaugccauugacgagauuacuaacaaaguaaauucuguuauugaaaagaugaauacacaguucacagcaguagguaaagaguucaaccaccuggaaaaaagaauagagaauuuaaauaaaaaaguugaugaugguuuccuggacauuuggacuuacaaugccgaacuguugguucuauuggaaaaugaaagaacuuuggacuaccacgauucaaaugugaagaacuuauaugaaaagguaagaagccaguuaaaaaacaaugccaaggaaacuggaaacggcugcuuugaauuuuaccacaaaugcgauaacacgugcauggaaagugucaaaaaugggacuuaugacuacccaaaauacucagaggaagcaaaauuaaacagagaagaaauagaugggguaaagcuggaaucaacaaggauuuaccagauuuuggcgaucuauucaacugucgccaguucauugguacugguagucucccugggggcaaucaguuucuggaugugcucuaaugggucucuacaguguagaauauguauuuaa

SEQ ID NO: 36484 - RNA, 1698 nt, Artificial Sequence
  derived and/or modified CDS sequence (wt) from hemagglutinin__InfluenzaA__ADE28761
augaaaguaaaacuacugguccuguuaugcacauuuacagcuacauaugcagacacaauauguauaggcuaccaugcuaacaacucgaccgacacuguugacacaguacuugaaaagaaugugacagugacacacucugucaaccugcuugagaacagucacaauggaaaacuaugucuauuaaaaggaauagccccacuacaauuggguaacugcagcguugccggguggaucuuaggaaacccagaaugcgaauuacugauuuccaaggagucaugguccuacauuguagaaaaaccaaauccugagaauggaacauguuacccagggcauuucgcugacuaugaggaacugagggagcaauugaguucaguaucuucauuugagagguucgaaauauuccccaaagaaagcucauggcccaaccacaccguaaccggagugucagcaucaugcucccauaauggggaaagcaguuuuuacagaaauuugcuauggcugacggggaagaaugguuuguacccaaaccugagcaaguccuaugcaaacaacaaagaaaaagaaguccuuguacuaugggguguucaucacccgccaaacauagguaaccaaaagacccucuaucauacagaaaaugcuuauguuucuguagugucuucacauuauagcagaaaauucaccccagaaauagccaaaagacccaaaguaagagaucaagaaggaagaaucaacuacuacuggacucugcuugaacccggggauacaauaauauuugaggcaaauggaaaucuaauagcgccaagauaugcuuucgcacugaguagaggcuuuggaucaggaaucaucaacucaaaugcaccaauggauaaaugugaugcgaagugccaaacaccucagggagcuauaaacagcagucuuccuuuccagaacguucacccagucacaauaggagaguguccaaaguaugucaggagugcaaaauuaaggaugguuacaggacuaaggaacaucccauccauucaauccagagguuuguuuggagccauugccgguuucauugaagggggguggacuggaaugguagaugguugguaugguuaucaucaucagaaugagcaaggaucuggcuaugcugcagaucaaaaaagcacacaaaaugccauuaaugggauuacaaacaaggugaauucuguaauugagaaaaugaacacucaauucacagcagugggcaaagaauucaacaaauuggaaagaaggauggaaaacuugaauaaaaaaguugaugauggguuuauagacauuuggacauauaaugcagaacuguugguucuacuggaaaaugaaaggacuuuggauuuccaugaauccaaugugaagaaucuguaugagaaaguaaaaagccaguuaaagaauaaugcuaaagaaauaggaaauggguguuuugaauucuaucacaaguguaacgaugaaugcauggagaguguaaagaauggaacuuaugacuauccaaaauauuccgaagaaucaaaguuaaacagggagaaaauugauggagugaaauuggaaucaauggaagucuaucagauucuggcgaucuacucaacagucgccaguucucugguucuuuuggucucccugggggcaaucagcuucuggauguguuccaaugggucuuugcaguguagaauaugcaucuaa

SEQ ID NO: 36485 - RNA, 1701 nt, Artificial Sequence; identical to SEQ ID NO: 34898
  derived and/or modified CDS sequence (wt) from hemagglutinin__InfluenzaA__ADE28780

SEQ ID NO: 36486 - RNA, 1701 nt, Artificial Sequence; identical to SEQ ID NO: 36269
  derived and/or modified CDS sequence (wt) from hemagglutinin__InfluenzaA__ADE28790

SEQ ID NO: 36487 - RNA, 1701 nt, Artificial Sequence
  derived and/or modified CDS sequence (wt) from hemagglutinin__InfluenzaA__ADE28800
augaaggcaauacuaguaguucugcuauauacauuugcaaccgcaaaugcagacacauuauguauagguuaucaugcgaacaauucaacagacacuguagacacaguacuagaaaagaauguaacaguaacacacucuguuaacauucuagaagacaagcauaacgggaaacuaugcaaacuaaaagggguagccccauugcauuuggguaaauguaacauugcuggcuggauccugggaaauccagagugugaaucacucuccacagcaagcucaugguccuacauuguggaaacaucuaguucagacaauggaacguguuacccaggagauuucaucgauuaugaggagcuaagagagcaauugagcucagugucaucauuugaaagguuugagauauuccccaagacaaguucauggcccaaucaugacucgaacaaagguguaacggcagcauguccucaugcuggagcaaaaagcuucuacaaaaauuuaauauggcuaguuaaaaaaggaaauucauacccaaagcucagcaaauccuacauuaaugauaaagggaaagaaguccucgugcuauggggcauucaccauccaucuacuagugcugaccaacaaagucucuaucagaaugcagaugcauauguuuuuguggggucaucaaaauacagcaagaaguucaagccggaaauagcaauaagacccaaagugagggaucaagaagggagaaugaacuauuacuggacacuaguagagccgggagacaaaauaacauucgaagcaacuggaaaucuagugguaccgagauaugcauucgcaauggaaagaaaugcuggaucugguauuaucauuucagauacaccaguccacgauugcaauacaacuugucagacacccaagggugcuauaaacaccagccucccauuucagaauauacauccgaucacaauuggaaaauguccaaaauauguaaaaagcacaaaauugagacuggccacaggauugaggaaugucccgucuauucaaucuagaggccuauuuggggccauugccgguuucauugaagggggguggacagggaugguagauggaugguacgguuaucaccaucaaaaugagcaggggucaggauaugcagccgaccugaagagcacacagaaugccauugacgagauuacuaacaaaguaaauucuguuauugaaaagaugaauacacaguucacagcaguagguaaagaguuuaaccaccuggaaaaaagaauagagaauuuaaauaaaaaaguugaugaugguuuccuggacauuuggacuuacaaugccgaacuguugguucuauuggaaaaugaaagaacuuuggacuaccacgauucaaaugugaagaacuuauaugaaaagguaagaagccagcuaaaaaacaaugccaaggaaauuggaaacggcugcuuugaauuuuaccacaaaugcgauaacacgugcauggaaagugucaaaaaugggacuuaugacuacccaaaauacucagaggaagcaaaauuaaacagagaagaaauagaugggguaaagcuggaaucaacaaggauuuaccagauuuuggcgaucuauucaacugucgccaguucauugguacugguagucucccugggggcaaucaguuucuggaugugcucuaaugggucucuacaguguagaauauguauuuaa

SEQ ID NO: 36488 - RNA, 1701 nt, Artificial Sequence; identical to SEQ ID NO: 36459
  derived and/or modified CDS sequence (wt) from hemagglutinin__InfluenzaA__ADE28810

SEQ ID NO: 36489 - RNA, 1701 nt, Artificial Sequence
  derived and/or modified CDS sequence (wt) from hemagglutinin__InfluenzaA__ADE28820
augaaggcaauacuaguaguucugcuauauacauuugcaaccgcaaaugcagacacauuauguauagguuaucaugcgaacaauucaacagacacuguagacacaguacuagaaaagaauguaacaguaacacacucuguuaaccuucuagaagacaagcauaacgggaaacuaugcaaacuaagagggguagccccauugcauuuggguaaauguaacauugcuggcuggauccugggaaguccagagugugaaucacucuccacagcaagcucaugguccuacauuguggaaacaucuaguucagacaauggaacguguuacccaggagauuucaucgauuaugaggagcuaagagagcaauugagcucagugucaucauuugaaagguuugagauauuccccaagacaaguucauggcccaaucaugacucgaacaaagguguaacggcagcauguccucaugcuggagcaaaaagcuucuacaaaaauuuaauauggcuaguuaaaaaaggaaauucauacccaaagcucagcaaauccuacauuaaugauaaagggaaagaaguccucgugcuauggggcauucaccauccaucuacuagugcugaccaacaaagucucuaucagaaugcagaugcauauguuuuuguggggacaucaagauacagcaagaaguucaagccggaaauagcaauaagacccaaagugagggaucaagaagggagaaugaacuauuacuggacacuaguagagccgggagacaaaauaacauucgaagcaacuggaaaucuagugguaccgagauaugcauucgcaauggaaagaaaugcuggaucugguauuaucauuucagauacaccaguccacgauugcaauacaacuugucagacacccaagggugcuauaaacaccagccucccauuucagaauauacauccgaucacaauuggaaaauguccaaaauauguaaaaagcacaaaauugagacuggccacaggauugaggaaugucccgucuauucaaucuagaggccuauuuggggccauugccgguuucauugaagggggguggacagggaugguagauggaugguacgguuaucaccaucaaaaugagcaggggucaggauaugcagccgaccugaagagcacacagaaugccauugacaagauuacuaacaaaguaaauucuguuauugaaaagaugaauacacaguucacagcaguagguaaagaguucaaccaccuggaaaaaagaauagagaauuuaaauaaaaaaguugaugaugguuuccuggacaucuggacuuacaaugccgaacuguugguucuauuggaaaaugaaagaacuuuggacuaccacgauucaaaugugaagaacuuauaugaaaagguaagaagccaguuaaaaaacaaugccaaggaaauuggaaacggcugcuuugaauuuuaccacaaaugcgauaacacgugcauggaaagugucaaaaaugggacuuaugacuacccaaaauacucagaggaagcaaaauuaaacagagaagaaauagaugggguaaagcuggaaucaacaaggauuuaccagauuuuggcgaucuauucaacugucgccaguucauugguacugguagucucccugggggcaaucaguuucuggaugugcucuaaugggucucuacaguguagaauauguauuuaa

SEQ ID NO: 36490 - RNA, 1701 nt, Artificial Sequence
  derived and/or modified CDS sequence (wt) from hemagglutinin__InfluenzaA__ADE28830
augaaggcaauacuaguaguucugcuauauacauuugcaaccgcaaaugcagacacauuauguauagguuaucaugcgaacaauucaacagacacuguagacacaguacuagaaaagaauguaacaguaacacacucuguuaacauucuagaagacaagcauaacgggaaacuaugcaaacuaagagggguagccccauugcauuuggguaaauguaacauugcuggcuggauccugggaaauccagagugugaaucacucuccacagcaagcucaugguccuacauuguggaaacaucuaguucagacaauggaacguguuacccaggagauuucaucgauuaugaggagcuaagagagcaauugagcucagugucaucauuugaaagguuugagauauuccccaagacaaguucauggcccaaucaugacucgaacaaagguguaacggcagcauguccucaugcuggagcaaaaagcuucuacaaaaauuuaauauggcuaguuaaaaaaggaaauucauacccaaaacucagcaaauccuacauuaaugauaaagggaaagaaguccucgugcuauggggcauucaccauccaucuacuagugcugaccaacaaagucucuaucagaaugcagaugcauauguuuuuguggggucaucaagauacagcaagaaguucaagccggaaauagcaauaagacccaaagugagggaucaagaagggagaaugaacuauuacuggacacuaguagagccgggagacaaaauaacauucgaagcaacuggaaaucuagugguaccgagauaugcauucgcaauggaaagaaaugcuggaucugguauuaucauuucagauacaccaguccacgauugcaauacaacuugucagacacccaagggugcuauaaacaccagccucccauuucagaauauacauccgaucacaauuggaaaauguccaaaauauguaaaaagcacaaaauugagacuggccacaggauugaggaaugucccgucuauucaaucuagaggccuauuuggggccauugccgguuucauugaagggggguggacagggaugguagauggaugguacgguuaucaccaucaaaaugagcaggggucaggauaugcagccgaccugaagagcacacagaaugccauugacgagauuacuaacaaaguaaauucuguuauugaaaagaugaauacacaguucacagcaguagguaaagaguucaaccaccuggaaaaaagaauagagaauuuaaauaaaaaaguugaugaugguuuccuggacauuuggacuuacaaugccgaacuguugguucuauuggaaaaugaaagaacuuuggacuaccacgauucaaaugugaagaacuuauaugaaaagguaagaagccagcuaaaaaacaaugccaaggaaauuggaaacggcugcuuugaauuuuaccacaaaugcgauaacacgugcauggaaagugucaaaaaugggacuuaugacuacccaaaauacucagaggaagcaaaauuaaacagagaagaaauagaugggguaaagcuggaaucaacaaggauuuaccagauuuuggcgaucuauucaacugucgccaguucauugguacugguagucucccugggggcaaucaguuucuggaugugcucuaaugggucucuacaguguagaauauguauuuaa

SEQ ID NO: 36491 - RNA, 1701 nt, Artificial Sequence; identical to SEQ ID NO: 36490
  derived and/or modified CDS sequence (wt) from hemagglutinin__InfluenzaA__ADE28840

SEQ ID NO: 36492 - RNA, 1701 nt, Artificial Sequence
  derived and/or modified CDS sequence (wt) from hemagglutinin__InfluenzaA__ADE28850
augaaggcaauacuaguaguucugcuauauacauuugcaaccgcaaaugcagacacauuauguauagguuaucaugcgaacaauucaacagacacuguagacacaguacuagaaaagaauguaacaguaacacacucuguuaacauucuagaagacaagcauaacgggaaacuaugcaaacuaagagggguagccccauugcauuuggguaaauguaacauugcuggcuggauccugggaaauccagagugugaaucacucuccacagcaagcucaugguccuacauuguggaaacaucuaguucagacaauggaacguguuacccaggagauuucaucgauuaugaggagcuaagagagcaauugagcucagugucaucauuugaaagguuugagauauuccccaagacaaguucauggcccaaucaugacucgaacaaagguguaacggcagcaugcccucaugcuggagcaaaaagcuucuacaaaaauuuaauauggcuaguuaaaaaaggaaauucauacccaaagcucagcaaauccuacauuaaugauaaagggaaagaaguccucgugcuauggggcauucaccauccaucuacuagugcugaccaacaaagucucuaucagaaugcagaugcauauguuuuuguggggucaucaagauacagcaagaaguucaagccggaaauagcaauaagacccaaagugagggaucaagaagggagaaugaacuauuacuggacacuaguagagccgggagacaaaauaacauucgaagcaacuggaaaucuagugguaccgagauaugcauucgcaauggaaagaaaugcuggaucugguauuaucaucucagauacaccaguccacgauugcaauacaacuugucagacacccaagggugcuauaaacaccagccucccauuucagaauauacauccgaucacaauuggaaaauguccaaaauauguaaaaagcacaaaauugagacuggccacaggauugaggaaugucccgucuauucaaucuagaggccuauuuggggccauugccgguuucauugaagggggguggacagggaugguagauggaugguacgguuaucaccaucaaaaugagcaggggucaggauaugcagccgaccugaagagcacacagaaugccauugacgagauuacuaacaaaguaaauucuguuauugaaaagaugaauacacaguucacagcaguagguaaagaguucaaccaccuggaaaaaagaauagagaauuuaaauaaaaaaguugaugaugguuuccuggacauuuggacuuacaaugccgaacuguugguucuauuggaaaaugaaagaacuuuggacuaccacgauucaaaugugaagaacuuauaugaaaagguaagaagccagcuaaaaaacaaugccaaggaaauuggaaacggcugcuuugaauuuuaccacaaaugcgauaacacgugcauggaaagugucaaaaaugggacuuaugacuacccaaaauacucagaggaagcaaaauuaaacagagaagaaauagaugggguaaagcuggaaucaacaaggauuuaccagauuuuggcgaucuauucaacugucgccaguucauugguacugguagucucccugggggcaaucaguuucuggaugugcucuaaugggucucuacaguguagaauauguauuuaa

SEQ ID NO: 36493 - RNA, 1701 nt, Artificial Sequence; identical to SEQ ID NO: 36490
  derived and/or modified CDS sequence (wt) from hemagglutinin__InfluenzaA__ADE28881

SEQ ID NO: 36494 - RNA, 1701 nt, Artificial Sequence; identical to SEQ ID NO: 35334
  derived and/or modified CDS sequence (wt) from hemagglutinin__InfluenzaA__ADE28891

SEQ ID NO: 36495 - RNA, 1701 nt, Artificial Sequence; identical to SEQ ID NO: 36371
  derived and/or modified CDS sequence (wt) from hemagglutinin__InfluenzaA__ADE28911

SEQ ID NO: 36496 - RNA, 1701 nt, Artificial Sequence; identical to SEQ ID NO: 36383
  derived and/or modified CDS sequence (wt) from hemagglutinin__InfluenzaA__ADE28921

SEQ ID NO: 36497 - RNA, 1701 nt, Artificial Sequence
  derived and/or modified CDS sequence (wt) from hemagglutinin__InfluenzaA__ADE28931
augaaggcaauacuaguaguucugcuauauacauuugcaaccgcaaaugcagacacauuauguauagguuaucaugcgaacaauucaacagacacuguagacacaguacuagaaaagaauguaacaguaacacacucuguuaaccuucuagaagacaagcauaacgggaaacuaugcaaacuaagagggguagccccauugcauuuggguaaauguaacauugcuggcuggauccugggaaauccagagugugaaucacucuccacagcaagcucaugguccuacauuguggaaacaucuaguucagacaauggaacguguuacccaggagauuucaucgauuaugaggagcuaagagagcaauugagcucagugucaucauuugaaagguuugagauauuccccaagacaaguucauggcccaaucaugacucgaacaaagguguaacggcagcauguccucaugcuggagcaaagagcuucuacaaaaauuuaauauggcuaguuaaaaaaggaaauucauacccaaagcucagcaaauccuacauuaaugauaaagggaaagaaguccucgugcuauggggcauucaccauccaucuacuagugcugaccaacaaagucucuaucagaaugcagaugcauauguuuuuguggggacaucaagauacagcaagaaguucaagccggaaauagcaauaagacccaaagugagggaucaagaagggagaaugaacuauuacuggacacuaguagagccgggagacaaaauaacauucgaagcaacuggaaaucuagugguaccgagauaugcauucgcaauggaaagaaaugcuggaucugguauuaucauuucagauacaccaguccacgauugcaauacaacuugucagacacccaagggugcuauaaacaccagccucccauuucagaauauacauccgaucacaauuggaaaauguccaaaauauguaaaaagcacaaaauugagacuggccacaggauugaggaaugucccgucuauucaaucuagaggccuauuuggggccauugccgguuucauugaagggggguggacagggaugguagauggaugguacgguuaucaccaucaaaaugagcaggggucaggauaugcagccgaccugaagagcacacagaaugccauugacaagauuacuaacaaaguaaauucuguuauugaaaagaugaauacacaguucacagcaguagguaaagaguucaaccaccuggaaaaaagaauagagaauuuaaauaaaaaaguugaugaugguuuccuggacauuuggacuuacaaugccgaacuguugguucuauuggaaaaugaaagaacuuuggacuaccacgauucaaaugugaagaacuuauaugaaaagguaagaagccaguuaaaaaacaaugccaaggaaauuggaaacggcugcuuugaauuuuaccacaaaugcgauaacacgugcauggaaagugucaaaaaugggacuuaugacuacccaaaauacucagaggaagcaaaauuaaacagagaagaaauagaugggguaaagcuggaaucaacaaggauuuaccagauuuuggcgaucuauucaacugucgccaguucauugguacuaguagucucccugggggcaaucaguuucuggaugugcucuaaugggucucuacaguguagaauauguauuuaa

SEQ ID NO: 36498 - RNA, 1701 nt, Artificial Sequence; identical to SEQ ID NO: 35772
  derived and/or modified CDS sequence (wt) from hemagglutinin__InfluenzaA__ADE28951

SEQ ID NO: 36499 - RNA, 1701 nt, Artificial Sequence
  derived and/or modified CDS sequence (wt) from hemagglutinin__InfluenzaA__ADE28961
augaaggcaauacuaguaguucugcuauauacauuugcaaccgcaaaugcagacacauuauguauagguuaucaugcgaacaauucaacagacacuguagacacagugcuagaaaagaauguaacaguaacacacucuguuaaccuucuagaagacaagcauaacgggaaacuaugcaaacuaagagggguagccccauugcauuuggguaaauguaacguugcuggcuggauccugggaaauccagagugugaaucacucuccacagcaagcucaugguccuacauuguggaaacaucuaguucagacaauggaacguguuacccaggagauuucaucgauuaugaggagcuaagagagcaauugagcucagugucaucauuugaaagguuugagauauuccccaagacaaguucauggcccaaucaugacucgaacaaagguguaacggcagcauguccucaugcuggagcaaaaagcuucuacaaaaauuuaauauggcuaguuaaaaaaggaaauucauacccaaagcucagcaaauccuacauuaaugauaaaggaaaagaaguccucgugcuauggggcauucaccauccaucuacuagugcugaccaacaaagucucuaucagaaugcagaugcauauguuuuuguggggacaucaagauacagcaagaaguucaagccggaaauagcaauaagacccaaagugagggaucaagaagggagaaugaacuauuacuggacacuaguagagccgggagacaaaauaacauucgaagcaacuggaaaucuagugguaccgagauaugcauucgcaauggaaagaaaugcuggaucugguauuaucauuucagauacaccaguccacgauugcaauacaacuugucagacacccaagggugcuauaaacaccagccucccauuucagaauauacauccgaucacaauuggaaaauguccaaaauauguaaaaagcacaaaauugagacuggccacaggauugaggaaugucccgucuauucaaucuagaggccuauuuggggccauugccgguuucauugaagggggguggacagggaugguagauggaugguacgguuaucaccaucaaaaugagcaggggucaggauaugcagccgaccugaagagcacacagaaugccauugacgagauuacuaacaaaguaaauucuguuauugaaaagaugaauacacaguucacagcaguagguaaagaguucaaccaccuggaaaaaagaauagagaauuuaaauaaaaagguugaugaugguuuccuggacauuuggacuuacaaugccgaacuguugguucuauuggaaaaugaaagaacuuuggacuaccacgauucaaaugugaagaacuuauaugaaaagguaagaagccaguuaaaaaacaaugccaaggaaauuggaaacggcugcuuugaauuuuaccacaaaugcgauaacacgugcauggaaagugucaaaaaugggacuuaugacuacccaaaauacucagaggaagcaaaauuaaacagagaagaaauagaugggguaaagcuggaaucaacaaggauuuaccagauuuuggcgaucuauucaacugucgccaguucauugguacugguagucucccugggggcaaucaguuucuggaugugcucuaaugggucucuacaguguagaauauguauuuaa

SEQ ID NO: 36500 - RNA, 1701 nt, Artificial Sequence; identical to SEQ ID NO: 36385
  derived and/or modified CDS sequence (wt) from hemagglutinin__InfluenzaA__ADE28971

SEQ ID NO: 36501 - RNA, 1701 nt, Artificial Sequence
  derived and/or modified CDS sequence (wt) from hemagglutinin__InfluenzaA__ADE28981
augaaggcaauacuaguaguucugcuauauacauuugcaaccgcaaaugcagacacauuauguauagguuaucaugcgaacaauucaacagaaacuguagacacaguacuagaaaagaauguaacaguaacacacucuguuaaccuucuagaagacaagcauaacgggaaacuaugcaaacuaagagggguagccccauugcauuuggguaaauguaacauugcuggcuggauccugggaaauccagagugugaaucacucuccacagcaagcucaugguccuacauuguggaaacaucuaguucagacaauggaacguguuacccaggagauuucaucgauuaugaggagcuaagagagcaauugagcucagugucaucauuugaaagguuugagauauuccccaagacaaguucauggcccaaucaugacucgaacaaagguguaacggcagcauguccucaugcuggagcaaaaagcuucuacaaaaauuuaauauggcuaguuaaaaaaggaaauucauacccaaagcucagcaaauccuacauuaaugauaaagggaaagaaguccucgugcuauggggcauucaccauccaucuacuagugcugaccaacaaagucucuaucagaaugcagaugcauauguuuuuguggggacaucaagauacagcaagaaguucaagccggaaauagcaauaagacccaaagugagggaucaagaagggagaaugaacuauuacuggacacuaguagagccgggagacaaaauaacauucgaagcaacuggaaaucuagugguaccgagauaugcauucgcaauggaaagaaaugcuggaucugguauuaucauuucagauacaccaguccacgauugcaauacaacuugucagacacccaagggugcuauaaacaccagccucccauuucagaauauacauccgaucacaauuggaaaauguccaaaauauguaaaaagcacaaaauugagacuggccacaggauugaggaaugucccgucuauucaaucuagaggccuauuuggggccauugccgguuucauugaagggggguggacagggaugguagauggaugguacgguuaucaccaucaaaaugagcaggggucaggauaugcagccgaccugaagagcacacagaaugccauugacaagauuaccaacaaaguaaauucuguuauugaaaagaugaauacacaguucacagcaguagguaaagaguucaaccaccuggaaaaaagaauagagaauuuaaauaaaaaaguugaugaugguuuccuggacauuuggacuuacaaugccgaacuguugguucuauuggaaaaugaaagaacuuuggacuaccacgauucaaaugugaagaacuuauaugaaaagguaagaagccaguuaaaaaacaaugccaaggaaauuggaaacggcugcuuugaauuuuaccacaaaugcgauaacacgugcauggaaagugucaaaaaugggacuuaugacuacccaaaauacucagaggaagcaaaauuaaacagagaagaaauagaugggguaaagcuggaaucaacaaggauuuaccagauuuuggcgaucuauucaacugucgccaguucauugguacugguagucucccugggggcaaucaguuucuggaugugcucuaaugggucucuacaguguagaauauguauuuaa

SEQ ID NO: 36502 - RNA, 1701 nt, Artificial Sequence; identical to SEQ ID NO: 35845
  derived and/or modified CDS sequence (wt) from hemagglutinin__InfluenzaA__ADE28991

SEQ ID NO: 36503 - RNA, 1701 nt, Artificial Sequence
  derived and/or modified CDS sequence (wt) from hemagglutinin__InfluenzaA__ADE29001
augaaggcaauacuaguaguucugcuauauacauuugcaaccgcaaaugcagacacauuauguauagguuaucaugcgaacaauucaacagacacuguagacacaguacuagaaaggaauguaacaguaacacacucuguuaaccuucuagaagacaagcauaacgggaaacuaugcaaacuaaaagggguagccccauugcauuuggguaaauguaacauugcuggcuggauccugggaaauccagagugugaaucacucuccacagcaagcucaugguccuacauuguggaaacaucuaguucagacaauggaacguguuacccaggagauuucaucgauuaugaggagcuaagagagcaauugagcucagugucaucauuugaaagguuugagauauuccccaagacaaguucauggcccaaucaugacucgaacaaagguguaacggcagcauguccucaugcuggagcaaaaagcuucuacaaaaauuuaauauggcuaguuaaaaaaggaaauucauacccaaagcucagcaaauccuacauuaaugauaaagggaaagaaguccucgugcuauggggcauucaccauccaucuacuagugcugaccaacaaagucucuaucagaaugcagaugcauauguuuuuguggggacaucaagauacagcaagaaguucaagccggaaauagcaauaagacccaaagugagggaucaagaagggagaaugaacuauuacuggacacuaguagagccgggagacaaaauaacauucgaagcaacuggaaaucuagugguaccgagauaugcauucgcaauggaaagaaaugcuggaucugguauuaucauuucagauacaccaguccacgauugcaauacaacuugucagacacccaagggugcuauaaacaccagccucccauuucagaauauacauccgaucacaauuggaaaauguccaaaauauguaaaaagcacaaaauugagacuggccacaggauugaggaaugucccgucuauucaaucuagaggccuauuuggggccauugccgguuucauugaagggggauggacagggaugguagauggaugguacgguuaucaccaucaaaaugagcaggggucaggauaugcagccgaccugaagagcacacagaaugccauugacgagauuacuaacaaaguaaauucuguuauugaaaagaugaauacacaguucacagcaguagguaaagaguucaaccaccuggaaaaaagaauagagaauuuaaauaaaaaaguugaugaugguuuccuggacauuuggacuuacaaugccgaacuguugguucuauuggaaaaugaaagaacuuuggacuaccacgauucaaaugugaagaacuuauaugaaaagguaagaagccaguuaaaaaacaaugccaaggaaauuggaaacggcugcuuugaauuuuaccacaaaugcgauaacacgugcauggaaagugucaaaaaugggacuuaugacuacccaaaauacucagaggaagcaaaauuaaacagagaagaaauagaugggguaaagcuggaaucaacaaggauuuaccagauuuuggcgaucuauucaacugucgccaguucauugguacugguagucucccugggggcaaucaguuucuggaugugcucuaaugggucucuacaguguagaauauguauuuaa

SEQ ID NO: 36504 - RNA, 1701 nt, Artificial Sequence; identical to SEQ ID NO: 35864
  derived and/or modified CDS sequence (wt) from hemagglutinin__InfluenzaA__ADE29011

SEQ ID NO: 36505 - RNA, 1701 nt, Artificial Sequence
  derived and/or modified CDS sequence (wt) from hemagglutinin__InfluenzaA__ADE29021
augaaggcaauacuaguaguucugcuauauacauuugcaaccgcaaaugcagacacauuauguauagguuaucaugcgaacaauucaacagacacuguagacacaguacuagaaaagaauguaacaguaacacacucuguuaaccuucuagaagacaagcauaacgggaaacuaugcaaacuaagagggguagccccauugcauuuggguaaauguaacauugcuggcuggauccugggaaauccagagugugaaucacucuccacagcaagcucaugguccuacauuguggaaacaucugguucagacaauggaacguguuacccaggagauuucaucgauuaugaggagcuaagagagcaauugagcucagugucaucauuugaaagguuugagauauuccccaagacaaguucauggcccaaucaugacucgaacaaagguguaacggcagcauguccucaugcuggagcaaaaagcuucuacaaaaauuuaauauggcuaguuaaaaaaggaaauucauacccaaagcucagcaaauccuacauuaaugauaaagggaaagaaguccucgugcuauggggcauucaccauccaucuacuaguacugaccaacaaagucucuaucagaaugcagaugcauauguuucuguggggacaucaagauacagcaagaaguucaagccggaaauagcaauaagacccaaagugagggaucaagaagggagaaugaacuauuacuggacacuaguagagccgggagacaaaauaacauucgaagcaacuggaaaucuagugguaccgagauaugcauucgcaauggaaagaaaugcuggaucugguauuaucauuucagauacaccaguccacgauugcaauacaacuugucagacacccaagggugcuauaaacaccagccucccauuucagaauauacauccgaucacaauuggaaaauguccaaaauauguaaaaagcacaaaauugagacuggccacaggauugaggaaugucccgucuauucaaucuagaggccuauuuggggccauugccgguuucauugaagggggguggacagggaugguagauggaugguacgguuaucaccaucaaaaugagcaggggucaggauaugcagccgaccugaagagcacacagaaugccauugacaagauuacuaacaaaguaaauucuguuauugaaaagaugaauacacaguucacagcaguagguaaagaguucaaccaccuggaaaaaagaauagagaauuuaaauaaaaaaguugaugaugguuuccuggacauuuggacuuacaaugccgaacuguugguucuauuggaaaaugaaagaacuuuggacuaccacgauucaaaugugaagaacuuauaugaaaagguaagaagccaguuaaaaaacaaugccaaggaaauuggaaacggcugcuuugaauuuuaccacaaaugcgauaacacgugcauggaaagugucaaaaaugggacuuaugacuacccaaaauacucagaggaagcaaaauuaaacagagaagaaauagaugggguaaagcuggaaucaacaaggauuuaccagauuuuggcgaucuauucaacugucgccaguucauugguacugguagucucccugggggcaaucaguuucuggaugugcucuaaugggucucuacaguguagaauauguauuuaa

SEQ ID NO: 36506 - RNA, 1701 nt, Artificial Sequence
  derived and/or modified CDS sequence (wt) from hemagglutinin__InfluenzaA__ADE29031
augaaggcaauacuaguaguucugcuauauacauuugcaaccgcaaaugcagacacauuauguauagguuaucaugcgaacaauucaacagacacuguagacacaguacuagaaaagaauguaacaguaacacacucuguuaaccuucuagaagacaagcauaacgggaaacuaugcaaacuaagagggguagccccauugcauuuggguaaauguaacauugcuggcuggauccugggaaauccagagugugaaucacucuccacagcaagcucaugguccuacauuguggaaacaucuaguucagacaauggaacguguuacccaggagauuucaucgauuaugaggagcuaagagagcaauugagcucagugucaucauuugaaagguuugagauauuccccaagacaaguucauggcccaaucaugacucgaacaaagguguaacggcagcauguccucaugcuggagcaaaaagcuucuacaaaaauuuaauauggcuaguuaaaaaaggaaauucauacccaaagcucagcaaauccuacauuaaugauaaagggaaagaaguccucgugcuauggggcauucaccauccaucuacuagugcugaccaacaaagucucuaucagaaugcagaugcauauguuuuuguggggacaucaagauacagcaagaaguucaagccggaaauagcaauaagacccaaagugagggaucaagaagggagaaugaacuauuacuggacacuaguagagccgggagacaaaauaacauucgaagcaacuggaaaucuagugguaccgagauaugcauucgcaauggaaagaaaugcuggaucugguauuaucauuucagauacaccaguccacgauugcaauacaacuugucagacacccaagggugcuauaaacaccagccucccauuucagaauauacauccgaucacaauuggaaaauguccaaaauauguaaaaagcacaaaauugagacuggccacaggauugaggaauaucccgucuauucaaucuagaggccuauuuggggccauugccgguuucauugaagggggguggacagggaugguagauggaugguacgguuaccaccaucaaaaugagcaggggucaggauaugcagccgaccugaagagcacacagaaugccauugacaagauuacuaacaaaguaaauucuguuauugaaaagaugaauacacaguucacagcaguagguaaagaguucaaccaccuggaaaaaagaauagagaauuuaaauaaaaaaguugaugaugguuuccuggacauuuggacuuacaaugccgaacuguugguucuauuggaaaaugaaagaacuuuggacuaccacgauucaaaugugaagaacuuauaugaaaagguaagaagccaguuaaaaaacaaugccaaggaaauuggaaacggcugcuuugaauuuuaccacaaaugcgauaacacgugcauggaaagugucaaaaaugggacuuaugacuacccaaaauacucagaggaagcaaaauuaaacagagaagaaauagaugggguaaagcuggaaucaacaaggauuuaccagauuuuggcgaucuauucaacugucgccaguucauugguacugguagucucccugggggcaaucaguuucuggaugugcucuaaugggucucuacaguguagaauauguauuuaa

SEQ ID NO: 36507 - RNA, 1701 nt, Artificial Sequence
  derived and/or modified CDS sequence (wt) from hemagglutinin__InfluenzaA__ADE29041
augaaggcaauacuaguaguucugcuauauacauuugcaacugcaaaugcagacacauuauguauagguuaucaugcgaacaauucaacagacacuguagacacaguacuagaaaagaauguaacaguaacacacucuguuaaccuucuagaagacaagcauaacgggaaacuaugcaaacuaagagggguagccccauugcauuuggguaaauguaacauugcuggcuggauccugggaaauccagagugugaaucacucuccacagcaagcucaugguccuacauuguggaaacaucuaguucagacaauggaacguguuacccaggagauuucaucgauuaugaggagcuaagagagcaauugagcucagugucaucauuugaaagguuugagauauuccccaagacaaguucauggcccaaucaugacucgaacaaagguguaacggcagcauguccucaugcuggagcaaaaagcuucuacaaaaauuuaauauggcuaguuaaaaaaggaaauucauacccaaagcucagcaaauccuacauuaaugauaaagggaaagaaguccucgugcuauggggcauucaccauccaucuacuagugcugaccaacaaagucucuaucagaaugcagaugcauauguuuuuguggggacaucaagauacagcaagaaguucaagccggaaauagcaauaagacccaaagugagggaucaagaagggagaaugaacuauuacuggacacuaguagagccgggagacaaaauaacauucgaagcaacuggaaaucuagugguaccgagauaugcauucgcaauggaaaaaaaugcuggaucugguauuaucauuucagauacaccaguccacgauugcaauacaacuugucagacacccaagggugcuauaaacaccagccucccauuucagaauauacauccgaucacaauuggaaaauguccaaaauauguaaaaagcacaaaauugagacuggccacaggauugaggaaugucccgucuauucaaucuagaggccuguuuggggccauugccgguuucauugaagggggguggacagggaugguagauggaugguacgguuaucaccaucaaaaugagcaggggucaggauaugcagccgaccugaagagcacacagaaugccauugacgagauuacuaacaaaguaaauucuguuauugaaaagaugaauacacaguucacagcaguagguaaagaguucaaccaccuggaaaaaagaauagagaauuuaaauaaaaaaguugaugaugguuuccuggacauuuggacuuacaaugccgaacuguugguucuauuggaaaaugaaagaacuuuggacuaccacgauucaaaugugaagaacuuauaugaaaagguaagaagccaguuaaaaaacaaugccaaggaaauuggaaacggcugcuuugaauuuuaccacaaaugcgacaacacgugcauggaaagugucaaaaaugggacuuaugacuacccaaaauacucagaggaagcaaaauuaaacagagaagaaauagaugggguaaagcuggaaucaacaaggauuuaccagauuuuggcgaucuauucaacugucgccaguucauugguacugguagucucccugggggcaaucaguuucuggaugugcucuaaugggucucuacaguguagaauauguauuuaa

SEQ ID NO: 36508 - RNA, 1701 nt, Artificial Sequence
  derived and/or modified CDS sequence (wt) from hemagglutinin__InfluenzaA__ADE29051
augaaggcaauacuaguaguucugcuauauacauuugcaaccgcaaaugcagacacauuauguauagguuaucaugcgaacaauucaacagacacuguagacacaguacuagaaaagaauguaacaguaacacacucuguuaaccuucuagaagacaagcauaacgggaaacuaugcaaacuaagagggguagccccauugcauuuggguaaauguaacauugcuggcuggauccugggaaauccagagugugaaucacucuccacagcaagcucaugguccuacauuguggaaacaucuaguucagacaauggaacguguuacccaggagauuucaucgauuaugaggagcuaagagagcaauugagcucagugucaucauuugaaagguuugagauauuccccaagacaaguucauggcccaaucaugacucgaacaaagguguaacggcagcauguccucaugcuggagcaaaaagcuucuacaaaaauuuaauauggcuaguuaaaaaaggaaauucauacccaaagcucagcaaauccuacauuaaugauaaagggaaagaaguccucgugcuauggggcauucaccauccaucuacuagugcugaccaacaaagucucuaucagaaugcagaugcauauguuuuuguggggacaucaagauacagcaagaaguucaagccggaaauagcaauaagacccaaagugagggaucaagaagggagaaugaacuauuacuggacacuaguagagccgggagacaaaauaacauucgaagcaacuggaaaucuagugguaccgagauaugcauucgcaauggaaagaaaugcuggaucugguauuaucauuucagauacaccaguccacgauugcaauacaacuugucagacacccaagggugcuauaaacaccagccucccauuucagaauauacauccgaucacaauuggaaaauguccaaaauauguaaaaagcacaaaauugagacuggccacaggauugaggaauaucccgucuauucaaucuagaggccuauuuggggccauugccgguuucauugaagggggguggacagggaugguagauggaugguacgguuaucaccaucaaaaugagcaggggucaggauaugcagccgaccugaagagcacacagaaugccauugacaagauuacuaacaaaguaaauucuguuauugaaaagaugaauacacaguucacagcaguagguaaagaguucaaccaccuggaaaaaagaauagagaauuuaaauaaaaaaguugaugaugguuuccuggacauuuggacuuacaaugccgaacuguugguucuauuggaaaaugaaagaacuuuggacuaccacgauucaaaugugaagaacuuauaugaaaagguaagaagccaguuaaaaaacaaugccaaggaaauuggaaacggcugcuuugaauuuuaccacaaaugcgauaacacgugcauggaaagugucaaaaaugggacuuaugacuacccaaaauacucagaggaagcaaaauuaaacagagaagaaauagaugggguaaagcuggaaucaacaaggauuuaccagauuuuggcgaucuauucaacugucgccaguucauugguacugguagucucccugggggcaaucaguuucuggaugugcucuaaugggucucuacaguguagaauauguauuuaa

SEQ ID NO: 36509 - RNA, 1701 nt, Artificial Sequence
  derived and/or modified CDS sequence (wt) from hemagglutinin__InfluenzaA__ADE29085
augaaggcaauacuaguaguucugcuauauacauuugcaaccgcaaaugcagacacauuauguauagguuaucaugcgaacaauucaacagacacuguagacacaguacuagaaaagaauguaacaguaacacacucuguuaaccuucuagaagacaagcauaacgggaaacuaugcaaacuaagagggguagccccauugcauuuggguaaauguaacauugcuggcuggauccugggaaauccagagugugaaucacucuccacagcaagcucaugguccuacauuguggaaacaccuaguucagacaauggaacguguuacccaggagauuucaucgauuaugaggagcuaagagagcaauugagcucagugucaucauuugaaagguuugagauauuccccaagacaaguucauggcccaaucaugacucgaacaaagguguaacggcagcauguccucaugcugaggcaaaaagcuucuacaaaaauuuaauauggcuaguuaaaaaaggaaauucauacccaaagcucagcaaauccuacauuaaugauaaagggaaagaaguccucgugcuauggggcauucaccauccaucuacuagugcugaccaacaaagucucuaucagaaugcagaugcauauguuuuuguggggucaucaagauacagcaagacguucaagccggaaauagcaauaagacccaaagugagggaucgagaagggagaaugaacuauuacuggacacuaguagagccgggagacaaaauaacauucgaagcaacuggaaaucuagugguaccgagauaugcauucgcaauggaaagaaaugcuggaucugguauuaucauuucagauacaccaguccacgauugcaauacaacuugucaaacacccaagggugcuauaaacaccagccucccauuucagaauauacauccgaucacaauuggaaaauguccaaaauauguaaaaagcacaaaauugagacuggccacaggauugaggaauaucccgucuauucaaucuagaggccuauuuggggccauugccgguuucauugaagggggguggacagggaugguagauggaugguacgguuaucaccaucaaaaugagcaggggucaggauaugcagccgaccugaagagcacacagaaugccauugacgagauuacuaacaaaguaaauucuguuauugaaaagaugaauacacaguucacagcaguagguaaagaguucaaccaccuggaaaaaagaauagagaauuuaaauaaaaaaguugaugaugguuuccuggacauuuggacuuacaaugccgaacuguugguucuauuggaaaaugaaagaacuuuggacuaccacgauucaaaugugaagaacuuauaugaaaagguaagaagccagcuaaaaaacaaugccaaggaaauuggaaacggcugcuuugaauuuuaccacaaaugcgauaacacgugcauggaaagugucaaaaaugggacuuaugacuacccaaaauacucagaggaagcaaaauuaaacagagaagaaauagaugggguaaagcuggaaucaacaaggauuuaccagauuuuggcgaucuauucaacugucgccaguucauugguacugguagucucccugggggcaaucaguuucuggaugugcucuaaugggucucuacaguguagaauauguauuuaa

SEQ ID NO: 36510 - RNA, 1701 nt, Artificial Sequence
  derived and/or modified CDS sequence (wt) from hemagglutinin__InfluenzaA__ADE29095
augaaggcaauacuaguaguucugcuauauacauuugcaaccgcaaaugcagacacauuauguauagguuaucaugcgaacaauucaacagacacuguagacacaguacuagaaaagaauguaacaguaacacacucuguuaaccuucuagaagacaagcauaacgggaaacuaugcaaacuaagagggguagccccauugcauuuggguaaauguaacauugcuggcuggauccugggaaauccagagugugaaucacucuccacagcaagcucaugguccuacauuguggaaacaccuaguucagacaauggaacguguuacccaggagauuucaucgauuaugaggagcuaagagagcaauugagcucagugucaucauuugaaagguuugagauauuccccaagacaaguucauggcccaaucaugacucgaacaaagguguaacggcagcauguccucaugcuggagcaaaaagcuucuacaaaaauuuaauauggcuaguuaaaaaaggaaauucauacccaaagcucagcaaauccuacauuaaugauaaagggaaagaaguccucgugcuauggggcauucaccauccaucuacuagugcugaccaacaaagucucuaucagaaugcagaugcauauguuuuuguggggucaucaagauacagcaagacguucaagccggaaauagcaauaagacccaaagugagggaucgagaagggagaaugaacuauuacuggacacuaguagagccgggagacaaaauaacauucgaagcaacuggaaaucuagugguaccgagauaugcauucgcaauggaaagaaaugcuggaucugguauuaucauuucagauacaccaguccacgauugcaauacaacuugucaaacacccaagggugcuauaaacaccagccucccauuucagaauauacauccgaucacaauuggaaaauguccaaaauauguaaaaagcacaaaauugagacuggccacaggauugaggaauaucccgucuauucaaucuagaggccuauuuggggccauugccgguuucauugaagggggguggacagggaugguagauggaugguacgguuaucaccaucaaaaugagcaggggucaggauaugcagccgaccugaagagcacacagaaugccauugacgagauuacuaacaaaguaaauucuguuauugaaaagaugaauacacaguucacagcaguagguaaagaguucaaccaccuggaaaaaagaauagagaauuuaaauaaaaaaguugaugaugguuuccuggacauuuggacuuacaaugccgaacuguugguucuauuggaaaaugaaagaacuuuggacuaccacgauucaaaugugaagaacuuauaugaaaagguaagaagccagcuaaaaaacaaugccaaggaaauuggaaacggcugcuuugaauuuuaccacaaaugcgauaacacgugcauggaaagugucaaaaaugggacuuaugacuacccaaaauacucagaggaagcaaaauuaaacagagaagaaauagaugggguaaagcuggaaucaacaaggauuuaccagauuuuggcgaucuauucaacugucgccaguucauugguacugguagucucccugggggcaaucaguuucuggaugugcucuaaugggucucuacaguguagaauauguauuuaa

SEQ ID NO: 36511 - RNA, 1701 nt, Artificial Sequence; identical to SEQ ID NO: 35602
  derived and/or modified CDS sequence (wt) from hemagglutinin__InfluenzaA__ADE34191

SEQ ID NO: 36512 - RNA, 1701 nt, Artificial Sequence
  derived and/or modified CDS sequence (wt) from hemagglutinin__InfluenzaA__ADE34202
augaagacuaucauugcuuugagcuacauucuaugucugguuuucgcucaaaaacuuccuggaaaugacaacagcacggcaacgcugugccuugggcaccaugcaguaccaaacggaacgauagugaaaacaaucacgaaugaccaaauugaaguuacuaaugcuacugagcugguucagaguuccucaacaggugaaauaugcgacaguccucaucagauccuugauggaaaaaacugcacacuaauagaugcucuauugggagacccucagugugauggcuuccaaaauaagaaaugggaccuuuuuguugaacgcagcaaagccuacagcaacuguuacccuuaugaugugccggauuaugccucccuuaggucacuaguugccucauccggcacacuggaguuuaacaaugaaagcuucaauuggacuggagucacucaagacggaacaagcucugcuugcauaaggagaucuaaaaacaguuucuuuaguagauugaauugguugacccacuuaaacuucaaauacccagcauuaaacgugacuaugccaaacaaugaacaauuugacaaauuguacauuugggggguucaccacccggguacggacaaagaccaaaucuuccuguaugcucaagcaucaggaagaaucacagucucuaccaaaagaagccaacaaacugcaaucccgaauaucggaucuagacccagaguaaggaauaucccuagcagaauaagcaucuauuggacaauaguaaaaccgggagacauacuuuugauuaacagcacagggaaucuaauugcuccuagggguuacuucaaaauacgaagugggaaaagcucaauaaugagaucagaugcacccauuggcaaaugcaauucugaaugcaucacuccaaauggaagcauucccaaugacaaaccauuccaaaauguaaacaggaucacauacggggccugucccagauauguuaagcaaaacacucugaaauuggcaacagggaugcgaaauguaccagagaaacaaacuagaggcauauuuggcgcaaucgcggguuucauagaaaaugguugggagggaaugguggaugguugguacgguuucaggcaucaaaauucugagggaagaggacaagcagcagaucucaaaagcacucaagcagcaaucgaucaaaucaaugggaagcugaauagauugaucgggaaaaccaacgagaaauuccaucagauugaaaaagaauucucagaagucgaagggagaauucaggaccuugagaaauauguugaggacacuaaaauagaucucuggucauacaacgcggagcuucuuguugcccuggagaaccaacauacaauugaucuaacugacucagaaaugaacaaacuguuugaaaaaacaaagaagcaacugagggaaaaugcugaggauaugggcaaugguuguuucaaaauauaccacaaaugugacaaugccugcauaggaucaaucagaaauggaacuuaugaccacgauguauacagagaugaagcauuaaacaaccgguuucagaucaagggaguugagcugaagucaggguacaaagauuggauccuauggauuuccuuugccauaucauguuuuuugcuuuguguugcuuuguugggguucaucaugugggccugccaaaaaggcaacauuaggugcaacauuugcauuuga

SEQ ID NO: 36513 - RNA, 1701 nt, Artificial Sequence
  derived and/or modified CDS sequence (wt) from hemagglutinin__InfluenzaA__ADE34213
augaagacuaucauugcuuugagcuacauucuaugucugguuuucgcucaaaaacuuccuggaaaugacaacagcacggcaacgcugugccuugggcaccaugcaguaccaaacggaacgauagugaaaacaaucacgaaugaccaaauugaaguuacuaaugcuacugagcugguucagaguuccucaacaggugaaauaugcgacaguccucaucagauccuugauggagaaaacugcacacuaauagaugcucuauugggagacccucagugugauggcuuccaaaauaagaaaugggaccuuuuuguugaacgacgcaaagccuacagcaacuguuacccuuaugaugugccggauuaugccucccuuaggucacuaguugccucauccggcacacuggaguuuaacaaugaaagcuucaauuggacuggagucacucaaaacggaacaagcucugcuugcauaaggagaucuaauaacaguuucuuuaguagauugaauugguugacccacuuaaaauucaaauacccagcauugaacgugacuaugccaaacaaugaacaauuugacaaauuguacauuugggggguucaccacccggguacggacaaugaccaaaucuuccuguaugcucaagcaucaggaagaaucacaguaucuaccaaaagaagccaacaaacuguaaucccgaauaucggaucuagacccagaguaaggaauaucccuagcagaauaagcaucuauuggacaauaguaaaaccgggagacauacuuuugauuaacagcacagggaaucuaauugcuccuagggguuacuucaaaauacgaagugggaaaagcucaauaaugagaucagaugcacccauuggcaaaugcaauucugaaugcaucacuccaaauggaagcauucccaaugacaaaccauuccaaaauguaaacaggaucacauacggggccugucccagauauguuaagcaaaacacucugaaauuggcaacaggaaugcgaaauguaccagagaaacaaacuagaggcauauuuggcgcaaucgcggguuucauagaaaaugguugggagggaaugguggaugguugguacgguuucaggcaucaaaauucugagggaagaggacaagcagcagaucucaaaagcacucaagcagcaaucgaccaaaucaaugggaagcugaauagauugaucgggaaaaccaacgagaaauuccaucagauugaaaaagaauucucagaagucgaagggagaauccaggaccuugagaaauauguugaggacacuaaaauagaucucuggucauacaacgcggagcuucuuguugcccuggagaaccaacauacaauugaucuaacugacucagaaaugaacaaacuguuugaaaaaacaaagaagcaacugagggaaaaugcugaggauaugggcaaugguuguuucaaaauauaccacaaaugugacaaugccugcauaggaucaaucagaaauggaacuuaugaccacgauguauacagagaugaagcauugaacaaccgguuccagaucaaaggaguugagcugaagucaggguacaaagauuggauccuauggauuuccuuugccauaucauguuuuuugcuuuguguugcuuuguugggguucaucaugugggccugccaaaaaggcaacauuaggugcaacauuugcauuuga

SEQ ID NO: 36514 - RNA, 1701 nt, Artificial Sequence; identical to SEQ ID NO: 35602
  derived and/or modified CDS sequence (wt) from hemagglutinin__InfluenzaA__ADE34224

SEQ ID NO: 36515 - RNA, 1701 nt, Artificial Sequence
  derived and/or modified CDS sequence (wt) from hemagglutinin__InfluenzaA__ADE34235
augaagacuaucauugcuuugagcuacauucuaugucugguuuucgcucaaaaacuuccuggaaaugacaacagcacggcaacgcugugccuugggcaccaugcaguaccaaacggaacgauagugaaaacaaucacgaaugaccaaauugaaguuacuaaugcuacugagcugguucagaguuccucaacaggugaaauaugcgacaguccucaucagauccuugauggaaaaaacugcacacuaauagaugcucuauugggagacccucagugugauggcuuccaaaauaagaaaugggaccuuuuuguugaacgcagcaaagccuacagcaacuguuacccuuaugaugugccggauuaugccucccuuaggucacuaguugccucauccggcacacuggaguuuaacaaugaaagcuucaauuggacuggagucacucaagacggaacaagcucugcuugcauaaggagaucuaaaaacaguuucuuuaguagauugaauugguugacccacuuaaacuucaaauacccagcauugaacgugacuaugccaaacaaugaacaauuugacaaauuguacauuugggggguucaccacccggguacggacaaagaccaaaucuuccuguaugcucaagcaucaggaagaaccacagucucuaccaaaagaagccaacaaacugcaaucccgaauaucggaucuagacccagaguaaggaauaucccuagcagaauaagcaucuauuggacaauaguaaaaccgggagacauacuuuugauuaacagcacagggaaucuaauugcuccuagggguuacuucaaaauacgaagugggaaaagcucaauaaugagaucagaugcacccauuggcaaaugcaauucugaaugcaucacuccaaauggaagcauucccaaugacaaaccauuccaaaauguaaacaggaucacauacggggccugucccagauauguuaagcaaaacacucugaaauuggcaacagggaugcgaaauguaccagagaaacaaacuagaggcauauuuggcgcaaucgcggguuucauagaaaaugguugggagggaaugguggaugguugguacgguuucaggcaucaaaauucugagggaagaggacaagcagcagaucucaaaagcacucaagcagcaaucgaucaaaucaaugggaagcugaauagauugaucgggaaaaccaacgagaaauuccaucagauugaaaaagaauucucagaagucgaagggagaauucaggaccuugagaaauauguugaggacacuaaaauagaucucuggucauacaacgcggagcuucuuguugcccuggagaaccaacauacaauugaucuaacugacucagaaaugaacaaacuguuugaaaaaacaaagaagcaacugagggaaaaugcugaggauaugggcaaugguuguuucaaaauauaccacaaaugugacaaugccugcauaggaucaaucagaaauggaacuuaugaccacgauguauacagagaugaagcauuaaacaaccgguuucagaucaagggaguugagcugaagucaggguacaaagauuggauccuauggauuuccuuugccauaucauguuuuuugcuuuguguugcuuuguugggguucaucaugugggccugccaaaaaggcaacauuaggugcaacauuugcauuuga

SEQ ID NO: 36516 - RNA, 1701 nt, Artificial Sequence
  derived and/or modified CDS sequence (wt) from hemagglutinin__InfluenzaA__ADE34246
augaagacuaucauugcuuugagcuacauucuaugucugguuuucgcucaaaaacuuccuggaaaugacaacagcacggcaacgcugugccuugggcaccaugcaguaccaaacggaacgauagugaaaacaaucacgaaugaccaaauugaaguuacuaaugcuacugagcugguucagaguuccucaacaggugaaauaugcgacaguccucaucagauccuugauggaaaaaacugcacacuaauagaugcucuauugggagacccucagugugauggcuuccaaaauaagaaaugggaccuuuuuguugaacgcagcaaagccuacagcaacuguuacccuuaugaugugccggauuaugccucccuuaggucacuaguugccucauccggcacacuggaguuuaacaaugaaagcuucaauuggacuggagucacucaagacggaacaagcucugcuugcauaaggagaucuaaaaacaguuucuuuaguagauugaauugguugacccacuuaaacuucaaauacccagcauugaacgugacuaugccaaacaaugaacaauuugacaaauuguacauuugggggguucaccacccggguacggacaaagaccaaaucuuccuguaugcucaagcaucaggaagaaucacagucucuaccaaaagaagccaacaaacugcaaucccgaauaucggaucuagacccagaguaaggaauaucccuagcagaauaagcaucuauuggacaauaguaaaaccgggagacauacuuuugauuaacagcacagggaaucuaauugcuccuagggguuacuucaaaauacgaagugggaaaagcucaauaaugagaucagaugcacccauuggcaaaugcaauucugaaugcaucacuccaaauggaagcauucccaaugacaaaccauuccaaaauguaaacaggaucacauacggggccugucccagauauguuaagcaaaacacucugaaauuggcaacagggaugcgaaauguaccagagaaacaaacuagaggcauauuuggcgcaaucgcggguuucauagaaaaugguugggagggaaugguggaugguugguacgguuucaggcaucaaaauucugagggaagaggacaagcagcagaucucaaaagcacucaagcagcaaucgaucaaaucaaugggaagcugaauagauugaucgggaaaaccaacgagaaauuccaucagauugaaaaagaauucucagaagucgaagggagaauucaggaccuugagaaauauguugaggacacuaaaauagaucucuggucauacaacgcggagcuucuuguugcccuggagaaccaacacacaauugaucuaacugacucagaaaugaacaaacuguuugaaaaaacaaagaagcaacugagggaaaaugcugaggauaugggcaaugguuguuucaaaauauaccacaaaugugacaaugccugcauaggaucaaucagaaauggaacuuaugaccacgauguauacagagaugaagcauuaaacaaccgguuucagaucaagggaguugagcugaagucaggguacaaagauuggauccuauggauuuccuuugccauaucauguuuuuugcuuuguguugcuuuguugggguucaucaugugggccugccaaaaaggcaacauuaggugcaacauuugcauuuga

SEQ ID NO: 36517 - RNA, 1701 nt, Artificial Sequence
  derived and/or modified CDS sequence (wt) from hemagglutinin__InfluenzaA__ADE34257
augaagacuaucauugcuuugagcuacauucuaugucugguuuucgcucaaaaacuuccuggaaaugacaacagcacggcaacgcugugccuugggcaccaugcaguaccaaacggaacgauagugaaaacaaucacgaaugaccaaauugaaguuacuaaugcuacugagcugguucagaguuccucaacaggugaaauaugcgacaguccucaucagauccuugauggaaaaaacugcacacugauagaugcucuauugggagacccucagugugauggcuuccaaaauaagaaaugggaccuuuuuguugaacgcagcaaagccuacagcaacuguuacccuuaugaugugccggauuaugccucccuuaggucacuaguugccucauccggcacacuggaguuuaacaaugaaagcuucaauuggacuggagucacucaaaacggaacaagcucugcuugcauaaggagaucuaaaaacaguuucuuuaguagauugaauugguugacccacuuaaacuucaaauacccagcauugaacgugacuaugccaaacaaugaacaauuugacaaauuguacauuugggggguucaccacccggguacggacaaagaccaaaucuuccuguaugcucaagcaucaggaagaaucacagucucuaccaaaagaagccaacaaacugcaaucccgaauaucggaucuagacccagaguaaggaauaucccuagcagaauaagcaucuauuggacaauaguaaaaccgggagacauacuuuugauuaacagcacagggaaucuaauugcuccuagggguuacuucaaaauacgaagugggaaaagcucaauaaugagaucagaugcacccauuggcaaaugcaauucugaaugcaucacuccaaauggaagcauucccaaugacaaaccauuccaaaauguaaacaggaucacauacggggccugucccagauauguuaagcaaaacacucugaaauuggcaacagggaugcgaaauguaccagagaaacaaacuagaggcauauuuggcgcaaucgcggguuucauagaaaaugguugggagggaaugguggaugguugguacgguuucaggcaucaaaauucugagggaagaggacaagcagcagaucucaaaagcacucaagcagcaaucgaucaaaucaaugggaagcugaauagauugaucgggaaaaccaacgagaaauuccaucagauugaaaaagaauucucagaagucgaagggagaauucaggaccuugagaaauauguugaggacacuaaaauagaucucuggucauacaacgcggagcuucuuguugcccuggagaaccaacauacaauugaucuaacugacucagaaaugaacaaacuguuugaaaaaacaaagaagcaacugagggaaaaugcugaggauaugggcaaugguuguuucaaaauauaccacaaaugugacaaugccugcauaggaucaaucagaaauggaacuuaugaccacgauguauacagagaugaagcauuaaacaaccgguuucagaucaagggaguugagcugaagucaggguacaaagauuggauccuauggauuuccuuugccauaucauguuuuuugcuuuguguugcuuuguugggguucaucaugugggccugccaaaaaggcaacauuaggugcaacauuugcauuuga

SEQ ID NO: 36518 - RNA, 1701 nt, Artificial Sequence
  derived and/or modified CDS sequence (wt) from hemagglutinin__InfluenzaA__ADE34268
augaagacuaucauugcuuugagcuacauucuaugucugguuuucgcucaaaaacuuccuggaaaugacaacagcacggcaacgcugugccuugggcaccaugcaguaccaaacggaacgauagugaaaacaaucacgaaugaccaaauugaaguuacuaaugcuacugagcugguucagaguuccucaacaggugaaauaugcgacaguccucaucagauccuugauggaaaaaacugcacacuaauagaugcucuauugggagacccucagugugauggcuuccaaaauaagaaaugggaccuuuuuguugaacgcagcaaagccuacagcaacuguuacccuuaugaggugccggauuaugccucccuuaggucacuaguugccucauccggcacacuggaguuuaacaaugaaagcuucaauuggacuggagucacucaagacggaacaagcucugcuugcauaaggagaucuaaaaacaguuucuuuaguagauugaauugguugacccacuuaaacuucaaauacccagcauugaacgugacuaugccaaacaaugaacaauuugacaaauuguacauuugggggguucaccacccggguacggacaaagaccaaaucuuccuguaugcucaagcaucaggaagaaucacagucucuaccaaaagaagccaacaaacugcaaucccgaauaucggaucuagacccagaguaaggaauaucccuagcagaauaagcaucuauuggacaauaguaaaaccgggagacauacuuuugauuaacagcacagggaaucuaauugcuccuagggguuacuuuaaaauacgaagugggaaaagcucaauaaugagaucagaugcacccauuggcaaaugcaauucugaaugcaucacuccaaauggaagcauucccaaugacaaaccauuccaaaauguaaacaggaucacauacggggccugucccagauauguuaagcaaaacacucugaaauuggcaacagggaugcgaaauguaccagagaaacaaacuagaggcauauuuggcgcaaucgcggguuucauagaaaaugguugggagggaaugguggaugguugguacgguuucaggcaucaaaauucugagggaagaggacaagcagcagaucucaaaagcacucaagcagcaaucgaucaaaucaaugggaagcugaauagauugaucgggaaaaccaacgagaaauuccaucagauugaaaaagaauucucagaagucgaagggagaauucaggaccuugagaaauauguugaggacacuaaaauagaucucuggucauacaaugcggagcuucuuguugcccuggagaaccaacauacaauugaucuaacugacucagaaaugaacaaacuguuugaaaaaacaaagaagcaacugagggaaaaugcugaggauaugggcaaugguuguuucaaaauauaccacaaaugugacaaugccugcauaggaucaaucagaaauggaacuuaugaccacgauguauacagagaugaagcauuaaacaaccgguuucagaucaagggaguugagcugaagucaggguacaaagauuggauccuauggauuuccuuugccauaucauguuuuuugcuuuguguugcuuuguugggguucaucaugugggccugccaaaaaggcaacauuaggugcaacauuugcauuuga

SEQ ID NO: 36519 - RNA, 1701 nt, Artificial Sequence
  derived and/or modified CDS sequence (wt) from hemagglutinin__InfluenzaA__ADE45499
augaaggcaauacuaguaguucugcuauauacauuugcaaccgcaaaugcagacacauuauguauagguuaucaugcgaacaauucaacagacacuguagacacaguacuagaaaagaauguaacaguaacacacucuguuaaccuucuagaagacaagcauaacgggaaacuaugcaaacuaagagggguagccccauugcauuuggguaaauguaacauugcuggcuggauccugggaaauccagagugugaaucacucuccacagcaagcucaugguccuacauuguggaaacaucuaguucagacaauggaacguguuacccaggagauuucaucgauuaugaggagcuaagagagcaauugagcucagugucaucauuuaaaagguuugagauauuccccaagacaaguucauggcccaaucaugacccgaacaaagguguaacggcagcauguccucaugcuggagcaaaaagcuucuacaaaaauuuaauauggcuaguuaaaaaaggaaauucauacccaaagcucagcaaauccuacauuaaugauaaagggaaagaaguccucgugcuauggggcauucaccauccaucuacuagugcugaccaacaaagucucuaucagaaugcagaugcauauguuuuuguggggacaucaagauacagcaagaaguucaagccggaaauagcaauaagacccaaagugagggaucaagaagggagaaugaacuauuacuggacacuaguagagccgggagacaaaauaacauucgaagcaacuggaaaucuagugguaccgagauaugcauucgcaauggaaagaaaugcuggaucugguauuaucauuucagauacaccaguccacgauugcaauacaacuugucagacacccaagggugcuauaaacaccagccucccauuucagaauauacauccgaucacaauuggaaaauguccaaaauauguaaaaagcacaaaauugagacuggccacaggauugaggaaugucccgucuauucaaucuagaggccuauuuggggccauugccgguuucauugaagggggguggacagggaugguagauggaugguacgguuaucaccaucaaaaugagcaggggucaggauaugcagccgaccugaagagcacacagaaugccauugacgagauuacuaacaaaguaaauucuguuauugaaaagaugaauacacaguucacagcaguagguaaagaguucaaccaccuggaaaaaagaauagagaauuuaaauaaaaaaguugaugaugguuuccuggacauuuggacuuacaaugccgaacuguugguucuauuggaaaaugaaagaacuuuggacuaccacgauucaaaugugaagaacuuauaugaaaagguaagaagccaguuaaaaaacaaugccaaggaaauuggaaacggcugcuuugaauuuuaccacaaaugcgauaacacgugcauggaaagugucaaaaaugggacuuaugacuacccaaaauacucagaggaagcaaaauuaaacagagaagaaauagaugggguaaagcuggaaucaacaaggauuuaccagauuuuggcgaucuauucaacugucgccaguucauugguacugguagucucccugggggcaaucaguuucuggaugugcucuaaugggucucuacaguguagaauauguauuuaa

SEQ ID NO: 36520 - RNA, 1701 nt, Artificial Sequence
  derived and/or modified CDS sequence (wt) from hemagglutinin__InfluenzaA__ADE45501
augaaggcaauacuaguaguucugcuauauacauuugcaaccgcaaaugcagacacacuauguauagguuaucaugcgaacaauucaacagacacuguagacacaguacuagaaaagaaugugacaguaacacacucuguuaaccuucuagaagacaagcauaacgggaaacuaugcaaacuaagagggguagccccauugcauuuggguaaauguaacauugcuggcuggauccugggaaauccagagugugaaucacucuccacagcaagcucaugguccuacauuguggaaacaucuaguucagacaauggaacguguuacccaggagauuucaucgauuaugaggagcuaagagagcaauugagcucagugucaucauuugaaagguuugagauauuccccaagacaaguucauggcccaaucaugacccgaacaaagguguaacggcagcauguccucaugcuggagcaaaaagcuucuacaaaaauuuaauauggcuaguuaaaaaaggaaauucauacccaaagcucagcaaauccuacauuaaugauaaagggaaagaaguccucgugcuauggggcauucaccauccaucuacuagugcugaccaacaaagucucuaucagaaugcagaugcauauguuuuuguggggacaucaagauacagcaagaaguucaagccggaaauagcaauaagacccaaagugagggaucaagaagggagaaugaacuauuacuggacacuaguagagccgggagacaaaauaacauucgaagcaacuggaaaucuagugguaccgagauaugcauucgcaauggaaagaaaugcuggaucugguauuaucauuucagauacaccaguccacgauugcaauacaacuugucagacacccaagggugcuauaaacaccagccucccauuucagaauauacauccgaucacaauuggaaaauguccaaaauauguaaaaagcacaaaauugagacuggccacaggauugaggaaugucccgucuauucaaucuagaggccuauuuggggccauugccgguuucauugaagggggguggacagggaugguagauggaugguacgguuaucaccaucaaaaugagcaggggucaggauaugcagccgaccugaagagcacacagaaugccauugacgagauuacuaacaaaguaaauucuguuauugaaaagaugaauacacaguucacagcaguagguaaagaguucaaccaccuggaaaaaagaauagagaauuuaaauaaaaaaguugaugaugguuuccuggacauuuggacuuacaaugccgaacuguugguucuauuggaaaaugaaagaacuuuggacuaccacgauucaaaugugaagaacuuauaugaaaagguaagaagccaguuaaaaaacaaugccaaggaaauuggaaacggcugcuuugaauuuuaccacaaaugcgauaacacgugcauggaaagugucaaaaaugggacuuaugacuacccaaaauacucagaggaagcaaaauuaaacagagaagaaauagaugggguaaagcuggaaucaacaaggauuuaucagauuuuggcgaucuauucaacugucgccaguucauugguacugguagucucccugggggcaaucaguuucuggaugugcucuaaugggucucuacaguguagaauauguauuuaa

SEQ ID NO: 36521 - RNA, 1701 nt, Artificial Sequence
  derived and/or modified CDS sequence (wt) from hemagglutinin__InfluenzaA__ADE45503
augaaggcaauacuaguaguucugcuauauacauuugcaaccgcaaaugcagacacauuauguauagguuaucaugcgaacaauucaacagacacuguagacacaguacuagaaaagaauguaacaguaacacacucuguuaaccuucuagaagacaagcauaacgggaaacuaugcaaacuaagagggguagccccauugcauuuggguaaauguaacauugcuggcuggauccugggaaauccagagugugaaucacucuccacagcaagcucaugguccuacauuguggaaacaucuaguucagacaauggaacguguuacccaggagauuucaucgauuaugaggagcuaagagagcaauugagcucagugucaucauuugaaagguuugagauauuccccaagacaaguucauggcccaaucaugacccgaacaaagguguaacggcagcauguccucaugcuggagcaaaaagcuucuacaaaaauuuaauauggcuaguuaaaaaaggaaauucauacccaaagcucagcaaauccuacauuaaugauaaagggaaagaaguccucgugcuauggggcauucaccauccaucuacuagugcugaccaacaaagucucuaucagaaugcagaugcauauguuuuuguggggacaucaagauacagcaagaaguucaagccggaaauagcaauaagacccaaagugagggaucaagaagggagaaugaacuauuacuggacacuaguagagccgggagacaaaauaacauucgaagcaacuggaaaucuagugguaccgagauaugccuucgcaauggaaagaaaugcuggaucugguauuaucauuucagauacaccaguccacgauugcaauacaacuugucagacacccaagggugcuauaaacaccagccucccauuucagaauauacauccgaucacaauuggaaaauguccaaaauauguaaaaagcacaaaauugagacuggccacaggauugaggaaugucccgucuauucaaucuagaggccuauuuggggccauugccgguuucauugaagggggguggacagggaugguagauggaugguacgguuaucaccaucaaaaugagcaggggucaggauaugcagccgaccugaagagcacacagaaugccauugacgagauuacuaacaaaguaaauucuguuauugaaaagaugaauacacaguucacagcaguagguaaagaguucaaccaccuggaaaaaagaauagagaauuuaaauaaaaaaguugaugaugguuuccuggacauuuggacuuacaaugccgaacuguugguucuauuggaaaaugaaagaacuuuggacuaccacgauucaaaugugaagaacuuauaugaaaagguaagaagccaguuaaaaaacaaugccaaggaaauuggaaacggcugcuuugaauuuuaccacaaaugcgauaacacgugcauggaaagugucaaaaaugggacuuaugacuacccaaaauacucagaggaagcaaaauuaaacagagaagaaauagaugggguaaagcuggaaucaacaaggguuuaccagauuuuggcgaucuauucaacugucgccaguucauugguacugguagucucccugggggcaaucaguuucuggaugugcucuaaugggucucuacaguguagaauauguauuuaa

SEQ ID NO: 36522 - RNA, 1701 nt, Artificial Sequence
  derived and/or modified CDS sequence (wt) from hemagglutinin__InfluenzaA__ADE45505
augaaggcaauacuaguaguucugcuauauacauuugcaaccgcaaaugcagacacauuauguauagguuaucaugcgaacaauucaacagacacuguagacacaguacuagaaaagaauguaacaguaacacacucuguuaaccuucuagaagacaagcauaacgggaaacuaugcaaacuaagagggguagccccauugcauuuggguaaauguaacauugcuggcuggauccugggaaauccagagugugaaucacucuccacagcaagcucaugguccuacauuguggaaacaucuaguucagacaauggaacguguuacccaggagauuucaucgauuaugaggagcuaagagagcaauugagcucagugucaucauuugaaagguuugagauauuccccaagacaaguucauggcccaaucaugacucgaacaaagguguaacggcagcauguccucaugcuggagcaaaaagcuucuacaaaaauuuaauauggcuaguuaaaaaaggaaauucauacccaaagcucagcaaauccuacauuaaugauaaagggaaagaaguccucgugcuauggggcauucaccauccaucuacuagugcugaccaacaaagucucuaucagaaugcagaugcauauguuuuuguggggacaucaagauacagcaagaaguucaagccggaaauagcaauaagacccaaagugagggaucaagaagggagaaugaacuauuacuggacacuaguagagccgggagacaaaauaacauucgaagcaacuggaaaucuagugguaccgagauaugcauucgcaauggaaagaaaugcuggaucugguauuaucauuucagauacaccaguccacgauugcaauacaacuugucagacacccaagggugcuauaaacaccagccucccauuucagaauauacauccgaucacaauuggaaaauguccaaaauauguaaaaagcacaaaauugagacuggccacaggauugaggaaugucccgucuauucaaucuagaggccuauuuggggccauugccgguuucauugaagggggguggacagggaugguagauggaugguacgguuaucaccaucaaaaugagcaggggucaggauaugcagccgaccugaagagcacacagaaugccauugacgagauuacuaacaaaguaaauucuguuauugaaaagaugaauacacaguucacagcaguagguaaagaguucaaccaccuggaaaaaagaauagagaauuuaaauaaaaaaguugaugaugguuuccuggacauuuggacuuacaaugccgaacuguugguucuauuggaaaaugaaagaacuuuggacuaccacgauucaaaugugaagaacuuauaugaaaagguaagaagccaguuaaaaaacaaugccaaggagauuggaaacggcugcuuugaauuuuaccacaaaugcgauaacacgugcauggaaagugucaaaaaugggacuuaugacuacccaaaauacucagaggaagcaaaauuaaacagagaagaaauagaugggguaaagcuggaaucaacaaggauuuaccagauuuuggcgaucuauucaacugucgccaguucauugguacugguggucucccugggggcaaucaguuucuggaugugcucuaaugggucucuacaguguagaauauguauuuaa

SEQ ID NO: 36523 - RNA, 1701 nt, Artificial Sequence
  derived and/or modified CDS sequence (wt) from hemagglutinin__InfluenzaA__ADE45507
augaaggcaauacuaguaguucugcuauauacauuugcaaccgcaaaugcagacacauuauguauagguuaucaugcgaacaauucaacagacacuguagacacaguacuagaaaagaauguaacaguaacacacucuguuaaccuucuagaagacaagcauaacgggaaacuaugcaaacuaagagggguagccccauugcauuuggguaaauguaacauugcuggcuggauccugggaaauccagagugugaaucacucuccacagcaagcucaugguccuacauuguggaaacaucuaguucagacaauggaacguguuacccaggagauuucaucgauuaugaggagcuaagagagcaauugagcucagugucaucauuugaaagguuugagauauuccccaagacaaguucauggcccaaucaugacucgaacaaagguguaacggcagcauguccucaugcuggagcaaaaagcuucuacaaaaauuuaauauggcuaguuaaaaaaggaaauucauacccaaagcucagcaaauccuacauuaaugauaaagggaaagagguccucgugcuauggggcauucaccauccaucuacuagugcugaccaacaaagucucuaucagaaugcagaugcauauguuuuuguggggacaucaagauacagcaagaaguucaagccggaaauagcaauaagacccaaagugagggagcaagaagggagaaugaacuauuacuggacacuaguagagccgggagacaaaauaacauucgaagcaacuggaaaucuagugguaccgagauaugcauucgcaauggaaagaaaugcuggaucugguauuaucauuucagauacaccaguccacgauugcaauacaacuugucagacacccaagggugcuauaaacaccagccucccauuucagaauauacauccgaucacaauuggaaaauguccaaaauauguaaaaagcacaaaauugagacuggccacaggauugaggaaugucccgucuauucaaucuagaggccuauuuggggccauugccgguuucauugaagggggguggacagggaugguagauggaugguacgguuaucaccaucaaaaugagcagggaucaggauaugcagccgaccugaagagcacacagaaugccauugacgagauuacuaacaaaguaaauucuguuauugaaaagaugaauacacaguucacagcaguagguaaagaguucaaccaccuggaaaaaagaauagagaauuuaaauaaaaaaguugaugaugguuuccuggacauuuggacuuacaaugccgaacuguugguucuauuggaaaaugaaagaacuuuggacuaccacgauucaaaugugaagaacuuauaugaaaagguaagaagccaguuaaaaaacaaugccaaggaaauuggaaacggcugcuuugaauuuuaccacaaaugcgauaacacgugcauggaaagugucaaaaaugggacuuaugacuacccaaaauacucagaggaagcaaaauuaaacagagaagaaauagaugggguaaagcuggaaucaacaaggauuuaccagauuuuggcgaucuauucaacugucgccaguucauugguacugguagucucccugggggcaaucaguuucuggauguguucuaaugggucucuacaguguagaauauguauuuaa

SEQ ID NO: 36524 - RNA, 1701 nt, Artificial Sequence; identical to SEQ ID NO: 36523
  derived and/or modified CDS sequence (wt) from hemagglutinin__InfluenzaA__ADE45509

SEQ ID NO: 36525 - RNA, 1701 nt, Artificial Sequence
  derived and/or modified CDS sequence (wt) from hemagglutinin__InfluenzaA__ADE45511
augaaggcaauacuaguaguucugcuauauacauuugcaaccgcaaaugcagacacauuauguauagguuaucaugcgaacaauucaacagacacuguagacacaguacuagaaaagaauguaacaguaacacacucuguuaaccuucuagaagacaagcauaacgggaaacuaugcaaacuaagagggguagccccauugcauuuggguaaauguaacauugcuggcuggauccugggaaauccagagugugaaucacucuccacagcaagcucaugguccuacauuguggaaacaucuaguucagacaauggaacguguuacccaggagauuucaucgauuaugaggagcuaagagagcaauugagcucagugucaucauuugaaagguuugagauauuccccaagacaaguucauggcccaaucaugacccgaacaaagguguaacggcagcauguccucaugcuggagcaaaaagcuucuacaaaaauuuaauauggcuaguuaaaaaaggaaauucauacccaaagcucagcaaauccuacauuaaugauaaagggaaagaaguccucgugcuauggggcauucaccauccaucuacuagugcugaccaacaaagucucuaucagaaugcagaugcauauguuuuuguggggacaucaagauacagcaagaaguucaagccggaaauagcaauaagacccaaagugagggaucaagaagggagaaugaacuauuacuggacacuaguagagccgggagacaaaauaacauucgaagcaacuggaaaucuagugguaccgagauaugcauucgcaauggaaagaaaugcuggaucugguauuaucauuucagauacaccaguccacgauugcaauacaacuugucagacacccaagggugcuauaaacaccagccucccauuucagaauauacauccgaucacaauuggaaaauguccaaaauauguaaaaagcacaaaauugagacuggccacaggauugaggaaugucccgucuauucaaucuagaggccuauuuggggccauugccgguuucauugaagggggguggacagggaugguagauggaugguacgguuaucaccaucaaaaugagcaggggucaggauaugcagccgaccugaagagcacacagaaugccauugacgagauuacuaacaaaguaaauucuguuauugaaaagaugaauacacaguucacagcaguagguaaagaguucaaucaccuggaaaaaagaauagagaauuuaaauaaaaaaguugaugaugguuuccuggacauuuggacuuacaaugccgaacuguugguucuauuggaaaaugaaagaacuuuggacuaccacgauucaaaugugaagaacuuauaugaaaagguaagaagccaguuaaaaaacaaugccaaggaaauuggaaacggcugcuuugaauuuuaccacaaaugcgauaacacgugcauggaaagugucaaaaaugggacuuaugacuacccaaaauacucagaggaagcaaaauuaaacagagaagaaauagaugggguaaaacuggaaucaacaaggauuuaccagauuuuggcgaucuauucaacugucgccaguucauugguacugguagucucccugggggcaaucaguuucuggaugugcucuaaugggucucuacaguguagaauauguauuuaa

SEQ ID NO: 36526 - RNA, 1701 nt, Artificial Sequence
  derived and/or modified CDS sequence (wt) from hemagglutinin__InfluenzaA__ADE45513
augaaggcaauacuaguaguucugcuauauacauuugcaaccgcaaaugcagacacauuauguauagguuaucaugcgaacaauucaacagacacuguagacacaguacuagaaaagaauguaacaguaacacacucuguuaaccuucuagaagacaagcauaacgggaaacuaugcaaacuaagagggguagccccauugcauuuggguaaauguaacauugcuggcuggauccugggaaauccagagugugaaucacucuccacagcaagcucaugguccuacauuguggaaacaucuaguucagacaauggaacguguuacccaggagauuucaucgauuaugaggagcuaagagagcaauugagcucagugucaucauuugaaagguuugagauauuccccaagacaaguucauggcccaaucaugacccgaacaaagguguaacggcagcauguccucaugcuggagcaaaaagcuucuacaaaaauuuaauauggcuaguuaaaaaaggaaauucauacccaaagcucagcaaauccuacauuaaugauaaagggaaagaaguccucgugcuauggggcauucaccauccaucuacuagugcugaccaacaaagucucuaucagaaugcagaugcauaugcuuuuguggggacaucaagauacagcaagaaguucaagccggaaauagcaauaagacccaaagugagggaucaagaagggagaauuaacuauuacuggacacuaguagagccgggagacaaaauaauauucgaagcaacuggaaaucuagugguaccgagauaugcauucgcaauggaaagaaaugcuggaucugguauuaucauuucagauacaccagcccacgauugcaauacaacuugucagacacccaagggugcuauaaacaccagccucccauuucagaauauacauccgaucacaauuggaaaauguccaaaauauguaaaaagcacaaaauugagacuggccacaggauugaggaaugucccgucuauucaaucuagaggccuauuuggggccauugccgguuucauugaagggggguggacagggaugguagauggaugguacgguuaucaccaucaaaaugagcaggggucaggauaugcagccgaccugaagagcacacagaaugccauugacgagauuacuaacaaaguaaauucuguuauugaaaagaugaauacacaguucacagcaguagguaaagaguucaaccaccuggaaaaaagaauagagaauuuaaauaaaaaaguugaugaugguuuccuggacauuuggacuuacaaugccgaacuguugguucuauuggaaaaugaaagaacuuuggacuaccacgauucaaaugugaagaacuuauaugaaaagguaagaagccaguuaaaaaacaaugccaaggaaauuggaaacggcugcuuugaauuuuaccacaaaugcgauaacacgugcauggaaagugucaaaaaugggacuuaugacuacccaaaauacucagaggaagcaaaauuaaacagagaagaaauagaugggguaaagcuggaaucaacaaggauuuaccagauuuuggcgaucuauucaacugucgccaguucauugguacugguagucucccugggggcaaucaguuucuggaugugcucuaaugggucucuacaguguagaauauguauuuaa

SEQ ID NO: 36527 - RNA, 1701 nt, Artificial Sequence
  derived and/or modified CDS sequence (wt) from hemagglutinin__InfluenzaA__ADE75388
augaaggcaauacuaguaguucugcuauauacauuugcaaccgcaaaugcagacacauuauguauagguuaucaugcgaacaauucaacagacacuguagacacaguacuagaaaagaauguaacaguaacacacucuguuaaccuucuagaagacaagcauaacgggaaacuaugcaaacuaagagggguagccccauugcauuuggguaaauguaacauugcuggcuggauccugggaaauccagagugugaaucacucuccacagcaagcucaugguccuacauuguggaaacaucuaguucagaaaauggaacauguuacccaggagauuucaucgauuaugaggagcuaagagagcaauugagcucagugucaucauuugaaagguuugagauauuccccaagacaaguucauggcccaaucaugacucgaacaaagguguaacggcagcauguccucaugcuggagcaaaaagcuucuacaaaaauuuaauauggcuaguuaaaaaaggaaauucauacccaaagcucagcaaauccuacauuaaugauaaagggaaagaaguccucgugcuauggggcauucaccauccaucuacuagugcugaccaacaaagucucuaucagaaugcagaugcauauguuuuuguggggacaucaagauacagcaagaaguucaagccggaaauagcaauaagacccaaagugagggaucaagaagggagaaugaacuauuacuggacacuaguagagccgggagacaaaauaacauucgaagcaacuggaaaucuagugguaccgagauaugcauucgcaauggaaagaaaugcuggaucugguauuaucauuucagauacaccaguccacgauugcaauacaacuugucagacacccaagggugcuauaaacaccagccucccauuucagaauauacauccgaucacaauuggaaaauguccaaaauauguaaaaagcacaaaauugagacuggccacaggauugaggaaugucccgucuauucaaucuagaggccuauuuggggccauugccgguuucauugaagggggguggacagggaugguagauggaugguacgguuaucaccaucaaaaugagcaggggucaggauaugcagccgaccugaagagcacacagaaugccauugacgagauuacuaacaaaguaaauucuguuauugaaaagaugaauacacaguucacagcaguagguaaagaguucaaccaccuggaaaaaagaauagagaauuuaaauaaaaagguugaugaugguuuccuagacauuuggacuuacaaugccgaacuguugguucuauuggaaaaugaaagaacuuuggacuaccacgauucaaaugugaagaacuuauaugaaaagguaagaagccaguuaaaaaacaaugccaaggaaauuggaaacggcugcuuugaauuuuaccacaaaugcgauaacacgugcauggaaagugucaaaaaugggacuuaugacuacccaaaauacucagaggaagcaaaauuaaacagagaagaaauagaugggguaaagcuggaaucaacaaggauuuaccagauuuuggcgaucuauucaacugucgccaguucauugguacugguagucucccugggggcaaucaguuucuggaugugcucuaaugggucucuacaguguagaauauguauuuaa

SEQ ID NO: 36528 - RNA, 1701 nt, Artificial Sequence; identical to SEQ ID NO: 34681
  derived and/or modified CDS sequence (wt) from hemagglutinin__InfluenzaA__ADE75390

SEQ ID NO: 36529 - RNA, 1701 nt, Artificial Sequence
  derived and/or modified CDS sequence (wt) from hemagglutinin__InfluenzaA__ADF10067
augaaggcaauacuaguaguucugcuauauacauuugcaaccgcaaaugcagacacauuauguauagguuaucaugcgaacaauucaacagacacuguagacacaguacuagaaaagaauguaacaguaacacacucuguuaaccuucuagaagacaagcauaacgggaaacuaugcaaacuaagagggguagccccauugcauuuggguaaauguaacauugcuggcuggauccugggaaauccagagugugaaucacucuccacagcaagcucaugguccuacauuguggaaacaucuaguucagacaauggaacguguuacccaggagauuucaucgauuaugaggagcuaagagagcaauugagcucagugucaucauuugaaagguuugagauauuccccaagacaaguucauggcccaaucaugacucgaacaaagguguaacggcagcauguccucaugcuggagcaaaaagcuucuacaaaaauuuaauauggcuaguuaaaaaaggaaauucauacccaaagcucagcaaauccuacauuaaugauaaagggaaagaaguccucgugcuauggggcauucaccauccaucuacuagugcugaccaacaaagucucuaucagaaugcagaugcauauguuuuuguggggacaucaagauacagcaagaaguucaagccggaaauagcaauaagacccaaagugagggaucaagaagggagaaugaacuauuacuggacacuaguagagccgggagacaaaauaacauucgaagcaacuggaaaucuagugguaccgagauaugcauucgcaauggaaagaaaugcuggaucugguauuaucauuucagauacaccaguccacgauugcaauacaacuugucagacacccaagggugcuauaaacaccagccucccauuucagaauauacauccgaucacaauuggaaaauguccaaaauauguaaaaagcacaaaauugagacuggccacaggauugaggaaugucccgucuauucaaucuagaggccuauuuggggccauugccggcuucauugaagggggguggacagggaugguagauggaugguacgguuaucaccaucaaaaugagcaggggucaggauaugcagccgaccugaagagcacacagaaugccauugacgagauuacuaacaaaguaaauucuguuauugaaaagaugaauacacaguucacagcaguagguaaagaguucaaccaccuggaaaaaagaauagagaauuuaaauaaaaaaguugaugaugguuuccuggacauuuggacuuacaaugccgaacuguugguucuauuggaaaaugaaagaacuuuggacuaccacgauucaaaugugaagaacuuauaugaaaagguaagaagccaguuaaaaaacaaugccaaggaaauuggaaacggcugcuuugaauuuuaccacaaaugcgauaacacgugcauggaaagugucaaaaaugggacuuaugacuacccaaaauacucagaggaagcaaaauuaaacagagaagaaauagaugggguaaagcuggaaucaacaaggauuuaccagauuuuggcgaucuauucaacugucgccaguucauugguacugguagucucccugggggcaaucaguuucuggaugugcucuaaugggucucuacaguguagaauauguauuuaa

SEQ ID NO: 36530 - RNA, 1701 nt, Artificial Sequence
  derived and/or modified CDS sequence (wt) from hemagglutinin__InfluenzaA__ADF10077
augaaggcaauacuaguaguucugcuauauacauuugcaaccgcaaaugcagacacauuauguauagguuaucaugcgaacaauucaacagacacuguagacacaguacuagaaaagaauguaacaguaacacacucuguuaaccuucuagaagacaagcauaacgggaaacuaugcaaacuaagagggguagccccauugcauuuggguaaauguaacauugcuggcuggauccugggaaauccagagugugaaucacucuccacagcaagcucaugguccuacauuguggaaacaucuaguucagacaauggaacguguuacccaggagauuucaucgauuaugaggagcuaagagagcaauugagcucagugucaucauuugaaagguuugagauauuccccaagacaaguucauggcccaaucaugacucgaacaaagguguaacggcagcauguccucaugcuggagcaaaaagcuucuacaaaaauuuaauauggcuaguuaaaaaaggaaauucauacccaaagcucagcaaauccuacauuaaugauaaagggaaagaaguccucgugcuauggggcauucaccauccaucuacuagugcugaccaacaaagucucuaucagaaugcagaugcauauguuuuuguggggacaucaagauacagcaagaaguucaagccggaaauagcaauaagacccaaagugagggaucaagaagggagaaugaacuauuacuggacacuaguagagccgggagacaaaauaacauucgaagcaacuggaaaucuagugguaccgagauaugcauucgcaauggaaagaaaugcuggaucugguauuaucauuucagauacaccaguccacgauugcaauacaacuugucagacacccaagggugcuauaaacaccagccucccauuucagaauauacauccgaucacaauuggaaaauguccaaaauauguaaaaagcacaaaauugagacuggccacaggauugaggaaugucccgucuauucaaucuagaggccuauuuggggccauugccgguuucauugaagggggguggacagggaugguagauggaugguacgguuaucaccaucaaaaugagcaggggucaggauaugcagccgaccugaagagcacacagaaugccauugacgagauuacuaacaagguaaauucuguuauugaaaagaugaauacacaguucacagcaguagguaaagaguucaaccaccuggaaaaaagaauagagaauuuaaauaaaaaaguugaugaugguuuccuggacauuuggacuuacaaugccgaacuguugguucuauuggaaaaugaaagaacuuuggacuaccacgauucaaaugugaagaacuuauaugaaaagguaagaagccaguuaaaaaacaaugccaaggaaauuggaaacggcugcuuugaauuuuaccacaaaugcgauaacacgugcauggaaagugucaaaaaugggacuuaugacuacccaaaauacucagaggaagcaaaauuaaacagagaagaaauagaugggguaaagcuggaaucaacaaggauuuaccagauuuuggcgaucuauucaacugucgccaguucauugguacugguagucucccugggggcaaucaguuucuggaugugcucuaaugggucccuacaguguagaauauguauuuaa

SEQ ID NO: 36531 - RNA, 1701 nt, Artificial Sequence
  derived and/or modified CDS sequence (wt) from hemagglutinin__InfluenzaA__ADF10087
augaaggcaauacuaguaguucugcuauauacauuugcaaccgcaaaugcagacacauuauguauagguuaucaugcgaacaauucaacagacacuguagacacaguacuagaaaagaauguaacaguaacacacucuguuaaccuucuagaagacaagcauaacgggaaacuaugcaaacuaagagggguagccccauugcauuuggguaaauguaacauugcuggcuggauccugggaaauccagagugugaaucacucuccacagcaagcucaugguccuacauuguggaaacaucuaguucagacaauggaacguguuacccaggagauuucaucgauuaugaggagcuaagagagcaauugagcucagugucaucauuugaaagguuugagauauuccccaagacaaguucauggcccaaucaugacucgaacaaagguguaacggcagcauguccucaugcuggagcaaaaagcuucuacaaaaauuuaauauggcuaguuaaaaaaggaaauucauacccaaagcucagcaaauccuacauuaaugauaaagggaaagaaguccucgugcuauggggcauucaccauccaucuacuagugcugaccaacaaagucucuaucagaaugcagaugcauauguuuuuguggggacaucaagauacagcaagaaguucaagccggaaauagcaauaagacccaaagugagggaucaagaagggagaaugaacuauuacuggacacuaguagagccgggagacaaaauaacauucgaagcaacuggaaaucuagugguaccgagauaugcauucgcaaugaaaagaaaugcuggaucugguauuaucauuucagauacaccaguccacgauugcaauacaacuugucagacacccaagggugcuauaaacaccagccucccauuucagaauauacauccgaucacaauuggaaaauguccaaaauauguaaaaagcacaaaauugagacuggccacaggauugaggaaugucccgucuauucaaucuagaggccuauuuggggccauugccgguuucauugaagggggguggacagggaugguagauggaugguacgguuaucaccaucaaaaugagcaggggucaggauaugcagccgaccugaagagcacacagaaugccauugacgagauuacuaacaaaguaaauucuguuauugaaaagaugaauacacaguucacagcaguagguaaagaguucaaccaccuggaaaaaagaauagagaauuuaaauaaaaagguugaugaugguuuccuggacauuuggacuuacaaugccgaacuguugguucuauuggaaaaugaaagaacuuuggacuaccacgauucaaaugugaagaacuuauaugaaaagguaagaaaccaguuaaaaaacaaugccaaggaaauuggaaacggcugcuuugaauuuuaccacaaaugcgauaacacgugcauggaaagugucaaaaaugggacuuaugacuacccaaaauacucagaggaagcaaaauuaaacagagaagaaauagaugggguaaagcuggaaucaacaaggauuuaccagauuuuggcgaucuauucaacugucgccaguucauugguacugguagucucccugggggcaaucaguuucuggaugugcucuaaugggucucuacaguguagaauauguauuuaa

SEQ ID NO: 36532 - RNA, 1701 nt, Artificial Sequence
  derived and/or modified CDS sequence (wt) from hemagglutinin__InfluenzaA__ADF10097
auggaggcaauacuaguaguucugcuauauacauuugcaaccgcaaaugcagacacauuauguauagguuaucaugcgaacaauucaacagacacuguagacacaguacuagaaaagaauguaacaguaacacacucuguuaaccuucuagaagacaagcauaacgggaaacuaugcaaacuaagagggguagccccauugcauuuggguaaauguaacauugcuggcuggauccugggaaauccagagugugaaucacucuccacagcaagcucaugguccuacauuguggaaacaucuaguucagacaauggaacguguuacccaggagauuucaucgauuaugaggagcuaagagagcaauugagcucagugucaucauuugaaagguuugagauauuccccaagacaaguucauggcccaaucaugacucgaacaaagguguaacggcagcauguccucaugcuggagcaaaaagcuucuacaaaaauuuaauauggcuaguuaaaaaaggaaauucauacccaaagcucagcaaauccuacauuaaugauaaagggaaagaaguccucgugcuauggggcauucaccauccaucuacuagugcugaccaacaaagucucuaucagaaugcagaugcauauguuuuuguggggucaucaaaauacagcaagaaguucaagccggaaauagcaauaagacccaaagugagggaucaagaagggagaaugaacuauuacuggacacuaguagagccgggagacaaaauaacauucgaagcaacuggaaaucuagugguaccgagauaugcauucgcaauggaaagaaaugcuggaucugguauuaucauuucagauacaccaguccacgauugcaauacaacuugucagacacccaagggugcuauaaacaccagccucccauuucauaauauacauccgaucacaauuggaaaauguccaaaauauguaaaaagcacaaaauugagacuggccacaggauugaggaaugucccgucuauucaaucuagaggccuauuuggggccauugccgguuucauugaagggggguggacagggaugguagauggaugguacgguuaucaccaucaaaaugagcaggggucaggauaugcagccgaccugaagagcacacagaaugccauugacgagauuacuaacaaaguaaauucuguuauugaaaagaugaauacacaguucacagcaguagguaaagaguucaaccaccuggaaaaaagaauagagaauuuaaauaaaaaaguugaugaugguuuccuggacauuuggacuuacaaugccgaacuguugguucuauuggaaaaugaaagaacuuuggacuaccacgauucaaaugugaagaacuuauaugaaaagguaagaagccaguuaaaaaacaaugccaaggaaauuggaaacggcugcuuugaauuuuaccacaaaugcgauaacacgugcauggaaagugucaaaaaugggacuuaugacuacccaaaauacucagaggaagcaaaauuaaacagagaagaaauagaugggguaaagcuggaaucaacaaagauuuaccagauuuuggcgaucuauucaacugucgccaguucauugguacugguagucucccugggggcaaucaguuucuggaugugcucuaaugggucucuacaguguagaauauguauuuaa

SEQ ID NO: 36533 - RNA, 1701 nt, Artificial Sequence
  derived and/or modified CDS sequence (wt) from hemagglutinin__InfluenzaA__ADF10107
auggaggcaauacuaguaguucugcuauauacauuugcaaccgcaaaugcagacacauuauguauagguuaucaugcgaacaauucaacagacacuguagacacaguacuagaaaagaauguaacaguaacacacucuguuaaccuucuagaagacaagcauaacgggaaacuaugcaaacuaagagggguagccccauugcauuuggguaaauguaacauugcuggcuggauccugggaaauccagagugugaaucacucuccacagcaagcucaugguccuacauuguggaaacaucuaguucagacaauggaacguguuacccaggagauuucaucgauuaugaggagcuaagagagcaauugagcucagugucaucauuugaaagguuugagauauuccccaagacaaguucauggcccaaucaugacucgaacaaagguguaacggcagcauguccucaugcuggagcaaaaagcuucuacaaaaauuuaauauggcuaguuaaaaaaggaaauucauacccaaagcucagcaaauccuacauuaaugauaaagggaaagaaguccucgugcuauggggcauucaccauccaccuacuagugcugaccaacaaagucucuaucagaaugcagaugcauauguuuuuguggggucaucaaaauacagcaagaaguucaagccggaaauagcaauaagacccaaagugagggaucaagaagggagaaugaacuauuacuggacacuaguagagccgggagacaaaauaacauucgaagcaacuggaaaucuagugguaccgagauaugcauucgcaauggaaagaaaugcuggaucugguauuaucauuucagauacaccagcccacgauugcaauacaacuugucagacacccaagggugcuauaaacaccagccucccauuucauaauauacauccgaucacaauuggaaaauguccaaaauauguaaaaagcacaaaauugagacuggccacaggauugaggaaugucccgucuauucaaucuagaggccuauuuggggccauugccgguuucauugaagggggguggacagggaugguagauggaugguacgguuaucaccaucaaaaugagcaggggucaggauaugcagccgaccugaagagcacacagaaugccauugacgagauuacuaacaaaguaaauucuguuauugaaaagaugaauacacaguucacagcaguagguaaagaguucaaccaccuggaaaaaagaauagagaauuuaaauaaaaaaguugaugaugguuuccuggacauuuggacuuacaaugccgaacuguugguucuauuggaaaaugaaagaacuuuggacuaccacgauucaaaugugaagaacuuauaugaaaagguaagaagccaguuaaaaaacaaugccaaggaaauuggaaacggcugcuuugaauuuuaccacaaaugcgauaacacgugcauggaaagugucaaaaaugggacuuaugacuacccaaaauacucagaggaagcaaaauuaaacagagaagaaauagaugggguaaagcuggaaucaacaaagauuuaccagauuuuggcgaucuauucaacugucgccaguucauugguacugguagucucccugggggcaaucaguuucuggaugugcucuaaugggucucuacaguguagaauauguauuuaa

SEQ ID NO: 36534 - RNA, 1701 nt, Artificial Sequence; identical to SEQ ID NO: 34681
  derived and/or modified CDS sequence (wt) from hemagglutinin__InfluenzaA__ADF10117

SEQ ID NO: 36535 - RNA, 1701 nt, Artificial Sequence
  derived and/or modified CDS sequence (wt) from hemagglutinin__InfluenzaA__ADF10127
augaaggcaauacuaguaguucugcuauauacauuugcaaccgcaaaugcagacacauuauguauagguuaucaugcgaacaauucaacagacacuguagacacaguacuagaaaagaauguaacaguaacacacucuguuaaccuucuagaagacaagcauaacgggaaacuaugcaaacuaagagggguagccccauugcauuuggguaaauguaacauugcuggcuggauccugggaaauccagagugugaaucacucuccacagcaagcucaugguccuacauuguggaaacaucuaguucagacaauggaacguguuacccaggagauuucaucgauuaugaggagcuaagagagcaauugagcucagugucaucauuugaaagguuugagauauuccccaagacaaguucauggcccaaucaugacucgaacaaagguguaacggcagcauguccucaugcuggagcaaaaagcuucuacaaaaauuuaauauggcuaguuaaaaaaggaaauucauacccaaagcucagcaaauccuacauuaaugauaaagggaaagaaguccucgugcuauggggcauucaccauccaucuacuagugcugaccaacaaagucucuaucagaaugcagaugcauauguuuuuguggggacaucaagauacagcaagaaguucaagccggaaauagcaauaagacccaaagugagggaacaagaagggagaaugaacuauuacuggacacuaguagagccgggagacaaaauaacauucgaagcaacuggaaaucuagugguaccgagauaugcauucgcaauggaaagaaaugcuggaucugguauuaucauuucagauacaccaguccacgauugcaauacaacuugucaaacacccaagggugcuauaaacaccagccucccauuucagaauauacauccgaucacaauuggaaaauguccaaaauauguaaaaagcacaaaauugagacuggccacaggauuaaggaaugucccgucuauucaaucuagaggccuauuuggggccauugccgguuucauugaagggggguggacagggaugguagauggaugguacgguuaucaccaucaaaaugagcaggggucaggauaugcagccgaccugaagagcacacagaaugccauugacgagauuacuaacaaaguaaauucuguuauugaaaagaugaauacacaguucacagcaguagguaaagaguucaaccaccuggaaaaaagaauagagaauuuaaauaaaaaaguugaugaugguuuccuggacauuuggacuuacaaugccgaacuguugguucuauuggaaaaugaaagaacuuuggacuaccacgauucaaaugugaagaacuuauaugaaaagguaagaagccaguuaaaaaacaaugccaaggaaauuggaaacggcugcuuugaauuuuaccacaaaugcgauaacacgugcauggaaagugucaaaaaugggacuuaugacuacccaaaauacucagaggaagcaaaauuaaacagagaagaaauagaugggguaaagcuggaaucaacaaggauuuaccagauuuuggcgaucuauucaacugucgccaguucauugguacugguagucucccugggggcaaucaguuucuggaugugcucuaaugggucucuacaguguagaguaugcauuuaa

SEQ ID NO: 36536 - RNA, 1701 nt, Artificial Sequence; identical to SEQ ID NO: 34681
  derived and/or modified CDS sequence (wt) from hemagglutinin__InfluenzaA__ADF10137

SEQ ID NO: 36537 - RNA, 1701 nt, Artificial Sequence
  derived and/or modified CDS sequence (wt) from hemagglutinin__InfluenzaA__ADF10154
augaaggcaauacuaguaguucugcuauauacauuugcaaccgcaaaugcagacacauuauguauagguuaucaugcgaacaauucaacagacacuguagacacaguacuagaaaagaauguaacaguaacacacucuguuaaccuucuagaagacaagcauaacgggaaacuaugcaaacuaagagggguagccccauugcauuuggguaaauguaacauugcuggcuggauccugggaaauccagagugugaaucacucuccacagcaagcucaugguccuacauuguggaaacaucuaguucagacaauggaacguguuacccaggagauuucaucgauuaugaggagcuaagagagcaauugagcucagugucaucauuugaaagguuugagauauuccccaagacaaguucauggcccgaucaugacucgaacaaagguguaacggcagcauguccucaugcuggagcaaaaagcuucuacaaaaauuuaauauggcuaguuaaaaaaggaaauucauacccaaagcucagcaaauccuacauuaaugauaaagggaaagaaguccucgugcuauggggcauucaccauccaucuacuagugcugaccaacaaagucucuaucagaaugcagaugcauauguuuuuguggggacaucaagauacagcaagaaguucaagccggaaauagcaauaagacccaaagugagggaacaagaagggagaaugaacuauuacuggacacuaguagagccgggagacaaaauaacauucgaagcaacuggaaaucuagugguaccgagauaugcauucgcaauggaaagaaaugcuggaucugguauuaucauuucagauacaccaguccacgauugcaauacaacuugucagacacccaagggugcuauaaacaccagccucccauuucagaauauacauccgaucacaauuggaaaauguccaaaauauguaaaaagcacaaaauugagacuggccacaggauugaggaaugucccgucuauucaaucuagaggccuauuuggggccauugccgguuucauugaagggggguggacagggaugguagauggaugguacgguuaucaccaucaaaaugagcaggggucaggauaugcagccgaccugaagagcacacagaaugccauugacgagauuacuaacaaaguaaauucuguuauugaaaagaugaauacacaguucacagcaguagguaaagaguucaaccaccuggaaaaaagaauagagaauuuaaauaaaaaaguugaugaugguuuccuggacauuuggacuuacaaugccgaacuguugguucuauuggaaaaugaaagaacuuuggacuaccacgauucaaaugugaagaacuuauaugaaaggguaagaagccaguuaaaaaacaaugccaaggaaauuggaaacggcugcuuugaauuuuaccacaaaugcgauaacacgugcauggaaagugucaaaaaugggacuuaugacuauccaaaauacucagaggaagcaaaauuaaacagagaagaaauagaugggguaaagcuggaaucaacaaggauuuaccagauuuuggcgaucuauucaacugucgccaguucauugguacugguagucucccugggggcaaucaguuucuggaugugcucuaaugggucucuacaguguagaauauguauuuaa

SEQ ID NO: 36538 - RNA, 1701 nt, Artificial Sequence
  derived and/or modified CDS sequence (wt) from hemagglutinin__InfluenzaA__ADF10174
augaaggcaauacuaguaguucugcuauauacauuugcaaccgcaaaugcagacacauuauguauagguuaucaugcgaacaauucaacagacacuguagacacaguacuagaaaagaauguaacaguaacacacucuguuaaccuucuagaagacaagcauaacgggaaacuaugcaaacuaagagggguagccccauugcauuuggguaaauguaacauugcuggcuggauccugggaaauccagagugugaaucacucuccacagcaagcucaugguccuacauuguggaaacaucuaguucagacaauggaacguguuacccaggagauuucaucgauuaugaggagcuaagagagcaauugagcucagugucaucauuugaaagguuugagauauuccccaagacaaguucauggcccaaucaugacucgaacaaagguguaacggcagcauguccucaugcuggagcaaaaagcuucuacaaaaauuuaauauggcuaguuaaaaaaggaaauucauacccaaagcucagcaaauccuacauuaaugauaaagggaaagaaguccucgugcuauggggcauucaccauccaucuacuagugcugaccaacaaagucucuaucagaaugcagaugcauauguuuuuguggggacaucaagauacagcaagaaguucaagccggaaauagcaauaagacccaaagugagggaacaagaagggagaaugaacuauuacuggacacuaguagagccgggagacaaaauaacauucgaagcaacuggaaaucuagugguaccgagauaugcauucgcaauggaaagaaaugcuggaucugguauuaucauuucagauacaccaguccacgauugcaauacaacuugucagacacccaagggugcuauaaacaccagucucccauuucagaauauacauccgaucacaauuggaaaauguccaaaauauguaaaaagcacaaaauugagacuggccacaggauugaggaaugucccgucuauucaaucuagaggccuauuuggggccauugccgguuucauugaagggggguggacagggaugguagauggaugguacgguuaucaccaucaaaaugagcaggggucaggauaugcagccgaccugaagagcacacagaaugccauugacgagauuacuaacaaaguaaauucuguuauugaaaagaugaauacacaguucacagcaguagguaaagaguucaaccaccuggaaaaaagaauagagaauuuaaauaaaaaaguugaugaugguuuccuggacauuuggacuuacaaugccgaacuguugguucuauuggaaaaugaaagaacuuuggacuaccacgauucaaaugugaagaacuuauaugaaaggguaagaagccaguuaaaaaacaaugccaaggaaauuggaaacggcugcuuugaauuuuaccacaaaugcgauaacacgugcauggaaagugucaaaaaugggacuuaugacuauccaaaauacucagaggaagcaaaauuaaacagagaagaaauagaugggguaaagcuggaaucaacaaggauuuaccagauuuuggcgaucuauucaacugucgccaguucauugguacugguagucucccugggggcaaucaguuucuggaugugcucuaaugggucucuacaguguagaauauguauuuaa

SEQ ID NO: 36539 - RNA, 1701 nt, Artificial Sequence
  derived and/or modified CDS sequence (wt) from hemagglutinin__InfluenzaA__ADF10190
augaaggcaauacuaguaguucugcuauauacauuugcaaccgcaaaugcagacacauuauguauagguuaucaugcgaacaauucaacagacacuguagacacaguacuagaaaagaauguaacaguaacacacucuguuaaccuucuagaagacaagcauaacgggaaacuaugcaaacuaagagggguagccccauugcauuuggguaaauguaacauugcuggcuggauccugggaaauccagagugugaaucacucuccacagcaagcucaugguccuacauuguggaaacaucuaguucagacaauggaacguguuacccaggagauuucaucgauuaugaggagcuaagagagcaauugagcucagugucaucauuugaaagguuugagauauuccccaagacaaguucauggcccaaucaugacucgaacaaagguguaacggcagcauguccucaugcuggagcaaaaagcuucuacaaaaauuuaauauggcuaguuaaaaaaggaaauucauacccaaagcucagcaaauccuacauuaaugauaaagggaaagaaguccucgugcuauggggcauucaccauccaucuacuagugcugaccaacaaagucucuaucagaaugcagaugcauauguuuuuguggggacaucaagauacagcaagaaguucaagccggaaauagcaauaagacccaaagugagggaacaagaagggagaaugaacuauuacuggacacuaguagagccgggagacaaaauaacauucgaagcaacuggaaaucuagugguaccgagauaugcauucgcaauggaaagaaaugcuggaucugguauuaucauuucagauacaccaguccacgauugcaauacaacuugucagacacccaagggugcuauaaacaccagccucccauuucagaauauacauccgaucacaauuggaaaauguccaaaauauguaaaaagcacaaaauugagacuggccacaggauugaggaaugucccgucuauucaaucuagaggccuauuuggggccauugccgguuucauugaagggggguggacagggaugguagauggaugguacgguuaucaccaucaaaaugagcaggggucaggauaugcagccgaccugaagagcacacagaaugccauugacgagauuacuaacaaaguaaauucuguuauugaaaagaugaauacacaguucacagcaguagguaaagaguucaaccaccuggaaaaaagaauagagaauuuaaauaaaaaaguugaugaugguuuccuggacauuuggacuuacaaugccgaacuguugguucuauuggaaaaugaaagaacuuuggacuaccacgauucaaaugugaagaacuuauaugaaaggguaagaagccaguuaaaaaacaaugccaaggaaauuggaaacggcugcuuugaauuuuaccacaaaugcgauaacacgugcauggaaagugucaaaaaugggacuuaugacuauccaaaauacucagaggaagcaaaauuaaacagagaagaaauagaugggguaaagcuggaaucaacaaggauuuaccagauuuuggcgaucuauucaacugucgccaguucauugguacugguagucucccugggggcaaucaguuucuggaugugcucuaaugggucucuacaguguagaauauguauuuaa

SEQ ID NO: 36540 - RNA, 1701 nt, Artificial Sequence; identical to SEQ ID NO: 36385
  derived and/or modified CDS sequence (wt) from hemagglutinin__InfluenzaA__ADF10237

SEQ ID NO: 36541 - RNA, 1701 nt, Artificial Sequence; identical to SEQ ID NO: 36539
  derived and/or modified CDS sequence (wt) from hemagglutinin__InfluenzaA__ADF10262

SEQ ID NO: 36542 - RNA, 1701 nt, Artificial Sequence
  derived and/or modified CDS sequence (wt) from hemagglutinin__InfluenzaA__ADF10288
augaaggcaauacuaguaguucugcuauauacauuugcaaccgcaaaugcagacacauuauguauagguuaucaugcgaacaauucaacagacacuguagacacaguacuagaaaagaauguaacaguaacacacucuguuaaccuucuagaagacaagcauaacgggaaacuaugcaaacuaagagggguagccccauugcauuuggguaaauguaacauugcuggcuggauccugggaaauccagagugugaaucacucuccacagcaagcucaugguccuacauuguggaaacaucuaguucagacaauggaacguguuacccaggagauuucaucgauuaugaggagcuaagagagcaauugagcucagugucaucauuugaaagguuugagauauuccccaagacaaguucauggcccaaucaugacucgaacaaagguguaacggcagcauguccucaugcuggagcaaaaagcuucuacaaaaauuuaauauggcuaguuaaaaaaggaaauucauacccaaagcucagcaaauccuacauuaaugauaaagggaaagaaguccucgugcuauggggcauucaccauccaucuacuagugcugaccaacaaagucucuaucagaaugcagaugcauauguuuuuguggggacaucaagauacagcaagaaguucaagccggaaauagcaauaagacccaaagugagggaacaagaagggagaaugaacuauuacuggacacuaguagagccgggagacaaaauaacauucgaagcaacuggaaaucuagugguaccgagauaugcauucgcaauggaaagaaaugcuggaucugguauuaucauuucagauacaccaguccacgauugcaauacaacuugucagacacccaagggugcuauaaacaccagccucccauuucagaauauacauccgaucacaauuggaaaauguccaaaauauguaaaaagcacaaaauugagacuggccacaggauuaaggaaugucccgucuauucaaucuagaggccuauuuggggccauugccgguuucauugaagggggguggacagggaugguagauggaugguacgguuaucaccaucaaaaugagcaggggucaggauaugcagccgaccugaagagcacacagaaugccauugacgagauuacuaacaaaguaaauucuguuauugaaaagaugaauacacaguucacagcaguagguaaagaguucaaccaccuggaaaaaagaauagagaauuuaaauaaaaaaguugaugaugguuuccuggacauuuggacuuacaaugccgaacuguugguucuauuggaaaaugaaagaacuuuggacuaccacgauucaaaugugaagaacuuauaugaaaggguaagaagccaguuaaaaaacaaugccaaggaaauuggaaacggcugcuuugaauuuuaccacaaaugcgauaacacgugcauggaaagugucaaaaaugggacuuaugacuauccaaaauacucagaggaagcaaaauuaaacagagaagaaauagaugggguaaagcuggaaucaacaaggauuuaccagauuuuggcgaucuauucaacugucgccaguucauugguacugguagucucccugggggcaaucaguuucuggaugugcucuaaugggucucuacaguguagaguaugcauuuaa

SEQ ID NO: 36543 - RNA, 1701 nt, Artificial Sequence
  derived and/or modified CDS sequence (wt) from hemagglutinin__InfluenzaA__ADF10302
augaaggcaauacuaguaguucugcuauauacauuugcaaccgcaaaugcagacacauuauguauagguuaucaugcgaacaauucaacagacacuguagacacaguacuagaaaagaauguaacaguaacacacucuguuaaccuucuagaagacaagcauaacgggaaacuaugcaaacuaagagggguagccccauugcauuuggguaaauguaacauugcuggcuggauccugggaaauccagagugugaaucacucuccacagcaagcucaugguccuacauuguggaaacaucuaguucagacaauggaacguguuacccaggagauuucaucgauuaugaggagcuaagagagcaauugagcucagugucaucauuugaaagguuugagauauuccccaagacaaguucauggcccaaucaugacucgaacaaagguguaacggcagcauguccucaugcuggagcaaaaagcuucuacaaaaauuuaauauggcuaguuaaaaaaggaaauucauacccaaagcucagcaaauccuacauuaaugauaaagggaaagaaguccucgugcuauggggcauucaccauccaucuacuagugcugaccaacaaagucucuaucagaaugcagaugcauauguuuuuguggggacaucaagauacagcaagaaguucaagccggaaauagcaauaagacccaaagugagggaacaagaagggagaaugaacuauuacuggacacuaguagagccgggagacaaaauaacauucgaagcaacuggaaaucuagugguaccgagauaugcauucgcaauggaaagaaaugcuggaucugguauuaucauuucagauacaccaguccacgauugcaauacaacuugucagacacccaagggugccauaaacaccagccucccauuucagaauauacauccgaucacaauuggaaaauguccaaaauauguaaaaagcacaaaauugagacuggccacaggauuaaggaaugucccgucuauucaaucuagaggccuauuuggggccauugccgguuucauugaagggggguggacagggaugguagauggaugguacgguuaucaccaucaaaaugagcaggggucaggauaugcagccgaccugaagagcacacagaaugccauugacgagauuacuaacaaaguaaauucuguuauugaaaagaugaauacacaguucacagcaguagguaaagaguucaaccaccuggaaaaaagaauagagaauuuaaauaaaaaaguugaugaugguuuccuggacauuuggacuuacaaugccgaacuguugguucuauuggaaaaugaaagaacuuuggacuaccacgauucaaaugugaagaacuuauaugaaaagguaagaagccaguuaaaaaacaaugccaaggaaauuggaaacggcugcuuugaauuuuaccacaaaugcgauaacacgugcauggaaagugucaaaaaugggacuuaugacuacccaaaauacucagaggaagcaaaauuaaacagagaagaaauagaugggguaaagcuggaaucaacaaggauuuaccagauuuuggcgaucuauucaacugucgccaguucauugguacugguagucucccugggggcaaucaguuucuggaugugcucuaaugggucucuacaguguagaguaugcauuuaa

SEQ ID NO: 36544 - RNA, 1701 nt, Artificial Sequence; identical to SEQ ID NO: 36385
  derived and/or modified CDS sequence (wt) from hemagglutinin__InfluenzaA__ADF10335

SEQ ID NO: 36545 - RNA, 1701 nt, Artificial Sequence; identical to SEQ ID NO: 36385
  derived and/or modified CDS sequence (wt) from hemagglutinin__InfluenzaA__ADF10359

SEQ ID NO: 36546 - RNA, 1701 nt, Artificial Sequence; identical to SEQ ID NO: 36539
  derived and/or modified CDS sequence (wt) from hemagglutinin__InfluenzaA__ADF10369

SEQ ID NO: 36547 - RNA, 1701 nt, Artificial Sequence; identical to SEQ ID NO: 36539
  derived and/or modified CDS sequence (wt) from hemagglutinin__InfluenzaA__ADF10390

SEQ ID NO: 36548 - RNA, 1701 nt, Artificial Sequence; identical to SEQ ID NO: 36385
  derived and/or modified CDS sequence (wt) from hemagglutinin__InfluenzaA__ADF10528

SEQ ID NO: 36549 - RNA, 1701 nt, Artificial Sequence
  derived and/or modified CDS sequence (wt) from hemagglutinin__InfluenzaA__ADF10598
augaaggcaauacuaguaguucugcuauauacauuugcaaccgcaaaugcagacacauuauguauagguuaucaugcgaacaauucaacagacacuguagacacaguacuagaaaagaauguaacaguaacacacucuguuaaccuucuagaagacaagcauaacgggaaacuaugcaaacuaagagggguagccccauugcauuuggguaaauguaacauugcuggcuggauccugggaaauccagagugugaaucacucuccacagcaagcucaugguccuacauuguggaaacaucuaguucagacaauggaacguguuacccaggagauuucaucgauuaugaggagcuaagagagcaauugagcucagugucaucauuugaaagguuugagauauuccccaagacaaguucauggcccaaucaugacucgaacaaagguguaacggcagcauguccucaugcuggagcaaaaagcuucuacaaaaauuuaauauggcuaguuaaaaaagggaauucauacccaaagcucagcaaauccuacauuaaugauaaagggaaagaaguccucgugcuauggggcauucaccauccaucuacuagugcugaccaacaaagucucuaucagaaugcagaugcauauguuuuuguggggacaucaagauacagcaagaaguucaagccggaaauagcaauaagacccaaagugagggaacaagaagggagaaugaacuauuacuggacacuaguagagccgggagacaaaauaacauucgaagcaacuggaaaucuagugguaccgagauaugcauucgcaauggaaagaaaugcuggaucugguauuaucauuucagauacaccaguccacgauugcaauacaacuugucagacacccaagggugcuauaaacaccagccucccauuucagaauauacauccgaucacaauuggaaaauguccaaaauauguaaaaagcacaaaauugagacuggccacaggauugaggaaugucccgucuauucaaucuagaggccuauuuggggccauugccgguuucauugaagggggguggacagggaugguagauggaugguacgguuaucaccaucaaaaugagcaggggucaggauaugcagccgaccugaagagcacacagaaugccauugacgagauuacuaacaaaguaaauucuguuauugaaaagaugaauacacaguucacagcaguagguaaagaguucaaccaccuggaaaaaagaauagagaauuuaaauaaaaaaguugaugaugguuuccuggacauuuggacuuacaaugccgaacuguugguucuauuggaaaaugaaagaacuuuggacuaccacgauucaaaugugaagaacuuauaugaaaggguaagaagccaguuaaaaaacaaugccaaggaaauuggaaacggcugcuuugaauuuuaccacaaaugcgauaacacgugcauggaaagugucaaaaaugggacuuaugacuauccaaaauacucagaggaagcaaaauuaaacagagaagaaauagaugggguaaagcuggaaucaacaaggauuuaccagauuuuggcgaucuauucaacugucgccaguucauugguacugguagucucccugggggcaaucaguuucuggaugugcucuaaugggucucuacaguguagaauauguauuuaa

SEQ ID NO: 36550 - RNA, 1701 nt, Artificial Sequence; identical to SEQ ID NO: 36539
  derived and/or modified CDS sequence (wt) from hemagglutinin__InfluenzaA__ADF10670

SEQ ID NO: 36551 - RNA, 1701 nt, Artificial Sequence; identical to SEQ ID NO: 36539
  derived and/or modified CDS sequence (wt) from hemagglutinin__InfluenzaA__ADF10724

SEQ ID NO: 36552 - RNA, 1701 nt, Artificial Sequence; identical to SEQ ID NO: 36543
  derived and/or modified CDS sequence (wt) from hemagglutinin__InfluenzaA__ADF10757

SEQ ID NO: 36553 - RNA, 1701 nt, Artificial Sequence
  derived and/or modified CDS sequence (wt) from hemagglutinin__InfluenzaA__ADF10828
augaaggcaauacuaguaguucugcuauauacauuugcaaccgcaaaugcagacacauuauguauagguuaucaugcgaacaauucaacagacacuguagacacaguacuagaaaagaauguaacaguaacacacucuguuaaccuucuagaagacaagcauaacgggaaacuaugcaaacuaagagggguagccccauugcauuuggguaaauguaacauugcuggcuggauccugggaaauccagagugugaaucacucuccacagcaagcucaugguccuacauuguggaaacaucuaguucagacaauggaacguguuacccaggagauuucaucgauuaugaggagcuaagagagcaauugagcucagugucaucauuugaaagguuugagauauuccccaagacaaguucauggcccaaucaugacucgaacaaagguguaacggcagcauguccucaugcuggagcaaaaagcuucuacaaaaauuuaauauggcuaguuaaaaaagggaauucauacccaaagcucagcaaauccuacauuaaugauaaagggaaagaaguccucgugcuauggggcauucaccauccaucuacuaguacugaccaacaaagucucuaucagaaugcagaugcauauguuuuuguggggacaucaagauacagcaagaaguucaagccggaaauagcaauaagacccaaagugagggaucaagaagggagaaugaacuauuacuggacacuaguagagccgggagacaaaauaacauucgaagcaacuggaaaucuagugguaccgagauaugcauucgcaauggaaagaaaugcuggaucugguauuaucauuucagauacaccaguccacgauugcaauacaacuugucagacacccaagggugcuauaaacaccagccucccauuucagaauauacauccgaucacaauuggaaaauguccaaaauauguaaaaagcacaaaauugagacuggccacaggauugaggaaugucccgucuauucaaucuagaggccuauuuggggccauugccgguuucauugaagggggguggacagggaugguagauggaugguacgguuaucaccaucaaaaugagcaggggucaggauaugcagccgaccugaagagcacacagaaugccauugacaagauuacuaacaaaguaaauucuguuauugaaaagaugaauacacaguucacagcaguagguaaagaguucaaccaccuggaaaaaagaauagagaauuuaaauaaaaaaguugaugaugguuuccuggacauuuggacuuacaaugccgaacuguugguucuauuggaaaaugaaagaacuuuggacuaccacgauucaaaugugaagaacuuauaugaaaagguaagaagccaguuaaaaaacaaugccaaggaaauuggaaacggcugcuuugaauuuuaccacaaaugcgauaacacgugcauggaaagugucaaaaaugggacuuaugacuacccaaaauacucagaggaagcaaaauuaaacagagaagaaauagaugggguaaagcuggaaucaacaaggauuuaccagauuuuggcgaucuauucaacugucgccaguucauugguacugguagucucccugggggcaaucaguuucuggaugugcucuaaugggucucuacaguguagaauauguauuuaa

SEQ ID NO: 36554 - RNA, 1701 nt, Artificial Sequence
  derived and/or modified CDS sequence (wt) from hemagglutinin__InfluenzaA__ADF10874
augaaggcaauacuaguaguucugcuauauacauuugcaaccgcaaaugcagacacauuauguauagguuaucaugcgaacaauucaacagacacuguagacacaguacuagaaaagaauguaacaguaacacacucuguuaaccuucuagaagacaagcauaacgggaaacuaugcaaacuaagagggguagccccauugcauuuggguaaauguaacauugcuggcuggauccugggaaauccagagugugaaucacucuccacagcaagcucaugguccuacauuguggaaacaucuaguucagacaauggaacguguuacccaggagauuucaucgauuaugaggagcuaagagagcaauugagcucagugucaucauuugaaagguuugagauauuccccaagacaaguucauggcccaaucaugacucgaacaaagguguaacggcagcauguccucaugcuggagcaaaaagcuucuacaaaaauuuaauauggcuaguuaaaaaaggaaauucauacccaaagcucagcaaauccuacauuaaugauaaagggaaagaaguccucgugcuauggggcauucaccauccaucuacuagugcugaccaacaaagucucuaucagaaugcagaugcauauguuuuuguggggacaucaagauacagcaagaaguucaagccggaaauagcaauaagacccaaagugagggaucaagaagggagaaugaacuauuacuggacacuaguagagccgggagacaaaauaacauucgaagcaacuggaaaucuagugguaccgagauaugcauucgcaauggaaagaaaugcuggaucugguauuaucauuucagauacaccaguccacgauuguaauacaacuugucagacacccaagggugcuauaaacaccagccucccauuucagaauauacauccgaucacaauuggaaaauguccaaaauauguaaaaagcacaaaauugagacuggccacaggauugaggaaugucccgucuauucaaucuagaggccuauuuggggccauugccgguuucauugaagggggguggacagggaugguagauggaugguacgguuaucaccaucaaaaugagcaggggucaggauaugcagccgaccugaagagcacacagaaugccauugacgagauuacuaacaaaguaaauucuguuauugaaaagaugaauacacaguucacagcaguagguaaagaguucaaccaccuggaaaaaagaauagagaauuuaaauaaaaaaguugaugaugguuuccuggacauuuggacuuacaaugccgaacuguugguucuauuggaaaaugaaagaacuuuggacuaccacgauucaaaugugaaaaacuuauaugaaaagguaagaagccaguuaaaaaacaaugccaaggaaauuggaaacggcugcuuugaauuuuaccacaaaugcgauaacacgugcauggaaagugucaaaaaugggacuuaugacuacccaaaauacucagaggaagcaaaauuaaacagagaagaaauagaugggguaaagcuggaaucaacaaggauuuaccagauuuuggcgaucuauucaacugucgccaguucauugguacugguagucucccugggggcaaucaguuucuggaugugcucuaaugggucucuacaguguagaauauguauuuaa

SEQ ID NO: 36555 - RNA, 1701 nt, Artificial Sequence; identical to SEQ ID NO: 35304
  derived and/or modified CDS sequence (wt) from hemagglutinin__InfluenzaA__ADF10929

SEQ ID NO: 36556 - RNA, 1701 nt, Artificial Sequence; identical to SEQ ID NO: 35304
  derived and/or modified CDS sequence (wt) from hemagglutinin__InfluenzaA__ADF10996

SEQ ID NO: 36557 - RNA, 1701 nt, Artificial Sequence
  derived and/or modified CDS sequence (wt) from hemagglutinin__InfluenzaA__ADF27367
augaaggcaauacuaguaguucugcuauauacauuugcaaccgcaaaugcagacacauuauguauagguuaucaugcgaacaauucaacagacacuguagacacaguacuagaaaagaauguaacaguaacacacucuguuaaccuucuagaagacaagcauaacgggaaacuaugcaaacuaagagggguagccccauugcauuuggguaaauguaacauugcuggauggauccugggaaauccagagugugaaucacucuccacagcaagcucaugguccuacauuguggaaacaucuaguucagacaauggaacguguuacccaggagauuucauugauuaugaggagcuaagagagcaauugagcucagugucaucauuugaaagguuugagauauuccccaagacaaguucauggcccaaucaugacucgaacaaagguguaacggcagcauguccucaugcuggagcaaaaagcuucuacaaaaauuuaauauggcuaguuaaaaaaggaaauucauacccaaagcucagcaaauccuacauuaaugauaaagggaaagaaguccucgugcuauggggcauucaccauccaucuacuagugcugaccaacaaagucucuaucagaaugcagaugcauauguuuuuguggggacaucaagauacagcaagaaguucaagccggaaauagcaauaagacccaaagugagggaucaagaagggagaaugaacuauuacuggacacuaguagagccgggagacaaaauaacauucgaagcaacuggaaaucuagugguaccgagauaugcauucgcaauggaaagaaaugcuggaucugguauuaucauuucagauacaccaguccacgauugcaauacaacuugucagacacccaagggugcuauaaacaccagccucccauuucagaauauacauccgaucacaauuggaaaauguccaaaauauguaaaaagcacaaaauugagacuggccacaggauugaggaaugucccgucuauucaaucuagaggccuauuuggggccauugccgguuucauugaagggggguggacagggaugguagauggaugguacgguuaucaccaucaaaaugagcaggggucaggauaugcagccgaccugaagagcacacagaaugccauugacgagauuacuaacaaaguaaauucuguuauugaaaagaugaauacacaguucacagcaguagguaaagaguucaaccaccuggaaaaaagaauagagaauuuaaauaaaaaaguugaugaugguuuccuggacauuuggacuuacaaugccgaacuguugguucuauuggaaaaugaaagaacuuuggacuaccacgauucaaaugugaagaacuuauaugaaaagguaagaagccaguuaaaaaacaaugccaaggaaauuggaaacggcugcuuugaauuuuaccacaaaugcgauaacacgugcauggaaagugucaaaaaugggacuuaugacuacccaaaauacucagaggaagcaaaauuaaacagagaagaaauagaugggguaaagcuggaaucaacaaggauuuaccagauuuuggcgaucuauucaacugucgccaguucauugguacugguagucucccugggggcaaucaguuucuggaugugcucuaaugggucucuacaguguagaauauguauuuaa

SEQ ID NO: 36558 - RNA, 1701 nt, Artificial Sequence; identical to SEQ ID NO: 34681
  derived and/or modified CDS sequence (wt) from hemagglutinin__InfluenzaA__ADF27369

SEQ ID NO: 36559 - RNA, 1701 nt, Artificial Sequence
  derived and/or modified CDS sequence (wt) from hemagglutinin__InfluenzaA__ADF27370
augaaggcaauacuaguaauucugcuauauacauuugcaaccgcaaaugcagacacauuauguauagguuaucaugcgaacaauucaacagacacuguagacacaguacuagaaaagaauguaacaguaacacacucuguuaaccuucuagaagacaagcauaacgggaaacuaugcaaacuaagagggguagccccauugcauuuggguaaauguaacauugcuggcuggauccugggaaauccagagugugaaucacucuccacagcaagcucaugguccuacauuguggaaacaucuaguucagacaauggaacguguuacccaggagauuucaucgauuaugaggagcuaagagagcaauugagcucagugucaucauuugaaagguuugagauauuccccaagacaaguucauggcccaaucaugacucgaacaaagguguaacggcagcauguccucaugcuggagcaaaaagcuucuacaaaaauuuaauauggcuaguuaaaaaaggaaauucauacccaaagcucagcaaauccuacauuaaugauaaagggaaagaaguccucgugcuauggggcauucaccauccaucuacuagugcugaccaacaaagucucuaucagaaugcagaugcauauguuuugguggggacaucaagauacagcaagaaguucaagccggaaauagcaauaagacccaaagugagggaucaagaagggagaaugaacuauuacuggacacuaguagagccgggagacaaaauaacauucgaagcaacuggaaaucuagugguaccgagauaugcauucgcaauggaaagaaaugcuggaucugguauuaucauuucagauacaccaguccacgauugcaauacaacuugucagacacccaagggugcuauaaacaccagccucccauuucagaauauacauccgaucacaauuggaaaauguccaaaauauguaaaaagcacaaaauugagacuggccacaggauugaggaaugucccgucuauucaaucuagaggccuauuuggggcuauugccgguuucauugaagggggguggacagggaugguagauggaugguacgguuaucaccaucaaaaugagcaggggucaggauaugcagccgaccugaagagcacacagaaugccauugacaagauuacuaacaaaguaaauucuguuauugaaaagaugaauacacaguucacagcaguagguaaagaguucaaccaccuggaaaaaagaauagagaauuuaaauaaaaaaguugaugaugguuuccuggacauuuggacuuacaaugccgaacuguugguucuauuggaaaaugaaagaacuuuggacuaccacgauucaaaugugaagaacuuauaugaaaagguaagaagccaguuaaaaaacaaugccaaggaaauuggaaacggcugcuuugaauuuuaccacaaaugcgauaacacgugcauggaaagugucaaaaaugggacuuaugacuacccaaaauacucagaggaagcaaaauuaaacagagaagaaauagaugggguaaagcuggaaucaacaaggauuuaccagauuuuggcgaucuauucaacugucgccaguucauugguacugguagucucccugggggcaaucaguuucuggaugugcucuaaugggucucuacaguguagaauauguauuuaa

SEQ ID NO: 36560 - RNA, 1701 nt, Artificial Sequence; identical to SEQ ID NO: 35853
  derived and/or modified CDS sequence (wt) from hemagglutinin__InfluenzaA__ADF27371

SEQ ID NO: 36561 - RNA, 1701 nt, Artificial Sequence
  derived and/or modified CDS sequence (wt) from hemagglutinin__InfluenzaA__ADF27372
augaaggcaauacuaguaguucugcuauauacauuugcaaccgcaaaugcagacacauuauguauagguuaucauacgaacaauucaacagacacuguagacacaguacuagaaaagaauguaacaguaacacacucuguuaaccuucuagaagacaagcauaacgggaaacuaugcaaacuaagagggguagccccauugcauuuggguaaauguaacauugcuggcuggauccugggaaauccagagugugaaucacucuccacagcaagcucaugguccuacauuguggaaacaucuaguucagacaauggaacguguuacccaggagauuucaucgauuaugaggagcuaagagagcaauugagcucagugucaucauuugaaagguuugagauauuccccaagacaaguucauggcccaaucaugacucgaacaaagguguaacggcagcauguccucaugcuggagcaaaaagcuucuacaaaaauuuaauauggcuaguuaaaaaaggaaauucauacccaaagcucagcaaauccuacauuaaugauaaagggaaagaaguccucgugcuauggggcauucaccauccaucuacuagugcugaccaacaaagucucuaucagaaugcagaugcauauguuuuuguggggacaucaagauacagcaagaaguucaagccggaaauagcaauaagacccaaagugagggaucaagaagggagaaugaacuauuacuggacacuaguagagccgggagacaaaauaacauucgaagcaacuggaaaucuagugguaccgagauaugcauucgcaauggaaagaaaugcuggaucugguauuaucauuucagauacaccaguccacgauugcaauacaacuugucagacacccaagggugcuauaaacaccagccucccauuucagaauauacauccgaucacaauuggaaaauguccaaaauauguaaaaagcacaaaauugagacuggccacaggauugaggaaugucccgucuauucaaucuagaggccuauuuggggccauugccgguuucauugaagggggguggacagggaugguagauggaugguacgguuaucaccaucaaaaugagcaggggucaggauaugcagccgaccugaagagcacacagaaugccauugacaagauuacuaacaaaguaaauucuguuauugaaaagaugaauacacaguucacagcaguagguaaagaguucaaccaccuggaaaaaagaauagagaauuuaaauaaaaaaguugaugaugguuuccuggacauuuggacuuacaaugccgaacuguugguucuauuggaaaaugaaagaacuuuggacuaccacgauucaaaugugaagaacuuauaugaaaagguaagaagccaguuaaaaaacaaugccaaggaaauuggaaacggcugcuuugaauuuuaccacaaaugcgauaacacgugcauggaaagugucaaaaaugggacuuaugacuacccaaaauacucagaggaagcaaaauuaaacagagaagaaauagaugggguaaagcuggaaucaacaaggauuuaccagauuuuggcgaucuauucaacugucgccaguucauugguacugguagucucccugggggcaaucaguuucuggaugugcucuaaugggucucuacaguguagaauauguauuuaa

SEQ ID NO: 36562 - RNA, 1701 nt, Artificial Sequence
  derived and/or modified CDS sequence (wt) from hemagglutinin__InfluenzaA__ADF27373
auggaggcaauacuaguaguucugcuauauacauuugcaaccgcaaaugcagacacauuauguauagguuaucaugcgaacaauucaacagacacuguagacacaguacuagaaaagaauguaacaguaacacacucuguuaaccuucuagaagacaagcauaacgggaaacuaugcaaacuaagagggguagccccauugcauuuggguaaauguaacauugcuggcuggauccugggaaauccagagugugaaucacucuccacagcaagcucaugguccuacauuguggaaacaucuaguucagacaauggaacguguuacccaggagauuucaucgauuaugaggagcuaauagagcaauugagcucagugucaucauuugaaagguuugagauauuccccaagacaaguucauggcccaaucaugacucgaacaaagguguaacggcagcauguccucaugcuggagcaaaaagcuucuacaaaaauuuaauauggcuaguuaaaaaaggaaauucauacccaaagcucagcaaauccuacauuaaugauaaagggaaagaaguccucgugcuauggggcauucaccauccaucuacuagugcugaccaacaaagucucuaucagaaugcagaugcauauguuuuuguggggucaucaagauacagcaagaaguucaagccggaaauagcaauaagacccaaagugagggaucaagaagggagaaugaacuauuacuggacacuaguagagccgggagacaaaauaacauucgaagcaacugggaaucuagugguaccgagauaugcauucgcaauggaaagaaaugcuggaucugguauuaucauuucagauacaccaguccacgauugcaauacaacuugucagacacccaagggugcuauaaacaccagccucccauuucauaauauacauccgaucacaauuggaaaauguccaaaauauguaaaaagcacaaaauugagacuggccacaggauugaggaaugucccgucuauucaaacuagaggccuauuuggggccauugccgguuucauugaagggggguggacagggaugguggauggaugguacgguuaucaccaucaaaaugagcaggggucaggauaugcagccgaccugaagagcacacagaaugccauugacgagauuacuaacaaaguaaauucuguuauugaaaagaugaauacacaguucacagcaguagguaaagaguucaaccaccuggaaaaaagaauagagaauuuaaauaaaaaaguugaugaugguuuccuggacauuuggacuuacaaugccgaacuguugguucuauuggaaaaugaaagaacuuuggacuaccacgauucaaaugugaagaacuuauaugaaaagguaagaagccaguuaaaaaacaaugccaaggaaauuggaaacggcugcuuugaauuuuaccacaaaugcgauaacacgugcauggaaagugucaaaaaugggacuuaugacuacccaaaauacucagaggaagcaaaauuaaacagagaagaaauagaugggguaaagcuggaaucaacaaggauuuaccagauuuuggcgaucuauucaacugucgccaguucauugguacugguagucucccugggggcaaucaguuucuggaugugcucuaaugggucucuacaguguagaauauguauuuaa

SEQ ID NO: 36563 - RNA, 1701 nt, Artificial Sequence
  derived and/or modified CDS sequence (wt) from hemagglutinin__InfluenzaA__ADF27374
auggaggcaauacuaguaguucugcuauauacauuugcaaccgcaaaugcagacacauuauguauagguuaucaugcgaacaauucaacagacacuguagacacaguacuagaaaagaauguaacaguaacacacucuguuaaccuucuagaagacaagcauaacgggaaacuaugcaaacuaagagggguagccccauugcauuuggguaaauguaacauugcuggcuggauccugggaaauccagagugugaaucacucuccacagcaagcucaugguccuacauuguggaaacaucuaguucagacaauggaacguguuacccaggagauuucaucgauuaugaggagcuaagagagcaauugagcucagugucaucauuugaaagguuugagauauuccccaagacaaguucauggcccaaucaugacucgaacaaagguguaacggcagcauguccucaugcuggagcaaaaagcuucuacaaaaauuuaauauggcuaguuaaaaaaggaaauucauacccaaagcucagcaaauccuacauuaaugauaaagggaaagaaguccucgugcuauggggcauucaccauccaucuacuagugcugaccaacaaagucucuaucagaaugcagaugcauauguuuuuguggggucaucaagauacagcaagaaguucaagccggaaauagcaauaagacccaaagugagggaucaagaagggagaaugaacuauuacuggacacuaguagagccgggagacaaaauaacauucgaagcaacugggaaucuagugguaccgagauaugcauucgcaauggaaagaaaugcuggaucugguauuaucauuucagauacaccaguccacgauugcaauacaacuugucagacacccaagggugcuauaaacaccagccucccauuucauaauauacauccgaucacaauuggaaaauguccaaaauauguaaaaagcacaaaauugagacuggccacaggauugaggaaugucccgucuauucaaucuagaggccuauuuggggccauugccgguuucauugaagggggguggacagggaugguggauggaugguacgguuaucaccaucaaaaugagcaggggucaggauaugcagccgaccugaagagcacacagaaugccauugacgagauuacuaacaaaguaaauucuguuauugaaaagaugaauacacaguucacagcaguagguaaagaguucaaccaccuggaaaaaagaauagagaauuuaaauaaaaaaguugaugaugguuuccuggacauuuggacuuacaaugccgaacuguugguucuauuggaaaaugaaagaacuuuggacuaccacgauucaaaugugaagaacuuauaugaaaagguaagaagccaguuaaaaaacaaugccaaggaaauuggaaacggcugcuuugaauuuuaccacaaaugcgauaacacgugcauggaaagugucaaaaaugggacuuaugacuacccaaaauacucagaggaagcaaaauuaaacagagaagaaauagaugggguaaagcuggaaucaacaaggauuuaccagauuuuggcgaucuauucaacugucgccaguucauugguacugguagucucccugggggcaaucaguuucuggaugugcucuaaugggucucuacaguguagaauauguauuuaa

SEQ ID NO: 36564 - RNA, 1701 nt, Artificial Sequence
  derived and/or modified CDS sequence (wt) from hemagglutinin__InfluenzaA__ADF27375
auggaggcaauacuaguaguucugcuauauacauuugcaaccgcaaaugcagacacauuauguauagguuaucaugcgaacaauucaacagacacuguagacacaguacuagaaaagaauguaacaguaacacacucuguuaaccuucuagaagacaagcauaacgggaaacuaugcaaacuaagagggguagccccauugcauuuggguaaauguaacauugcuggcuggauccugggaaauccagagugugaaucacucuccacagcaagcucaugguccuacauuguggaaacaucuaguucagacaauggaacguguuacccaggagauuucaucgauuaugaggagcuaagagagcaauugaguucagugucaucauuugaaagguuugagauauuccccaagacaaguucauggcccaaucaugacucgaacaaagguguaacggcagcauguccucaugcuggagcaaaaagcuucuacaaaaauuuaauauggcuaguuaaaaaaggaaauucauacccaaagcucagcaaauccuacauuaaugauaaagggaaagaaguccucgugcuauggggcauucaccauccaucuacuagugcugaccaacaaagucucuaucagaaugcagaugcauauguuuuuguggggucaucaagauacagcaagaaguucaagccggaaauagcaauaagacccaaagugagggaucaagaagggagaaugaacuauuacuggacacuaguagagccgggagacaaaauaacauucgaagcaacugggaaucuagugguaccgagauaugcauucgcaauggaaagaaaugcuggaucugguauuaucauuucagauacaccaguccacgauugcaauacaacuugucagacacccaagggugcuauaaacaccagccucccauuucauaauauacauccgaucacaauuggaaaauguccaaaauauguaaaaagcacaaaauugagacuggccacaggauugaggaaugucccgucuauucaaucuagaggccuauuuggggccauugccgguuucauugaagggggguggacagggaugguggauggaugguacgguuaucaccaucaaaaugagcaggggucaggauaugcagccgaccagaagagcacacagaaugccauugacgagauuacuaacaaaauaaauucuguuauugaaaagaugaauacacaguucacagcaguaggcaaagaguucaaccaccuagaaaaaagaauagagaauuuaaauaaaaaaguugaugaugguuuccuggacauuuggacuuacaaugccgaacuguugguucuauuggaaaaugaaagaacuuuggacuaccacgauucaaaugugaagaacuuauaugaaaagguaagaagccaguuaaaaaacaaugccaaggaaauuggaaacggcugcuuugaauuuuaccacaaaugcgauaacacgugcauggaaagugucaaaaaugggacuuaugacuacccaaaauacucagaggaagcaaaauuaaacagagaagaaauagaugggguaaagcuggaaucaacaaggauuuaccagauuuuggcgaucuauucaacugucgccaguucauugguacugguagucucccugggggcaaucaguuucuggaugugcucuaaugggucucuacaguguagaauauguauuuaa

SEQ ID NO: 36565 - RNA, 1701 nt, Artificial Sequence
  derived and/or modified CDS sequence (wt) from hemagglutinin__InfluenzaA__ADF27376
augaaggcaauacuaguaguucugcuauauacauuuguaaccgcaaaugcagacacauuauguauagguuaucaugcgaacaauucaacagacacuguagacacaguacuagaaaagaauguaacaguaacacacucuguuaaccuucuagaagacaagcauaacgggaaacuaugcaaacuaagagggguagccccauugcauuuggguaaauguaacauugcuggcuggauccugggaaauccagagugugaaucacucuccacagcaagcucaugguccuacauuguggaaacaucuaauucagacaauggaacguguuacccaggagauuucaucgauuaugaggagcuaagagagcaauugagcucagugucaucauuugaaagguuugagauauuccccaagacaaguucauggcccaaucaugacucgaacaaagguguaacggcagcauguccucaugcuggagcaaaaagcuucuacaaaaauuuaauauggcuaguuaaaaaaggaaauucauacccaaagcucagcaaauccuacauuaaugauaaagggaaagaaguccucgugcuauggggcauucaccauccaucuacuagugcugaccaacaaagucucuaucagaaugcagaugcauauguuuuuguggggacaucaagauacagcaagaaguucaagccggaaauagaaauaagacccaaagugagggaucaagaagggagaaugaacuauuacuggacacuaguagagccgggagacaaaauaacauucgaagcaacuggaaaucuagugguaccgagauaugcauucgcaauggaaagaaaugcuggaucugguauuaucauuucagauacaccaguccacgauugcaauacaacuugucagacacccaagggugcuauaaacaccagccucccauuucagaauauacauccgaucacaauuggaaaauguccaaaauauguaaaaagcacaaaauugagacuggccacaggauugaggaaugucccgucuauucaaucuagaggccuauuuggggccauugccgguuucauugaagggggguggacagggaugguagauggaugguacgguuaucaccaucaaaaugagcaggggucaggauaugcagccgaccugaagagcacacagaaugccauugacaagauuacuaacaaaguaaauucuguuauugaaaagaugaauacacaguucacagcaguagguaaagaguucaaccaccuggaaaaaagaauagagaauuuaaauaaaaaaguugaugaugguuuccuggacauuuggacuuacaaugccgaacuguugguucuauuggaaaaugaaagaacuuuggacuaccacgauucaaaugugaagaacuuauaugaaaagguaaggagccaguuaaaaaacaaugccaaggaaauuggaaacggcugcuuugaauuuuaccacaaaugcgauaacacgugcauggaaagugucaaaaaugggacuuaugacuacccaaaauacucagaggaagcaaaauuaaacagagaagaaauagaugggguaaagcuggaaucaacaaggauuuaccagauuuuggcgaucuauucaacugucgccaguucauugguacugguagucucccugggggcaaucaguuucuggaugugcucuaaugggucucuacaguguagaauauguauuuaa

SEQ ID NO: 36566 - RNA, 1701 nt, Artificial Sequence
  derived and/or modified CDS sequence (wt) from hemagglutinin__InfluenzaA__ADF27378
augaaggcaauacuaguaguucugcuauauacauuuguaaccgcaaaugcagacacauuauguauagguuaucaugcgaacaauucaacagacacuguagacacaguacuagaaaagaauguaacaguaacacacucuguuaaccuucuagaagacaagcauaacgggaaacuaugcaaacuaagagggguagccccauugcauuuggguaaauguaacauugcuggcuggauccugggaaauccagagugugaaucacucuccacagcaagcucaugguccuacauuguggaaacaucuaauucagacaauggaacguguuacccaggagauuucaucgauuaugaggagcuaagagagcaauugagcucagugucaucauuugaaagguuugagauauuccccaagacaaguucauggcccaaucaugacucgaacaaagguguaacggcagcauguccucaugcuggagcaaaaagcuucuacaaaaauuuaauauggcuaguuaaaaaaggaaauucauacccaaagcucagcaaauccuacauuaaugauaaagggaaagaaguccucgugcuauggggcauucaccauccaucuacuagugcugaccaacaaagucucuaucagaaugcagaugcauauguuuuuguggggacaucaagauacagcaagaaguucaagccggaaauagcaauaagacccaaagugagggaucaagaagggagaaugaacuauuacuggacacuaguagagccgggagacaaaauaacauucgaagcaacuggaaaucuagugguaccgagauaugcauucgcaauggaaagaaaugcuggaucugguauuaucauuucagauacaccaguccacgauugcaauacaacuugucagacacccaagggugcuauaaacaccagccucccauuucagaauauacauccgaucacaauuggaaaauguccaaaauauguaaaaagcacaaaauugagacuggccacaggauugaggaaugucccgucuauucaaucuagaggccuauuuggggccauugccgguuucauugaagggggguggacagggaugguagauggaugguacgguuaucaccaucaaaaugagcaggggucaggauaugcagccgaccugaagagcacacagaaugccauugacaagauuacuaacaaaguaaauucuguuauugaaaagaugaauacacaguucacagcaguagguaaagaguucaaccaccuggaaaaaagaauagagaauuuaaauaaaaaaguugaugaugguuuccuggacauuuggacuuacaaugccgaacuguugguucuauuggaaaaugaaagaacuuuggacuaccacgauucaaaugugaagaacuuauaugaaaagguaaggagccaguuaaaaaacaaugccaaggaaauuggaaacggcugcuuugaauuuuaccacaaaugcgauaacacgugcauggaaagugucaaaaaugggacuuaugacuacccaaaauacucagaggaagcaaaauuaaacagagaagaaauagaugggguaaagcuggaaucaacaaggauuuaccagauuuuggcgaucuauucaacugucgccaguucauugguacugguagucucccugggggcaaucaguuucuggaugugcucuaaugggucucuacaguguagaauauguauuuaa

SEQ ID NO: 36567 - RNA, 1701 nt, Artificial Sequence
  derived and/or modified CDS sequence (wt) from hemagglutinin__InfluenzaA__ADF27389
augaaggcaauacuaguaguucugcuauauacauuugcaaccgcaaaugcagacacauuauguauagguuaucaugcgaacaauucaacagacacuguagacacaguacuagaaaagaauguaacaguaacacacucuguuaaccuucuagaagacaagcauaacgggaaacuaugcaaacuaagagggguagccccauugcauuuggguaaauguaacauugcuggcuggauccugggaaauccagagugugaaucacucuccacagcaagcucaugguccuacauuguggaaacaucuaguucagacaauggaacguguuacccaggagauuucaucgauuaugaggagcuaagagagcaauugagcucagugucaucauuugaaagguuugagauauuccccaagacaaguucauggcccaaucaugacucgaacaaagguguaacggcagcauguccucaugcuggagcaaaaagcuucuacaaaaauuuaauauggcuaguuaaaaaaggaaauucauacccaaagcucagcaaauccuacauuaaugauaaagggaaagaaguccucgugcuauggggcauucaccauccaucuacuagugcugaccaacaaagucucuaucagaaugcagaugcauauguuuuuguggggacaucaagauacagcaagaaguucaagccggaaauagcaauaagacccaaagugagggaucaagaagggagaaugaacuauuacuggacacuaguagagccgggagacaaaauaacauucgaagcaacuggaaaucuagugguaccgagauaugcauucgcaauggaaagaaaugcuggaucugguauuaucacuucagauacaccaguccacgauugcaauacaacuugucagacacccaagggugcuauaaacaccagccucccauuucagaauauacauccgaucacaauuggaaaauguccaaaauauguaaaaagcacaaaauugagacuggccacaggauugaggaaugucccgucuauucaaucuagaggccuauuuggggccauugccgguuucauugaagggggguggacagggaugguagauggaugguacgguuaucaccaucaaaaugagcaggggucaggauaugcagccgaccugaagagcacacagaaugccauugacgagauuacuaacaaaguaaauucuguuauugaaaagaugaauacacaguucacagcaguagguaaagaguucaaccaccuggaaaaaagaauagagaauuuaaauaaaaaaguugaugaugguuuccuggacauuuggacuuacaaugccgaacuguugguucuauuggaaaaugaaagaacuuuggacuaccacgauucaaaugugaagaacuuauaugaaaagguaagaagccaguuaaaaaacaaugccaaggaaauuggaaacggcugcuuugaauuuuaccacaaaugcgauaacacgugcauggaaagugucaaaaaugggacuuaugacuacccaaaauacucagaggaagcaaaauuaaacagagaagaaauagauggaguaaagcuggaaucaacaaggaucuaccagauuuuggcgaucuauucaacugucgccaguucauugguacugguagucucccugggggcaaucaguuucuggaugugcucuaaugggucucuacaguguagaauauguauuuaa

SEQ ID NO: 36568 - RNA, 1701 nt, Artificial Sequence
  derived and/or modified CDS sequence (wt) from hemagglutinin__InfluenzaA__ADF27399
augaaggcaauacuaguaguucugcuauauacauuugcaaccgcaaaugcagacacauuauguauagguuaucaugcgaacaauucaacagacacuguagacacaguacuagaaaagaauguaacaguaacacacucuguuaaccuucuagaagacaagcauaacgggaaacuaugcaaacuaagagggguagccccauugcauuuggguaaauguaacauugcuggcuggauccugggaaauccagagugugaaucacucuccacagcaagcucaugguccuacauuguggaaacaucuaguucagacaauggaacguguuacccaggagauuucaucgauuaugaggagcuaagagagcaauugagcucagugucaucauuugaaagguuugagauauuccccaagacaaguucauggcccaaucaugacucgaacaaagguguaacggcagcauguccucaugcuggagcaaaaagcuucuacaaaaauuuaauauggcuaguuaaaaaaggaaauucauacccaaagcucagcaaauccuacauuaaugauaaagggaaagaaguccucgugcuauggggcauucaccauccaucuacuagugcugaccaacaaagucucuaucagaaugcagaugcauauguuuuuguggggacaucaagauacagcaagaaguucaagccggaaauagcaauaagacccaaagugagggaucaagaagggagaaugaacuauuacuggacacuaguagagccgggagacaaaauaacauucgaagcaacuggaaaucuagugguaccgagauaugcauucgcaauggaaagaaaugcuggaucugguauuaucauuucagauacaccaguccacgauugcaauacaacuugucagacacccaagggugcuauaaacaccagccucccauuucagaauauacauccgaucacaauuggagaauguccaaaauauguaaaaagcacaaaauugagacuggccacaggauugaggaaugucccgucuauucaaucuagaggccuauuuggggccauugccgguuucauugaagggggguggacagggaugguagauggaugguacgguuaucaccaucaaaaugagcaggggucaggauaugcagccgaccugaagagcacacagaaugccauugacgagauuacuaacaaaguaaauucuguuauugaaaagaugaauacacaguucacagcaguagguaaagaguucaaccaccuggaaaaaagaauagagaauuuaaauaaaaaaguugaugaugguuuccuggacauuuggacuuacaaugccgaacuguugguucuauuggaaaaugaaagaacuuuggacuaccacgauucaaaugugaagaacuuauaugaaaagguaagaagccaguuaaaaaacaaugccaaggaaauuggaaacggcugcuuugaauuuuaccacaaaugcgauaacacgugcauggaaagugucaaaaaugggacuuaugacuacccaaaauacucagaggaagcaaaauuaaacagagaagaaauagaugggguaaagcuggaaucaacaagaauuuaccagauuuuggcgaucuauucaacugucgccaguucauugguacugguagucucccugggggcaaucaguuucuggaugugcucuaaugggucucuacaguguagaauauguauuuaa

SEQ ID NO: 36569 - RNA, 1701 nt, Artificial Sequence; identical to SEQ ID NO: 35845
  derived and/or modified CDS sequence (wt) from hemagglutinin__InfluenzaA__ADF27409

SEQ ID NO: 36570 - RNA, 1701 nt, Artificial Sequence
  derived and/or modified CDS sequence (wt) from hemagglutinin__InfluenzaA__ADF27419
augaaggcaauacuaguaguucugcuauauacauuugcaaccgcaaaugcagacacauuauguauagguuaucaugcgaacaauucaacagacacuguagacacaguacuagaaaagaauguaacaguaacacacucuguuaaccuucuagaagacaagcauaacgggaaacuaugcaaacuaagagggguagccccauugcauuuggguaaauguaacauugcuggcuggauccugggaaauccagagugugaaucacucuccacagcaagcucaugguccuacauuguggaaacaucuaguucagacaauggaacguguuacccaggagauuucaucgauuaugaggagcuaagagagcaauugagcucagugucaucauuugaaagguuugagauauuccccaagacaaguucauggcccaaucaugacucgaacaaagguguaacggcagcauguccucaugcuggagcaaaaagcuucuacaaaaauuuaauauggcuaguuaaaaaaggaaauucauacccaaagcucagcaaauccuacauuaaugauaaagggaaagaaguccucgugcuauggggcauucaccauccaucuacuaguacugaccaacaaagucucuaucagaaugcagaugcauauguuuuuguggggacaucaagauacagcaagaaguucaagccggaaauagcaauaagacccaaagugagggaucaagaagggagaaugaacuauuacuggacacuaguagagccgggagacaaaauaacauucgaagcaacuggaaaucuagugguaccgagauaugcauucgcaauggaaagaaaugcuggaucugguauuaucauuucagauacaccaguccacgauugcaauacaacuugucagacacccaagggugcuauaaacaccagccucccauuucagaauauacauccgaucacaauuggaaaauguccaaaauauguaaaaagcacaaaauugagacuggccacaggauugaggaaugucccgucuauucaaucuagaggccuauuuggggccauugccgguuucauugaagggggguggacagggaugguagauggaugguacgguuaucaccaucaaaaugagcaggggucaggauaugcagccgaccugaagagcacacagaaugccauugacaagauuacuaacaaaguaaauucuguuauugaaaagaugaauacacaguucacagcaguagguaaagaguucaaccaccuggaaaaaagaauagagaauuuaaauaaaaaaguugaugaugguuuccuggacauuuggacuuacaaugccgaacuguugguucuauuggaaaaugaaagaacuuuggacuaccacgauucaaaugugaagaacuuauaugaaaagguaagaagccaguuaaaaaacaaugccaaggaaauuggaaacggcugcuuugaauuuuaccacaaaugcgauaacacgugcauggaaagugucaaaaaugggacuuaugacuacccaaaauacucagaggaagcaaaauuaaacagagaagaaauagaugggguaaagcuggaaucaacaaggauuuaccagauuuuggcgaucuauucaacugucgccaguucauugguacugguagucucccugggggcaaucaguuucuggaugugcucuaaugggucucuacaguguagaauauguauuuaa

SEQ ID NO: 36571 - RNA, 1701 nt, Artificial Sequence
  derived and/or modified CDS sequence (wt) from hemagglutinin__InfluenzaA__ADF27429
augaaggcaauacuaguaguucugcuauauacauuugcaaccgcaaaugcagacacauuauguauagguuaucaugcgaacaauucaacagacacuguagacacaguacuagaaaagaauguaacaguaacacacucuguuaaccuucuagaagacaagcauaacgggaaacuaugcaaacuaagagggguagccccauugcauuuggguaaauguaacauugcuggcuggauccugggaaauccagagugugaaucacucuccacagcaagcucaugguccuacauuguggaaacaucuaguucagacaauggaacguguuacccaggagauuucaucgauuaugaggagcuaagagagcaauugagcucagugucaucauuugaaagguuugagauauuccccaagacaaguucauggcccaaucaugacucgaacaaagguguaacggcagcauguccucaugcuggagcaaaaagcuucuacaaaaauuuaauauggcuaguuaaaaaaggaaauucauacccaaagcucagcaaauucuacauuaaugauaaagggaaagaaguccucgugcuauggggcauucaccauccaucuacuagugcugaccaacaaagucucuaucagaaugcagaugcauauguuuuuguggggacaucaagauacagcaagaaguucaagccggaaauagcaauaagacccaaagugagggaucaagaagggagaaugaacuauuacuggacacuaguagagccgggagacaaaauaacauucgaagcaacuggaaaucuagugguaccgagauaugcauucgcaauggaaagaaaugcuggaucugguauuaucauuucagauacaccaguccacgauugcaauacaacuugucagacacccaagggugcuauaaacaccagccucccauuucagaauauacauccgaucacaauuggaaaauguccaaaauauguaaaaagcacaaaauugagacuggccacaggauugaggaaugucccgucuauucaaucuagaggccuauuuggggccauugccgguuucauugaagggggguggacagggaugguagauggaugguacgguuaucaccaucaaaaugagcaggggucaggauaugcagccgaccugaagagcacacagaaugccauugacaagauuacuaacaaaguaaauucuguuauugaaaagaugaauacacaguucacagcaguagguaaagaguucaaccaccuggaaaaaagaauagagaauuuaaauaaaaaaguugaugaugguuuccuggacauuuggacuuacaaugccgaacuguugguucuauuggaaaaugaaagaacuuuggacuaccacgauucaaaugugaagaacuuauaugaaaagguaagaagccaguuaaaaaacaaugccaaggaaauuggaaacggcugcuuugaauuuuaccacaaaugcgauaacacgugcaugaaaagugucaaaaaugggacuuaugacuacccaaaauacuccgaggaagcaaaauuaaacagagaagaaauagaugggguaaagcuagaaucaacaaggauuuaccagauuuuggcgaucuauucaacugucgccaguucauugguacugguagucucccugggggcaaucaguuucuggaugugcucuaaugggucucuacaguguagaauauguauuuaa

SEQ ID NO: 36572 - RNA, 1701 nt, Artificial Sequence
  derived and/or modified CDS sequence (wt) from hemagglutinin__InfluenzaA__ADF27439
augaaggcaauacuaguaguucugcuauauacauuugcaaccgcaaaugcagacacauuauguauagguuaucaugcgaacaauucaacagacacuguagacacaguacuagaaaagaauguaacaguaacacacucuguuaaccuucuagaagacaagcauaacgggaaacuaugcaaacuaagagggguagccccauugcauuuggguaaauguaacauugcuggcuggauccugggaaauccagagugugaaucacucuccacagcaagcucaugguccuacauuguggaaacaucuaguucagacaauggaacguguuacccaggagauuucaucgauuaugaggagcuaagagagcaauugagcucagugucaucauuugaaagguuugagauauuccccaagacaaguucauggcccaaccaugacucgaacaaagguguaacggcagcauguccucaugcuggagcaaaaagcuucuacaaaaauuuaauauggcuaguuaaaaaaggaaauucauacccaaagcucagcaaauccuacauuaaugauaaagggaaagaaguccucgugcuauggggcauucaccauccaucuacuagugcugaccaacaaagucucuaucagaaugcagaugcauauguuuuuguggggacaucaagauacagcaagaaguucaagccggaaauagcaauaagacccaaagugagggaucaagaagggagaaugaacuauuacuggacacuaguagagccgggagacaaaauaacauucgaagcaacuggaaaucuagugguaccgagauaugcauucgcaauggaaagaaaugcuggaucugguauuaucauuucagauacaccaguccacgauugcaauacaacuugucagacacccaagggugcuauaaacaccagccucccauuucagaauauacauccgaucacaauuggaaaauguccaaaauauguaaaaagcacaaaauugagacuggccacaggauugaggaaugucccgucuauucaaucuagaggccuauuuggggccauugccgguuucauugaagggggguggacagggaugguagauggaugguacgguuaucaccaucaaaaugagcaggggucaggauaugcagccgaccugaagagcacacagaaugccauugacgagauuacuaacaaaguaaauucuguuauugaaaagaugaauacacaguucacagcaguagguaaagaguucaaccaccuggaaaaaagaauagagaauuuaaauaaaaagguugaugaugguuuccuggacauuuggacuuacaaugccgaacuguugguucuauuggaaaaugaaagaacuuuggacuaccacgauucaaaugugaagaacuuauaugaaaagguaagaagccaguuaaaaaacaaugccaaggaaauuggaaacggcugcuuugaauuuuaccacaaaugcgauaacacgugcauggaaagugucaaaaaugggacuuaugacuacccaaaauacucagaggaagcaaaauuaaacagagaagaaauagaugggguaaagcuggaaucaacaaggauuuaccagauuuuggcgaucuauucaacugucgccaguucauugguacugguagucucccugggggcaaucaguuucuggaugugcucuaaugggucucuacaguguagaauauguauuuaa

SEQ ID NO: 36573 - RNA, 1701 nt, Artificial Sequence
  derived and/or modified CDS sequence (wt) from hemagglutinin__InfluenzaA__ADF27449
augaaggcaauacuaguaguucugcuauauacauuugcaaccguaaaugcagacacauuauguauagguuaucaugcgaacaauucaacagacacuguagacacaguacuagaaaagaauguaacaguaacacacucuguuaaucuucuagaagacaagcauaacgggaaacuaugcaaacuaagagggguagccccauugcauuuggguaaauguaacauugcuggcuggauccugggaaauccagagugugaaucacucuccacagcaagcucaugguccuacauuguggaaacaucuaguucagacaauggaacguguuacccaggagauuucaucgauuaugaggagcuaagagagcaauugagcucagugucaucauuugaaagguuugagauauuccccaagacaaguucauggcccaaucaugacucgaacaaagguguaacggcagcauguccucaugcuggagcaaaaagcuucuacaaaaauuuaauauggcuaguuaaaaaaggaaauucauacccaaagcucagcaaauccuacauuaaugauaaagggaaagaaguccucgugcuauggggcauucaccauccaucuacuagugcugaccaacaaagucucuaucagaaugcagaugcauauguuuuuguggggacaucaagauacagcaagaaguucaagccggaaauagcaauaagacccaaagugagggaucaagaagggagaaugaacuauuacuggacacuaguagagccgggagacaaaauaacauucgaagcaacuggaaaucuagugguaccgagauaugcauucgcaauggaaagaaaugcuggaucugguauuaucauuucagauacaccaguccacgauugcaauacaacuugucagacacccaagggugcuauaaacaccagccucccauuucagaauauacauccgaucacaauuggaaaauguccaaaauauguaaaaagcacaaaauugagacuggccacaggauugaggaauaucccgucuauucaaucuagaggccuauuuggggccauugccgguuucauugaagggggguggacagggaugguagauggaugguacgguuaucaccaucaaaaugagcaggggucaggauaugcagccgaccugaagagcacacagaaugccauugacgagauuacuaacaaaguaaauucuguuauugaaaagaugaauacacaguucacagcaguagguaaagaguucaaccaccuggaaaaaagaauagagaauuuaaauaaaaaaguugaugaugguuuccuggacauuuggacuuacaaugccgaacuguugguucuauuggaaaaugaaagaacuuuggacuaccacgauucaaaugugaagaacuuauaugaaaagguaagaagccaguuaaaaaacaaugccaaggaaauuggaaacggcugcuuugaauuuuaccacaaaugcgauaacacgugcauggaaagugucaaaaaugggacuuaugacuacccaaaauacucagaggaagcaaaauuaaacagagaagaaauagaugggguaaagcuggaaucaacaaggauuuaccagauuuuggcgaucuauucaacugucgccaguucauugguacugguagucucccugggggcaaucaguuucuggaugugcucuaaugggucucuacaguguagaauauguauuuaa

SEQ ID NO: 36574 - RNA, 1701 nt, Artificial Sequence; identical to SEQ ID NO: 35841
  derived and/or modified CDS sequence (wt) from hemagglutinin__InfluenzaA__ADF27459

SEQ ID NO: 36575 - RNA, 1701 nt, Artificial Sequence
  derived and/or modified CDS sequence (wt) from hemagglutinin__InfluenzaA__ADF27469
augaaggcaauacuaguaguucugcuauauacauuugcaaccgcaaaugcagacacauuauguauagguuaucaugcgaacaauucaacagacacuguagacacaguacuagaaaagaauguaacaguaacacacucuguuaaccuucuagaagacaagcauaacgggaaacuaugcaaacuaagagggguagccccauugcauuuggguaaauguaacauugcuggcuggauccugggaaauccagagugugaaucacucuccacagcaagcucaugguccuacauuguggaaacaucuaguucagacaauggaacguguuacccaggagauuucaucgauuaugaggagcuaagagagcaauugagcucagugucaucauuugaaagguuugagauauuccccaagacaaguucauggcccaaucaugacucgaacaaagguguaacggcagcauguccucaugcuggagcaaaaagcuucuacaaaaauuuaauauggcuaguuaaaaaaggaaauucauacccaaagcucagcaaauccuacauuaaugauaaagggaaagaaguccucgugcuauggggcauucaccauccaucuacuagugcugaccagcaaagucucuaucagaaugcagaugcauauguuuuuguggggacaucaagauacagcaagaaguucaagccggaaauagcaauaagacccaaagugagggaucaagaagggagaaugaacuauuacuggacacuaguagagccgggagacaaaauaacauucgaagcaacuggaaaucuagugguaccgagauaugcauucgcaauggaaagaaaugcuggaucugguauuaucauuucagauacaccaguccacgauugcaacacaacuugucagacacccaagggugcuauaaacaccagccucccauuucagaauauacauccgaucacaauuggaaaauguccaaaauauguaaaaagcacaaaauugagacuggccacaggauugaggaaugucccgucuauucaaucuagaggccuauuuggggccauugccgguuucauugaagggggguggacagggaugguagauggaugguacgguuaucaccaucaaaaugagcaggggucaggguaugcagccgaccugaagagcacacagaaugccauugacgagauuacuaacaaaguaaauucuguuauugaaaagaugaauacacaguucacagcaguagguaaagaguucaaccaccuggaaaaaagaauagagaauuuaaauaaaaaaguugaugaugguuuccuggacauuuggacuuacaaugccgaacuguugguucuauuggaaaaugaaagaacuuuggacuaccacgauucaaaugugaagaacuuauaugaaaagguaagaagccaguuaaaaaacaaugccaaggaaauuggaaacggcugcuuugaauuuuaccacaaaugcgauaacacgugcauggaaagugucaaaaaugggacuuaugacuacccaaaauacucagaggaagcaaaauuaaacagagaagaaauagaugggguaaagcuggaaucaacaaggauuuaccagauuuuggcgaucuauucaacugucgccaguucauugguacugguagucucccugggggcaaucaguuucuggaugugcucuaaugggucucuacaguguagaauauguauuuaa

SEQ ID NO: 36576 - RNA, 1701 nt, Artificial Sequence
  derived and/or modified CDS sequence (wt) from hemagglutinin__InfluenzaA__ADF27479
augaaggcaauacuaguaguucugcuauauacauuugcaaccgcaaaugcagacacauuauguauagguuaucaugcgaacaauucaacagacacuguagacacaguacuagaaaagaauguaacaguaacacacucuguuaaccuucuagaagacaagcauaacgggaaacuaugcaaacuaagagggguagccccauugcauuuggguaaauguaacauugcuggcuggauccugggaaauccagagugugaaucacucuccacagcaagcucaugguccuacauuguggaaacaucuaguucagacaauggaacguguuacccaggagauuucaucgauuaugaggagcuaagagagcaauugagcucagugucaucauuugaaagguuugagauauuccccaagacaaguucauggcccaaucaugacucgaacaaagguguaacggcagcauguccucaugcuggagcaaaaagcuucuacaaaaauuuaauauggcuaguuaaaaaaggaaauucauacccaaagcucagcaaauccuacauuaaugauaaagggaaagaaguccucgugcuauggggcauucaccauccaucuacuagugcugaccaacaaagucucuaucagaaugcagaugcauauguuuuuguggggacaucaagauacagcaagaaguucaagccggaaauagcaauaagacccaaagugagggaucaagaagggagaaugaacuauuacuggacacuaguagagccgggagacaaaauaacauucgaagcaacuggaaaucuagugguaccgagauaugcauucgcaauggaaagaaaugcuggaucugguauuaucauuucagauacaccaguccacgauugcaauacaacuugucagacacccaagggugcuauaaacaccagccucccauuucagaauauacauccgaucacaauuggaaaauguccaaaauauguaaaaagcacaaaauugagacuggccacaggauugaggaaugucccgucuauucauucuagaggccuauuuggggccauugccgguuucauugaagggggguggacagggaugguagauggaugguacgguuaucaccaucaaaaugagcaggggucaggauaugcagccgaccugaagagcacacagaaugccauugacaagauuacuaacaaaguaaauucuguuauugaaaagaugaauacacaguucacagcaguagguaaagaguucaaccaccuggaaaaaagaauagagaauuuaaauaaaaaaguugaugaugguuuccuggacauuuggacuuacaaugccgaacuguugguucuauuggaaaaugaaagaacuuuggacuaccacgauucaaaugugaagaacuuauaugaaaagguaagaagccaguuaaaaaacaaugccaaggaaauuggaaacggcugcuuugaauuuuaccacaaaugcgauaacacgugcauggaaagugucaaaaaugggacuuaugacuacccaaaauacucagaggaagcaaaauuaaacagagaagaaauagaugggguaaagcuggaaucaacaaggauuuaccagauuuuggcgaucuauucaacugucgccaguucauugguacugguagucucccugggggcaaucaguuucuggaugugcucuaaugggucucuacaguguagaauauguauuuaa

SEQ ID NO: 36577 - RNA, 1701 nt, Artificial Sequence
  derived and/or modified CDS sequence (wt) from hemagglutinin__InfluenzaA__ADF27489
augaaggcaauacuaguaguucugcuauauacauuugcaaccgcaaaugcagacacauuauguauagguuaucaugcgaacaauucaacagacacuguagacacaguacuagaaaagaauguaacaguaacacacucuguuaaccuucuagaauacaagcauaacgggaaacuaugcaaacuaagagggguagccccauugcauuuggguaaauguaacauugcuggcuggauccugggaaauccagagugugaaucacucuccacagcaagcucaugguccuacauuguggaaacaucuaguucagacaauggaacguguuacccaggagauuucaucgauuaugaggagcuaagagagcaauugagcucagugucaucauuugaaagguuugagauauuccccaagacaaguucauggcccaaucaugacucgaacaaagguguaacggcagcauguccucaugcuggagcaaaaagcuucuacaaaaauuuaauauggcuaguuaaaaaaggaaauucauacccaaagcucagcaaauccuacauuaaugauaaagggaaagaaguccucgugcuauggggcauucaccauccaucuacuagugcugaccaacaaagucucuaucagaaugcagaugcauauguuuuuguggggacaucaagauacagcaagaaguucaagccggaaauagcaauaagacccaaagugagggaucaagaagggagaaugaacuauuacuggacacuaguagagccgggagacaaaauaacauucgaagcaacuggaaaucuagugguaccgagauaugcauucgcaauggaaagaaaugcuggaucugguauuaucauuucagauacaccaguccacgauugcaauacaacuugucagacacccaagggugcuauaaacaccagccucccauuucagaauauacauccgaucacaauuggagaauguccaaaauauguaaaaagcacaaaauugagacuggccacaggauugaggaaugucccgucuauucaaucuagaggccuauuuggggccauugccgguuucauugaagggggguggacagggaugguagauggaugguacgguuaucaccaucaaaaugagcaggggucuggauaugcagccgaccugaagagcacacagaaugccauugacgagauuacuaacaaaguaaauucuguuauugaaaagaugaauacacaguucacagcaguagguaaagaguucaaccaccuggaaaaaagaauagagaauuuaaauaaaaagguugaugaugguuuccuggacauuuggacuuacaaugccgaacuguugguucuauuggaaaaugaaagaacuuuggacuaccacgauucaaaugugaagaacuuauaugaaaagguaagaagccaguuaaaaaacaaugccaaggaaauuggaaacggcugcuuugaauuuuaccacaaaugcgauaacacgugcauggaaagugucaaaaaugggacuuaugacuacccaaaauacucagaggaagcaaaauuaaacagagaagaaauagaugggguaaagcuggaaucaacaaggauuuaccagauuuuggcgaucuauucaacugucgccaguucauugguacugguagucucccugggggcaaucaguuucuggaugugcucuaaugggucucuacaguguagaauauguauuuaa

SEQ ID NO: 36578 - RNA, 1701 nt, Artificial Sequence
  derived and/or modified CDS sequence (wt) from hemagglutinin__InfluenzaA__ADF27499
augaaggcaauacuaguaguucugcuauauacauuugcaaccgcaaaugcagacacauuauguauagguuaucaugcgaacaauucaacagacacuguagacacaguacuagaaaagaauguaacaguaacacacucuguuaaccuucuagaagacaagcauaacgggaaacuaugcaaacuaagagggguagccccauugcauuuggguaaauguaacauugcuggcuggauccugggaaauccagagugugaaucacucuccacagcaagcucaugguccuacauuguggaaacaucuaguucagacaauggaacguguuacccaggagauuucaucgauuaugaggagcuaagagagcaauugagcucagugucaucauuugaaagguuugagauauuccccaagacaaguucauggcccaaucaugacucgaacaaagguguaacggcagcauguccucaugcuggagcaaaaagcuucuacaaaaauuuaauauggcuaguuaaaaaaggaaauucauacccaaagcucagcaaauccuacauuaaugauaaagggaaagaaguccucgugcuauggggcauucaccauccaucuacuagugcugaccaacaaagucucuaucagaaugcagaugcauauguuuuuguggggacaucaagauacagcaagaaguucaagccagaaauagcaauaagacccaaagugagggaucaagaagggagaaugaacuauuacuggacacuaguagagccgggagacaaaauaacauucgaagcaacuggaaaucuagugguaccgagauaugcauucgcaauggaaagaaaugcuggaucugguauuaucauuucagauacaccaguccacgauugcaauacaacuugucagacacccaagggugcuauaaacaccagccucccauuucagaauauacauccgaucacaauuggaaaauguccaaaauauguaaaaagcacaaaauugagacuggccacaggauugaggaaugucccgucuauucaaucuagaggccuauuuggggccauugccgguuucauugaagggggguggacagggaugguagauggaugguacgguuaucaccaucaaaaugagcaggggucaggauaugcagccgaccugaagagcacacagaaugccauugacaagauuacuaacaaaguaaauucuguuauugaaaagaugaauacacaguucacagcaguagguaaagaguucaaccaccuggaaaaaagaauagagaauuuaaauaaaaaaguugaugaugguuuccuggacauuuggacuuacaaugccgaacuguugguucuauuggaaaaugaaagaacuuuggacuaccacgauucaaaugugaagaacuuauaugaaaagguaagaagccaguuaaaaaacaaugccaaggaaauuggaaacggcugcuuugaauuuuaccacaaaugcgauaacacgugcauggaaagugucaaaaaugggacuuaugacuacccaaaauacucagaggaagcaaaauuaaacagagaagaaauagaugggguaaagcuggaaucaacaaggauuuaccagauuuuggcgaucuauucaacugucgccaguucauugguacugguagucucccugggggcaaucaguuucuggaugugcucuaaugggucucuacaguguagaauauguauuuaa

SEQ ID NO: 36579 - RNA, 1701 nt, Artificial Sequence
  derived and/or modified CDS sequence (wt) from hemagglutinin__InfluenzaA__ADF27509
augaaggcaauacuaguaguucugcuauauacauuugcaaccgcaaaugcagacacauuauguauagguuaucaugcgaacaauucaacagacacuguagacacaguacuagaaaagaauguaacaguaacacacucuguuaaccuucuagaagacaagcauaacgggaaacuaugcaaacuaagagggguagccccauugcauuuggguaaauguaacauugcuggcuggauccugggaaauccagagugugaaucacucuccacagcaagcucaugguccuacauuguggaaacaucuaguucagacaauggaacguguuacccaggagauuucaucgauuaugaggagcuaagagagcaauugagcucagugucaucauuugaaagguuugagauauuccccaagacaaguucauggcccaaucaugacucgaacaaagguguaacggcagcauguccucaugcuggagcaaaaagcuucuacaaaaauuuaauauggcuaguuaaaaaaggaaauucauacccaaagcucagcaaauccuacauuaaugauaaagggaaagaaguccucgugcuauggggcauucaccauccaucuacuagugcugaccaacaaagucucuaucagaaugcagaugcauauguuuuuguggggacaucaagauacagcaagaaguucaagccggaaauagcaauaagacccaaagugagggaucaagaagggagaaugaacuauuacuggacacuaguagagccgggagacaaaauaacauucgaagcaacuggaaaucuagugguaccgagauaugcauucgcaauggaaagaaaugcuggaucugguauuaucauuucagauacaccaguccacgauugcaauacaacuugucagacacccaagggugcuauaaacaccagucucccauuucagaauauacauccgaucacaauuggaaaauguccaaaauauguaaaaagcacaaaauugagacuggccacaggauugaggaaugucccgucuauucaaucuagaggccuauuuggggccauugccgguuucauugaagggggguggacagggaugguagauggaugguacgguuaucaccaucaaaaugagcaggggucaggauaugcagccgaccugaagagcacacagaaugccauugacgagauuacuaacaaaguaaauucuguuauugaaaagaugaauacacaguucacagcaguagguaaagaguucaaccaccuggaaaaaagaauagagaauuuaaauaaaaaaguugaugaugguuuccuggacauuuggacuuacaaugccgaacuguugguucuauuggaaaaugaaagaacuuuggacuaccacgauucaaaugugaagaacuuauaugaaaagguaagaagccaguuaaaaaacaaugccaaggaaauuggaaacggcugcuuugaauuuuaccacaaaugcgauaacacgugcauggaaagugucaaaaaugggacuuaugacuacccaaaauacucagaggaagcaaaauuaaacagagaagaaauagaugggguaaagcuggaaucaacaaggauuuaccagauuuuggcgaucuauucaacugucgccaguucauugguacugguagucucccugggggcaaucaguuucuggaugugcucuaaugggucucuacaguguagaauauguauuuaa

SEQ ID NO: 36580 - RNA, 1701 nt, Artificial Sequence
  derived and/or modified CDS sequence (wt) from hemagglutinin__InfluenzaA__ADF27529
augaaggcaauacuaguaguucugcuauauacauuugcaaccgcaaaugcagacacauuauguauagguuaucaugcgaacaauucaacagacacuguagacacaguacuagaaaagaauguaacaguaacacacucuguuaacauucuagaagacaagcauaacgggaaacuaugcaaacuaagagggguagccccauugcauuuggguaaauguaacauugcuggcuggauccugggaaauccagagugugaaucacucuccacagcaagcucaugguccuacauuguggaaacaucuaguucagacaauggaacguguuacccaggagauuucaucgauuaugaggagcuaagagagcaauugagcucagugucaucauuugaaagguuugagauauuccccaagacaaguucauggcccaaucaugacucgaacaaagguguaacggcagcauguccucaugcuggagcaaaaagcuucuacaaaaauuuaauauggcuaguuaaaaaaggaaacucauacccaaagcucagcaaauccuacauuaaugauaaagggaaagaaguccucgugcuauggggcauucaccauccaucuacuagugcugaccaacaaagucucuaucagaaugcagaugcauauguuuuuguggggacaucaagauacagcaagaaguucaagccggaaauagcaauaagacccaaagugagggaucaagaagggagaaugaacuauuacuggacacuaguagagccgggagacaaaauaacauucgaagcaacuggaaaucuagugguaccaagauaugcauucgcaauggaaagaaaugcuggaucugguauuaucauuucagauacaccaguccacgauugcaauacaacuugucagacacccaagggugcuauaaacaccagccucccauuucagaauauacauccgaucacaauuggaaaauguccaaaauauguaaaaagcacaaaauugagacuggccacaggauugaggaaugucccgucuauucaaucuagaggccuauuuggggccauugccgguuucauugaagggggguggacagggaugguagauggaugguacgguuaucaccaucaaaaugagcaggggucaggauaugcagccgaccugaagagcacacagaaugccauugacgagauuacuaacaaaguaaauucuguuauugaaaagaugaauacacaguucacagcaguagguaaagaguucaaccaccuggaaaaaagaauagagaauuuaaauaaaaagguugaugaugguuuccuggacauuuggacuuacaaugccgaacuguugguucuauuggaaaaugaaagaacuuuggacuaccaugauucaaaugugaagaacuuauaugaaaagguaagaagccaguuaaaaaacaaugccaaggaaauuggaaacggcugcuuugaauuuuaccacaaaugcgauaacacgugcauggaaagugucaaaaaugggacuuaugacuacccaaaauacucagaggaagcaaaauuaaacagagaagaaauagaugggguaaagcuggaaucaacaaggauuuaccagauuuuggcgaucuauucaacugucgccaguucauugguacugguagucucccugggggcaaucaguuucuggaugugcucuaaugggucucuacaguguagaauauguauuuaa

SEQ ID NO: 36581 - RNA, 1701 nt, Artificial Sequence
  derived and/or modified CDS sequence (wt) from hemagglutinin__InfluenzaA__ADF27539
augaaggcaauacuaguaguucugcuauauacauuugcaaccgcaaaugcagacacauuauguauagguuaucaugcgaacaauucaacagacacuguagacacaguacuagaaaggaauguaacaguaacacacucuguuaaccuucuagaagacaagcauaacgggaaacuaugcaaacuaagagggguagccccauugcauuuggguaaauguaacauugcuggcuggauccugggaaauccagagugugaaucacucuccacagcaagcucaugguccuacauuguggaaacaucuaguucagacaauggaacguguuacccaggagauuucaucgauuaugaggagcuaagagagcaauugagcucagugucaucauuugaaagguuugagauauuccccaagacaaguucauggcccaaucaugacucgaacaaagguguaacggcagcauguccucaugcuggagcaaaaagcuucuacaaaaauuuaauauggcuaguuaaaaaaggaaauucauacccaaagcucagcaaauccuacauuaaugauaaagggaaagaaguccucgugcuauggggcauucaccauccaucuacuagugcugaccaacaaagucucuaucagaaugcagaugcauauguuuuuguggggacaucaagauacagcaagaaguucaagccggaaauagcaauaagacccaaagugagggaucaagaagggagaaugaacuauuacuggacacuaguagagccgggagacaaaauaacauucgaagcaacuggaaaucuagugguaccgagauaugcauucgcaauggaaagaaaugcuggaucugguauuaucauuucagauacaccaguccacgauugcaauacaacuugucagacacccaagggugcuauaaacaccagccucccauuucagaauauacauccgaucacaauuggaaaauguccaaaauauguaaaaagcacaaaauugagacuggccacaggauugaggaaugucccgucuauucaaucuagaggccuauuuggggccauugccgguuucauugaagggggguggacagggaugguagauggaugguacgguuaucaccaucaaaaugagcaggggucaggauaugcagccgaccugaagagcacacagaaugccauugacgagauuacuaacaaaguaaauucuguuauugaaaagaugaauacacaguucacagcaguagguaaagaguucaaccaccuggaaaaaagaauagagaauuuaaauaaaaaaguugaugaugguuuccuggacauuuggacuuacaaugccgaacuguugguucuauuggaaaaugaaagaacuuuggacuaccacgauucaaaugugaagaacuuauaugaaaagguaagaagccaguuaaaaaacaaugccaaggaaauuggaaacggcugcuuugaauuuuaccacaaaugcgauaacacgugcauggaaagugucaaaaaugggacuuaugacuacccaaaauauucagaggaagcaaaauuaaacagagaagaaauagaugggguaaagcuggaaucaacaaggauuuaccagauuuuggcgaucuauucaacugucgccaguucauugguacugguagucucccugggggcaaucaguuucuggaugugcucuaaugggucucuacaguguagaauauguauuuaa

SEQ ID NO: 36582 - RNA, 1701 nt, Artificial Sequence; identical to SEQ ID NO: 35853
  derived and/or modified CDS sequence (wt) from hemagglutinin__InfluenzaA__ADF27549

SEQ ID NO: 36583 - RNA, 1701 nt, Artificial Sequence
  derived and/or modified CDS sequence (wt) from hemagglutinin__InfluenzaA__ADF27559
augaaggcaauacuaguaguucugcuauauacauuugcaaccgcaaaugcagacacauuauguauagguuaucaugcgaacaauucaacagacacuguagacacaguacuagaaaagaauguaacaguaacacacucuguuaaccuucuagaagacaagcauaacgggaaacuaugcaaacuaagagggguagccccauugcauuuggguaaauguaacauugcugguuggauccugggaaauccagagugugaaucacucuccacagcaagcucaugguccuacauuguggaaacaucuaguucagacaauggaacguguuacccaggagauuucaucgauuaugaagagcuaagagagcaauugagcucagugucaucauuugaaagguuugagauauuccccaagacaaguucauggcccaaucaugacucgaacaaagguguaacggcagcauguccucaugcuggagcaaaaagcuucuacaaaaauuuaauauggcuaguuaaaaaaggaaauucauacccaaagcucagcaaauccuacauuaaugauaaagggaaagaaguccucgugcuauggggcauucaccauccaucuacuagugcugaccaacaaagucucuaucagaaugcagaugcauauguuuuuguggggacaucaagauacagcaagaaguucaagccggaaauagcaauaagacccaaagugagggaucaagaagggagaaugaacuauuacuggacacuaguagagccgggagacaaaauaacauucgaagcaacuggaaaucuagugguaccgagauaugcauucgcaauggaaagaaaugcuggaucugguauuaucauuucagauacaccaguccacgauugcaauacaacuugucagacacccaagggugcuauaaacaccagccucccauuucagaauauacauccgaucacaauuggaaaauguccaaaauauguaaaaagcacaaaauugagacuggccacaggauugaggaaugucccgucuauucaaucuagaggccuauuuggggccauugccgguuucauugaagggggguggacagggaugguagauggaugguacgguuaucaccaucaaaaugagcaggggucaggauaugcagccgaccugaagagcacacagaaugccauugacgagauuacuaacaaaguaaauucuguuauugaaaagaugaauacacaguucacagcaguagguaaagaguucaaccaccuggaaaaaagaauagagaauuuaaauaaaaaaguugaugaugguuuccuggacauuuggacuuacaaugccgaacuguugguucuauuggaaaaugaaagaacuuuggacuaccacgauucaaaugugaagaacuuauaugaaaagguaagaagccaguuaaaaaacaaugccaaggaaauuggaaacggcugcuuugaauuuuaccacaaaugcgauaacacgugcauggaaagugucaaaaaugggacuuaugacuacccaaaauacucagaggaagcaaaauuaaacagagaagaaauagaugggguaaagcuggaaucaacaaggauuuaccagauuuuggcgaucuauucaacugucgccaguucauugguacugguagucucccugggggcaaucaguuucuggaugugcucuaaugggucucuacaguguagaauauguauuuaa

SEQ ID NO: 36584 - RNA, 1701 nt, Artificial Sequence
  derived and/or modified CDS sequence (wt) from hemagglutinin__InfluenzaA__ADF27569
augaaggcaauacuaguaguucugcuauauacauuugcaaccgcaaaugcagacacauuauguauagguuaucaugcgaacaauucaacagacacuguagacacaguacuagaaaagaauguaacaguaacacacucuguuaaccuucuagaagacaagcauaacgggaaacuaugcaaacuaagagggguagccccauugcauuuggguaaauguaacauugcuggcuggauccugggaaauccagagugugaaucacucuccacagcaagcucaugguccuacauuguggaaacaucuaguucagacaauggaacguguuacccaggagauuucaucgauuaugaggagcuaagagagcaauugagcucagugucaucauuugaaagguuugagauauuccccaagacaaguucauggcccaaucaugacucgaacaaagguguaacggcagcauguccucaugcuggagcaaaaagcuucuacaaaaauuuaauauggcuaguuaaaaaaggaaauucauacccaaagcucagcaaauccuacauuaaugauaaagggaaagaaguccucgugcuauggggcauucaccauccaucuacuagugcugaccaacaaagucucuaucagaaugcagaugcauauguuuuuguggggacaucaagauacagcaagaaguucaagccggaaauagcaauaagacccaaagugagggaucaagaagggagagugaacuauuacuggacacuaguagagccgggagacaaaauaacauucgaagcaacuggaaaucuagugguaccgagauaugcauucgcaauggaaagaaaugcuggaucugguauuaucauuucagauacaccaguccacgauugcaauacaacuugucagacacccaagggugcuauaaacaccagccucccauuucagaauauacauccgaucacaauuggaaaauguccaaaauauguaaaaagcacaaaauugagacuggccacaggauugaggaaugucccgucuauucaaucuagaggccuauuuggggccauugccgguuucauugaagggggguggacagggaugguagauggaugguacgguuaucaccaucaaaaugagcaggggucaggauaugcagccgaccugaagagcacacagaaugccauugacaagauuacuaacaaaguaaauucuguuauugaaaagaugaauacacaguucacagcaguagguaaagaguucaaccaccuggaaaaaagaauagagaauuuaaauaaaaaaguugaugaugguuuccuggacauuuggacuuacaaugccgaacuguugguucuauuggaaaaugaaagaacuuuggacuaccacgauucaaaugugaagaacuuauaugaaaagguaagaagccaguuaaaaaacaaugccaaggaaauuggaaacggcugcuuugaauuuuaccacaaaugcgauaacacgugcauggaaagugucaaaaaugggacuuaugacuaccccaaauacucagaggaagcaaaauuaaacagagaagaaauagaugggguaaagcuagaaucaacaaggauuuaccagauuuuggcgaucuauucaacugucgccaguucauugguacugguagucucccugggggcaaucaguuucuggaugugcucuaaugggucucuacaguguagaauauguauuuaa

SEQ ID NO: 36585 - RNA, 1701 nt, Artificial Sequence
  derived and/or modified CDS sequence (wt) from hemagglutinin__InfluenzaA__ADF27579
augaaggcaauacuaguaguucugcuauauacauuugcaaccgcaaaugcagacacauuauguauagguuaucaugcgaacaauucaacagacacuguagacacaguacuagaaaggaauguaacaguaacacacucuguuaaccuucuagaagacaagcauaacgggaaacuaugcaaacuaagagggguagccccauugcauuuggguaaauguaacauugcuggcuggauccugggaaauccagagugugaaucacucuccacagcaagcucaugguccuacauuguggaaacaucuaguucagacaauggaacguguuacccaggagauuucaucgauuaugaggagcuaagagagcaauugagcucagugucaucauuugaaagguuugagauauuccccaagacaaguucauggcccaaucaugacucgaacaaagguguaacggcagcauguccucaugcuggagcaaaaagcuucuacaaaaauuuaauauggcuaguuaaaaaaggaaauucauacccaaagcucagcaaauccuacauuaaugauaaagggaaagaaguccucgugcuauggggcauucaccauccaucuacuagugcugaccaacaaagucucuaucagaaugcagaugcauauguuuuuguggggacaucaagauacagcaagaaguucaagccggaaauagcaauaagacccaaagugagggaucaagaagggagaaugaacuauuacuggacacuaguagagccgggagacaaaauaacauucgaagcaacuggaaaucuagugguaccgagauaugcauucgcaauggaaagaaaugcuggaucugguauuaucauuucagauacaccaguccacgauugcaauacaacuugucagacacccaagggugcuauaaacaccagccucccauuucagaauauacauccgaucacaauuggaaaauguccaaaauauguaaaaagcacaaaauugagacuggccacaggauugaggaaugucccgucuauucaaucuagaggccuauuuggggccauugccgguuucauugaagggggguggacagggaugguagauggaugguacgguuaucaccaucaaaaugagcaggggucaggauaugcagccgaccugaagagcacacagaaugccauugacgagauuacuaacaaaguaaauucuguuauugaaaagaugaauacacaguucacagcaguagguaaagaauucaaccaccuggaaaaaagaauagagaauuuaaauaaaaaaguugaugaugguuuccuggacauuuggacuuacaaugccgaacuguugguucuauuggaaaaugaaagaacuuuggacuaccacgauucaaaugugaagaacuuauaugaaaagguaagaagccaguuaaaaaacaaugccaaggaaauuggaaacggcugcuuugaauuuuaccacaaaugcgauaacacgugcauggaaagugucaaaaaugggacuuaugacuacccaaaauacucagaggaagcaaaauuaaacagagaagaaauagaugggguaaagcuggaaucaacaaggauuuaccagauuuuggcgaucuauucaacugucgccaguucauugguacugguagucucccugggggcaaucaguuucuggaugugcucuaaugggucucuacaguguagaauauguauuuaa

SEQ ID NO: 36586 - RNA, 1701 nt, Artificial Sequence
  derived and/or modified CDS sequence (wt) from hemagglutinin__InfluenzaA__ADF27589
augaaggcaauacugguaguucugcuauauacauuugcaaccgcaaaugcagacacauuauguauagguuaucaugcgaacaauucaacagacacuguagacacaguacuagaaaagaauguaacaguaacacacucuguuaaccuucuagaagacaagcauaacgggaaacuaugcaaacuaagagggguagccccauugcauuuggguaaauguaacauugcuggcuggauccugggaaauccagagugugaaucacucuccacagcaagcucaugguccuacauuguggaaacaucuaguucagacaauggaacguguuacccaggagauuucaucgauuaugaggagcuaagagagcaauugagcucagugucaucauuugaaagguuugagauauuccccaagacaaguucauggcccaaucaugacucgaacaaagguguaacggcagcauguccucaugcuggagcaaaaagcuucuacaaaaauuuaauauggcuaguuaaaaaaggaaauucauacccaaagcucagcaaauccuacauuaaugauaaagggaaagaaguccucgugcuauggggcauucaccauccaucuacuagugcugaccaacaaagucucuaucagaaugcagaugcauauguuuuuguggggacaucaagauacagcaagaaguucaagccggaaauagcaauaagacccaaagugagggaucaagaagggagaaugaacuauuacuggacacuaguagagccgggagacaaaauaacauucgaagcaacuggaaaucuagugguaccgagauaugcauucgcaauggaaagaaaugcuggaucugguauuaucauuucagauacaucaguucacgauugcaauacaacuugucagacacccaagggugcuauaaacaccagccucccauuucagaauauacauccgaucacaauuggaaaauguccaaaauauguaaaaagcacaaaauugagacuggccacaggauugaggaaugucccgucuauucaaucuagaggccuauuuggggccauugccgguuucauugaagggggguggacagggaugguagauggaugguacgguuaucaccaucaaaaugagcaggggucaggauaugcagccgaccugaagagcacacagaaugccauugacgagauuacuaauaaaguaaauucuguuauugaaaagaugaauacacaguucacagcaguagguaaagaguucaaccaccuggaaaaaagaauagagaauuuaaauaaaaaaguugaugaugguuuccuggacauuuggacuuacaaugccgaacuguugguucuauuggaaaaugaaagaacuuuggacuaccacgauucaaaugugaagaacuuauaugaaaagguaagaagccaguuaaaaaacaaugccaaggaaauuggaaacggcugcuuugaauuuuaccacaaaugcgauaacacgugcauggaaagugucaaaaaugggacuuaugacuacccaaaauacucagaggaagcaaaauuaaacagagaagaaauagaugggguaaagcuggaaucaacaaggauuuaccagauuuuggcgaucuauucaacugucgccaguucauugguacugguagucucccugggggcaaucaguuucuggaugugcucuaaugggucucuacaguguagaauauguauuuaa

SEQ ID NO: 36587 - RNA, 1701 nt, Artificial Sequence
  derived and/or modified CDS sequence (wt) from hemagglutinin__InfluenzaA__ADF27599
augaaggcaauacuaguaguucugcuauauacauuugcaaccgcaaaugcagacacauuauguauagguuaucaugcgaacaauucaacagacacuguagacacaguauuagaaaagaauguaacaguaacacacucuguuaaccuucuagaagacaagcauaacgggaaacuaugcaaacuaagagggguagccccauugcauuuggguaaauguaacauugcuggcuggauccugggaaauccagagugugaaucacucuccacagcaagcucaugguccuacauuguggaaacaucuaguucagacaauggaacguguuacccaggagauuucaucgauuaugaggagcuaagagagcaauugagcucagugucaucauuugaaagguuugagauauuccccaagacaaguucauggcccaaucaugauucgaacaaagguguaacggcagcauguccucaugcuggagcaaaaagcuucuacaaaaauuuaauauggcuaguuaaaaaaggaaauucauacccaaagcucagcaaauccuacauuaaugauaaagggaaagaaguccucgugcuauggggcauucaccauccaucuacuagugcugaccaacaaagucucuaucagaaugcagaugcauauguuuuuguggggacaucaagauacagcaagaaguucaagccggaaauagcaauaagacccaaagugagggaucaagaagggagaaugaacuauuacuggacacuaguagagccgggagacaaaauaacauucgaagcaacuggaaaucuagugguaccgagauaugcauucacaauggaaagaaaugcuggaucugguauuaucauuucagauacaccaguccacgauugcaauacaacuugucagacacccaagggugcuauaaacaccagccucccauuucagaauauacauccgaucacaauuggaaaauguccaaaauauguaaaaagcacaaaauugagacuggccacaggauugaggaaugucccgucuauucaaucuagaggccuauuuggggccauugccgguuucauugaagggggguggacagggaugguagauggaugguacgguuaucaccaucaaaaugagcaggggucaggauaugcagccgaccugaagagcacacagaaugccauugacgagauuacuaacaaaguaaauucuguuauugaaaagaugaauacacaguucacagcaguagguaaagaguucaaccaccuggaaaaaagaauagagaauuuaaauaaaaagguugaugaugguuuccuggacauuuggacuuacaaugccgaacuguugguuuuauuggaaaaugaaagaacuuuagacuaccacgauucaaaugugaagaacuuauaugaaaagguaagaagccaguuaaaaagcaaugccaaggaaauuggaaacggcugcuuugaauuuuaccacaaaugcgauaacacgugcauggaaagugucaaaaaugggacuuaugacuacccaaaauacucagaggaagcaaaauuaaacagagaagaaauagaugggguaaagcuggaaucaacaaggauuuaccagauuuuggcgaucuauucaacugucgccaguucauugguacugguagucucccugggggcaaucaguuucuggaugugcucuaaugggucucuacaguguagaauauguauuuaa

SEQ ID NO: 36588 - RNA, 1701 nt, Artificial Sequence
  derived and/or modified CDS sequence (wt) from hemagglutinin__InfluenzaA__ADF27609
augaaggcaauacuaguaguucugcuauauacauuugcaaccgcaaaugcagacacauuauguauagguuaucaugcgaacaauucaacagacacuguagacacaguacuagaaaagaauguaacaguaacacacucuguuaaccuucuagaagacaagcauaacgggaaacuaugcaaacuaagagggguagccccauugcauuuggguaaauguaacauugcuggcuggauccugggaaauccagagugugaaucacucuccacagcaagcucaugguccuacauuguggaaacaucuaguucagacaauggaacguguuacccaggagauuucaucgauuaugaggagcuaagagagcaauugagcucagugucaucauuugaaagguuugagauauuccccaagacaaguucauggcccaaucaugacucgaacaaaggugugacggcagcauguccucaagcuggagcaaaaagcuucuacaaaaauuuaauauggcuaguuaaaaaaggaaauucauacccaaagcucagcaaauccuacauuaaugauaaagggaaagaaguccucgugcuauggggcauucaccauccaucuacuagugcugaccaacaaagucucuaucagaaugcagaugcauauguuuuuguggggacaucaagauacagcaagaaguucaagccggaaauagcaauaagacccaaagugagggaucaagaagggagaaugaacuauuacuggacacuaguagagccgggagacaaaauaacauucgaagcaacuggaaaucuagugguaccgagauaugcauucgcaauggaaagaaaugcuggaucugguauuaucauuucagauacaccaguccacgauugcaauacaacuugucagacacccaagggugcuauaaacaccagccucccauuucagaauauacauccgaucacaauuggaaaauguccaaaauauguaaaaagcacaaaauugagacuggccacaggauugaggaaugucccgucuauucaaucuagaggccuauuuggggccauugccgguuucauugaagggggguggacagggaugguagauggaugguacgguuaucaccaucaaaaugagcaggggucaggauaugcagccgaccugaagagcacacagaaugccauugacgagauuacuaacaaaguaaauucuguuauugaaaagaugaauacacaguucacagcaguagguaaagaguucaaccaccuggaaaaaagaauagagaauuuaaauaaaaaaguugaugaugguuuccuggacauuuggacuuacaaugccgaacuguugguucuauuggaaaaugaaagaacuuuggacuaccacgauucaaaugugaagaacuuauaugaaaagguaagaagccaguuaaaaaacaaugccaaggaaauuggaaacggcugcuuugaauuuuaccacaaaugcgauaacacgugcauggaaagugucaaaaaugggacuuaugacuacccaaaauacucagaggaagcaaaauuaaacagagaagaaauagaugggguaaagcuggaaucaacaaggauuuaccagauuuuggcgaucuauucaacugucgccagcucauugguacugguagucucccugggggcaaucaguuucuggaugugcucuaaugggucucuacaguguagaauauguauuuaa

SEQ ID NO: 36589 - RNA, 1701 nt, Artificial Sequence
  derived and/or modified CDS sequence (wt) from hemagglutinin__InfluenzaA__ADF27619
augaaggcaauacuaguaguucugcuauauacauuugcaaccgcaaaugcagacacauuauguauagguuaucaugcgaacaauucaacagacacuguagacacaguacuagaaaagaauguaacaguaacacacucuguuaaccuucuagaagacaagcauaacgggaaacuaugcaaacuaagagggguagucccauugcauuuggguaaauguaacauugcuggcuggauccugggaaauccagagugugaaucacucuccacagcaagcucaugguccuacauuguggaaacaucuaguucagacaauggaacgugcuacccaggagauuucaucgauuaugaggagcuaagagagcaauugagcucagugucaucauuugaaagguuugagauauuccccaagacaaguucauggcccaaucaugacucgaacaaagguguaacggcagcauguccucaugcuggagcaaaaagcuucuacaaaaauuuaauauggcuaguuaaaaaaggaaauucauacccaaagcucagcaaauccuacauuaaugauaaagggaaagaaguccucgugcuauggggcauucaccauccaucuacuagugcugaccaacaaagucucuaucagaaugcagaugcauauguuuuuguggggacaucaagauacagcaagaaguucaagccggaaauagcaauaagacccaaagugagggaucaagaagggagaaugaacuauuacuggacacuaguagagccgggagacaaaauaacauucgaagcaacuggaaaucuagugguaccgagauaugcauucgcaauggaaagaaaugcuggaucugguauuaucauuucagauacaccaguccacgauugcaauacaacuugucagacacccaagggugcuauaaacaccagccucccauuucagaauauacauccgaucacaauuggaaaauguccaaaauauguaaaaagcacaaaauugagacuggccacaggauugaggaaugucccgucuauucaaucuagaggccuauuuggggccauugccgguuucauugaagggggguggacagggaugguagauggaugguacgguuaucaccaucaaaaugagcaggggucaggauaugcagccgaccugaagagcacacagaaugccauugacaagauuacuaacaaaguaaauucuguuauugaaaagaugaauacacaguucacagcaguagguaaagaguucaaccaccuggaaaaaagaauagagaauuuaaauaaaaaaguugaugaugguuuccuggacauuuggacuuacaaugccgaacuguugguucuauuggaaaaugaaagaacuuuggacuaccacgauucaaaugugaagaacuuauaugaaaagguaagaagccaguuaaaaaacaaugccaaggaaauuggaaacggcugcuuugaauuuuaccacaaaugcgauaacacgugcauggaaagugucaaaaaugggacuuaugacuaccccaaauacucagaggaagcaaaauuaaacagagaagaaauagaugggguaaagcuggaaucaacaaggauuuaccagauuuuggcgaucuauucaacugucgccaguucauugguacugguagucucccugggggcaaucaguuucuggaugugcucuaaugggucucuacaguguagaauauguauuuaa

SEQ ID NO: 36590 - RNA, 1701 nt, Artificial Sequence
  derived and/or modified CDS sequence (wt) from hemagglutinin__InfluenzaA__ADF27629
augaaggcaauacuaguaguucugcuauauacauuugcaaccgcaaaugcagacacauuauguauagguuaucaugcgaacaauucaacagacacuguagacacaguacuagaaaggaauguaacaguaacacacucuguuaaccuucuagaagacaagcauaacgggaaacuaugcaaacuaagagggguagccccacugcauuuggguaaauguaacauugcuggcuggauccugggaaauccagagugugaaucacucuccacagcaagcucaugguccuacauuguggaaacaucuaguucagacaauggaacguguuacccaggagauuucaucgauuaugaggagcuaagagagcaauugagcucagugucaucauuugaaagguuugagauauuccccaagacaaguucauggcccaaucaugacucgaacaaagguguaacggcagcauguccucaugcuggagcaaaaagcuucuacaaaaauuuaauauggcuaguuaaaaaaggaaauucauacccaaagcucagcaaauccuacauuaaugauaaagggaaagaaguccucgugcuauggggcauucaccauccaucuacuagugcugaccaacaaagucucuaucagaaugcagaugcauauguuuuuguggggacaucaagauacagcaagaaguucaagccggaaauagcaauaagacccaaagugagggaucaagaagggagaaugaacuauuacuggacacuaguagagccgggagacaaaauaacauucgaagcaacuggaaaucuagugguaccgagauaugcauucgcaauggaaagaaaugcuggaucugguauuaucauuucagauacaccaguccacgauugcaauacaacuugucagacacccaagggugcuauaaacaccagccucccauuucagaauauacauccgaucacaauuggaaaauguccaaaauauguaaaaagcacaaaauugagacuggccacaggauugaggaaugucccgucuauucaaucuagaggccuauuuggggccauugccgguuucauugaagggggguggacagggaugguagauggaugguacgguuaucaccaucaaaaugagcaggggucaggauaugcagccgaccugaagagcacacagaaugccauugacgagauuacuaacaaaguaaauucuguuauugaaaagaugaauacacaguucacagcaguagguaaagaguucaaccaccuggaaaaaagaauagagaauuuaaauaaaaaaguugaugaugguuuccuggacauuuggacuuacaaugccgaacuguugguucuauuggaaaaugaaagaacuuuggacuaccacgauucaaaugugaagaacuuauaugaaaagguaagaagccaguuaaaaaacaaugccaaggaaauuggaaacggcugcuuugaauuuuaccacaaaugcgauaacacgugcauggaaagugucaaaaaugggacuuaugacuacccaaaauacucagaggaagcaaaauuaaacagagaagaaauagaugggguaaagcuggaaucaacaaggauuuaccagauuuuggcgaucuauucaacugucgccaguucauugguacugguagucucccugggggcaaucaguuucuggaugugcucuaaugggucucuacaguguagaauauguauuuaa

SEQ ID NO: 36591 - RNA, 1701 nt, Artificial Sequence
  derived and/or modified CDS sequence (wt) from hemagglutinin__InfluenzaA__ADF27649
augaaggcaauacuaguaguucugcuauauacauuugcaaccgcaaaugcagacacauuauguauagguuaucaugcgaacaauucaacagacacuguagacacaguacuagaaaagaauguaacaguaacacacucuguuaaccuucuagaagacaagcauaacgggaaacuaugcaaacuaagaggaguagccccauugcauuuggguaaauguaacauugcuggcuggauccugggaaauccagagugugaaucacucuccacagcaagcucaugguccuacauuguggaaacaucuaguucagacaauggaacguguuacccaggagauuucaucgauuaugaggagcuaagagagcaauugagcucagugucaucauuugaaagguuugagauauuccccaagacaaguucauggcccaaucaugacucgaacaaagguguaacggcagcauguccucaugcuggagcaaaaagcuucuacaaaaauuuaauauggcuaguuaaaaaaggaaauucauacccaaagcucagcaaauccuacauuaaugauaaagggaaagaaguccucgugcuauggggcauucaccauccaucuacuagugcugaccaacaaagucucuaucagaaugcagaugcauauguuuuugugggaacaucaagauacagcaagaaguucaagccggaaauagcaauaagacccaaagugagggaucaagaagggagaaugaacuauuacuggacacuaguagagccgggagacaaaauaacauucgaagcaacuggaaaucuagugguaccgagauaugcauucgcaauggaaagaaaugcuggaucugguauuaucauuucagauacaccaguccacgauugcaauacaacuugucagacacccaagggugcuauaaacaccagccucccauuucagaauauacauccgaucacaauuggaaaauguccaaaauauguaaaaagcacaaaauugagacuggccacaggauugaggaaugucccgucuauccaaccuagaggccuauuuggggccauugccgguuucauugaagggggguggacagggaugguagauggaugguacgguuaucaccaucaaaaugagcaggggucaggauaugcagccgaccugaagagcacacagaaugccauugacaagauuacuaauaaaguaaauucuguuauugaaaagaugaauacacaguucacagcaguagguaaagaguucaaccaccuggaaaaaagaauagagaauuuaaauaaaaaaguugaugaugguuuccuggacauuuggacuuacaaugccgaacuguugguucuauuggaaaaugaaagaacuuuggacuaccacgauucaaaugugaagaacuuauaugaaaagguaagaagccaguuaaaaaacaaugccaaggaaauuggaaacggcugcuuugaauuuuaccacaaaugcgauaacacgugcauggaaagugucaaaaaugggacuuaugacuacccaaaauacucagaggaagcaaaauuaaacagagaagaaauagaugggguaaagcuggaaucaacaaggauuuaccagauuuuggcgaucuauucaacugucgccaguucauugguacugguagucucccugggggcaaucaguuucuggaugugcucuaaugggucucuacaguguagaauauguauuuaa

SEQ ID NO: 36592 - RNA, 1701 nt, Artificial Sequence; identical to SEQ ID NO: 35853
  derived and/or modified CDS sequence (wt) from hemagglutinin__InfluenzaA__ADF27659

SEQ ID NO: 36593 - RNA, 1701 nt, Artificial Sequence; identical to SEQ ID NO: 36508
  derived and/or modified CDS sequence (wt) from hemagglutinin__InfluenzaA__ADF27669

SEQ ID NO: 36594 - RNA, 1701 nt, Artificial Sequence
  derived and/or modified CDS sequence (wt) from hemagglutinin__InfluenzaA__ADF27679
augaaggcaauacuaguaguucugcuauauacauuugcaaccgcaaaugcagacacauuauguauagguuaucaugcgaacaauucaacagacacuguagacacaguacuagaaaagaauguaacaguaacacacucuguuaaccuucuagaagacaagcauaacgggaaacuaugcaaacuaagagggguagccccauugcauuuggguaaauguaacauugcuggcuggauccugggaaauccagagugugaaucacucuccacagcaagcucaugguccuacauuguggaaacaucuaguucagacaauggaacguguuacccaggagauuucaucgauuaugaggagcuaagagagcaauugagcucagugucaucauuugaaagguuugagauauuccccaaaacaaguucauggcccaaucaugacucgaacaaagguguaacggcagcauguccucaugcuggagcaaaaagcuucuacaaaaauuuaauauggcuaguuaaaaaaggaaauucauacccaaagcucagcaaauccuacauuaaugauaaagggaaagaaguccucgugcuauggggcauucaccauccaucuacuagugcugaccaacaaagucuuuaucagaaugcagaugcauauguuuuuguggggacaucaagguacagcaagaaguucaagccggaaauagcaauaagacccaaagugagggaucaagaagggagaaugaacuauuacuggacacuaguagagccgggagacaaaauaacauucgaagcaacuggaaaucuagugguaccgagauaugcauucgcaauggaaagaaaugcuggaucugguauuaucauuucagauacaccaguccacgauugcaauacaacuugucagacacccaagggugcuauaaacaccagccucccauuucagaauauacauccgaucacaauuggaaaauguccaaaauauguaaaaagcacaaaauugagacuggccacaggauugaggaauaucccgucuauucaaucuagaggccuauuuggggccauugccgguuucauugaagggggguggacagggaugguagauggaugguacgguuaucaccaucaaaaugagcaggggucaggauaugcagcugaccugaagagcacacagaaugccauugacgagauuacuaacaaaguaaauucuguuauugaaaagaugaauacacaguucacagcaguagguaaagaguucaaccaccuggaaaaaagaauagagaauuuaaauaaaaaaguugaugaugguuuccuggacauuuggacuuacaaugccgaacuguugguucuauuggaaaaugaaagaacuuuggacuaccacgauucaaaugugaagaacuuauaugaaaagguaagaagccaguuaaaaaacaaugccaaggaaauuggaaacggcugcuuugaauuuuaccacaaaugcgauaacacgugcauggaaagugucaaaaaugggacuuaugacuacccaaaauacucagaggaagcaaaauuaaacagagaagaaauagaugggguaaagcuggaaucaacaaggauuuaccagauuuuggcgaucuauucaacugucgccaguucauugguacugguagucucccugggggcaaucaguuucuggaugugcucuaaugggucucuacaguguagaauauguauuuaa

SEQ ID NO: 36595 - RNA, 1701 nt, Artificial Sequence
  derived and/or modified CDS sequence (wt) from hemagglutinin__InfluenzaA__ADF27689
augaaggcaauacuaguaguucugcuauauacauuugcaaccgcaaaugcagacacauuauguauagguuaucaugcgaacaauucaacagacacuguagacacaauacuagaaaagaauguaacaguaacacacucuguuaaccuucuagaagacaagcauaacgggaaacuaugcaaacuaagagggguagccccauugcauuuggguaaauguaacauugcuggcuggauccugggaaauccagagugugaaucacucuccacagcaagcucaugguccuacauuguggaaacaucuaguucagacaauggaacguguuacccaggagauuucaucgauuaugaggagcuaagagagcaauugagcucagugucaucauuugaaagguuugagauauuccccaagacaaguucauggcccaaucaugacucgaacaaagguguaacggcagcauguccucaugcuggagcaaaaagcuucuacaaaaauuuaauauggcuaguuaaaaagggaaauucauacccaaagcucagcaaauccuacauuaaugauaaagggaaagaaauccucgugcuauggggcauucaccauccaucuacuagugcugaccaacaaagucucuaucagaaugcagaugcauauguuuuuguggggacaucaagauacagcaagaaguucaagccggaaauagcaauaagacccaaagugagggaucaagaagggagaaugaacuacuacuggacacuaguagagccgggagacaaaauaacauucgaagcaacuggaaaucuagugguaccgagauaugcauucgcaauggaaagaaaugcuggaucugguauuaucauuucagauacaccaguccacgauugcaauacaacuugucagacacccaagggugcuauaaacaccagccucccauuucagaauauacauccgaucacaauuggaaaauguccaaaauauguaaaaagcacaaaauugagacuggccacaggauugaggaaugucccgucuauucaaucuagaggccuauuuggggccauugccgguuucauugaagggggguggacagggaugguagauggaugguacgguuaucaccaucaaaaugagcaggggucaggauaugcagccgaccugaagagcacacagaaugccauugacgagauuacuaacaaaguaaauucuguuauugaaaagaugaauacacaguucacagcaguagguaaagaguucaaccaccuggaaaaaagaauagagaauuuaaauaaaaagguugaugaugguuuccuggacauuuggacuuacaaugccgaacuguugguucuauuggaaaaugaaagaacguuggacuaccacgauucaaaugugaagaacuuauaugaaaagguaagaagccaguuaaaaaacaaugccaaggaaauuggaaacggcugcuuugaauuuuaccacaaaugcgauaacacgugcauggaaagugucaaaaaugggacuuaugacuacccaaaauacucagaggaagcaaaauuaaacagagaagaaauagaugggguaaagcuggaaucaacaaggauuuaccagauuuuggcgaucuauucaacugucgccaguucauugguacugguagucucccugggggcaaucaguuucuggaugugcucuaaugggucucuacaguguagaauauguauuuaa

SEQ ID NO: 36596 - RNA, 1701 nt, Artificial Sequence
  derived and/or modified CDS sequence (wt) from hemagglutinin__InfluenzaA__ADF27699
augaaggcaauacuaguaguucugcuauauacauuugcaaccgcaaaugcagacacauuauguauagguuaucaugcgaacaauucaacagacacuguagacacaguacuagaaaagaauguaacaguaacacacucuguuaaccuucuagaagacaagcauaacgggaaacuaugcaaacuaagagggguagccccauugcauuuggguaaauguaacauugcuggcuggauccugggaaauccagagugugaaucacucuccacagcaagcucaugguccuacauuguggaaacaucuaguucagacaauggaacauguuacccaggagauuucaucgauuaugaggagcuaagagagcaauugagcucagugucaucauuugaaagguuugagauguuccccaagacaaguucauggcccaaucaugacucgaacaaagguguaacagcagcauguccucaugcuggagcaaaaagcuucuacaaaaauuuaauauggcuaguuaaaaaaggaaauucauacccaaagcucagcaaauccuacauuaaugauaaagggaaagaaguccucgugcuauggggcauucaccauccauccacuagugcugaccaacaaagucucuaucagaaugcagaugcauauguuuuuguggggacaucaagauacagcaagaaguucaagccggaaauagcaauaagacccaaagugagggaucaagaagggagaaugaacuauuacuggacacuaguagagccgggagacaaaauaacauucgaagcaacuggaaaucuagugguaccgagauacgcauucgcaauggaaagaaaugcuggaucugguauuaucauuucagauacaccaguucacaauugcaauacaacuugucagacacccaagggugcuauaaacaccagccucccauuucagaauauacauccgaucacaauuggaaaauguccaaaauauguaaaaagcacaaaauugagacuggccacaggauugaggaaugucccgucuauucaaucuagaggccuauuuggggccauugccgguuucauugaagggggguggacagggaugguagauggaugguacgguuaucaccaucaaaaugagcaggggucaggauaugcagccgaccugaagagcacacagaaugccauugacgagauuacuaacaaaguaaauucuguuauugaaaagaugaauacacaguucacagcaguagguaaagaguucaaccaccuggaaaaaagaauagagaauuuaaauaaaaaaguugaugaugguuuccuggacauuuggacuuacaaugccgaacuguugguucuauuggaaaaugaaagaacuuuggacuaccacgauucaaaugugaagaacuuauaugaaaagguaagaagccaguuaaaaaacaaugccaaggaaguuggaaacggcugcuuugaauuuuaccacaaaugcgauaacacgugcauggaaagugucaaaaaugggacuuaugacuacccaaaauacucagaggaagcaaaauuaaacagagaagaaauagaugggguaaagcuggaaucaacaaggauuuaccagauuuuggcgaucuauucaacugucgccaguucauugguacugguagucucccugggggcaaucaguuucuggaugugcucuaaugggucucuacaguguagaauauguauuuaa

SEQ ID NO: 36597 - RNA, 1701 nt, Artificial Sequence
  derived and/or modified CDS sequence (wt) from hemagglutinin__InfluenzaA__ADF27709
augaaggcaauacuaguaguucugcuauauacauuugcaaccgcaaaugcagacacauuauguauagguuaucaugcgaacaauucaacagacacuguagacacaguacuagaaaagaauguaacaguaacacacucuguuaaccuucuagaagacaagcauaacgggaaacuaugcaaacuaagagggguagccccauugcauuuggguaaauguaacauugcuggcuggauccugggaaauccagagugugaaucacucuccacagcaagcucaugguccuacauuguggaaauaucuaguucagacaauggaacguguuacccaggagauuucaucaauuaugaggagcuaagagagcaauugagcucagugucaucauuugaaagguuugagauauuccccaagacaaguucauggcccaaucaugacucgaacaaagguguaacggcagcauguccucaugcuggagcaaaaagcuucuacaaaaauuuaauauggcuaguuaaaaaaggaaauucauacccaaagcucagcaaauccuacauuaaugauaaagggaaagaaguccucgugcuauggggcauucaccauccaucuacuagugcugaccaacaaagucucuaucagaaugcagaugcauauguuuuuguggggacaucaagauacagcaagaaguucaagccggaaauagcaauaagacccaaagugagggaucaagaagggagaaugaacuauuacuggacacuaguagagccgggagacaaaauaacauucgaagcaacuggaaaucuagugguaccgagauaugcauucgcaauggaaagaaaugcuggaucugguauuaucaucucagauacaccaguccacgauugcaauacaacuugucagacacccaagggugcuauaaacaccagccucccauuucagaauauacauccgaucacaauuggaaaauguccaaaauauguaaaaagcacaaaauugagacuggccacaggauugaggaaugucccgucuauucaaucuagaggccuauuuggggccauugccgguuucauugaagggggguggacagggaugguagauggaugguacgguuaucaccaucaaaaugagcaggggucaggauaugcagccgaccugaagagcacacagaaugccauugacaagauuacuaacaaaguaaauucuguuauugaaaagaugaauacacaguucacagcaguagguaaagaguucaaccaccuggaaaaaagaauagagaauuuaaauaaaaaaguugaugaugguuuccuggacauuuggacuuacaaugccgaacuguugguucuauuggaaaaugaaagaacuuuggacuaccacgauucaaaugugaagaacuuauaugaaaagguaagaagccaguuaaaaaacaaugccaaggaaauuggaaacggcugcuuugaauuuuaccacaaaugcgauaacacgugcauggaaagugucaaaaaugggacuuaugacuacccaaaauacucagaggaagcaaaauuaaacagagaagaaauagaugggguaaagcuggaaucaacaaggauuuaccagauuuuggcgaucuauucaacugucgccaguucauugguacugguagucucccugggggcaaucaguuucuggaugugcucuaaugggucucuacaguguagaauauguauuuaa

SEQ ID NO: 36598 - RNA, 1701 nt, Artificial Sequence
  derived and/or modified CDS sequence (wt) from hemagglutinin__InfluenzaA__ADF27785
augaaggcaauacuaguaguucugcuauauacauuugcaaccgcaaaugcagacacauuauguauagguuaucaugcgaacaauucaacagacacuguagacacaguacuagaaaagaauguaacaguaacacacucuguuaaccuucuagaagacaagcauaacgggaaacuaugcaaacuaagagggguagccccauugcauuuggguaaauguaacauugcuggcuggauccugggaaauccagagugugaaucacucuccacagcaagcucaugguccuacauuguggaaacaucuaguucagacaauggaacguguuacccaggagauuucaucgauuaugaggagcuaagagagcaauugagcucagugucaucauuugaaagguuugagauauuccccaagacaaguucauggcccaaucaugacucgaacaaagguguaacggcagcauguccucaugcuggagcaaaaagcuucuacaaaaauuuaauauggcuaguuaaaaaaggaaauucauacccaaagcucagcaaauccuacauuaaugauaaagggaaagaaguccucgugcuauggggcauucaccauccaucuacuagugcugaccaacaaagucucuaucagaaugcagaugcauauguuuuuguggggacaucaagauacagcaagaaguucaagccggaaauagcaauaagacccaaagugagggaucaagaagggagaaugaacuauuacuggacacuaguagagccgggagacaaaauaacauucgaagcaacuggaaaucuagugguaccgagauacgcauucgcaauggaaagaaaugcuggaucugguauuaucauuucagauacaccaguccacgauugcaauacaacuugucaaacacccaagggugcuauaaacaccagccucccauuucagaauauacauccgaucacaauuggaaaauguccaaaauauguaaaaagcacaaaauugagacuggccacaggacugaggaaugucccgucuauucaaucuagaggccuauuuggggccauugccggcuucauugaagggggguggacagggaugguagauggaugguacgguuaucaccaucaaaaugagcaggggucaggauaugcagccgaccugaagagcacacagaaugccauugacaagauuacuaacaaaguaaauucuguuauugaaaagaugaauacacaguucacagcaguagguaaagaguucaaccaccuggaaaaaagaauagagaauuuaaauaaaaaaguugaugaugguuuccuggacauuuggacuuacaaugccgaacuguugguucuauuggaaaaugaaagaacuuuggacuaccacgauucaaaugugaagaacuuauaugaaaagguaagaagccaguuaaaaaacaaugccaaggaaauuggaaacggcugcuuugaauuuuaccacaaaugcgauaacacgugcauggaaagugucaaaaaugggacuuaugacuacccaaaauacucagaggaagcaaaauuaaacagagaagaaauagaugggguaaagcuggaaucaacaaggauuuaccagauuuuggcgaucuauucaacugucgccaguucauugguacugguagucucccugggggcaaucaguuucuggaugugcucuaaugggucucuacaguguagaauauguauuuaa

SEQ ID NO: 36599 - RNA, 1701 nt, Artificial Sequence
  derived and/or modified CDS sequence (wt) from hemagglutinin__InfluenzaA__ADF27795
augaaggcaauacuaguaguucugcuauauacauuugcaaccgcaaaugcagacacauuauguauagguuaucaugcgaacaauucaacagacacuguagacacaguacuagaaaagaauguaacaguaacacacucuguuaaccuucuagaagacaagcauaacgggaaacuaugcaaacuaagagggguagccccauugcauuuggguaaauguaacauugcuggcuggauccugggaaauccagagugugaaucacucuccacagcaagcucaugguccuacauuguggaaacaucuaguucagacaauggaacguguuacccaggagauuucaucgauuaugaggagcuaagagagcaauugagcucagugucaucauuugaaagguuugagauauuccccaagacaaguucauggcccaaucaugacucgaacaaagguguaacggcagcaugcccucaugcuggagcaaagagcuucuacaaaaauuuaauauggcuaguuaaaaaaggaaauucauacccaaagcucagcaaauccuacauuaaugauaaagggaaagaaguccucgugcuauggggcauucaccauccaucuacuagugcugaccaacaaagucucuaucagaaugcagaugcauauguuuuuguggggacaucaagauacagcaagaaguucaagccggaaauagcaauaagacccaaagugagggaucaagaagggagaaugaacuauuacuggacacuaguaaagccgggagacaaaauaacauucgaagcaacuggaaaucuagugguaccgagauaugcauucgcaauggaaagaaaugcuggaucugguauuaucauuucagauacaccaguccacgauugcaauacaacuugucagacacccaagggugcuauaaacaccagccucccauuucagaauauacauccgaucacaauuggaaaauguccaaaauauguaaaaagcacaaaauugagacuggccacaggauugaggaaugucccgucuauucaaucuagaggccuguuuggggccauugccgguuucauugaagggggguggacagggaugguagauggaugguacgguuaucaccaucaaaaugagcaggggucaggauaugcagccgaccugaagagcacacagaaugccauugacgagauuacuaacaaaguaaauucuguuauugaaaagaugaauacacaguucacagcaguagguaaagaguucaaccaccuggaaaaaagaauagagaauuuaaauaaaaaaguugaugaugguuuccuggacauuuggacuuacaaugccgaacuguugguucuauuggaaaaugaaagaacuuuggacuaccacgauucaaaugugaagaacuuauaugaaaagguaagaagccaguuaaaaaacaaugccaaggaaauuggaaacggcugcuuugaauuuuaccacaaaugcgauaacacgugcauggaaagugucaaaaaugggacuuaugacuacccaaaauacucagaggaagcaaaauuaaacagagaagaaauagaugggguaaagcuggaaucaacaaggauuuaccagauuuuggcgaucuauucaacugucgccaguucauugguacugguagucucccugggggcaaucaguuucuggaugugcucuaaugggucucuacaguguagaauauguauuuaa

SEQ ID NO: 36600 - RNA, 1701 nt, Artificial Sequence
  derived and/or modified CDS sequence (wt) from hemagglutinin__InfluenzaA__ADF27805
augaaggcaauacuaguaguucugcuauauacauuugcaaccgcaaaugcagacacauuauguauagguuaucaugcgaacaauucaacagacacuguagacacaguacuagaaaggaauguaacaguaacacacucuguuaaccuucuagaagacaagcauaacgggaaacuaugcaaacuaagagggguggccccauugcauuuggguaaauguaacauugcuggcuggauccugggaaauccagagugugaaucacucuccacagcaagcucaugguccuacauuguggagacaucuaguucagacaauggaacguguuacccaggagauuucaucgauuaugaggagcuaagagagcaauugagcucagugucaucauuugaaagguuugagauauuccccaagacaaguucauggcccaaucaugacucgaacaaagguguaacggcagcauguccucaugcuggagcaaaaagcuucuacaaaaauuuaauauggcuaguuaaaaaaggaaauucauacccaaagcucagcaaauccuacauuaaugauaaagggaaagaaguccucgugcuauggggcauucaccauccaucuacuagugcugaccaacaaagucucuaucagaaugcagaugcauauguuuuuguggggacaucaagauacagcaagaaguucaagccggaaauagcaauaagacccaaagugagggaucaagaagggagaaugaacuauuacuggacacuaguagagccgggagacaaaauaacauucgaagcaacuggaaaucuagugguaccgagauaugcauucgcaauggaaagaaaugcuggaucugguauuaucauuucagauacaccaguccacgauugcaauacaacuugucagacacccaagggugcuauaaacaccagccucccauuucagaauauacauccgaucacaauuggaaaauguccaaaauauguaaaaagcacaaaauugagacuggccacaggauugaggaaugucccgucuauucaaucuagaggccuauuuggggccauugccgguuucauugaagggggguggacagggaugguagauggaugguacgguuaucaccaucaaaaugagcaggggucaggauaugcagccgaccugaagagcacacagaaugcuauugacgagauuacuaacaaaguaaauucuguuauugaaaagaugaauacacaguucacagcaguagguaaagaguucaaccaccuggaaaaaagaauagagaauuuaaauaaaaaaguugaugaugguuuccuggacauuuggacuuacaaugccgaacuguugguucuauuggaaaaugaaagaacuuuggacuaccacgauucaaaugugaagaacuuauaugaaaagguaagaagccaguuaaaaaacaaugccaaggaaauuggaaacggcugcuuugaauuuuaccacaaaugcgauaacacgugcauggaaagugucaaaaaugggacuuaugacuacccaaaauacucagaggaagcaaaauuaaacagagaagaaauagaugggguaaagcuggaaucaacaaggauuuaccagauuuuggcgaucuauucaacugucgccaguucauugguacugguagucucccugggggcaaucaguuucuggaugugcucuaaugggucucuacaguguagaauauguauuuaa

SEQ ID NO: 36601 - RNA, 1701 nt, Artificial Sequence
  derived and/or modified CDS sequence (wt) from hemagglutinin__InfluenzaA__ADF27815
augaaggcaauacuaguaguucugcuauauacauuugcaaccgcaaaugcagacacauuauguauagguuaucaugcgaacaauucaacagacacuguagacacaguacuagaaaagaauguaacaguaacacacucuguuaaccuucuagaagacaagcauaacgggaaacuaugcaaacuaagagggguagccccauugcauuuggguaaauguaacauugcuggcuggauccugggaaauccagagugugaaucacucuccacagcaagcucaugguccuacauuguggaaacaucuaguucagacaauggaacguguuacccaggagauuucaucgauuaugaggagcuaagagagcaauugagcucagugucaucauuugaaagguuugagauauuccccaagacaaguucauggcccaaucaugacucgaacaaagguguaacggcagcauguccucaugauggagcaaaaagcuucuacaaaaauuuaauauggcuaguuaaaaaaggaaauucauacccaaagcucagcaaauccuacauuaaugauaaagggaaagaaguccucgugcuauggggcauucaccauccaucuacuagugcugaccaacaaagucucuaucagaaugcagaugcauauguuuuuguggggacaucaagauacagcaagaaguucaagccggaaauagcaauaagacccaaagugagggaucaagaagggagaaugaacuauuacuggacacuaguagagccgggagacaaaauaacauucgaagcaacuggaaaucuagugguaccgagauaugcauucgcaauggaaagaaaugcuggaucugguauuaucauuucagauacaccaguccacgauugcaauacaacuugucagacacccaagggugcuauaaacaccagccucccauuucagaauauacauccgaucacaauuggaaaauguccaaaauauguaaaaagcacaaaauugagacuggccacaggauugaggaaugucccgucuauucaaucuagaggccuauuuggggccauugccgguuucauugaagggggguggacagggaugguagauggaugguacgguuaucaccaucaaaaugagcaggggucaggauaugcagccgaccugaagagcacacagaaugccauugacaagauuacuaacaaaguaaauucuguuauugaaaagaugaauacacaguucacagcaguagguaaagaguucaaccaccuggaaaaaagaauagagaauuuaaauaaaaaaguugaugaugguuuccuggacauuuggacuuacaaugccgaacuguugguucuauuggaaaaugaaagaacuuuggacuaccacgauucaaaugugaagaacuuauaugaaaagguaagaagccaguuaaaaaacaaugccaaggaaauuggaaacggcugcuuugaauuuuaccacaaaugcgauaacacgugcauggaaagugucaaaaaugggacuuaugacuacccaaaauacucagaggaagcaaaauuaaacagagaagaaauagaugggguaaagcuggaaucaacaaggauuuaccagauuuuggcgaucuauucaacugucgccaguucauugguacugguagucucccugggggcaaucaguuucuggaugugcucuaaugggucucuacaguguagaauauguauuuaa

SEQ ID NO: 36602 - RNA, 1701 nt, Artificial Sequence
  derived and/or modified CDS sequence (wt) from hemagglutinin__InfluenzaA__ADF27825
augaaggcaauacuaguaguucugcuauauacauuugcaaccgcaaaugcagacacauuauguauagguuaucaugcgaacaauucaacagacacuguagacacaguacuagaaaggaauguaacaguaacacacucuguuaaccuucuagaagacaagcauaacgggaaacuaugcaaacuaagagggguagccccauugcauuuggguaaauguaacauugcuggcuggauccugggaaauccagagugugaaucacucuccacagcaagcucaugguccuacauuguggaaacaucuaguucagacaauggaacguguuacccaggagauuucaucgauucugaggagcuaagagagcaauugagcucagugucaucauuugaaagguuugagauauuccccaagacaaguucauggcccaaucaugacucgaacaaagguguaacggcagcauguccucaugcuggagcaaaaagcuucuacaaaaauuuaauauggcuaguuaaaaaaggaaauucauacccaaagcucagcaaauccuacauuaaugauaaagggaaagaaguccucgugcuauggggcauucaccauccaucuacuagugcugaccaacaaagucucuaucagaaugcagaugcauauguuuuuguggggacaucaagauacagcaagaaguucaagccggaaauagcaauaagacccaaagugagggaucaagaagggagaaugaacuauuacuggacacuaguagagccgggagacaaaauaacauucgaagcaacuggaaaucuagugguaccgagauaugcauucgcaauggaaagaaaugcuggaucugguauuaucauuucagauacaccaguucacgauugcaauacaacuugucagacacccaagggugcuauaaacaccagccucccauuucagaauauacauccgaucacaauuggaaaauguccaaaauauguaaaaagcacaaaauugagacuggccacaggauugaggaaugucccgucuauucaaucuagaggccuauuuggggccauugccgguuucauugaagggggguggacagggaugguagauggaugguacgguuaucaccaucaaaaugagcaggggucaggauaugcagccgaccugaagagcacacagaaugccauugacgagauuacuaacaaaguaaauucuguuauugaaaagaugaauacacaguucacagcaguagguaaagaguucaaccaccuggaaaaaagaauagagaauuuaaauaaaaaaguugaugaugguuuccuggacauuuggacuuacaaugccgaacuguugguucuauuggaaaaugaaagaacuuuggacuaccacgauucaaaugugaagaacuuauaugaaaagguaagaagccaguuaaaaaacaaugccaaggaaauuggaaacggcugcuuugaauuuuaccacaaaugcgauaacacgugcauggaaagugucaaaaaugggacuuaugacuacccaaaauacucagaggaagcaaaauuaaacagagaagaaauagaugggguaaagcuggaaucaacaaggauuuaccagauuuuggcgaucuauucaacugucgccaguucauugguacugguagucucccugggggcaaucaguuucuggaugugcucuaaugggucucuacaguguagaauauguauuuaa

SEQ ID NO: 36603 - RNA, 1701 nt, Artificial Sequence
  derived and/or modified CDS sequence (wt) from hemagglutinin__InfluenzaA__ADF27845
augaaggcaauacuaguaguucugcuauauacauuugcaaccgcaaaugcagacacauuauguauagguuaucaugcgaacaauucaacagacacuguagacacaguacuagaaaagaauguaacaguaacacacucugcuaaccuucuagaagacaagcauaacgggaaacuaugcaaacuaagagggguagccccauugcauuuggguaaauguaacauugcuggcuggauccugggaaauccagagugugaaucacucuccacagcaagcucaugguccuacauuguggaaacaucuaguucagacaauggaacguguuacccaggagauuucaucgauuaugaggagcuaagagagcaauugagcucagugucaucauuugaaagguuugagauauuccccaagacaaguucauggcccaaucaugacucgaacaaagguguaacggcagcauguccucaugcuggagcaaaaagcuucuacaaaaauuuaauauggcuaguuaaaaaaggaaauucauacccaaagcucagcaaauccuacauuaaugauaaagggaaagaaguccuugugcuauggggcauucaccauccaucuacuaaugcugaccaacaaagucucuaucagaaugcagaugcauauguuuuuguggggacaucaagauacagcaagaaguucaagccggaaauagcaauaagacccaaagugagggaucaagaagggagaaugaacuauuacuggacacuaguagagccgggagacaaaauaacauucgaagcaacuggaaaucuagugguaccgagauaugcauucgcaauggaaagaaaugcuggaucugguauuaucauuucagauacaccaguccacgauugcaauacaacuugucagacacccaagggugcuauaaacaccagccucccauuucagaauauacauccgaucacaauuggaaaauguccaaaauauguaaaaagcacaaaauugagacuggccacaggauugaggaaugucccgucuauucaaucuagaggccuauuuggggccauugccgguuucauugaagggggguggacagggaugguagauggaugguacgguuaucaccaucaaaaugagcaggggucaggauaugcagccgaccugaagagcacacagaaugccauugacgagauuacuaacaaaguaaauucuguuauugaaaagaugaauacacaguucacagcaguagguaaagaguucaaccaccuggaaaaaagaauagagaauuuaaauaaaaagguugaugaugguuuccuggacauuuggacuuacaaugccgaauuguugguucuauuggaaaaugaaagaacuuuggacuaccacgauucaaaugugaagaacuuauaugaaaagguaagaagccaguuaaaaaacaaugccaaggaaauuggaaacggcugcuuugaauuuuaccacaaaugcgauaacacgugcauggaaagugucaaaaaugggacuuaugacuacccaaaauacucagaggaagcaaaauuaaacagagaagaaauagaugggguaaagcuggaaucaacaaggauuuaccagauuuuggcgaucuauucaacugucgccaguucauugguacugguagucucccugggggcaaucaguuucuggaugugcucuaaugggucucuacaguguagaauauguauuuaa

SEQ ID NO: 36604 - RNA, 1701 nt, Artificial Sequence
  derived and/or modified CDS sequence (wt) from hemagglutinin__InfluenzaA__ADF27855
augaaggcaauacuaguaguucugcuauauacauuugcaaccgcaaaugcagacacauuauguauagguuaucaugcgaacaauucaacagacacuguagacacaguacuagaaaagaauguaacaguaacacacucuguuaaccuucuagaagacaagcauaacgggaaacuaugcaaacuaagagggguagccccauugcauuuggguaaauguaacauugcuggcuggauccugggaaauccagagugugaaucacucuccacagcaagcucaugguccuacauuguggaaacaucuaguucagacaauggaacguguuacccaggagauuucaucgauuaugaggagcuaagagagcaauugagcucagugucaucauuugaaagguuugagauauuccccaagacaaguucauggcccaaucaugacucgaacaaagguguaacggcagcauguccucaugcuggagcaaaaagcuucuacaaaaauuuaauauggcuaguuaaaaaaggaaauucauacccaaagcucagcaaauccuacauuaaugauaaagggaaagaaguccucgugcuauggggcauucaccauccaucuacuagugcugaccaacaaagucucuaucagaaugcagaugcauauguuuuuguggggacaucaagauacagcaagaaguucaagccggaaauagcaauaagacccaaagugagggaucaagaagggagaaugaacuauuacuggacacuaguagagccgggagacaaaauaacauucgaagcaacuggaaaucuagugguaccgagauacgcauucgcaauggaaagaaaugcuggaucugguauuaucauuucagauacaccaguccacgauugcaauacaacuugucaaacacccaagggugcuauaaacaccagccucccauuucagaauauacauccgaucacaauuggaaaauguccaaaauauguaaaaagcacaaaauugagacuggccacaggauugaggaaugucccgucuauucaaucuagaggccuauuuggggccauugccggcuucauugaagggggguggacagggaugguagauggaugguacgguuaucaccaucaaaaugaacaggggucaggauaugcagccgaccugaagagcacacagaaugccauugacaagauuacuaacaaaguaaauucuguuauugaaaagaugaacacacaguucacagcaguagguaaagaguucaaccaccuggaaaaaagaauagagaauuuaaauaaaaaaguugaugaugguuuccuggacauuuggacuuacaaugccgaacuguugguucuauuggaaaaugaaagaacuuuggacuaccacgauucaaaugugaagaacuuauaugaaaagguaagaagccaguuaaaaaacaaugccaaggaaauuggaaacggcugcuuugaauuuuaccacaaaugcgauaacacgugcauggaaagugucaaaaaugggacuuaugacuacccaaaauacucagaggaagcaaaauuaaacagagaagaaauagaugggguaaagcuggaaucaacaaggauuuaccagauuuuggcgaucuauucaacugucgccaguucauugguacugguagucucccugggggcaaucaguuucuggaugugcucuaaugggucucuacaguguagaauauguauuuaa

SEQ ID NO: 36605 - RNA, 1701 nt, Artificial Sequence; identical to SEQ ID NO: 36604
  derived and/or modified CDS sequence (wt) from hemagglutinin__InfluenzaA__ADF27865

SEQ ID NO: 36606 - RNA, 1701 nt, Artificial Sequence; identical to SEQ ID NO: 36604
  derived and/or modified CDS sequence (wt) from hemagglutinin__InfluenzaA__ADF27875

SEQ ID NO: 36607 - RNA, 1701 nt, Artificial Sequence
  derived and/or modified CDS sequence (wt) from hemagglutinin__InfluenzaA__ADF27885
augaaggcaauacuaguaguucugcuauauacauuugcaaccgcaaaugcagacacauuauguauagguuaucaugcgaacaauucaacagacacuguagacacaguacuagaaaagaauguaacaguaacacacucuguuaaccuucuagaagacaagcauaacgggaaacuaugcaaacuaagagggguagccccauugcauuuggguaaauguaacauugcuggcuggauccugggaaauccagagugugaaucacucuccacagcaagcucaugguccuacauuguggaaacaucuaguucagacaauggaacguguuacccaggagauuucaucgauuaugaggagcuaagagagcaauugagcucagugucaucauuugaaagguuugagauauuccccaagacaaguucauggcccaaucaugacucgaacaaagguguaacggcagcauguccucaugcuggagcaaaaagcuucuacaaaaauuuaauauggcuaguuaaaaaaggaaauucauacccaaagcucagcaaauccuacauuaaugauaaagggaaagaaguccucgugcuauggggcauucaccauccaucuacuagugcugaccaacaaagucucuaucagaaugcagaugcauauguuuuuguggggacaucaagauacagcaagaaguucaagccggaaauagcaauaagacccaaagugagggaucaagaagggagaaugaacuauuacuggacacuaguagagccgggagacaaaauaacauucgaagcaacuggaaaucuagugguaccgagauacgcauucgcaauggaaagaaaugcuggaucugguauuaucauuucagauacaccaguccacgauugcaauacaacuugucaaacacccaaaggugcuauaaacaccagccucccauuucagaauauacauccgaucacaauuggaaaauguccaaaauauguaaaaagcacaaaauugagacuggccacaggauugaggaaugucccgucuauucaaucuagaggccuauuuggggccauugccggcuucauugaagggggguggacagggaugguagauggaugguacgguuaucaccaucaaaaugagcaggggucaggauaugcagccgaccugaagagcacacagaaugccauugacaagauuacuaacaaaguaaauucuguuauugaaaagaugaauacacaguucacagcaguagguaaagaguucaaccaccuggaaaaaagaauagagaauuuaaauaaaaaaguugaugaugguuuccuggacauuuggacuuacaaugccgaacuguugguucuauuggaaaaugaaagaacuuuggacuaccacgauucaaaugugaagaacuuauaugaaaagguaagaagccaguuaaaaaacaaugccaaggaaauuggaaacggcugcuuugaauuuuaccacaaaugcgauaacacgugcauggaaagugucaaaaaugggacuuaugacuacccaaaauacucagaggaagcaaaauuaaacagagaagaaauagaugggguaaagcuggaaucaacaaggauuuaccagauuuuggcgaucuauucaacugucgccaguucauugguacugguagucucccugggggcaaucaguuucuggaugugcucuaaugggucucuacaguguagaauauguauuuaa

SEQ ID NO: 36608 - RNA, 1701 nt, Artificial Sequence
  derived and/or modified CDS sequence (wt) from hemagglutinin__InfluenzaA__ADF27895
augaaggcaauacuaguaguucugcuauauacauuugcaaccgcaaaugcagacacauuauguauagguuaucaugcgaacaauucaacagacacuguagacacaguacuagaaaagaauguaacaguaacacacucuguuaaccuucuagaagacaagcauaacgggaaacuaugcaaacuaagagggguagccccauugcauuuggguaaauguaacauugcuggcuggauccuggggaauccagagugugaaucacucuccacagcaagcucaugguccuacauuguggaaacaucuaguucagacaauggaacguguuacccaggagauuucaucgauuaugaggagcuaagagagcaauugagcucagugucaucauuugaaagguuugagauauuccccaagacaaguucauggcccaaucaugacucgaacaaagguguaacggcagcauguccucaugcuggagcaaaaagcuucuacaaaaauuuaauauggcuaguuaaaaaaggaaauucauacccaaagcucagcaaauccuacauuaaugauaaagggaaagaaguccucgugcuguggggcauucaccauccaucuacuagugcugaccaacaaagucucuaucagaaugcagaugcauauguuuuuguggggacaucaagauacagcaagaaauucaagccggaaauagcaauaagacccaaagugagggaucaagaagggagaaugaacuauuacuggacacuaguagagccgggagacaaaauaacauucgaagcaacuggaaaucuagugguaccgagauaugcauucgcaauggaaagaaaugcuggaucugguauuaucauuucagauacaccaguccacgauugcaauacaacuugucagacacccaagggugcuauaaacaccagccucccauuucagaauauacauccgaucacaauuggaaaauguccaaaauauguaaaaagcacaaaauugagacuggccacaggauugaggaaugucccgucuauucaaucuagaggccuauuuggggccauugccgguuucauugaagggggguggacagggaugguagauggaugguacgguuaucaccaucaaaaugagcaggggucaggauaugcagccgaccugaagagcacacagaaugccauugacgagauuacuaacaaaguaaauucuguuauugaaaagaugaauacacaguucacagcaguagguaaagaguucaaccaccuggaaaaaagaauagagaauuuaaauaaaaaaguugaugaugguuuccuggacauuuggacuuacaaugccgaacuguugguucuauuggaaaaugaaagaacuuuggacuaccacgauucaaaugugaagaacuuauaugaaaagguaagaagccaguuaaaaaacaaugccaaggaaauuggaaacggcugcuuugaauuuuaccacaaaugcgauaacacgugcauggaaagugucaaaaaugggacuuaugacuacccaaaauacucagaggaagcaaaauuaaacagagaagaaauagaugggguaaagcuggaaucaacaaggauuuaccagauuuuggcgaucuauucaacugucgccaguucauugguacugguagucucccugggggcaaucaguuucuggaugugcucuaaugggucucuacaguguagaauauguauuuaa

SEQ ID NO: 36609 - RNA, 1701 nt, Artificial Sequence
  derived and/or modified CDS sequence (wt) from hemagglutinin__InfluenzaA__ADF27915
augaaggcaauacuaguaguucugcuauauacauuugcaaccgcaaaugcagacacauuauguauagguuaucaugcgaacaauucaacagacacuguagacacaguacuagaaaagaauguaacaguaacacacucuguuaaccuucuagaagacaagcauaacgggaaacuaugcaaacuaagagggguagccccauugcauuuggguaaauguaacauugcuggcuggauccugggaaauccagagugugaaucacucuccacagcaagcucaugguccuacauuguggaaacaucuaguucagacaauggaacguguuacccaggagauuucaucgauuaugaggagcuaagagagcaauugagcucagugucaucauuugaaagguuugagauauuccccaagacaaguucauggcccaaucaugacucgaacaaagguguaacggcagcauguccucaugcuggagcaaaaagcuucuacaaaaauuuaauauggcuaguuaaaaaaggaaauucauacccaaagcucagcaaauccuacauuaaugauaaagggaaagaaguccucgugcuauggggcauucaccauccaucugcuagugcugaccaacaaagccucuaucagaaugcagaugcauauguuuuuguggggacaucaagauacagcaagaaguucaagccggaaauagcaauaagacccaaagugagggaucaagaagggagaaugaacuauuacuggacacuaguagagccgggagacaaaauaacauucgaagcaacuggaaaucuagugguaccgagauacgcauucgcaauggaaagaaaugcuggaucugguauuaucauuucagauacaccaguccacgauugcaauacaacuugucaaacacccaagggugcuauaaacaccagccucccauuucagaauauacauccgaucacaauuggaaaauguccaaaauauguaaaaagcacaaaauugagacuggccacaggauugaggaaugucccgucuauucaaucuagaggccuauuuggggccauugccggcuucauugaagggggguggacagggaugguagauggaugguacgguuaucaccaucaaaaugagcaggggucaggauaugcagccgaccugaagagcacacagaaugccauugacaagauuacuaacaaaguaaauucuguuauugaaaagaugaauacacaguucacagcaguagguaaagaguucaaccaccuggaaaaaagaauagagaauuuaaauaaaaaaguugaugaugguuuccuggacauuuggacuuacaaugccgaacuguugguucuauuggaaaaugaaagaacuuuggacuaccacgauucaaaugugaagaacuuauaugaaaagguaagaagccaguuaaaaaacaaugccaaggaaauuggaaacggcugcuuugaauuuuaccacaaaugcgauaacacgugcauggaaagugucaaaaaugggacuuaugacuacccaaaauacucagaggaagcaaaauuaaacagagaagaaauagaugggguaaagcuggaaucaacaaggauuuaccagauuuuggcgaucuauucaacugucgccaguucauugguacugguagucucccugggggcaaucaguuucuggaugugcucuaaugggucucuacaauguagaauauguauuuaa

SEQ ID NO: 36610 - RNA, 1701 nt, Artificial Sequence
  derived and/or modified CDS sequence (wt) from hemagglutinin__InfluenzaA__ADF27925
augaaggcaauacuaguaguucugcuauauacauuugcaaccgcaaaugcagacacauuauguauagguuaucaugcgaacaauucaacagacacuguagacacaguacuagaaaagaauguaacaguaacacacucuguuaaccuucuagaagacaagcauaacgggaaacuaugcaaacuaagagggguagccccauugcauuuggguaaauguaacauugcuggcuggauccugggaaauccagagugugaaucacucuccacagcaagcucaugguccuacauuguggaaacaucuaguucagacaauggaacguguuacccaggagauuucaucgauuaugaggagcuaagagagcaauugagcucagugucaucauuugaaagguuugagauauuccccaagacaaguucauggcccaaucaugacucgaacaaagguguaacggcagcauguccucaugcuggagcaaaaagcuucuacaaaaauuuaauauggcuaguuaaaaaaggaaauucauacccaaagcucagcaacuccuacauuaaugauaaagggaaagaaguucucgugcuauggggcauucaccauccaucuacuagugcugaccaacaaagucucuaucagaaugcagaugcauauguuuuuguggggacaucaagauacagcaagaaguucaagccggaaauagcaauaagacccaaagugagggaucaagaagggagaaugaacuauuacuggacacuaguagagccgggagacaaaauaacauucgaagcaacuggaaaucuagugguaccgagauaugcauucgcaauggaaagaaaugcuggaucugguauuaucauuucagauacaccagcccacgauugcaauacaacuugucagacacccaagggugcuauaaacaccagccucccauuucagaauauacauccgaucacaauuggaaaauguccaaaauauguaaaaagcacaaaauugagaauggccacaggauugaggaaugucccgucuauucaaucuagaggccuauuuggggccauugccgguuucauugaagggggguggacagggaugguagauggaugguacgguuaucaccaucaaaaugagcaggggucaggauaugcagccgaccugaagagcacacagaaugccauugacgagauuacuaacaaaguaaauucuguuauugaaaagaugaauacacaguucacagcaguagguaaagaguucaaccaccuggaaaaaagaauagagaauuuaaauaaaaaaguugaugaugguuuccuggacauuuggacuuacaaugccgaacuguugguucuauuggaaaaugaaagaacuuuggacuaccacgauucaaaugugaagaacuuauaugaaaagguaagaagccaguuaaaaaacaaugccaaggaaauuggaaacggcugcuuugaauuuuaccacaaaugcgauaacacgugcauggaaagugucaaaaaugggacuuaugacuacccaaaauacucagaggaagcaaaauuaaacagagaagaaauagaugggguaaagcuggaaucaacaaggauuuaccagauuuuggcgaucuauucaacugucgccaguucauugguacugguagucucccugggggcaaucaguuucuggaugugcucuaaugggucucuacaguguagaauauguauuuaa

SEQ ID NO: 36611 - RNA, 1701 nt, Artificial Sequence
  derived and/or modified CDS sequence (wt) from hemagglutinin__InfluenzaA__ADF27935
augaaggcaauacuaguaguucugcuauauacauuugcaaccgcaaaugcagacacauuauguauagguuaucaugcgaacaauucaacagacacuguagacacaguacuagaaaagaauguaacaguaacacacucuguuaaccuucuagaagacaagcauaacgggaaacuaugcaaacuaagagggguagccccauugcauuuggguaaauguaacauugcuggcuggauccugggaaauccaaagugugaaucacucuccacagaaagcucaugguccuacauuguggaaacaucuaguucagacaauggaacguguuacccaggagauuucaucaauuaugaggagcuaagagagcaauugagcucagugucaucauuugaaagguuugagauauuccccaagacaaguucauggcccaaucaugacucgaacaaagguguaacggcugcauguccucaugcuggagcaaaaagcuucuacaaaaauuuaauauggcuaguuaaaaaagggaauucauacccaaagcucagcaaauccuacauuaaugauaaagggaaagaaguccucgugcuauggggcauucaccauccaucuacuagugcugaccaacaaagucucuaucagaaugcagaugcauauguuuuuguggggacaucaagauacagcaagaaguucaagccggaaauagcaauaagacccaaagugagggaucaagaagggagaaugaacuauuacuggacacuaguagagccgggagacaaaauaacauucgaagcaacuggaaaucuagugguaccgagauaugcauucgcaauggaaagaaaugcuggaucugguauuauaaucucagauacaccaguccacgauugcaauacaacuugucagacacccaagggugcuauaaacaccagccucccauuucagaauauacauccgaucacaauuggaaaauguccaaaauauguaaaaagcacaaaauugagacuggccacaggauugaggaaugucccaucuauucaaucuagaggccuauuuggggccauugccgguuucauugaagggggguggacagggaugguagauggaugguacgguuaucaccaucaaaaugagcaggggucaggauaugcagccgaccugaagagcacacagaaugccauugacaagauuacuaacaaaguaaauucuguuauugaaaagaugaauacacaguucacagcaguagguaaagaguucaaccaccuggaaaaaagaauagagaauuuaaauaaaaaaguugaugaugguuuccuggacauuuggacuuacaaugccgaacuguugguucuauuggaaaaugaaagaacuuuggacuaccacgauucaaaugugaagaacuuauaugaaaagguaagaagccaguuaaaaaacaaugccaaggaaauuggaaacggcugcuuugaauuuuaccacaaaugcgauaacacgugcauggaaagugucaaaaaugggacuuaugacuacccaaaauacucagaggaagcaaaauuaaacagagaagaaauagaugggguaaagcuggaaucaacaaggauuuaccagauuuuggcgaucuauucaacugucgccaguucauugguacugguagucucccugggggcaaucaguuucuggaugugcucuaaugggucucuacaguguagaauauguauuuaa

SEQ ID NO: 36612 - RNA, 1701 nt, Artificial Sequence
  derived and/or modified CDS sequence (wt) from hemagglutinin__InfluenzaA__ADF27955
augaaggcaauacuaguaguucugcuauauacauuugcaaccgcaaaugcagacacauuauguauagguuaucaugcaaacaauucaacagacacuguagacacaguacuagaaaagaauguaacaguaacacacucuguuaaccuucuagaagacaagcauaacgggaaacuaugcaaacuaagagggguagccccauugcauuuggguaaauguaacauugcuggcuggauccugggaaauccagagugugaaucacucuccacagcaagcucaugguccuacauuguggaaacaucuaguucagacaauggaacguguuacccaggagauuucaucgauuaugaggagcuaagagagcaauugagcucagugucaucauuugaaagguuugagauauuccccaagacaaguucauggcccaaucaugacucgaacaaagguguaacggcagcauguccucaugcuggagcaaaaagcuucuacaaaaauuuaauauggcuaguuaaaaaaggaaauucauacccaaagcucagcaacuccuacauuaaugauaaagggaaagaaguccucgugcuauggggcauucaccauccaucuacuagugcugaccaacaaagucucuaucagaaugcagaugcauauguuuuuguggggacaucaagauacagcaagaaguucaagccggaaauagcaauaagacccaaagugagggaucaagaagggagaaugaacuauuacuggacacuaguagagccgggagacaaaauaacauucgaagcaacuggaaaucuagugguaccgagauacgcauucgcaauggaaagaaaugcuggaucugguauuaucauuucagauacaccaguccacgauugcaauacaacuugucaaacacccaagggugcuauaaacaccagccucccauuucagaauauacauccgaucacaauuggaaaauguccaaaauauguaaaaagcacaaaauugagacuggccacaggauugaggaaugucccgucuauucaaucuagaggccuauuuggggccauugccggcuucauugaagggggguggacagggaugguagauggaugguacgguuaucaccaucaaaaugagcaggggucaggauaugcagccgaccugaagagcacacagaaugccauugacaagauuacuaacaaaguaaauucuguuauugaaaagaugaauacacaguucacagcaguagguaaagaguucaaccaccuggaaaaaagaauagagaauuuaaauaaaaaaguugaugaugguuuccuggacauuuggacuuacaaugccgaacuguugguucuauuggaaaaugaaagaacuuuggacuaccacgauucaaaugugaagaacuuauaugaaaagguaagaagccaguuaaaaaacaaugccaaggaaauuggaaacggcugcuuugaauuuuaccacaaaugcgauaacacgugcauggaaagugucaaaaaugggacuuaugacuacccaaaauacucagaggaagcaaaauuaaacagagaagaaauagaugggguaaagcuggaaucaacaaggauuuaccagauuuuggcgaucuacucaacugucgccaguucauugguacugguagucucccugggggcaaucaguuucuggaugugcucuaaugggucucuacaguguagaauauguauuuaa

SEQ ID NO: 36613 - RNA, 1701 nt, Artificial Sequence
  derived and/or modified CDS sequence (wt) from hemagglutinin__InfluenzaA__ADF27965
augaaggcaauacuaguaguucugcuauauacauuugcaaccgcaaaugcagacacauuauguauagguuaucaugcgaacaauucaacagacacuguagacacaguacuagaaaagaauguaacaguaacacacucuguuaaccuucuagaagacaagcauaacgggaaacuaugcaaacuaagaggaguagccccauugcauuuggguaaauguaacauugcuggcuggaucuugggaaauccagagugugaaucacucuccacagcaagcucaugguccuacauuguggaaacaucuaguucagacaauggaacguguuacccaggagauuucaucgauuaugaggagcuaagagagcaauugagcucagugucaucauuugaaagguuugagauauuccccaagacaaguucauggcccaaucaugacucgaacaaagguguaacggcagcauguccucaugcuggagcaaaaagcuucuacaaaaauuuaauauggcuaguuaaaaaaggaaauucauacccaaagcucagcaaauccuacauuaaugauaaagggaaaaaaguccucgugcuauggggcauucaccauccaucuacuagugcugaccaacaaagucucuaucagaaugcagaugcauauguuuuuguggggacaucaagauacagcaagaaguucaagccggaaauagcaauaagacccaaagugagggaucaagaagggagaaugaacuauuacuggacacuaguagagccgggagacaaaauaacauucgaagcaacuggaaaucuagugguaccgagauaugcauucgcaauggaaagaaaugcuggaucugguauuaucauuucagauacaccagucaacgauugcaauacaacuugucagacacccaagggugcuauaaacaccagccucccauuucagaacauacauccgaucacaauuggaaaauguccaaaauauguaaaaagcacaaaauugagacuggccacaggauugaggaaugucccgucuauucaaucuagaggccuauuuggggccauugccgguuucauugaagggggguggacagggaugguagauggaugguacgguuaucaccaucaaaaugagcaggggucaggauaugcagccgaccugaagagcacacagaaugccauugacaagauuacuaacaaaguaaauucuguuauugaaaagaugaauacacaguucacagcaguaggcaaagaguucaaccaccuggaaaaaagaauagagaauuuaaauaaaaaaguugaugaugguuuccuggacauuuggacuuacaaugccgaacuguugguucuauuggaaaaugaaagaacuuuggacuaccacgauucaaaugugaagaacuuauaugaaaagguaagaagccaguuaaaaaacaaugccaaggaaauuggaaacggcugcuuugaauuuuaccacaaaugcgauaacacgugcauggaaagugucaaaaaugggacuuaugacuacccaaaauacucagaggaagcaaaauuaaacagagaagaaauagaugggguaaagcuggaaucaacaaggauuuaccagauuuuggcgaucuauucaacugucgccaguucauugguacugguagucucccugggggcaaucaguuucuggaugugcucuaaugggucucuacaguguagaauauguauuuaa

SEQ ID NO: 36614 - RNA, 1701 nt, Artificial Sequence
  derived and/or modified CDS sequence (wt) from hemagglutinin__InfluenzaA__ADF27975
augaaggcaauacuaguaguucugcuauauacauuugcaaccgcaaaugcagacacauuauguauagguuaucaugcgaacaauucaacagacacuguagacacaguacuagaaaagaauguaacaguaacacacucuguuaaccuucuagaagacaagcauaacgggaaacuaugcaaacuaagagggguagccccauugcauuuggguaaauguaacauugcuggcuggauccugggaaauccagagugugaaucacucuccacagcaagcucaugguccuacauuguggaaacaucuaguucagacaauggaacguguuacccaggagauuucaucgauuaugaggagcuaagagagcaauugagcucagugucaucauuugaaagguuugagauuuuccccaagacaaguucauggcccaaucaugacucgaacaaagguguaacggcagcauguccucaugcuggagcaaaaagcuucuacaaaaauuuaauauggcuaguuaaaaaaggaaauucauacccaaagcucagcaaauccuacaucaaugauaaagggaaagaaguccucgugcuauggggcauucaccauccaucuacuagugcugaccaacaaagucucuaucagaaugcagaugcauauguuuuuguggggacaucaagauacagcaagaaguucaagccggaaauagcaauaagacccaaagugagggaucaagaagggagaaugaacuauuacuggacacuaguagagccgggagacaaaauaacauucgaagcaacuggaaaucuagugguaccgagauacgcauucgcaauggaaagaaaugcuggaucugguauuaucauuucagauacaccaguccacgauugcaauacaacuugucaaacacccaagggugcuauaaacaccagccucccauuucagaauauacauccgaucacaauuggaaaauguccaaaauauguaaaaagcacaaaauugagacuggccacaggauugaggaaugucccgucuauucaaucuagaggccuauuuggggccauugccggcuuuauugaagggggguggacagggaugguagauggaugguacgguuaucaccaucaaaaugagcaggggucaggauaugcagccgaccugaagagcacacagaaugccauugacaagauuacuaacaaaguaaauucuguuauugaaaagaugaauacacaguucacagcaguagguaaagaguucaaccaccuggaaaaaagaauagagaauuuaaauaaaaaaguugaugaugguuuccuggacauuuggacuuacaaugccgagcuguugguucuauuggaaaaugaaagaacuuuggacuaccacgauucaaaugugaagaacuuauaugaaaagguaagaagccaguuaaaaaacaaugccaaggaaauuggaaacggcugcuuugaauuuuaccacaaaugcgauaacacgugcauggaaagugucaaaaaugggaccuaugacuacccaaaauacucagaggaagcaaaauuaaacagagaagaaauagaugggguaaagcuggaaucaacaaggauuuaccagauuuuggcgaucuauucaacugucgccaguucauugguacugguagucucccugggggcaaucaguuucuggaugugcucuaaugggucucuacaguguagaauauguauuuaa

SEQ ID NO: 36615 - RNA, 1701 nt, Artificial Sequence
  derived and/or modified CDS sequence (wt) from hemagglutinin__InfluenzaA__ADF27985
augaaggcaauacuaguaguucugcuauauacauuugcaaccgcaaaugcagacacauuauguauagguuaucaugcgaacaauucaacagacacuguagacacaguacuagaaaggaauguaacaguaacacacucuguuaaccuucuagaagacaagcauaacgggaaacuaugcaaacuaagagggguggccccauugcauuuggguaaauguaacauugcuggcuggauccugggaaauccagagugugaaucacucuccacagcaagcucaugguccuacauuguggagacaucuaguucagacaauggaacguguuacccaggagauuucaucgauuaugaggagcuaagagagcaauugagcucagugucaucauuugaaagguuugagauauuccccaagacaaguucauggcccaaucaugacucgaacaaagguguaacggcagcauguccucaugcuggagcaaaaagcuucuacaaaaauuuaauauggcuaguuaaaaaaggaaauucauacccaaagcucagcaaauccuacauuaaugauaaagggaaagaaguccucgugcuauggggcauucaccauccaucuacuagugcugaccaacaaagucucuaucagaaugcagaugcauauguuuuuguggggacaucaagauacagcaagaaguucaagccggaaauagcaauaagacccaaagugagggaucaagaagggagaaugaacuauuacuggacacuaguagagccgggagacaaaauaacauucgaagcaacuggaaaucuagugguaccgagauaugcauucgcaauggaaagaaaugcuggaucugguauuaucauuucagauacaccaguccacgauugcaauacaacuugucagacacccaagggugcuauaaacaccagccucccauuucagaauauacauccgaucacaauuggaaaauguccaaaauauguaaaaagcacaaaauugagacuggccacaggauugaggaaugucccgucuauucaaucuagaggccuauuuggggccauugccgguuucauugaagggggguggacagggaugguagauggaugguacgguuaucaccaucaaaaugagcaggggucaggauaugcagccgaccugaagagcacacagaaugccauugacgagauuacuaacaaaguaaauucuguuauugaaaagaugaauacacaguucacagcaguagguaaagaguucaaccaccuggaaaaaagaauagagaauuuaaauaaaaaaguugaugaugguuuccuggacauuuggacuuacaaugccgaacuguugguucuauuggaaaaugaaagaacuuuggacuaccacgauucaaaugugaagaacuuauaugaaaagguaagaagccaguuaaaaaacaaugccaaggaaauuggaaacggcugcuuugaauuuuaccacaaaugcgauaacacgugcauggaaagugucaaaaaugggacuuaugacuacccaaaauacucagaggaagcaaaauuaaacagagaagaaauagaugggguaaagcuggaaucaacaaggauuuaccagauuuuggcgaucuauucaacugucgccaguucauugguacugguagucucccugggggcaaucaguuucuggaugugcucuaaugggucucuacaguguagaauauguauuuaa

SEQ ID NO: 36616 - RNA, 1701 nt, Artificial Sequence
  derived and/or modified CDS sequence (wt) from hemagglutinin__InfluenzaA__ADF27995
augaaggcaauacuaguaguucugcuauauacauuugcaaccgcaaaugcagacacauuauguauagguuaucaugcgaacaauucaacagacacuguagacacaguacuagaaaagaauguaacaguaacacacucugcuaaccuucuagaagauaagcauaacgggaaacuaugcaaacuaagagggguagccccauugcauuuggguaaauguaacauugcuggcuggauccugggaaauccagagugugaaucacucuccacagcaagcucaugguccuacauuguggaaacaucuaguucagacaauggaacguguuacccaggagauuucaucgauuaugaggagcuaagagagcaauugagcucagugucaucauuugaaagguuugagauauuccccaagacaaguucauggcccaaucaugacucgaacaaagguguaacggcagcauguccucaugcuggagcaaaaagcuucuacaaaaauuuaauauggcuaguuaaaaaaggaaauucauacccaaagcucagcaaauccuacauuaaugauaaagggaaagaaguccucgugcuauggggcauucaccauccaucuacuaaugcugaccaacaaagucucuaucagaaugcagaugcauauguuuuuguggggacaucaagauacagcaagaaguucaagccggaaauagcaauaagacccaaagugagggaucaagaagggagaaugaacuauuacuggacacuaguagagccgggagacaaaauaacauucgaagcaacuggaaaucuagugguaccgagauaugcauucgcaauggaaagaaaugcuggaucugguauuaucauuucagauacaccagcccacgauugcaauacaacuugucagacacccaagggugcuauaaacaccagccucccauuucagaauauacauccgaucacaauuggaaaauguccaaaauauguaaaaagcacaaaauugagacuggccacaggauugaggaauaucccgucuauucaaucuagaggccuauuuggggccauugccgguuucauugaagggggguggacagggaugguagauggaugguacgguuaucaccaucaaaaugagcaggggucaggauaugcagccgaccugaagagcacacagaaugccauugacgagauuacuaacaaaguaaauucuguuauugaaaagaugaauacacaguucacagcaguagguaaagaguucaaccaccuggaaaaaagaauagagaauuuaaauaaaaagguugaugaugguuuccuggacauuuggacuuacaaugccgaacuguugguucuauuggaaaaugaaagaacuuuggacuaccacgauucaaaugugaagaacuuauaugaaaagguaagaagccaguuaaaaaacaaugccaaggaaauuggaaacggcugcuuugaauuuuaccacaaaugcgauaacacgugcauggaaagugucaaaaaugggacuuaugacuacccaaaauacucagaggaagcaaaauuaaacagagaagaaauagaugggguaaagcuggaaucaacaaggauuuaccagauuuuggcgaucuauucaacugucgccaguucauugguacugguagucucccugggggcaaucaguuucuggaugugcucuaaugggucucuacaguguagaauauguauuuaa

SEQ ID NO: 36617 - RNA, 1701 nt, Artificial Sequence; identical to SEQ ID NO: 36239
  derived and/or modified CDS sequence (wt) from hemagglutinin__InfluenzaA__ADF28005

SEQ ID NO: 36618 - RNA, 1701 nt, Artificial Sequence; identical to SEQ ID NO: 36239
  derived and/or modified CDS sequence (wt) from hemagglutinin__InfluenzaA__ADF28015

SEQ ID NO: 36619 - RNA, 1701 nt, Artificial Sequence; identical to SEQ ID NO: 35845
  derived and/or modified CDS sequence (wt) from hemagglutinin__InfluenzaA__ADF28025

SEQ ID NO: 36620 - RNA, 1701 nt, Artificial Sequence; identical to SEQ ID NO: 35845
  derived and/or modified CDS sequence (wt) from hemagglutinin__InfluenzaA__ADF28045

SEQ ID NO: 36621 - RNA, 1701 nt, Artificial Sequence
  derived and/or modified CDS sequence (wt) from hemagglutinin__InfluenzaA__ADF28055
augaaggcaauacuaguaguucugcuauauacauuugcaaccgcaaaugcagacacauuauguauagguuaucaugcgaacaauucaacagacacuguagacacaguacuagaaaagaauguaacaguaacacacucuguuaaccuucuagaagacaagcauaacgggaaacuaugcaaacuaagagggguagccccauugcauuuggguaaauguaacauugcuggcuggauccugggaaauccagagugugaaucacucuccacagcaagcucaugguccuacauuguggaaacaucuaguucagacaauggaacguguuacccaggagauuucaucgauuaugaggagcuaagagagcaauugagcucagugucaucauuugaaagguuugagauauuccccaagacaaguucauggcccaauuaugacucgaacaaagguguaacggcagcauguccucaugcuggagcaaagagcuucuauaaaaauuuaauauggcuaguuaaaaaaggaaauucauacccaaagcucagcaaauccuacauuaaugauaaagggaaagaaguccucgugcuauggggcauucaccauccaucuacuagugcugaccaacaaagucucuaucagaaugcagaugcauauguuuuuguggggacaucaagauacagcaagaaguucaagccggaaauagcaauaagacccaaagugagggaucaagaagggagaaugaacuauuacuggacacuaguagagccgggagacaaaauaacauucgaagcaacuggaaaucuagugguaccgagauaugcauucgcaauggaaagaaaugcuggaucugguauuaucauuucagauacaccaguccacgauugcaauacaacuugucagacacccaagggugcuauaaacaccagccucccauuucagaauauacauccgaucacaauuggaaaauguccaaaauauguaaaaagcacaaaauugagacuggccacaggauugaggaaugucccgucuauucaaucuagaggccuauuuggggccauugccgguuucauugaagggggguggacagggaugguagauggaugguacgguuaucaccaucaaaaugagcaggggucaggauaugcagccgaccugaagagcacacagaaugccauugacaagauuacuaacaaaguaaauucuguuauugaaaagaugaauacacaguucacagcaguagguaaagaguucaaccaccuggaaaaaagaauagagaauuuaaauaaaaaaguugaugaugguuuccuggacauuuggacuuacaaugccgaacuguugguucuauuggaaaaugaaagaacuuuggacuaccacgauucaaaugugaagaacuuauaugaaaagguaagaagccaguuaaaaaacaaugccaaggaaauuggaaacggcugcuuugaauuuuaccacaaaugcgauaacacgugcauggaaagugucaaaaaugggacuuaugacuacccaaaauacucagaggaagcaaaauuaaacagagaagaaauagaugggguaaagcuggaaucaacaaggauuuaccagauuuuggcgaucuauucaacugucgccaguucauugguacugguagucucccugggggcaaucaguuucuggaugugcucuaaugggucucuacaguguagaauauguauuuaa

SEQ ID NO: 36622 - RNA, 1701 nt, Artificial Sequence
  derived and/or modified CDS sequence (wt) from hemagglutinin__InfluenzaA__ADF28065
augaaggcaauacuaguaguucugcuauauacauuugcaaccgcaaaugcagacacauuauguauagguuaucaugcgaacaauucaacagacacuguagacacaguacuagaaaagaauguaacaguaacacacucuguuaaccuucuagaagacaagcauaacgggaaacuaugcaaacuaagagggguagccccauugcauuuggguaaauguaacauugcuggcuggauccugggaaauccagagugugaaucacucuccacagcaagcucaugguccuacauuguggaaacaucuaguucagacaauggaacguguuacccaggagauuucaucgauuaugaggagcuaagagagcaauugagcucagugucaucauuugaaagguuugagauauuccccaagacaaguucauggcccaaucaugacucgaacaaagguguaacggcagcauguccucaugcuggagcaaaaagcuucuacaaaaauuuaauauggcuaguuaaaaaaggaaauucauacccaaagcucagcaaauccuacauuaaugauaaagggaaagaaguccucgugcuauggggcauucaccauccaucuacuagugcugaccaacaaagucucuaucagaaugcagaugcauauguuuuuguggggacaucaagauacagcaagaaguucaagccggaaauagcaauaagacccaaagugagggaucaagaagggagaaugaacuauuacuggacacuaguagagccgggagacaaaauaacauucgaagcaacuggaaaucuagugguaccgagauaugcauucgcaauggaaagaaaugcuggaucugguauuaucauuucagauacaccaguccacgauugcaauacaacuugucagacacccaagggugcuauaaacaccagccucccauuucagaauauacauccgaucacaauuggaaaauguccaaaauauguaaaaagcacaaaauugagacuggccacaggauugaggaaugucccgucuauucaaucuagaggccuauuuggggccauugccgguuucauugaagggggguggacagggaugguagauggaugguacgguuaucaccaucaaaaugagcaggggucaggauaugcagccgaccugaagagcacacagaaugccauugacaagauuacuaacaaaguaaauucuguuauugaaaagaugaauacacaguucacagcaguagguaaagaguucaaccaccuggaaaaaagaauagagaauuuaaauaaaaaaguugaugaugguuuccuggacauuuggacuuacaaugccgaacuguugguucuauuggaaaaugaaagaacuuuggacuaccacgauucaaaugugaagaacuuauaugaaaagguaagaagccaguuaaaaaacaaugccaaggaaauuggaaacggcugcuuugaauuuuaccacaaaugcgauaacacgugcauggaaagugucaaaaaugggacuuaugacuacccaaaauacucagaggaagcaaaauuaaacagagaagaaauagaugggguaaagcuggaaucaacaagaauuuaccagauuuuggcgaucuauucaacugucgccaguucauugguacugguagucucccugggggcaaucaguuucuggaugugcucuaaugggucucuacaguguagaauauguauuuaa

SEQ ID NO: 36623 - RNA, 1701 nt, Artificial Sequence
  derived and/or modified CDS sequence (wt) from hemagglutinin__InfluenzaA__ADF28075
augaaggcaauacuaguaguucugcuauauacauuugcaaccgcaaaugcagacacauuauguauagguuaucaugcgaacaauucaacagacacuguagacacaguacuagaaaagaauguaacaguaacacacucuguugaccuucuagaagacaagcauaacgggaaacuaugcaaacuaagagggguagccccauugcauuuggguaaauguaacauugcuggcuggauccugggaaauccagagugugaaucacucuccacagcaagcucaugguccuacauuguggaaacaucuaguucagacaauggaacguguuacccaggagauuucaucgauuaugaggaacuaagagagcaauugagcucagugucaucauuugaaagguuugagauauuccccaagacaaguucauggcccaaucaugacucgaacaaagguguaacggcagcauguccucaugcuggagcaaaaagcuucuacaaaaauuuaauauggcugguuaaaaaaggaaauucauacccaaagcucagcaaauccuacauuaaugauaaagggaaagaaguccucgugcuauggggcauucaccauccaucuacuagugcugaccaacaaagucucuaucagaaugcagaugcauauguuuuuguggggucaucaagauacagcaagaaguucaagccggaaauagcaauaagacccaaagugagggaucaagaagggagaaugaacuauuacuggacacuaguagagccgggagacaaaauaacauucgaagcaacuggaaaucuagugguaccgagauaugcauucgcaauggaaagaaaugcuggaucugguauuaucauuucggauacaccaguccacgauugcaauacaacuugucagacacccaagggugcuauaaacaccagccucccauuucagaauauacauccgaucacaauuggaaaauguccaaaauauguaaaaagcacaaaauugagacuggccacaggauugaggaaugucccgucuauucaaucuagaggccuauuuggggccauugccgguuucauugaagggggguggacagggaugguagauggaugguacgguuaucaccaucaaaaugagcaggggucaggauaugcagccgaccugaagagcacacagaaugccauugacgagauuacuaacaaaguaaauucuguuauugaaaagaugaauacacaguucacagcaguagguaaagaguucaaccaccuggaaaaaagaauagagaauuuaaauaaaaaaguugaugaugguuuccuggacauuuggacuuacaaugccgaacuguugguucuauuggaaaaugaaagaacuuuggacuaccacgauucaaaugugaagaacuuauaugaaaagguaagaagccaguuaaaaaacaaugccaaggaaauuggaaacggcugcuuugaauuuuaccacaaaugcgauaacacgugcauggaaagugucaaaaaugggacuuaugacuacccaaaauacucagaggaagcaaaauuaaacagagaagaaauagaugggguaaagcuggaaucaacaaggauuuaccagauuuuggcgaucuauucaacugucgccaguucauugguacugguagucucccugggggcaaucaguuucuggaugugcucuaaugggucucuacaguguagaauauguauuuaa

SEQ ID NO: 36624 - RNA, 1701 nt, Artificial Sequence; identical to SEQ ID NO: 35789
  derived and/or modified CDS sequence (wt) from hemagglutinin__InfluenzaA__ADF28085

SEQ ID NO: 36625 - RNA, 1701 nt, Artificial Sequence
  derived and/or modified CDS sequence (wt) from hemagglutinin__InfluenzaA__ADF28107
augaaggcaauacuaguaguucugcuauauacauuugcaaccgcaaaugcagacacauuauguauagguuaucaugcgaacaauucaacagacacuguagacacaguacuagaaaagaauguaacaguaacacacucuguuaacauucuagaagacaagcauaacgggaaacuaugcaaacuaagagggguagccccauugcauuuggguaaauguaacauugcuggcuggauccugggaaauccagagugugaaucacucuccacagcaagcucaugguccuacauuguggaaacaucuaguucagacaauggaacguguuacccaggagauuucaucgauuaugaggagcuaagagagcaauugagcucagugucaucauuugaaagguuugagauauuccccaagacaaguucauggcccaaucaugacucgaacaaagguguaacggcagcauguccucaugcuggagcaaaaagcuucuacaaaaauuuaauauggcuaguuaaaaaaggaaauucauacccaaagcucagcaaauccuacauuaaugauaaagggaaagaaguccucgugcuauggggcauucaccauccaucuacuagugcugaccaacaaagucucuaucagaaugcagaugcauauguuuuuguggggucaucaagauacagcaagaaguucaagccggaaauagcaauaagacccaaagugagggaucaagaagggagaaugaacuauuacuggacacuaguagagccgggagacaaaauaacauucgaagcaacuggaaaucuagugguaccgagauaugcauucgcaauggaaagaaaugcuggaucugguauuaucauuucagauacaccaguccacgauugcaauacaacuugucagacacccaagggugcuauaaacaccagccucccauuucagaauauacauccgaucacaauuggaaaauguccaaaauauguaaaaagcacaaaauugagacuggccacaggauugaggaaugucccgucuauucaaucuagaggccuauuuggggccauugccggcuucauugaagggggguggacagggaugguagauggaugguacgguuaucaucaucaaaaugagcaggggucaggauaugcagccgaccugaagagcacacagaaugccauugacgagauuacuaacaaaguaaauucuguuauugaaaagaugaauacacaguucacagcaguagguaaagaguucaaccaccuggaaaaaagaauagagaauuuaaauaaaaaaguugaugaugguuuccuggacauuuggacuuacaaugccgaacuguugguucuauuggaaaaugaaagaacuuuggacuaccacgauucaaaugugaagaacuuauaugaaaagguaagaagccagcuaaaaaacaaugccaaggaaauuggaaacggcugcuuugaauuuuaccacaaaugcgauaacacgugcauggaaagugucaaaaaugggacuuaugacuacccaaaauacucagaggaagcaaaauuaaacagagaagaaauagaugggguaaagcuggaaucaacaaggauuuaccagauuuuggcgaucuauucaacugucgccaguucauugguacugguagucucccugggggcaaucaguuucuggaugugcucuaaugggucucuacaguguagaauauguauuuaa

SEQ ID NO: 36626 - RNA, 1701 nt, Artificial Sequence
  derived and/or modified CDS sequence (wt) from hemagglutinin__InfluenzaA__ADF28117
augaaggcaauacuaguaguucugcuauauacauuugcaaccgcaaaugcagacacauuauguauagguuaucaugcgaacaauucaacagacacuguagacacaguacuagaaaagaauguaacaguaacacacucuguuaaccuucuagaagacaagcauaacgggaaacuaugcaaacuaagagggguagccccauugcauuuggguaaauguaacauugcuggcuggauccugggaaauccagagugugaaucacucuccacagcaagcucaugguccuacauuguggaaacaucuaguucagacaauggaacguguuacccaggagauuucaucaauuaugaggagcuaagagagcaauugagcucagugucaucauuugaaagguuugagauauuccccaagacaaguucauggcccaaucaugacucgaacaaagguguaacggcagcauguccucaugcuggagcaaaaagcuucuacaaaaauuuaauauggcuaguuaaaaaaggaaauucauacccaaagcucagcaaauccuacauuaaugauaaagggaaagaaguccucgugcuauggggcauucaccauccaucuacuagugcugaccaacaaagucucuaucagaaugcagaugcauauguuuuuguggggacaucaagauacagcaagaaguucaagccggaaauagcaauaagacccaaagugagggaucaagaagggagaaugaacuauuacuggacacuaguagagccgggagacaaaauaacauucgaagcaacuggaaaucuagugguaccgagauaugcauucgcaauggaaagaaaugcuggaucugguauuaucaucucagauacaccaguccacgauugcaauacaacuugucagacacccaagggugcuauaaacaccagccucccauuucagaauauacauccgaucacaauuggaaaauguccaaaauauguaaaaagcacaaaauugagacuggccacaggauugaggaaugucccgucuauucaaucuagaggccuauuuggggccauugccgguuucauugaagggggguggacagggaugguagauggaugguacgguuaucaccaucaaaaugagcaggggucaggauaugcagccgaccugaagagcacacagaaugccauugacaagauuacuaacaaaguaaauucuguuauugaaaagaugaauacacaguucacagcaguagguaaagaguucaaccaccuagaaaaaagaauagagaauuuaaauaaaaaaguugaugaugguuuccuggacauuuggacuuacaaugccgaacuguugguucuauuggaaaaugaaagaacuuuggacuaccacgauucaaaugugaagaacuuauaugaaaagguaagaagccaguuaaaaaacaaugccaaggaaauuggaaacggcugcuuugaauuuuaccacaaaugcgauaacacgugcauggaaagugucaaaaaugggacuuaugacuacccaaaauacucagaggaagcaaaauuaaacagagaagaaauagaugggguaaagcuggaaucaacaaggauuuaccagauuuuggcgaucuauucaacugucgccaguucauugguacugguagucucccugggggcaaucaguuucuggaugugcucuaaugggucucuacaguguagaauauguauuuaa

SEQ ID NO: 36627 - RNA, 1701 nt, Artificial Sequence
  derived and/or modified CDS sequence (wt) from hemagglutinin__InfluenzaA__ADF29918
augaaggcaauacuaguaguacugcuauauacauuugcaaccgcaaaugcagacacauuauguauagguuaucaugcgaacaauucaacagacacuguagacacaguacuagaaaagaauguaacaguaacacacucuguuaaccuucuagaagacaagcauaacgggaaacuaugcaaacuaagagggguagccccauugcauuuggguaaauguaacauugcuggcuggauccugggaaauccagagugugaaucacucuccacagcaagcucaugguccuacauuguggaaacaucuaguucagacaauggaacguguuacccaggagauuucaucgauuaugaggagcuaagagagcaauugagcucagugucaucauuugaaagguuugagauauuccccaagacaaguucauggcccaaucaugacucgaacaaagguguaacggcagcauguccucaugcuggagcaaaaagcuucuacaaaaauuuaauauggcuaguuaaaaaaggaaauucauacccaaagcucagcagauccuacauuaaugauaaagggaaagaaguccucgugcuauggggcauucaccauccaucuacuagugcugaccaacaaagucucuaucagaaugcagaugcauauguuuuuguggggacaucaagauacagcaagaaguucaagccggaaauagcaauaagacccaaagugaggaaucaagaagggagaaugaacuauuacuggacacuaguagagccgggagacaaaauaacauucgaagcaacuggaaaucuagugguaccgagauaugcauucgcaauggaaagaaaugcuggaucugguauuaucauuucagauacaccaguccacgauugcaauacaacuugucagacacccaagggugcuauaaacaccagccucccauuucagaauauacauccgaucacaauuggaaaauguccaaaauauguaaaaagcacaaaauugagacuggccacaggauugaggaaugucccgucuauucaaucuagaggccuauuuggggccauugccgguuucauugaagggggguggacagggaugguagauggaugguacgguuaucaccaucaaaaugagcaggggucaggauaugcagccgaccugaagagcacacaaaaugccauugacgagauuacuaacaaaguaaauucuguuauugaaaagaugaauacacaguucacagcaguagguaaagaguucaaccaccuggaaaaaagaauagagaauuuaaauaaaaagguugaugaugguuuccuggacauuuggacuuacaaugccgaacuguugguucuauuggaaaaugaaagaacuuuggacuaccacgauucaaaugugaagaacuuauaugaaaagguaagaagccaguuaaaaaacaaugccaaggaaauuggaaacggcugcuuugaauuuuaccacaaaugcgauaacacgugcauggaaagugucaaaaaugggacuuaugacuacccaaaauacucagaggaagcaaaauuaaacagagaagaaauagaugggguaaagcuggaaucaacaaggauuuaccagauuuuggcgaucuauucaacugucgccaguucauugguacugguagucucccugggggcaaucaguuucuggaugugcucuaaugggucucuacaguguagaauauguauuuaa

SEQ ID NO: 36628 - RNA, 1701 nt, Artificial Sequence
  derived and/or modified CDS sequence (wt) from hemagglutinin__InfluenzaA__ADF42689
augaaggcaauacuaguaguucugcuauauacauuugcaaccgcaaaugcagacacauuauguauagguuaucaugcgaacaauucaacagacacuguagacacaguacuagaaaagaauguaacaguaacacacucuguuaaccuucuagaagacaagcauaacgggaaacuaugcaaacuaagagggguagccccauugcauuuggguaaauguaacauugcuggcuggauccugggaaauccagagugugaaucacucuccacagcaagcucaugguccuacauuguggaaacaucuaguucagacaauggaacguguuacccaggagauuucaucgauuaugaggagcuaagagagcaauugagcucagugucaucauuugaaagguuugagauauuccccaagacaaguucauggcccaaucaugacucgaacaaagguguaacggcagcauguccucaugcuggagcaaaaagcuucuacaaaaauuuaauauggcuaguuaaaaaaggaaauucauacccaaagcucagcaaauccuacauuaaugauaaagggaaagaaguccucgugcuauggggcauucaccauccaucuacuagugcugaccaacaaagucucuaucagaaugcagaugcauauguuuuuguggggacaucaagauacagcaagaaguucaagccggaaauagcaauaagacccaaagugagggaucaagaagggagaaugaacuauuacuggacacuaguagagccgggagacaaaauaacauucgaagcaacuggaaaucuagugguaccgagauaugcauucgcaauggaaagaaaugcuggaucugguauuaucauuucagauacaccaguccacgauugcaauacaacuugucagacacccaagggugcuauaaacaccagccucccauuucagaauauacauccgaucacaauuggaaaauguccaaaauauguaaaaagcacaaaauugagacuggccacaggauugaggaaugucccgucuauucaaucuagaggccuauuuggggccauugccgguuucauugaagggggguggacagggaugguagauggaugguacgguuaucaccaucaaaaugagcaggggucaggauaugcagccgaccugaagagcacacagaaugccauugacgagauuacuaacaaaguaaauucuguuauugaaaagaugaauacacaguucacagcaguagguaaagaguucaaccaccuggaaaaaagaauagagaauuuaaauaaaaaaguugaugaugguuuccuggacauuuggacuuacaaugccgaacuguugguucuauuggaaaaugaaagaacuuuggacuaccacgauucaaaugugaagaacuuauaugaaaagguaagaagccaguuaaaaaacaaugccaaggaaauuggaaacggcugcuuugaauuuuaccacaaaugcgauaacacgugcauggaaagugucaaaaaugggacuuaugacuacccaaaauacucagaggaagcaaaauuaaacagagaagaaauagaugggguaaagcuggaaucaacaaggauuuaccagauuuuggcgaucuauucaacugucgccaguucauugguacuggcagucucccugggggcaaucgguuucuggaugugcucuaaugggucucuacaguguagaauauguauuuaa

SEQ ID NO: 36629 - RNA, 1701 nt, Artificial Sequence
  derived and/or modified CDS sequence (wt) from hemagglutinin__InfluenzaA__ADF42699
augaaggcaauacuaguaguucugcuauauacauuugcaaccgcaaaugcagacacauuauguauagguuaucaugcgaacaauucaacagacacuguagacacaguacuagaaaagaauguaacaguaacacacucuguuaaccuucuagaagacaagcauaacgggacacuaugcaaacuaagagggguagccccauugcauuuggguaaauguaacauugcuggcuggauccugggaaauccagagugugaaucacucuccacagcaagcucaugguccuacauuguggaaacaucuaguucagacaauggaacguguuacccaggagauuucaucgauuaugaggagcuaagagagcaauugagcucagugucaucauuugaaagguuugagauguuccccaagacaaguucauggcccaaucaugacucgaacaaagguguaacggcagcauguccucaugcuggagcaaaaagcuucuacaaaaauuuaauauggcuaguuaaaaaaggaaauucauauccaaagcucagcaaauccuacauuaaugauaaagggaaagaaguccucgugcuauggggcauucaccauccaucuacuagugcugaccaacaaagucucuaucagaaugcagaugcauauguuuuuguagggacaucaagauacagcaagaaguucaagccggaaauagcaauaagacccaaagugagggaucaagaagggagaaugaacuauuacuggacacuaguagagccgggagacaaaauaacauucgaagcaacuggaaaucuagugguaccgagauaugcauucgcaauggaaagaaaugcuggaucugguauuaucauuucagauacaccaguccacgauugcaauacaacuugucagacacccaagggugcuauaaacaccagccucccauuucagaauauacauccgaucacaauuggaaaauguccaaaauauguaaaaagcacaaaauugagacuggccacaggauugaggaaugucccgucuauucaaucuagaggccuauuuggggccauugccgguuucauugaagggggguggacagggaugguagauggaugguacgguuaucaccaucaaaaugagcaggggucaggauaugcagccgaccugaagagcacacagaaugccauugacgagauuacuaacaaaguaaauucuguuauugaaaagaugaauacacaguucacagcaguagguaaagaguucaaccaccuggaaaaaagaauagagaauuuaaauaaaaaaguugaugaugguuuccuggacauuuggacuuacaaugccgaacuguugguucuauuggaaaaugaaagaacuuuggacuaccacgauucaaaugugaagaacuuauaugaaaagguaagaagccaguuaaaaaacaaugccaaggaaauuggaaacggcugcuuugaauuuuaccacaaaugcgauaacacgugcauggaaagugucaaaaaugggacuuaugacuacccaaaauacucagaggaagcaaaauuaaacagagaagaaauagaugggguaaagcuggaaucaacaaggauuuaccagauuuuggcgaucuauucaacugucgccaguucauugguacugguagucucccugggggcaaucaguuucuggaugugcucuaaugggucucuacaguguagaauauguauuuaa

SEQ ID NO: 36630 - RNA, 1701 nt, Artificial Sequence; identical to SEQ ID NO: 36604
  derived and/or modified CDS sequence (wt) from hemagglutinin__InfluenzaA__ADF42709

SEQ ID NO: 36631 - RNA, 1701 nt, Artificial Sequence
  derived and/or modified CDS sequence (wt) from hemagglutinin__InfluenzaA__ADF42719
augaaggcaauacuaguaguucugcuauauacauuugcaaccgcaaaugcagacacauuauguauagguuaucaugcgaacaauucaacagacacuguagacacaguacuagagaagaauguaacaguaacacacucuguuaaccuucuagaagacaagcauaacgggaaacuaugcaaacuaagagggguagccccauugcauuuggguaaauguaacauugcuggcuggauccuggggaauccagagugugaaucacucuccacagcaagcucaugguccuacauuguggaaacaucuaguucagacaauggaacguguuacccaggagauuucaucgauuaugaggagcuaagagagcaauugagcucagugucaucauuugaaagguuugagauauuccccaagacaaguucauggcccaaucaugacucgaacaaagguguaacggcagcauguccucaugcuggagcaaaaagcuucuacaaaaauuuaauauggcuaguuaaaaaaggaaauucauacccaaagcucagcaaauccuacauuaaugauaaagggaaagaaguccucgugcuauggggcauucaccauccaucuacuagugcugaccaacaaagucucuaucagaaugcagaugcauauguuuuuguggggacaucaagauacagcaagaaguucaagccggaaauagcaauaagacccaaagugagggaucaagaagggagaaugaacuauuacuggacacuaguagagccgggagacaaaauaacauucgaagcaacuggaaaucuagugguaccgagauaugcauucgcaauggaaagaaaugcuggaucugguauuaucauuucagauacaccaguccacgauugcaauacaacuugucagacacccaagggugcuauaaacaccagccucccauuucagaauauacauccgaucacaauuggaaaauguccaaaauauguaaaaagcacaaaauugagacuggccacaggauugaggaaugucccgucuauucaaucuagaggccuauuuggggccauugccgguuucauugaagggggguggacagggaugguagauggaugguacgguuaucaccaucaaaaugagcaggggucaggauaugcagccgaccugaagagcacacagaaugccauugacaagauuacuaacaaaguaaauucuguuauugaaaagaugaauacacaguucacagcaguagguaaagaguucaaccaccuggaaaaaagaauagagaauuuaaauaaaaaaguugaugaugguuuccuggacauuuggacuuacaaugccgaacuguugguucuauuggaaaaugaaagaacuuuggacuaccacgauucaaaugugaagaacuuauaugaaaagguaagaagccaguuaaaaaacaaugccaaggaaauuggaaacggcugcuuugaauuuuaccacaaaugcgauaacacgugcauggaaagugucaaaaaugggacuuaugacuacccaaaauacucagaggaagcaaaauuaaacagagaagaaauagaugggguaaagcuggaaucaacaaggauuuaccagauuuuggcgaucuauucaacugucgccaguucauugguacugguagucucccugggggcaaucaguuucuggaugugcucuaaugggucucuacaguguagaauauguauuuaa

SEQ ID NO: 36632 - RNA, 1701 nt, Artificial Sequence; identical to SEQ ID NO: 36326
  derived and/or modified CDS sequence (wt) from hemagglutinin__InfluenzaA__ADF42729

SEQ ID NO: 36633 - RNA, 1701 nt, Artificial Sequence; identical to SEQ ID NO: 35845
  derived and/or modified CDS sequence (wt) from hemagglutinin__InfluenzaA__ADF42739

SEQ ID NO: 36634 - RNA, 1701 nt, Artificial Sequence
  derived and/or modified CDS sequence (wt) from hemagglutinin__InfluenzaA__ADF58349
augaaggcaauacuaguaguucugcuauacacauuugcaaccgcaaaugcagacacauuauguauagguuaucaugcgaacaauucaacagacacuguagacacaguacuagaaaagaauguaacaguaacacacucuguuaaccuucuagaagacaagcauaacgggaaacuaugcaaacuaagagggguagccccauugcauuuggguaaauguaacauugcuggcuggauccugggaaauccagagugugaaucacucuccacagcaagcucaugguccuacauuguggaaacaucuaguucagacaauggaacguguuacccaggagauuucaucgauuaugaggagcuaagagagcaauugagcucagugucaucauuugaaagguuugagauauuccccaagacaaguucauggcccgaucaugacucgaacaaagguguaacggcagcauguccucaugcuggagcaaaaagcuucuacaaaaauuuaauauggcuaguuaaaaaaggaaauucauacccaaagcucagcaaauccuacauuaaugauaaagggaaagaaguccucgugcuauggggcauucaccauccaucuacuagugcugaccaacaaagucucuaucagaaugcagaugcauauguuuuuguggggacaucaagauacagcaagaaguucaagccggaaauagcaauaagacccaaagugagggaacgagaagggagaaugaacuauuacuggacacuaguagagccgggagacaaaauaacauucgaagcaacuggaaaucuagugguaccgagauaugcauucgcaauggaaagaaaugcuggaucugguauuaucauuucagauacaccaguccacgauugcaauacaacuugucagacacccaaaggugcuauaaacaccagccucccauuucagaauauacauccgaucacaauuggaaaauguccaaaauauguaaaaagcacaaaauugagacuggccacaggauugaggaaugucccgucuauucaaucuagaggccuauuuggggccauugccgguuucauugaagggggguggacagggaugguagauggaugguacgguuaucaccaucaaaaugagcaggggucaggauaugcagccgaccugaagagcacacagaaugccauugacgagauuacuaacaaaguaaauucuguuauugaaaagaugaauacacaguucacagcaguagguaaagaguucaaccaccuggaaaaaagaauagagaauuuaaauaaaaaaguugaugaugguuuccuggacauuuggacuuacaaugccgaacuguugguucuauuggaaaaugaaagaacuuuggacuaccacgauucaaaugugaagaacuuauaugaaaagguaagaagccaguuaaaaaacaaugccaaggaaauuggaaacggcugcuuugaauuuuaccacaaaugcgauaacacgugcauggaaagugucaaaaaugggacuuaugacuacccaaaauacucagaggaagcaaaauuaaacagagaagaaauagaugggguaaagcuggaaucaacaaggauuuaccagauuuuggcgaucuauucaacugucgccaguucauugguacugguagucucccugggggcaaucaguuucuggaugugcucuaaugggucucuacaguguagaauauguauuuaa

SEQ ID NO: 36635 - RNA, 1701 nt, Artificial Sequence
  derived and/or modified CDS sequence (wt) from hemagglutinin__InfluenzaA__ADF58351
augaaggcaauacuaguaguucugcuauauacauuugcaaccgcaaaugcagacacauuauguauagguuaucaugcgaacaauucaacagacacuguagacacaguacuagaaaagaauguaacaguaacacacucuguuaacauucuagaagacaagcauaacgggaaacuaugcaaacuaagagggguagccccauugcauuuggguaaauguaacauugcuggcuggauccugggaaauccagagugugaaucacucuccacagcaagcucaugguccuacauuguggaaacaucuaguucagacaauggaacguguuacccaggagauuucaucgauuaugaggagcuaagagagcaauugagcucagugucaucauuugaaagguuugagauauuccccaagacaaguucauggcccaaucaugacucgaacaaagguguaacggcagcauguccucaugcuggagcaaaaagcuucuacaaaaauuuaauauggcuaguuaaaaaaggaaauucauacccaaagcucagcaaauccuacauuaaugauaaagggaaagaaguccucgugcuauggggcauucaccauccaucuacuagugcugaccaacaaagucucuaucagaaugcagaugcauauguuuuuguggggacaucaagauacagcaagaaguucaagccggaaauagcaauaagacccaaagugagggaucaagaagggagaaugaacuauuacuggacacuaguagagccgggagacaaaauaacauucgaagcaacuggaaaucuagugguaccgagauaugcauucgcaauggaaagaaaugcuggaucugguauuaucauuucagauacaccaguccacgauugcaauacaacuugucagacacccaagggugcuauaaacaccagccucccauuucaaaauauacauccgaucacaauuggaaaauguccaaaauauguaaaaagcacaaaauugagacuggccacaggauugaggaaugucccgucuauucaaucuagaggccuauuuggggccauugccgguuucauugaagggggguggacagggaugguagauggaugguacgguuaucaccaucaaaaugagcaggggucaggauaugcagccgaccugaagagcacacagaaugccauugacgagauuacuaacaaaguaaauucuguuauugaaaagaugaauacacaguucacagcaguagguaaagaguucaaccaccuggaaaaaagaauagagaauuuaaauaaaaaaguugaugaugguuuccuggacauuuggacuuacaaugccgaacuguugguucuauuggaaaaugaaagaacuuuggacuaccacgauucaaaugugaagaacuuauaugaaaagguaagaagccaguuaaaaaacaaugccaaggaaauuggaaacggcugcuuugaauuuuaccacaaaugcgauaacacgugcauggaaagugucaaaaaugggacuuaugacuaccccaaauacucagaggaagcaaaauuaaacagagaagaaauagaugggguaaagcuggaaucaacaaggauuuaccagauuuuggcgaucuauucaacugucgccaguucauugguacugguagucucccugggggcaaucaguuucuggaugugcucuaaugggucucuacaguguagaauauguauuuaa

SEQ ID NO: 36636 - RNA, 1701 nt, Artificial Sequence
  derived and/or modified CDS sequence (wt) from hemagglutinin__InfluenzaA__ADF80454
augaaggcaauacuaguaguucugcuauauacauuugcaacugcaaaugcagacacauuauguauagguuaucaugcgaacaauucaacagacacuguagacacaguacuagaaaagaauguaacaguaacacacucuguuaaccuucuagaagacaagcauaacgggaaacuaugcaaacuaagagggguagccccauugcauuuggguaaauguaacauugcuggcuggauccugggaaauccagagugugaaucacucuccacagcaagcucaugguccuacauuguggaaacaucuaguucagacaauggaacguguuacccaggagauuucaucgauuaugaggagcuaagagagcaguugagcucagugucaucauuugaaagguuugagauauuccccaagacaaguucauggcccaaucaugacucgaacaaagguguaacggcagcauguccucaugcuggagcaaaaagcuucuacaaaaauuuaauauggcuaguuaaaaaaggaaauucauacccaaagcucagcaaauccuacauuaaugauaaagggaaagaaguccucgugcuauggggcauucaccauccaucuacuagugcugaccaacaaagucucuaucagaaugcagaugcauauguuuuuguggggacaucaagauacagcaagaaguucaagccggaaauagcaauaagacccaaagugagggaucaagaagggagaaugaacuauuacuggacacuaguagagccgggagacaaaauaacauucgaagcaacuggaaaucuagugguaccgagauaugcauucgcaauggaaagaaaugcuggaucugguauuaucauuucagauacaccaguccacgauugcaauacaacuugucagacacccgagggugcuauaaacaccagccucccauuucagaauauacauccgaucacaauuggaaaauguccaaaauauguaaaaagcacaaaauugagacuggccacaggauugaggaaugucccuucuauucaaucuagaggccuauuuggggccauugccgguuucauugaagggggguggacagggaugguagauggaugguacgguuaucaccaucaaaaugagcaggggucaggauaugcagccgaccugaagagcacacagaaugccauugacgagauuacuaacaaaguaaauucuauuauugaaaagaugaauacacaguucacagcaguagguaaagaguucaaccaccuggaaaaaagaauagagaauuuaaauaaaaaaguugaugaugguuuccuggacauuuggacuuacaaugccgaacuguugguucuauuggaaaaugaaagaacuuuggacuaccacgauucaaaugugaagaacuuauaugaaaagguaagaagccaguuaaaaaacaaugccaaggaaauuggaaacggcugcuuugaauuuuaccacaaaugcgaugacacgugcauggaaagugucaaaaaugggacuuaugacuacccaaaauacucagaggaagcaaaauuaaacagagaagaaauagaugggguaaagcuggaaucaacaaggauuuaccagauuuuggcgaucuauucaacugucgccaguucauugguacugguagucucccugggggcaaucaguuucuggaugugcucuaaugggucucuacaguguagaauauguauuuaa

SEQ ID NO: 36637 - RNA, 1701 nt, Artificial Sequence
  derived and/or modified CDS sequence (wt) from hemagglutinin__InfluenzaA__ADF80462
augaaggcaauacuaguaguucugcuauauacauuugcaaccgcaaaugcagacacauuauguauagguuaucaugcgaacaauucaacagacacuguagacacaguacuagaaaagaauguaacaguaacacacucuguuaaccuucuagaagacaagcauaacgggaaacuaugcaaacuaagagggguagccccauugcauuuggguaaauguaacauugcuggcuggauccugggaaauccagagugugaaucacucuccacagcaagcucaugguccuacauuguggaaacaucuaauucagacaauggaacguguuacccaggagauuucaucgauuaugaggagcuaagagagcaguugagcucagugucaucauuugaaagguuugagauauuccccaagauaaguucauggcccaaucaugacucgaacaaagguguaacggcagcauguccucaugcuggagcaaaaagcuucuacaaaaauuuaauauggcuaguuaaaaaaggaaauucauacccaaagcucagcaaauccuacauuaaugauaaagggaaagaaguccucgugcuauggggcauucaccauccaucuacuagugcugaccaacaaagucucuaucagaaugcagaugcauauguuuuuguggggacaucaagauacagcaagaaguucaagccggaaauagcaauaagacccaaagugagggaucaagaagggagaaugaacuauuacuggacacuaguagagccgggagacaaaauaacauucgaagcaacuggaaaucuagugguaccgagauaugcauucgcaauggaaagaaaugcuggaucugguauuaucauuucagauacaccaguccacgauugcaauacaacuugucagacacccaagggugcuauaaacaccagccucccauuucagaauauacauccgaucacaauuggaaaauguccaaaauauguaaaaagcacaaaauugagacuggccacaggauugaggaaugucccuucuauucaaucuagaggccuauuuggggccauugccgguuucauugaagggggguggacagggaugguagauggaugguacgguuaucaccaucaaaaugagcaggggucaggauaugcagccgaccugaagagcacacagaaugccauugacgagauuacuaacaaaguaaauucuguuauugaaaagaugaauacacaguucacagcaguagguaaagaguucaaccaccuggaaaaaagaauagagaauuuaaauaaaaaaguugaugaugguuuccuggacauuuggacuuacaaugccgaacuguugguucuauuggaaaaugaaagaacuuuggacuaccacgauucaaaugugaagaacuuauaugaaaagguaagaagccaguugaaaaacaaugccaaggaaauuggaaacggcugcuuugaauuuuaccacaaaugcgauaacacgugcauggaaagugucaaaaaugggacuuaugacuacccaaaauacucagaggaagcaaaauuaaacagagaagaaauagaugggguaaagcuggaaucaacaaggauuuaccagauuuuggcgaucuauucaacugucgccaguucauugguacugguagucucccugggggcaaucaguuucuggaugugcucuaaugggucucuacaguguagaauauguauuuaa

SEQ ID NO: 36638 - RNA, 1701 nt, Artificial Sequence
  derived and/or modified CDS sequence (wt) from hemagglutinin__InfluenzaA__ADF80470
augaaggcaauacuaguaguucugcuauauacauuugcaaccgcaaaugcagacacauuauguauagguuaucaugcaaacaauucaacagacacuguagacacaguacuagaaaagaauguaacaguaacacacucugucaaccuucuagaagacaagcauaacgggaaacuaugcaaacuaagagggguagccccauugcauuuggguaaauguaacauugcuggcuggauccugggaaauccagagugugaaucacucuccacagcaagcucaugguccuacauuguggaaacaucuaguucagacaauggaacguguuacccaggagauuucaucgauuaugaggagcuaagagagcaauugagcucagugucaucauuugaaagguuugagauauuccccaagacaaguucauggcccaaucaugacucgaacaaagguguaacggcagcauguccucaugcuggagcaaaaagcuucuacaaaaauuuaauauggcuaguuaaaaaaggaaauucauacccaaagcucagcaaauccuacauuaaugauaaagggaaagaaguccucgugcuauggggcauucaccauccaucuacuagugcugaccaacaaagucucuaucagaaugcagaugcauauguuuuuguggggacaucaagauacagcaagaaguucaagccggaaauagcaauaagacccaaagugagggaucaagaagggagaaugaacuauuacuggacacuaguagagccgggagacaaaauaacauucgaagcaacuggaaaucuagugguaccgagauaugcauucgcaauggaaagaaaugcuggaucugguauuaucauuucagauacaccaguccacgauugcaauacaacuugucagacacccaagggugcuauaaacaccagccucccauuucagaauauacauccgaucacaauuggaaaauguccaaaauauguaaaaagcacaaaauugagacuggccacaggauugaggaaugucccgucuauucaaucuagaggccuauuuggggccauugccgguuucauugaagggggguggacagggaugguagauggaugguacgguuaucaccaucaaaaugagcaggggucaggauaugcagccgaccugaagagcacacagaaugccauugacgagauuacuaacaaaguaaauucuguuauugaaaagaugaauacacaguucacagcaguagguaaagaguucaaccaucuggaaaaaagaauagagaauuuaaauaaaaaaguugaugaugguuuccuggacauuuggacuuacaaugccgaacuguugguucuauuggaaaaugaaagaacuuuggacuaccacgauucaaaugugaagaacuuauaugaaaagguaagaagccaguuaaaaaacaaugccaaggaaauuggaaacggcugcuuugaauuuuaccacaaaugcgauaacacgugcauggaaagugucaaaaaugggacuuaugacuacccaaaauacucagaggaagcaaaauuaaacagagaagaaauagaugggguaaagcuggaaucaacaaggauuuaccagauuuuggcgaucuauucaacugucgccaguucauugguacugguagucucccugggggcaaucaguuucuggaugugcucuaaugggucucuacaguguagaauauguauuuaa

SEQ ID NO: 36639 - RNA, 1701 nt, Artificial Sequence
  derived and/or modified CDS sequence (wt) from hemagglutinin__InfluenzaA__ADF80478
augaaggcaauacuaguaguucugcuauauacauuugcaaccgcaaaugcagacacauuauguauagguuaucaugcaaacaauucaacagacacuguagacacaguacuagaaaagaauguaacaguaacacacucuguuaaccuucuagaagacaagcauaacgggaaacuaugcaaacuaagagggguagccccauugcauuuggguaaauguaacauugcuggcuggauccugggaaauccagagugugaaucacucuccacagcaagcucaugguccuacauuguggaaacaucuaguucagacaauggaacguguuacccaggagauuucaucgauuaugaggagcuaagagagcaauugagcucagugucaucauuugaaagguuugagauauuccccaagacaaguucauggcccaaucaugacccgaacaaagguguaacggcagcauguccucaugcuggagcaaaaagcuucuacaaaaauuuaauauggcuaguuaaaaaaggaaauucauacccaaagcucagcaaauccuacauuaaugauaaagggaaagaaguccucgugcuauggggcauucaccauccaucuacuagugcugaccaacaaagucucuaucagaaugcagaugcauauguuuuuguggggacaucaagauacagcaagaaguucaagccggaaauagcaauaagacccaaagugagggaucaagaagggagaaugaacuauuacuggacacuaguagagccgggagacaaaauaacauucgaagcaacuggaaaucuaaugguaccgagauaugcauucgcaauggaaagaaaugcuggaucugguauuaucauuucagauacaccaguccacgauugcaauacaacuugucagacacccaagggugcuauaaacaccagccucccauuucagaauauacauccgaucacaauuggaaaauguccaaaauauguaaaaagcacaaaauugagacuggccacaggauugaggaaugucccgucuauucaaucuagaggccuauuuggggccauugccgguuucauugaagggggguggacagggaugguagauggaugguacgguuaucaccaucaaaaugagcaggggucaggauaugcagccgaccugaagagcacacagaaugccauugacgagauuacuaacaaaguaaauucuguuauugaaaagaugaauacacaguucacagcaguagguaaagaguucaaccaucuggaaaaaagaauagagaauuuaaauaaaaaaguugaugaugguuuccuggacauuuggacuuacaaugccgaacuguugguucuauuggaaaaugaaagaacuuuggacuaccacgauucaaaugugaagaacuuauaugaaaagguaagaagccaguuaaaaaacaaugccaaggaaauuggaaacggcugcuuugaauuuuaccacaaaugcgauaacacgugcauggaaagugucaaaaaugggacuuaugacuacccaaaauacucagaggaagcaaaauuaaacagagaagaaauagaugggguaaagcuggaaucaacaaggauuuaccagauuuuggcgaucuauucaacugucgccaguucauugguacugguagucucccugggggcaaucaguuucuggaugugcucuaaugggucucuacaguguagaauauguauuuaa

SEQ ID NO: 36640 - RNA, 1701 nt, Artificial Sequence
  derived and/or modified CDS sequence (wt) from hemagglutinin__InfluenzaA__ADF80494
augaaggcaauacuaguaguucugcuauauacauuugcaaccgcaaaugcagacacauuauguauagguuaucaugcgaacaauucaacagacacuguagacacaguacuagaaaagaauguaacaguaacacacucuguuaaccuucuagaagacaagcauaacgggaaacuaugcaaacuaagagggguagccccauugcauuuggguaaauguaacauugcuggcuggauccugggaaauccagagugugaaucacucuccacagcaagcucaugguccuacauuguggaaacaucuaguucagacaauggaacguguuacccaggagauuucaucgauuaugaggagcuaagagagcaauugagcucagugucaucauuugaaagguuugagauauuccccaagacaaguucauggcccaaucaugacucgaacaaagguguaacggcagcauguccucaugcuggagcaaaaagcuucuacaaaaauuuaauauggcuaguuaaaaaaggaaauucauacccaaagcucagcaaauccuacauuaaugauaaagggaaagaaguccucgugcuauggggcauucaccauccaucuacuagugcugaccaacaaagucucuaucagaaugcagaugcauauguuuuuguggggacaucaagauacagcaagaaguucaagccggaaauagcaauaagacccaaagugagggaucaagaagggagaaugaacuauuacuggacacuaguagagccgggagacaaaauaacauucgaagcaacuggaaaucuauugguaccgagauaugcauucgcaauggaaagaaaugcuggaucugguauuaucauuucagauacaccaguccacgauugcaauacaacuugucagacacccaagggugcuauaaacaccagccucccauuucagaauauacauccgaucacaauuggaaaauguccaaaauauguaaaaagcacaaaauugagacuggccacaggauugaggaaugucccgucuauucaaucuagaggccuauuuggggccauugccgguuucauugaagggggguggacagggaugguagauggaugguacgguuaucaccaucaaaaugagcaggggucaggauaugcagccgaccugaagagcacacagaaugccauugacgagauuacuaacaaaguaaauucuguuauugaaaagaugaauacacaguucacagcaguagguaaagaguucaaccaccuggaaaaaagaauagagaauuuaaauaaaaaaguugaugaugguuuccuggacauuuggacuuacaaugccgaacucuugguucuauuggaaaaugaaagaacuuuggacuaccacgauucaaaugugaagaacuuauaugaaaagguaagaagccaguuaaaaaccaaugccaaggaaauuggaaacggcugcuuugaauuuuaccacaaaugcgauaacacgugcauggaaagugucaaaaaugggacuuaugacuacccaaaauacucagaggaagcaaaauuaaacagagaagaaauagaugggguaaagcuggaaucaacaaggauuuaccagauuuuggcgaucuauucaacugucgccaguucauugguacugguagucucccugggggcaaucaguuucuggaugugcucuaaugggucucuacaguguagaauauguauuuaa

SEQ ID NO: 36641 - RNA, 1701 nt, Artificial Sequence; identical to SEQ ID NO: 36640
  derived and/or modified CDS sequence (wt) from hemagglutinin__InfluenzaA__ADF80498

SEQ ID NO: 36642 - RNA, 1701 nt, Artificial Sequence
  derived and/or modified CDS sequence (wt) from hemagglutinin__InfluenzaA__ADF80502
augaaggcaauacuaguaguucugcuauauacauuugcaaccgcaaaugcagacacauuauguauagguuaucaugcaaacaauucaacagacacuguagacacaguacuagaaaagaauguaacaguaacacacucuguuaaccuucuagaagacaagcauaacgggaaacuaugcaaacuaagagggguagccccauugcauuuggguaaauguaacauugcuggcuggauccugggaaauccagagugugaaucacucuccacagcaagcucaugguccuacauuguggaaacaucuaguucagacaauggaacguguuacccaggagauuucaucgauuaugaagagcuaagagagcaauugagcucagugucaucauuugaaagguuugagauauuccccaagacaaguucauggcccaaucaugacucgaacaaagguguaacgacagcauguccucaugcuggagcaaaaagcuucuacaaaaauuuaauauggcuaguuaaaaaaggaaauucauacccaaagcucagcaaauccuacauuaaugauaaagggaaagaaguccucgugcuauggggcauucaccauccaucuacuagugcugaccaacaaagucucuaucagaaugccgaugcauauguuuuuguggggacaucaagauacagcaagaaguucaagccggaaauagcaauaagacccaaagugagggaucaagaagggagaaugaacuauuacuggacacuaguagagccgggagacaaaauaacauucgaagcaacuggaaaucuagugguaccgagauaugcauucgcaauggaaagaaaugcuggaucugguauuaucauuucagauacaccaguccacgauugcaauacaacuugucagacacccaagggugcuauaaacaccagccucccauuucagaauauacauccgaucacaauuggaaaauguccaaaauauguaaaaagcacaaaauugagacuggccacaggauugaggaaugucccgucuauucaaucuagaggccuauuuggggccauugccgguuucauugaagggggguggacagggaugguagauggaugguacgguuaucaccaucaaaaugagcaggggucaggauaugcagccgaccugaagagcacacagaaugccauugacgagauuacuaacaaaguaaauucuguuauugaaaagaugaauacacaguucacagcaguagguaaagaguucaaccaucuggaaaaaagaauagagaauuuaaauaaaaaaguugaugaugguuuccuggacauuuggacuuacaaugccgaacuguugguucuauuggaaaaugaaagaacuuuggacuaccacgauucaaaugugaagaacuuauaugaaaagguaagaagccaguuaaaaaacaaugccaaggaaauuggaaacggcugcuuugaauuuuaccacaaaugcgauaacacgugcauggaaagugucaaaaaugggacuuaugacuacccaaaauacucagaggaagcaaaauuaaacagagaagaaauagaugggguaaagcuggaaucaacaaggauuuaccagauuuuggcgaucuauucaacugucgccaguucauugguacugguagucucccugggggcaaucaguuucuggaugugcucuaaugggucucuacaguguagaauauguauuuaa

SEQ ID NO: 36643 - RNA, 1701 nt, Artificial Sequence
  derived and/or modified CDS sequence (wt) from hemagglutinin__InfluenzaA__ADF80506
augaaggcaauacuaguaguucugcuauauacauuugcaaccgcaaaugcagacacauuauguauagguuaucaugcgaacaauucaacagacacuguagacacaguacuagaaaggaauguaacaguaacacacucuguuaaccuucuagaagacaagcauaacgggaaacuaugcaaacuaagagggguagccccauugcauuuggguaaauguagcauugcuggcuggauccugggaaauccagagugugaaucacucuccacagcaagcucaugguccuacauuguggaaacaucuaguucagacaauggaacguguuacccaggagauuucaucgauuaugaggagcuaagagagcaauugagcucagugucaucauuugaaagguuugagauauuccccaagacaaguucauggcccaaucaugacccgaacaaagguguaacggcagcauguccucaugcuggagcaaaaagcuucuacaaaaauuuaauauggcuaguuaaaaaagaaaauucauacccaaagcucagcaaauccuacauuaaugauaaagggaaagaaguccucgugcuauggggcauucaccauccaucuacuagugcugaccaacaaagucucuaucagaaugcagaugcauauguuuuuguggggacaucaagauacagcaagaaguucaagccggaaauagcaauaagacccaaagugagggaucaagaagggagaaugaacuauuacuggacacuaguagagccgggagacaaaauaacauucgaagcaacuggaaaucuagugguaccgagauaugcauucgcaauggaaagaaaugcuggaucugguauuaucauuucagauacaccaguccacgauugcaauacaacuugucagacacccaagggugcuauaaacaccagccucccauuucagaauauacauccgaucacaauuggaaaauguccaaaauauguaaaaagcacaaaauugagacuggccacaggauugaggaaugucccgucuauucaaucuagaggccuauuuggggccauugccgguuucauugaagggggguggacagggaugguagauggaugguacgguuaucaccaucaaaaugagcaggggucaggauaugcagccgaccugaagagcacacagaaugccauugacgagauuacuaacaaaguaaauucuguuauugaaaagaugaauacacaguucacagcaguagguaaagaguucaaccaccuggaaaaaagaauagagaauuuaaauaaaaaaguugaugaugguuuccuggacauuuggacuuacaaugccgaacuguugguucuauuggaaaaugaaagaacuuuggacuaccacgauucaaaugugaagaacuuauaugaaaagguaagaagccaguuaaaaaacaaugccaaggaaauuggaaacggcugcuuugaauuuuaccacaaaugcgauaacacgugcauggaaagugucaaaaaugggacuuaugacuacccaaaauacucagaggaagcaaaauuaaacagagaagaaauagaugggguaaagcuggaaucaacaaggauuuaccagauuuuggcgaucuauucaacugucgccaguucauugguacugguagucucccugggggcaaucaguuucuggaugugcucuaaugggucucuacaguguagaauauguauuuaa

SEQ ID NO: 36644 - RNA, 1701 nt, Artificial Sequence
  derived and/or modified CDS sequence (wt) from hemagglutinin__InfluenzaA__ADF83741
augaagacuaucauugcuuugagcuacauucuaugucugguuuucgcucaaaaacuuccuggaaaugacaacagcacggcaacgcugugccuugggcaccaugcaguaccaaacggaacgauagugaaaacaaucacaaaugaccaaauugaaguuacuaaugcuacugagcugguucagaguuccucaacaggugaaauaugcgacaguccucaucagauccuugauggaaaaaacugcacacuaauagaugcucuauugggagacccucagugugauggcuuccaaaauaagaaaugggaccuuuuuguugaacgcagcaaagccuacagcaacuguuacccuuaugaugugccggauuaugccucccuuaggucacuaguugccucauccggcacacuggaguuuaacaaugaaagcuucaauuggacuggagucacucaaaacggaacaagcucugcuugcauaaggagaucuaaaaacaguuucuuuaguagauugaauugguugacccacuuaaacuucaaauacccagcauugaacgugacuaugccaaacaaugaacaauuugacaaauuguacauuugggggguucaccacccggguacggacaaagaccaaaucuuccuguaugcucaagcaucaggaagaaucacagucucuaccaaaagaagccaacaaacugcaaucccgaauaucggaucuagacccagaguaaggaauaucccuagcagaauaagcaucuauuggacaauaguaaaaccgggagacauacuuuugauuaacagcacagggaaucuaauugcuccuagggguuacuucaaaauacgaagugggaaaagcucaguaaugagaucagaugcacccauuggcaaaugcaauucugauugcaucacuccaaauggaagcauucccaaugacaaaccauuccaaaauguaaacaggaucacauacggggccugucccagauauguuaagcaaaacacucugaaauuggcaacagggaugcgaaauguaccagagaaacaaacuagaggcauauuuggcgcaaucgcggguuucauagaaaaugguugggagggaaugguggaugguugguacgguuucaggcaucaaaauucugagggaagaggacaagcagcagaucucaaaagcacucaagcagcaaucgaucaaaucaaugggaagcugaauagauugaucgggaaaaccaacgagaaauuccaucagauugaaaaagaauucucagaagucgaagggagaauucaggaccuugagaaauauguugaggacacuaaaauagaucucuggucguacaacgcggagcuucuuguugcccuggagaaccaacauacaauugaucuaacugacucagaaaugaacaaacuguuugaaaaaacaaagaagcaacugagggaaaaugcugaggauaugggcaaugguuguuucaaaauauaccacaaaugugacaaugccugcauaggaucaaucagaaauggaacuuaugaccacgauguauacagagaugaagcauuaaacaaccgguuucagaucaagggaguugagcugaagucaggguacaaagauuggauccuauggauuuccuuugccauaucauguuuuuugcuuuguguugcuuuguugggguucaucaugugggccugccaaaaaggcaacauuaggugcaacauuugcauuuga

SEQ ID NO: 36645 - RNA, 1701 nt, Artificial Sequence
  derived and/or modified CDS sequence (wt) from hemagglutinin__InfluenzaA__ADF83752
augaagacuaucauugcuuugagcuacauucuaugucugguuuucgcucaaaaacuuccuggaaaugacaacagcacggcaacgcugugccuugggcaccaugcaguaccaaacggaacgauagugaaaacaaucacgaaugaccaaauugaaguuacuaaugcuacugagcugguucagaguuccucaacaggugaaauaugcgacaguccucaucagauccuugauggagaaaacugcacacuaauagaugcucuauugggagacccucagugugauggcuuccaaaauaagaaaugggaccuuuuuguugaacgaagcaaagccuacagcaacuguuacccuuaugaugugccggauuaugccucccuuaggucacuaguugccucauccggcacacuggaguuuaacaaugaaagcuucaauuggacuggagucacucaaaacggaacaagcucugcuugcauaaggagaucuaauaauaguuucuuuaguagauugaauugguugacccacuuaaacuucaaauacccagcauugaacgugacuaugccaaacaaugaacaauuugacaaauuguacauuugggggguucaccacccggguacggacaaggaccaaaucuuccuguaugcucaagcaucaggaagaaucacaguaucuaccaaaagaagccaacaagcuguaaucccgaauaucggaucuagacccagaguaaggaauaucccuagcagaauaagcaucuauuggacaauaguaaaaccgggagacauacuuuugauuaacagcacagggaaucuaauugcuccuagggguuacuucaaaauacgaagugggaaaagcucaauaaugagaucagaugcacccauuggcaaaugcaauucugaaugcaucacuccaaauggaagcauucccaaugacaaaccauuccaaaauguaaacaggaucacauacggggccugucccagauauguuaagcaaaacacucugaaauuggcaacaggaaugcgaaauguaccagagaaacaaacuagaggcauauuuggcgcaauagcggguuucauagaaaaugguugggagggaaugguggaugguugguacgguuucaggcaucaaaauucugagggaagaggacaagcagcagaucucaaaagcacucaagcagcaaucgaucaaaucaaugggaagcugaauagauugaucgggaaaaccaacgagaaauuccaucagauugaaaaagaauucucagaagucgaagggagaauucaggaccuugagaaauauguugaggacacuaaaauagaucucuggucauacaacgcggagcuucuuguugcccuggagaaccaacauacaauugaucuaacugacucagaaaugaacaaacuguuugaaaaaacaaagaagcaacugagggaaaaugcugaggauaugggcaaugguuguuucaaaauauaucacaaaugugacaaugccugcauaggaucaaucagaaauggaacuuaugaccacgauguauacagagaugaagcauuaaacaaccgguuccagaucaagggaguugagcugaagucaggguacaaagauuggauccuauggauuuccuuugccauaucauguuuuuugcuuuguguugcuuuguugggguucaucaugugggccugccaaaaaggcaacauuaggugcaacauuugcauuuga

SEQ ID NO: 36646 - RNA, 1701 nt, Artificial Sequence
  derived and/or modified CDS sequence (wt) from hemagglutinin__InfluenzaA__ADF83763
augaaggcaauacuaguaguucugcuauauacauuugcaaccgcaaaugcagacacauuauguauagguuaucaugcgaacaauucaacagacacuguagacacaguacuagaaaagaauguaacaguaacacacucuguaaaccuucuagaagacaagcauaacgggaaacuaugcaaacuaagagggguagccccauugcauuuggguaaauguaacauugcuggcuggauccugggaaauccagagugugaaucacucuccacagcaagcucaugguccuacauuguggaaacaucuaguucagacaauggaacguguuacccaggagauuucaucaauuaugaggagcuaagagagcaauugagcucagugucaucauuugaaagguuugagauauuccccaagacaaguucauggcccaaucaugacucgaacaaagguguaacggcugcauguccucaugcuggagcaaaaagcuucuacaaaaauuuaauauggcuaguuaaaaaaggaaauucauacccaaagcucagcaaauccuacauuaaugauaaagggaaagaaguccucgugcuauggggcauucaccauccaucuacuagugcugaccaacaaagucucuaucagaaugcagaugcauauguuuuuguggggacaucaagauacagcaagaaguucaagccggaaauagcaauaagacccaaagugagggaucaagaagggagaaugaacuauuacuggacacuaguagagccgggagacaaaauaacauucgaagcaacuggaaaucuagugguaccgagauaugcauucgcaauggaaagaaaugcuggaucugguauuaucaucucagauacaccaguccacgauugcaauacaacuugucagacacccaagggugcuauaaacaccagccucccauuucagaauauacauccgaucacaauuggaaaauguccaaaauauguaaaaagcacaaaauugagacuggccacaggauugaggaaugucccgucuauucaaucuagaggccuauuuggggccauugccgguuucauugaagggggguggacagggaugguagauggaugguacgguuaucaccaucaaaaugagcaggggucaggauaugcagccgaccugaagagcacacagaaugccauugacaagauuacuaacaaaguaaauucuguuauugaaaagaugaauacacaguucacagcaguagguaaagaauucaaccaccuggaaaaaagaauagagaauuuaaauaaaaaaguugaugaugguuuccuggacauuuggacuuacaaugccgaacuguugguucuauuggaaaaugaaagaacuuuggacuaccacgauucaaaugugaagaacuuauaugaaaagguaagaagccaguuaaaaaacaaugccaaggaaauuggaaacggcugcuuugaauuuuaccacaaaugcgauaacacgugcauggaaagugucaaaaaugggacuuaugacuacccaaaauacucagaggaagcaaaauuaaacagagaagaaauagaugggguaaagcuggaaucaacaaggauuuaccagauuuuggcgaucuauucaacugucgccaguucauugguacugguagucucccugggggcaaucaguuucuggaugugcucuaaugggucucuacaguguagaauauguauuuaa

SEQ ID NO: 36647 - RNA, 1701 nt, Artificial Sequence; identical to SEQ ID NO: 36239
  derived and/or modified CDS sequence (wt) from hemagglutinin__InfluenzaA__ADF83773

SEQ ID NO: 36648 - RNA, 1701 nt, Artificial Sequence
  derived and/or modified CDS sequence (wt) from hemagglutinin__InfluenzaA__ADF83783
augaaggcaauacuaguaguucugcuauauacauuugcaaccgcaaaugcagacacauuauguauagguuaucaugcgaacaauucaacagacacuguagacacaguacuagaaaagaauguaacaguaacacacucuguuaaccuucuagaagacaagcauaacgggaaacuaugcaaacuaagagggguagccccauugcauuuggguaaauguaacauugcuggcuggauccugggaaauccagagugugaaucacucuccacagcaagcucaugguccuacauuguggaaacaucuaguucagacaauggaacguguuacccaggagauuucaucgauuaugaggagcuaagagagcaauugagcucagugucaucauuugaaagguuugagauauuccccaagacaaguucauggcccaaucaugacucgaacaaagguguaacggcagcauguccucaugcuggagcaaaaagcuucuacaaaaauuuaauauggcuaguuaaaaaaggaaauucauacccaaagcucagcaaauccuacauuaaugauaaagggaaggaaguccucgugcuauggggcauucaccauccaucuacuagugcugaccaacaaagucucuaucagaaugcagaugcauauguuuuuguggggacaucaagauacagcaagaaguucaagccggaaauagcaauaagacccaaagugagggaucaagaagggagaaugaacuauuacuggacacuaguagagccgggagacaaaauaacauucgaagcaacuggaaaucuagugguaccgagauaugcauucgcaauggaaagaaaugcuggaucugguauuaucauuucagauacaccaguccacgauugcaauacaacuugucagacacccaagggugcuauaaacaccagccucccauuucagaauauacauccgaccacaauuggaaaauguccaaaauauguaaaaagcacaaaauugagacuggccacaggauugaggaaugucccgucuauucaaucuagaggccuauuuggggccauugccgguuucauugaagggggguggacagggaugguagauggaugguacgguuaucaccaucaaaaugagcaggggucaggauaugcagccgaccugaagagcacacagaaugccauugacgagauuacuaacaaaguaaauucuguuauugaaaagaugaacacacaguucacagcaguagguaaagaguucaaccaccuggaaaaaagaauagagaauuuaaauaaaaaaguugaugaugguuuccuggacauuuggacuuacaaugccgaacuguugguucuauuggaaaaugaaagaacuuuggacuaccacgauucaaaugugaagaacuuauaugaaaagguaagaagccaguuaaaaaacaaugccaaggaaauuggaaacggcugcuuugaauuuuaccacaaaugcgauaacacgugcauggaaagugucaaaaaugggacuuaugacuacccaaaauacucagaggaagcaaaauuaaacagagaagaaauagaugggguaaagcuggaaucaacaaggauuuaccagauuuuggcgaucuauucaacugucgccaguucauugguacugguagucucccugggggcaaucaguuucuggaugugcucuaaugggucucuacaguguagaauauguauuuaa

SEQ ID NO: 36649 - RNA, 1701 nt, Artificial Sequence
  derived and/or modified CDS sequence (wt) from hemagglutinin__InfluenzaA__ADF83793
augaaggcaauacuaguaguucugcuauauacauuugcaaccgcaaaugcagacacauuauguauagguuaucaugcgaacaauucaacagacacuguagacacaguacuagaaaagaauguaacaguaacacacucuguuaacauucuagaagacaagcauaacgggaaacuaugcaaacuaagagggguagccccauugcauuuggguaaauguaacauugcuggcuggauccugggaaauccagagugugaaucacucuccacagcaagcucaugguccuacauuguggaaacaucuaguucagacaauggaacguguuacccaggagauuucaucgauuaugaggagcuaagagagcaauugagcucagugucaucauuugaaagguuugagauauuccccaagacaaguucauggcccaaucaugacucgaacaaagguguaacggcagcauguccucaugcuggagcaaaaagcuucuacaaaaauuuaauuuggcuaguuaaaaaaggaaauucauacccaaagcucagcaaauccuacauuaaugauaaagggaaagaaguccucgugcuauggggcauucaccauccaucuacuagugcugaccaacaaagucucuaucagaaugcagaugcauauguuuuuguggggucaucaagauacagcaagaaguucaagccggaaauagcaauuagacccaaagugagggaucaagaagggagaaugaacuauuacuggacacuaguagagccuggagacaaaauaacauucgaagcaacuggaaaucuagugguaccgagauaugcauucgcaauggaaagaaaugcuggaucugguauuaucauuucagauacaccaguccaugauugcaauacaacuugucagacacccaagggugcuauaaacaccagccucccauuucagaauauacauccgaucacaauuggaaaauguccaaaauauguaaaaagcacaaaauugagacuggccacaggauugaggaaugucccgucuauucaaucuagaggccuauuuggggccauugccgguuucauugaagggggguggacagggaugguagauggaugguacgguuaucaccaucaaaaugagcaggggucaggauaugcagccgaccugaagagcacacagaaugccauugacgagauuacuaacaaaguaaauucuguuauugaaaagaugaauacacaguucacagcaguagguaaagaguucaaccaccuggaaaaaagaauagagaauuuaaauaaaaaaguugaugaugguuuccuggacauuuggacuuacaaugccgaacuguugguucuauuggaaaaugaaagaacuuuggacuaccacgauucaaaugugaagaacuuauaugaaaagguaagaagccagcuaaaaaacaaugccaaggaaguuggaaacggcugcuuugaauuuuaccacaaaugcgauaacacgugcauggaaagugucaaaaaugggacuuaugacuacccaaaauacucagaggaagcaaaauuaaacagagaagaaauagaugggguaaagcuggaaucaacaaggauuuaccagauuuuggcgaucuauucaacugccgccaguucauugguacugguagucucccugggggcaaucaguuucuggaugugcucuaaugggucucuacaguguagaauauguauuuaa

SEQ ID NO: 36650 - RNA, 1701 nt, Artificial Sequence
  derived and/or modified CDS sequence (wt) from hemagglutinin__InfluenzaA__ADF83803
augaaggcaauacuaguaguucugcuauauacauuugcaaccgcaaaugcagacacauuauguauagguuaucaugcgaacaauucaacagacacuguagacacaguacuagaaaagaauguaacaguaacacacucuguuaaccuucuagaagacaagcauaacgggaaacuaugcaaacuaagagggguagccccauugcauuuggguaaauguaacauugcuggcuggauccugggaaauccagagugugaaacacucuccacagcaagcucaugguccuacauuguggaaacaucuaguucagacaauggaacguguuacccaggagauuucaucgauuaugaggagcuaagagagcaauugagcucagugucaucauuugaaagguuugagauauuccccaagacaaguucauggcccaaucaugacucgaacaaagguguaacggcagcauguccucaugcuggagcaaaaagcuucuacaaaaauuuaauauggcuaguuaaaaaaggaaauucauacccaaagcucagcaaauccuacauuaaugauaaagggaaagaaguccucgugcuauggggcauucaccauccaucuacuagugcugaccaacaaagucucuaucagaaugcagaugcauauguuuuuguggggacaucaagauacagcaagaaguucaagccggaaauagcaauaagacccaaagugagggaucaagaagggagaaugaacuauuacuggacacuaguagagccgggagacaaaauaacauucgaagcaacuggaaaucuagugguaccgagauaugcauucgcaauggaaagaaaugcuggaucugguauuaucauuucagauacaccaguccacgauugcaauacaacuugucagacacccaagggugcuauaaacaccagccucccauuucagaauguacauccgaucacaauuggaaaauguccaaaauauguaaaaagcacaaaauugagacuggccacaggauugaggaaugucccgucuauucaaucuagaggccuauuuggggccauugccgguuucauugaagggggguggacagggaugguagauggaugguacgguuaucaccaucaaaaugagcaggggucaggauaugcagccgaccugaagagcacacagaaugccauugacgagauuacuaacaaaguaaauucuguuauugaaaagaugaauacacaguucacagcaguagguaaagaguucaaccaccuggaaaaaagaauagagaauuuaaauaaaaagguugaugaugguuuccuagacauuuggacuuacaaugccgaacuguugguucuauuggaaaaugaaagaacuuuggacuaccacgauucaaaugugaagaacuuauaugaaaagguaagaagccaguuaaaaaacaaugccaaggaaacuggaaacggcugcuuugaauuuuaccacaaaugcgauaacacgugcauggaaagugucaaaaaugggacuuaugacuacccaaaauacucagaggaagcaaaauuaaacagagaagaaauagaugggguaaagcuggaaucaacaaggauuuaccagauuuuggcgaucuauucaacugucgccaguucauugguacugguagucucccugggggcaaucaguuucuggaugugcucuaaugggucucuacaguguagaauauguauuuaa

SEQ ID NO: 36651 - RNA, 1701 nt, Artificial Sequence
  derived and/or modified CDS sequence (wt) from hemagglutinin__InfluenzaA__ADF83813
augaaggcaauacuaguaguucugcuauauacauuugcaaccgcaaaugcagacacauuauguauagguuaucaugcgaacaauucaacagacacuguagacacaguacuagaaaagaauguaacaguaacacacucuguuaaccuucuagaagacaagcauaacgggaaacuaugcaaacuaagagggguagccccauugcauuuggguaaauguaacauugcuggcuggauccugggaaauccagagugugaaucacucuccacagcaagcucaugguccuacauuguggaaacaucuaguucagacaauggaacguguuacccaggagauuucaucgauuaugaggagcuaagagagcaauugagcucagugucaucauuugaaagguuugagauauuccccaagacaaguucauggcccaaucaugacucaaacaaagguguaacggcagcauguccucaugcuggagcaaaaagcuucuacaaaaauuuaauauggcuaguuaaaaaaggaaauucauacccaaagcucagcaaauccuacauuaaugauaaagggaaagaaguccucgugcuauggggcauucaccauccaucuacuagcacugaccaacaaagucucuaucagaaugcagaugcauauguuuuuguggggacaucaagauacagcaagaaguucaagccggaaauagcaauaagacccaaagugagggaucaagaagggagaaugaacuauuacuggacacuaguagagccgggagacaaaauaacauucgaagcaacuggaaaucuagugguaccgagauaugcauucgcaauggaaagaaaugcuggaucugguauuaucauuucagauacaccaguccacgauugcaauacaacuugucagacacccaagggugcuauaaacaccagccucccauuucagaauauacauccgaucacaauuggaaaauguccaaaauauguaaaaagcacaaaauugagacuggccacaggauugaggaaugucccgucuauucaaucuagaggccuauuuggggccauugccgguuucauugaagggggguggacagggaugguagauggaugguacgguuaucaccaucaaaaugagcagggaucaggauaugcagccgaccugaagagcacacagaaugccauugacgagauuacuaacaaaguaaauucuguuauugaaaagaugaauacacaguucacagcaguagguaaagaguucaaccaccuggaaaaaagaauagagaauuuaaauaaaaagguugaugaugguuuccuggacauuuggacuuacaaugccgaacuguugguucuauuggaaaaugaaagaacuuuggacuaccacgauucaaaugugaagaacuuauaugaaaagguaagaagccaguuaaaaaacaaugccaaggaaauuggaaacggcugcuuugaauuuuaccacaaaugcgauaacacgugcauggaaagugucaaaaaugggacuuaugacuacccaaaauacucagaggaagcaaaauuaaacagagaagaaauagaugggguaaagcuggaaucaacaaggauuuaccagauuuuggcgaucuauucaacugucgccaguucauugguacugguagucucccugggggcaaucaguuucuggaugugcucuaaugggucucuacaguguagaauauguauuuaa

SEQ ID NO: 36652 - RNA, 1701 nt, Artificial Sequence
  derived and/or modified CDS sequence (wt) from hemagglutinin__InfluenzaA__ADF83823
augaaggcaauacuaguaguucugcuauauacauuugcaaccgcaaaugcagacacauuauguauagguuaucaugcgaacaauucaacagacacuguagacacaguacuagaaaagaauguaacaguaacacacucuguuaaccuucuagaagacaaacauaacgggaaacuaugcaaacuaagagggguagccccauugcauuuggguaaauguaacauugcuggcuggauccugggaaauccagagugugaaucacucuccacagcaagcucaugguccuacauuguggaaacaucuaguucagacaauggaacguguuacccaggagauuucaucgauuaugaggagcuaagagagcaauugagcucagugucaucauuugaaagguuugagauauuccccaagacaaguucauggcccaaucaugauucgaacaaagguguaacggcagcauguccucaugcuggagcaaaaagcuucuacaaaaauuuaauauggcuaguuaaaaaaggaaauucauacccaaagcucagcaaauccuacauuaaugauaaagggaaagaaguccucgugcuauggggcauucaccauccaucuacuagugcugaccaacaaagucucuaucagaaugcagauucauauguuuuuguggggacaucaagauacagcaagaaguucaagccggaaauagcaauaagacccaaagugagggaucaagaagggagaaugaacuauuacuggacacuaguagagccgggagacaaaauaacauucgaagcaacuggaaaucuagugguaccgagauaugcauucgcaauggaaagaaaugcuggaucugguauuaucauuucagauacaccaguccacgauugcaauacaacuugucagacacccaagggugcuauaaacaccagccucccauuucagaauauacauccgaucacaauuggaaaauguccaaaauauguaaaaagcacaaaauugagacuggccacaggauugaggaauaucccgucuauucaaucuagaggccuauuuggggccauugccgguuucauugaagggggguggacagggaugguagauggaugguacgguuaucaccaucaaaaugagcaggggucaggauaugcagccgaccugaagagcacacagaaugccauugacgagauuacuaacaaaguaaauucuguuauugaaaagaugaauacacaguucacagcaguagguaaagaguucaaccaccuggaaaaaagaauagagaauuuaaauaaaaagguugaugaugguuuccuggacauuuggacuuacaaugccgaacuauugguucuauuagaaaaugaaagaacuuuagacuaccacgauucaaaugugaagaacuuauaugaaaagguaagaagccaguuaaaaaacaaugccaaggaaauuggaaacggcugcuuugaauuuuaccacaaaugcgauaacacgugcauggaaagugucaaaaaugggacuuaugacuacccaaaauacucagaggaagcaaaauuaaacagagaagaaauagaugggguaaagcuggaaucaacaaggauuuaccagauuuuggcgaucuauucaacugucgccaguucauugguacugguagucucccugggggcaaucaguuucuggaugugcucuaaugggucucuacaguguagaauauguauuuaa

SEQ ID NO: 36653 - RNA, 1701 nt, Artificial Sequence
  derived and/or modified CDS sequence (wt) from hemagglutinin__InfluenzaA__ADF83833
augaaggcaauacuaguaguucugcuauauacauuugcaaccgcaaaugcagacacauuauguauagguuaucaugcgaacaauucaacagacacuguagacacaguacuagaaaagaauguaacaguaacacacucuguuaaccuucuagaagacaagcauaacgggaaacuaugcaaacuaagagggguagccccauugcauuuggguaaauguaacauugcuggcuggauccugggaaauccagagugugaaucacucuccacagcaagcucaugguccuacauuguggaaacaucuaguucagacaauggaacguguuacccaggagauuucaucaauuaugaggagcuaagagagcaauugagcucagugucaucauuugaaagguuugagauauuccccaagacaaguucauggcccaaucaugauucgaacaaagguguaacggcugcauguccucaugcuggagcaaaaagcuucuacaaaaauuuaauauggcuaguuaaaaaaggaaauucauacccaaagcucagcaaauccuacauuaaugauaaagggaaagaaguccucgugcuauggggcauucaccauccaucuacuagugcugaccaacaaagucucuaucagaaugcagaugcauauguuuuuguggggacaucaagauacagcaagaaguucaagccggaaauagcaauaagacccaaagugagggaucaagaagggagaaugaacuauuacuggacacuaguagagccgggagacaaaauaacauucgaagcaacuggaaaucuagugguaccgagauaugcauucgcaauggaaagaaaugcuggaucugguauuaucaucucagauacaccaguccacgauugcaauacaacuugucagacacccaagggugcuauaaacaccagccucccauuucagaauauacauccgaucacaauuggaaaauguccaaaauauguaaaaagcacaaaauugagacuggccacaggauugaggaaugucccgucuauucaaucuagaggccuauuuggggccauugccgguuucauugaagggggguggacagggaugguagauggaugguacgguuaucaccaucaaaaugagcaggggucaggauaugcagccgaccugaagagcacacagaaugccauugacaagauuacuaacaaaguaaauucuguuauugaaaagaugaauacacaguucacagcaguagguaaagaguucaaccaccuggaaaaaagaauagagaauuuaaauaaaaaaguugaugaugguuuccuggacauuuggacuuacaaugccgaacuguugguucuauuggaaaaugaaagaacuuuggacuaccacgauucaaaugugaagaacuuauaugaaaagguaagaagccaguuaaaaaacaaugccaaggaaauuggaaacggcugcuuugaauuuuaccacaaaugcgauaacacgugcauggaaagugucaaaaaugggacuuaugacuacccaaaauacucagaggaagcaaaauuaaacagagaagaaauagaugggguaaagcuggaaucaacaaggauuuaccagauuuuggcgaucuauucaacugucgccaguucauugguacugguagucucccugggggcaaucaguuucuggaugugcucuaaugggucucuacaguguagaauauguauuuaa

SEQ ID NO: 36654 - RNA, 1701 nt, Artificial Sequence; identical to SEQ ID NO: 36653
  derived and/or modified CDS sequence (wt) from hemagglutinin__InfluenzaA__ADF83843

SEQ ID NO: 36655 - RNA, 1701 nt, Artificial Sequence; identical to SEQ ID NO: 36239
  derived and/or modified CDS sequence (wt) from hemagglutinin__InfluenzaA__ADF83853

SEQ ID NO: 36656 - RNA, 1701 nt, Artificial Sequence
  derived and/or modified CDS sequence (wt) from hemagglutinin__InfluenzaA__ADF83873
augaaggcaauacuaguaguucugcuauauacauuugcaaccgcaaaugcagacacauuauguauagguuaucaugcgaacaauucaacagacacuguagacacaguacuagaaaagaauguaacaguaacacacucuguuaaccuucuagaagacaagcauaacgggaaacuaugcaaacuaagagggguagccccauugcauuuggguaaauguaacauugcuggcuggauccugggaaauccagagugugaaucacucuccacagcaaacucaugguccuacauuguggaaacaucuaguucagacaauggaacguguuacccaggagauuucaucgauuaugaggagcuaagagagcaauugagcucagugucaucauuugaaagguuugagauauuccccaagacaaguucauggcccaaucaugacucgaacaaagguguaacggcagcauguccucaugcuggagcaaaaagcuucuacaaaaauuuaauauggcuaguuaaaaaaggaaauucauacccaaagcucagcaaguccuacauuaaugauaaagggaaagaaguccucgugcuauggggcauucaccauccaucuacuaguacugaccaacaaagucucuaucagaaugcagaugcauauguuuuuguggggacaucaagauacagcaagaaguucaagccggaaauagcaauaagacccaaagugagggaucaagaagggagaaugaacuauuacuggacacuaguagagccgggagacaaaauaacauucgaagcaacuggaaaucuagugguaccgagauaugcauucgcaauggaaagaaaugcuggaucugguauuaucauuucagauacaccaguccacgauugcaauacaacuugucagacacccaagggugcuauaaacaccagccucccauuucagaauauacauccgaucacaauuggaaaauguccaaaauauguaaaaagcacaaaauugagacuggccacaggauugaggaaugucccgucuauucaaucuagaggccuauuuggggccauugccgguuucauugaagggggguggacagggaugguagauggaugguacgguuaucaccaucaaaaugagcaggggucaggauaugcagccgaccugaagagcacacagaaugccauugacaagauuacuaacaaaguaaauucuguuauugaaaagaugaauacacaguucacagcaguagguaaagaguucaaccaccuggaaaaaagaauagagaauuuaaauaaaaaaguugaugaugguuuccuggacauuuggacuuacaaugccgaacuguugguucuauuggaaaaugaaagaacuuuggacuaccacgauucaaaugugaagaacuuauaugaaaagguaagaagccaguuaaaaaacaaugccaaggaaauuggaaacggcugcuuugaauuuuaccacaaaugcgauaacacgugcauggaaagugucaaaaaugggacuuaugacuacccaaaauacucagaggaagcaaaauuaaacagagaagaaauagaugggguaaagcuggaaucaacaaggauuuaccagauuuuggcgaucuauucaacugucgccaguucauugguacugguagucucccugggggcaaucaguuucuggaugugcucuaaugggucucuacaguguagaauauguauuuaa

SEQ ID NO: 36657 - RNA, 1701 nt, Artificial Sequence
  derived and/or modified CDS sequence (wt) from hemagglutinin__InfluenzaA__ADF83885
augaaggcaauacuaguaguucugcuauauacauuugcaaccgcaaaugcagacacauuauguauagguuaucaugcgaacaauucaacagacacuguagacacaguacuagaaaagaauguaacaguaacacacucuguuaaccuucuagaagacaagcauaacgggaaacuaugcaaacuaagagggguagccccauugcauuuggguaaauguaacauugcuggcuggauccugggaaauccagagugugaaucacucuccacagcaagcucaugguccuacauuguggaaacaucuaguucagacaauggaacguguuacccaggagauuucaucgauuaugaggagcuaagagagcaauugagcucagugucaucauuugaaagguuugagauauuccccaagacaaguucauggcccaaucaugacucgaacaaagguguaacggcagcauguccucaugcuggagcaaaaagcuucuacaaaaauuuaauauggcuaguuaaaaaaggaaauucauacccaaagcucagcaaauccuacauuaaugauaaagggaaagaaguccucgugcuauggggcauucaccauccaucuacuagugcugaccaacaaagucucuaucagaaugcagaugcauauguuuuuguggggacaucaagauacagcaagaaguucaagccggaaauagcaauaagacccaaagugagggaucaagaagggagaaugaacuauuacuggacacuaguagagccgggagacaaaauaacauucgaagcaacuggaaaucuagugguaccgagauaugcauucgcaauggaaagaaaugcuggaucugguauuaucauuucagauacaccaguccacgauugcaauacaacuugucagacacccaagggugcuauaaacaccagccucccauuucagaauauacauccgaucacaauuggaaaauguccaaaauauguaaaaagcacaaaauugagacuggccacaggauugaggaaugucccgucuauucaaucuagaggccuauuuggggccauugccgguuucauugaagggggguggacagggaugguagauggaugguacgguuaucaccaucaaaaugagcaggggucaggauaugcagccgaccugaagagcacacagaaugccauugacaagauuacuaacaaaguaaauucuguuauugaaaagaugaauacacaguucacagcaguagguaaagaguucaaccaccuggaaaaaagaauagagaauuuaaauaaaaaaguugaugaugguuuccuggacauuuggacuuacaaugccgaacuguugguucuauuggaaaaugaaagaacuuuggacuaccacgauucaaaugugaagaacuuauaugaaaagguaagaagccaguuaaaaaacaaugccaaggaaauuggaaacggcugcuuugaauuuuaccacaaaugcgauaacacgugcauggaaagugucaaaaaugggacuuaugacuacccaaaauacucagaggaagcaaaauugaacagagaagaaauagaugggguaaagcuggaaucaacaaggauuuaccagauuuuggcgaucuauucaacugucgccaguucauugguacugguagucucccugggggcaaucaguuucuggaugugcucuaaugggucucuacaguguagaauauguauuuaa

SEQ ID NO: 36658 - RNA, 1701 nt, Artificial Sequence
  derived and/or modified CDS sequence (wt) from hemagglutinin__InfluenzaA__ADF83895
augaaggcaauacuaguaguucugcuauauacauuugcaaccguaaaugcagacacauuauguauagguuaucaugcgaacaauucaacagacacuguagacacaguacuagaaaagaauguaacaguaacacacucuguuaaccuucuagaagacaagcauaacgggaaacuaugcaaacuaagagggguagccccauugcauuuggguaaauguaacauugcuggcuggauccugggaaauccagagugugaaucacucuccacagcaagcucaugguccuacauuguggaaacaucuaguucagacaauggaacguguuacccaggagauuucaucgauuaugaggagcuaagagagcaauugagcucagugucaucauuugaaagguuugagauauuccccaagacaaguucauggcccaaucaugacucgaacaaagguguaacggcagcauguccucaugcuggagcaaaaagcuucuacaaaaauuuaauauggcuaguuaaaaaaggaaauucauacccaaagcucagcaaauccuacauuaaugauaaagggaaagaaguccucgugcuauggggcauucaccauccaucuacuagugcugaccaacaaagucucuaucagaaugcagaugcauauguuuuuguggggacaucaagauacagcaagaaguucaagccggaaauagcaauaagacccaaagugagggaucaagaagggagaaugaacuauuacuggacacuaguagagccgggagacaaaauaacauucgaagcaacuggaaaucuagugguaccgagauaugcauucgcaauggaaagaaaugcuggaucugguauuaucauuucagauacaccaguccacgauugcaauacaacuugucagacacccaagggugcuauaaacaccagccucccauuucagaauauacauccgaucacaauuggaaaauguccaaaauauguaaaaagcacaaaauugagacuggccacaggauugaggaaugucccgucuauucaaucuagaggccuauuuggggccauugccgguuucauugaagggggguggacagggaugguagauggaugguacgguuaucaccaucaaaaugagcaggggucaggauaugcagccgaccugaagagcacacagaaugccauugacaagauuacuaacaaaguaaauucuguuauugaaaagaugaauacacaguucacagcaguagguaaagaguucaaccaccuggaaaaaagaauagagaauuuaaauaaaaaaguugaugaugguuuccuggacauuuggacuuacaaugccgaacuguugguucuauuggaaaaugaaagaacuuuggacuaccacgauucaaaugugaagaacuuauaugaaaagauaagaagccaguuaaaaaacaaugccaaggaaauuggaaacggcugcuuugaauuuuaccacaaaugcgauaacacgugcauggaaagugucaaaaaugggacuuaugacuacccaaaauacucagaggaagcaaaauuaaacagagaagaaauagaugggguaaagcuggaaucaacaaggauuuaccagauuuuggcgaucuauucaacugucgccaguucauugguacugguagucucccugggggcaaucaguuucuggaugugcucuaaugggucucuacaguguagaauauguauuuaa

SEQ ID NO: 36659 - RNA, 1701 nt, Artificial Sequence
  derived and/or modified CDS sequence (wt) from hemagglutinin__InfluenzaA__ADF83915
augaaggcaauacuaguaguucugcuauauacauuugcaaccgcaaaugcagacacauuauguauagguuaucaugcgaacaauucaacagacacuguagacacaguacuagaaaagaauguaacaguaacacacucuguuaaccuucuagaagacaagcauaacgggaaacuaugcaaacuaagagggguagccccauugcauuuggguaaauguaacauugcuggcuggauccugggaaauccagagugugaaucacucuccacagcaagcucaugguccuacauuguggaaacaucuaguucagacaauggaacguguuacccaggagauuucaucaauuaugaggagcuaagagagcaauugagcucagugucaucauuugaaagguuugagauauuccccaagacaaguucauggcccaaucaugacucgaacaaagguguaacggcugcauguccucaugcuggagcaaaaagcuucuacaaaaauuuaauauggcuaguuaaaaaaggaaauucauacccaaagcucagcaaauccuacauuaaugauaaagggaaagaaguccucgugcuauggggcauucaccauccaucuacuagugcugaccaacaaagucucuaucagaaugcagaugcauauguuuuuguggggacaucaagauacagcaagaaguucaagccggaaauagcaauaagacccaaagugagggaucaagaagggagaaugaacuauuacuggacacuaguagagccgggagacaaaauaacauucgaagcaacuggaaaucuagugguaccgagauaugcauucgcaauggaaagaaaugcuggaucugguauuaucaucucagauacaccaguccacgauugcaauacaacuugucagacacccaagggugcuauaaacaccagccucccauuucaaaauauacauccgaucacaauuggaaaauguccaaaauauguaaaaagcacaaaauugagacuggccacaggauugaggaaugucccgucuauucaaucuagaggccuauuuggggccauugccgguuucauugaagggggguggacagggaugguagauggaugguacgguuaucaccaucaaaaugagcaggggucaggauaugcagccgaccugaagagcacacagaaugccauugacaagauuacuaacaaaguaaauucuguuauugaaaagaugaauacacaguucacagcaguagguaaagaguucaaccaccuggaaaaaagaauagagaauuuaaauaaaaaaguugaugaugguuuccuggacauuuggacuuacaaugccgaacuguugguucuauuggaaaaugaaagaacuuuggacuaccacgauucaaaugugaagaacuuauaugaaaagguaagaagccaguuaaaaaacaaugccaaggaaauuggaaacggcugcuuugaauuuuaccacaaaugcgauaacacgugcauggaaagugucaaaaaugggacuuaugacuacccaaaauacucagaggaagcaaaauuaaacagagaagaaauagaugggguaaagcuggaaucaacaaggauuuaccagauuuuggcgaucuauucaacugucgccaguucauugguacugguagucucccugggggcaaucaguuucuggaugugcucuaaugggucucuacaguguagaauauguauuuaa

SEQ ID NO: 36660 - RNA, 1701 nt, Artificial Sequence
  derived and/or modified CDS sequence (wt) from hemagglutinin__InfluenzaA__ADF84441
augaaggcaauacuaguaguucugcuauauacauuugcaaccgcaaaugcagacacauuauguauagguuaucaugcgaacaauucaacagacacuguagacacaguacuagaaaagaauguaacaguaacacacucuguuaaccuucuagaagacaagcauaacgggaaacuaugcaaacuaagagggguagccccauugcauuuggguaaauguaacauugcuggcuggauccugggaaauccagagugugaaucacucuccacagcaagcucaugguccuacauuguggaaacaucuaguucagacaauggaacguguuacccaggagauuucaucaauuaugaggagcuaagagagcaauugagcucagugucaucauuugaaagguuugagauauuccccaagacaaguucauggcccagucaugacucgaacaaagguguaacggcugcauguccucaugcuggagcaaaaagcuucuacaaaaauuuaauauggcuaguuaaaaaaggaaauucauacccaaagcucagcaaauccuacauuaaugauaaagggaaagaaguccucgugcuauggggcauucaccauccaucuacuagugcugaccaacaaagucucuaucagaaugcagaugcauauguuuuuguggggacaucaagauacagcaagaaguucaagccggaaauagcaauaagacccaaagugagggaucaagaagggagaaugaacuauuacuggacacuaguagagccgggagacaaaauaacauucgaagcaacuggaaaucuagugguaccgagauaugcauucgcaauggaaagaaaugcuggaucugguauuaucaucucagauacaccaguccacgauugcaauacaacuugucagacacccaagggugcuauaaacaccagccucccauuucagaauauacauccgaucacaauuggaaaauguccaaaauauguaaaaagcacaaaauugagacuggccacaggauugaggaaugucccgucuauucaaucuagaggccuauuuggggccauugccgguuucauugaagggggguggacagggaugguagauggaugguacgguuaucaccaucaaaaugagcaggggucaggauaugcagccgaccugaagagcacacagaaugccauugacaagauuacuaacaaaguaaauucuguuauugaaaagaugaauauacaguucacagcaguagguaaagaguucaaccaccuggaaaaaagaauagagaauuuaaauaaaaaaguugaugaugguuuccuggacauuuggacuuacaaugccgaacuguugguucuauuggaaaaugaaagaacuuuggacuaccacgauucaaaugugaagaacuuauaugaaaagguaagaagccaguuaaaaaacaaugccaaggaaauuggaaacggcugcuuugaauuuuaccacaaaugcgauaacacgugcauggaaagugucaaaaaugggacuuaugacuacccaaaauacucagaggaagcaaaauuaaacagagaagaaauagaugggguaaagcuggaaucaacaaggauuuaccagauuuuggcgaucuauucaacugucgccaguucauugguacugguagucucccugggggcaaucaguuucuggaugugcucuaaugggucucuacaguguagaauauguauuuaa

SEQ ID NO: 36661 - RNA, 1701 nt, Artificial Sequence
  derived and/or modified CDS sequence (wt) from hemagglutinin__InfluenzaA__ADF84459
augaaggcaauacuaguaguucugcuauauacauuugcaaccgcaaaugcagacacauuauguauagguuaucaugcgaacaauucaacagacacuguagacacaguacuagaaaagaauguaacaguaacacacucuguuaaccuucuagaagacaagcauaacgggaaacuaugcaaacuaagagggguagccccauugcauuuggguaaauguaacauugcuggcuggauccugggaaauccagagugugaaucacucuccacagcaagcucaugguccuacauuguggaaacaucuaguucagacaauggaacguguuacccaggagauuucaucgauuaugaggagcuaagagagcaauugagcucagugucaucauuugaaagguuugagauauuccccaagacaaguucauggcccaaucaugacucgaacaaagguguaacggcagcauguccucaugcuggagcaaaaagcuucuacaaaaauuuaauauggcuaguuaaaaaaggaaauucauacccaaagcucagcaaauccuacauuaaugauaaagggaaagaaguccucgugcuauggggcauucaccauccaucuacuagugcugaccaacaaagucucuaucagaaugcagaugcauauguuuuuguggggacaucaagauacagcaagaaguucaagccggaaauagcaauaagacccaaagugagggaucaagaagggagaaugaacuauuacuggacacuaguagagccgggagacaaaauaacauucgaagcaacuggaaaucuagugguaccgagauaugcauucgcaauggaaagaaaugcuggaucugguauuaucauuucagauacaccaguccacgauugcaauacaacuugucagacacccaagggugcuauaaacaccagccucccauuucagaauauacauccuaucacaauuggaaaauguccaaaauauguaaaaagcacaaaauugagacuggccacaggauugaggaaugucccgucuauucaaucuagaggccuauuuggggccauugccgguuucauugaagggggguggacagggaugguagauggaugguacgguuaucaccaucaaaaugagcaggggucaggauaugcagccgaccugaagagcacacagaaugccauugacaagauuacuaacaaaguaaauucuguuauugaaaagaugaauacacaguucacagcaguagguaaagaguucaaccaccuggaaaaaagaauagagaauuuaaauaaaaaaguugaugaugguuuccuggacauuuggacuuacaaugccgaacuguugguucuauuggaaaaugaaagaacuuuggacuaccacgauucaaaugugaagaacuuauaugaaaagguaagaagccaguuaaaaaacaaugccaaggaaauuggaaacggcugcuuugaauuuuaccacaaaugcgauaacacgugcauggaaagugucaaaaaugggacuuaugacuacccaaaauacucagaggaagcaaaauuaaacagagaagaaauagaugggguaaagcuggaaucaacaaggauuuaccagauuuuggcgaucuauucaacugucgccaguucauugguacugguagucucccugggggcaaucaguuucuggaugugcucuaaugggucucuacaguguagaauauguauuuaa

SEQ ID NO: 36662 - RNA, 1701 nt, Artificial Sequence; identical to SEQ ID NO: 36286
  derived and/or modified CDS sequence (wt) from hemagglutinin__InfluenzaA__ADF84469

SEQ ID NO: 36663 - RNA, 1701 nt, Artificial Sequence
  derived and/or modified CDS sequence (wt) from hemagglutinin__InfluenzaA__ADF84479
augaaggcaauacuaguaguucugcuauauacauuugcaaccgcaaaugcagacacauuauguauagguuaucaugcgaacaauucaacagacacuguagacacaguacuagaaaagaauguaacaguaacacacucuguuaaccuucuagaagacaagcauaacgggaaacuaugcaaacuaagagggguagccccauugcauuuggguaaauguaacauugcuggcuggauccugggaaauccagagugugaaucacucuccacagcaagcucaugguccuacauuguggaaacaucuaguucagacaauggaacguguuacccaggagauuucaucgauuaugaggagcuaagagagcaauugagcucagugucaucauuugaaagguuugagauauuccccaagacaaguucauggcccaaucaugacucgaacaaagguguaacggcagcauguccucaugcuggagcaaaaagcuucuacaaaaauuuaauauggcuaguuaaaaaaggaaauucauacccaaagcucagcaaauccuacaucaaugauaaagggaaagaaguccucgugcuauggggcauucaccauccaucuacuagugcugaccaacaaagucucuaucagaaugcagauucauauguuuuuguggggacaucaagauacagcaagaaauucaagccggaaauagcaauaagacccaaagugagggaucaagaagggagaaugaacuauuacuggacacuaguagagccgggagacaaaauaacauucgaagcaacuggaaaucuagugguaccgagauaugcauucgcaauggaaagaaaugcuggaucugguauuaucauuucagauacaccaguccacgauugcaauacaacuugucagacacccgagggugcuauaaacaccagccucccauuucagaauauacauccgaucacaauuggaaaauguccaaaauauguaaaaagcacaaaauugagacuggccacaggauugaggaaugucccgucuauucaaucuagaggccuauuuggggccauugccgguuucauugaagggggguggacagggaugguagauggaugguacgguuaucaccaucaaaaugagcaggggucaggauaugcagccgaccugaagagcacacagaaugccauugacgagauuacuaacaaaguaaauucuguuauugaaaagaugaauacacaguucacagcaguagguaaagaguucaaccaccuggaaaaaagaauagagaauuuaaauaaaaaaguugaugaugguuuccuggacauuuggacuuacaaugccgaacuguugguucuauuggaaaaugaaagaacuuuggacuaccacgauucaaaugugaagaacuuauaugaaaagguaagaagccaguuaaaaaacaaugccaaggaaauuggaaacggcugcuuugaauuuuaccacaaaugcgauaacacgugcauggaaagugucaaaaaugggacuuaugacuacccaaaauacucagaggaagcaaaauuaaacagagaagaaauagauggaguaaagcuggaaucaacaaggauuuaccagauuuuggcgaucuauucaacugucgccaguucauugguacugguagucucccugggggcaaucaguuucuggaugugcucuaaugggucucuacaguguagaauauguauuuaa

SEQ ID NO: 36664 - RNA, 1701 nt, Artificial Sequence; identical to SEQ ID NO: 36286
  derived and/or modified CDS sequence (wt) from hemagglutinin__InfluenzaA__ADF84489

SEQ ID NO: 36665 - RNA, 1701 nt, Artificial Sequence
  derived and/or modified CDS sequence (wt) from hemagglutinin__InfluenzaA__ADF85017
augaaggcaauacuaguaguucugcuauauacauuugcaaccgcaaaugcagacacauuauguauagguuaucaugcgaacaauucaacagacacuguagacacaguacuagaaaagaauguaacaguaacacacucuguuaaccuucuagaagacaagcauaacgggaaacuaugcaaacuaagagggguagccccauugcauuuggguaaauguaacauugcuggcuggauccugggaaauccagagugugaaucacucuccacagcaagcucaugguccuacauuguggaaacaucuaguucagacaauggaacguguuacccaggagauuucaucaauuaugaggagcuaagagagcaauugagcucagugucaucauuugaaagguuugagauauuccccaagacaaguucauggcccaaucaugacucgaacaaagguguaacggcugcauguccucaugcuggagcaaaaagcuucuacaaaaauuuaauauggcuaguuaaaaaaggaaauucauacccaaagcucagcaaauccuacauuaaugauaaagggaaagaaguccucgugcuauggggcauucaccauccaucuacuagugcugaccaacaaagucucuaucagaaugcagaugcauauguuuuuguggggacaucaagauacagcaagaaguucaagccggaaauagcaauaagacccaaagugagggaucaagaagggagaaugaacuauuacuggacacuaguagagccgggagacaaaauaacauucgaagcaacuggaaaucuagugguaccgagauaugcauucgcaauggaaagaaaugcuggaucugguauuaucaucucagauacaccaguccacgauugcaauacaacuugucagacacccaagggugcuauaaacaccagccucccauuucagaauauacauccgaucacaauuggaaaauguccaaaauauguaaaaagcacaaaauugagacuggccacaggauugaggaaugucccgucuauucaaucuagaggccuauuuggggccauugccgguuucauugaagggggguggacagggaugguagauggaugguacgguuaucaccaucaaaaugagcaggggucaggauaugcagccgaccugaagagcacacagaaugccauugacaagauuacuaacaaaguaaauucuguuauugaaaagaugaauacacaguucacagcaguagguaaagaguucaaccaccuggaaaaaagaauagagaauuuaaauaaaaaaguugaugaugguuuccuggacauuuggacuuacaaugccgaacuguugguucuauuggaaaaugaaagaacuuuggacuaccacgauucaaaugugaagaacuuauaugaaaagguaagaagccaguuaaaaaacaaugccaaggaaauuggaaacggaugcuuugaauuuuaccacaaaugcgauaacacgugcauggaaagugucaaaaaugggacuuaugacuacccaaaauacucagaggaagcaaaauuaaacagagaagaaauagaugggguaaagcuggaaucaacaaggauuuaccagauuuuggcgaucuauucaacugucgccaguucauugguacugguagucucccugggggcaaucaguuucuggaugugcucuaaugggucucuacaguguagaauauguauuuaa

SEQ ID NO: 36666 - RNA, 1701 nt, Artificial Sequence
  derived and/or modified CDS sequence (wt) from hemagglutinin__InfluenzaA__ADF87152
augaaggcaauacuaguaguucugcuauauacauuugcaaccgcaaaugcagacacauuauguauagguuaucaugcgaacaauucaacagacacuguagacacaguacuagaaaagaauguaacaguaacacacucuguuaaccuucuagaagacaagcauaacgggaaacuaugcaaauuaagagggguagccccauugcauuuggguaaauguaauauugcuggcuggauccugggaaauccagagugugaaucacucuccacagcaagcucaugguccuacauuguggaaacaucuaguucagacaauggaacguguuacccaggagauuucaucaauuaugaggagcuaagagagcaauugagcucagugucaucauuugaaagguuugagauauuccccaagacaaguucauggcccaaucaugacucgaacaaagguguaacggcagcauguccucaugcuggagcaaaaagcuucuacaaaaauuuaauauggcuaguuaaaaaaggaaauucauacccaaagcucagcaaauccuacauuaaugauaaagggaaagaaguccucgugcuauggggcauucaccauccaucuacuagugcugaccaacaaagucucuaucagaaugcagaugcauauguuuuuguggggacaucaagauacagcaagaaguucaagccggaaauagcaauaagacccaaagugagggaucaagaagggagaaugaacuauuacuggacacuaguagagccgggagacaaaauaacauucgaagcaacuggaaaucuagugguaccgagauaugcauucgcaauggaaagaaaugcuggaucugguauuaucaucucagauacaccaguccacgauugcaauacaacuugucagacacccaagggugcuauaaacaccagccucccauuucagaauauacauccgaucacaauuggaaaauguccaaaauauguaaaaagcacaaaauugagacuggccacaggauugaggaaugucccgucuauucaaucuagaggccuauuuggggccauugccgguuucauugaagggggguggacagggaugguagauggaugguacgguuaucaccaucaaaaugagcaggggucaggauaugcagccgaccugaagagcacacagaaugccauugacaagauuacuaacaaaguaaauucuguuauugaaaagaugaauacacaguucacagcaguagguaaagaguucaaccaccuggaaaaaagaauagagaauuuaaauaaaaaaguugaugaugguuuccuggacauuuggacuuacaaugccgaacuguugguucuauuggaaaaugaaagaacuuuggacuaccaugauucaaaugugaagaacuuauaugaaaagguaagaagccaguuaaaaaacaaugccaaggaaauuggaaacggcugcuuugaauuuuaccacaaaugcgauaacacgugcauggaaagugucaaaaaugggacuuaugacuacccaaaauacucagaggaagcaaaauuaaacagagaagaaauagaugggguaaagcuggaaucaacaaggauuuaccagauuuuggcgaucuauucaacugucgccaguucauugguacugguagucucccugggggcaaucaguuucuggaugugcucuaaugggucucuacaguguagaauauguauuuaa

SEQ ID NO: 36667 - RNA, 1701 nt, Artificial Sequence
  derived and/or modified CDS sequence (wt) from hemagglutinin__InfluenzaA__ADF87162
augaaggcaauacuaguaguucugcuauauacauuugcaaccgcaaaugcagacacauuauguauagguuaucaugcgaacaauucaacagacacuguagacacaguacuagaaaagaauguaacaguaacacacucuguuaaccuucuagaagacaagcauaacgggaaacuaugcaaacuaagagggguagccccauugcauuuggguaaauguaacauugcuggcuggauccugggaaauccagagugugaaucacucuccacagcaagcucaugguccuacauuguggaaacaucuaguucagacaauggaacguguuacccaggagauuucaucgauuaugaggagcuaagagagcaauugagcucagugucaucauuugaaagguuugagauauuccccaagacaaguucauggcccaaucaugacucgaacaaagguguaacggcagcauguccucaugcuggagcaaaaagcuucuacaaaaauuuaauauggcuaguuaaaaaaggaaauucauacccaaagcucagcaaauccuacaucaaugauaaagggaaagaaguccucgugcuauggggcauucaccauccaucuacuagugcugaccaacaaagucucuaucagaaugcagauucauauguuuuuguggggacaucaaaauacagcaagaaauucaagccggaaauagcaauaagacccaaagugagggaucaagaagggagaaugaacuauuacuggacacuaguagagccgggagacaaaauaacauucgaagcaacuggaaaucuagugguaccgagauaugcauucgcaauggaaagaaaugcuggaucugguauuaucauuucagauacaccaguccacgauugcaauacaacuugucagacacccgagggugcuauaaacaccagccucccauuucagaauauacauccgaucacaauuggaaaauguccaaaauauguaaaaagcacaaaauugagacuggccacaggauugaggaaugucccgucuauucaaucuagaggccuauuuggggccauugccgguuucauugaagggggguggacagggaugguagauggaugguacgguuaucaccaucaaaaugagcaggggucaggauaugcagccgaccugaagagcacacagaaugccauugacgagauuacuaacaaaguaaauucuguuauugaaaagaugaauacacaguucacagcaguagguaaagaguucaaccaccuggaaaaaagaauagagaauuuaaauaaaaaaguugaugaugguuuccuggacauuuggacuuacaaugccgaacuguuaguucuauuggaaaaugaaagaacuuuggacuaccacgauucaaaugugaagaacuuauaugaaaagguaagaagccaguuaaaaaacaaugccaaggaaauuggaaacggcugcuuugaauuuuaccacaaaugcgauaacacgugcauggaaagugucaaaaaugggacuuaugacuacccaaaauacucagaggaagcaaaauuaaacagagaagaaauagaugggguaaagcuggaaucaacaaggauuuaccagauuuuggcgaucuauucaacugucgccaguucauugguacugguagucucccugggggcaaucaguuucuggaugugcucuaaugggucucuacaguguagaauauguauuuaa

SEQ ID NO: 36668 - RNA, 1701 nt, Artificial Sequence; identical to SEQ ID NO: 36286
  derived and/or modified CDS sequence (wt) from hemagglutinin__InfluenzaA__ADF87172

SEQ ID NO: 36669 - RNA, 1701 nt, Artificial Sequence
  derived and/or modified CDS sequence (wt) from hemagglutinin__InfluenzaA__ADF87182
augaaugcaauacuaguaguucugcuauauacauuugcaaccgcaaaugcagacacauuauguauagguuaucaugcgaacaauucaacagacacuguagacacauuacuagaaaagaauguaacaguaacacacucuguuaaccuucuagaagacaagcauaacgggaaacuaugcaaacuaagagggguagccccauugcauuuggguaaauguaacauugcuggcuggauccugggaaauccagagugugaaucacucuccacagcaagcucaugguccuacauuguggaaacaucuaguucagacaauggaacguguuacccaggagauuucaucgauuaugaggagcuaagagagcaauugagcucagugucaucauuugaaagguuugagauauuccccaagacaaguucauggcccaaucaugacucgaacaaagguguaacggcagcauguccucaugcuggagcaaaaagcuucuacaaaaauuuaauauggcuaguuaaaaaaggaaauucauacccaaagcucagcaaauccuacauuaaugauaaagggaaagaaguccucgugcuauggggcauucaccauccaucuacuagugcugaccaacaaagucucuaucagaaugcagaugcauauguuuuuguggggacaucaagauacagcaagaaguucaagccagaaauagcaauaagacccaaagugagggaucaagaagggagaaugaacuaucacuggacacuaguagagccgggagacaaaauaacauucgaagcaacuggaaaucuagugguaccgagauaugcauucgcaauggaaagaaaugcuggaucugguauuaucauuucagaugcaccaguccacgauugcaauacaacuugucaaacacccaagggugcuauaaacaccagccucccauuucagaauauacauccgaucacaauuggaaaauguccaaaauauguaaaaagcacaaaauugagacuggccacaggauugaggaaugucccgucuauucaaucuagaggccuauuuggggccauugccgguuucauugaagggggguggacagggaugguagauggaugguacgguuaucaccaucaaaaugagcaggggucaggauaugcagccgaccugaagagcacacagaaugccauugacgagauuacuaacaaaauaaauucuguuauugaaaagaugaauacacaguucacagcaguagguaaagaguucaaccaccuggaaaaaagaauagagaauuuaaauaaaaaaguugaugaugguuuccuggacauuuggacuuacaaugccgaacuguugguucuauuggaaaaugaaagaacuuuggacuaccacgauucaaaugugaagaacuuauaugaaaagguaagaagccaguuaaaaaacaaugccaaggaaauuggaaacggcugcuuugaauuuuaccacaaaugcgauaacacgugcauggaaagugucaaaaaugggacuuaugacuacccaaaauacucagaggaagcaaaauuaaacagagaagaaauagaugggguaaagcuggaaucaacaaggauuuaccagauuuuggcgaucuauucaacugucgccaguucauugguacugguagucucccugggggcaaucaguuucuggaugugcucuaaugggucucuacaguguagaauauguauuuaa

SEQ ID NO: 36670 - RNA, 1701 nt, Artificial Sequence; identical to SEQ ID NO: 36286
  derived and/or modified CDS sequence (wt) from hemagglutinin__InfluenzaA__ADF87192

SEQ ID NO: 36671 - RNA, 1701 nt, Artificial Sequence
  derived and/or modified CDS sequence (wt) from hemagglutinin__InfluenzaA__ADF87202
augaaggcaauacuaguaguucugcuauauacauuugcaaccgcaaaugcagacacauuauguauagguuaucaugcgaacaauucaacagacacuguagacacaguacuagaaaagaauguaacaguaacacacucuguuaaccuucuagaagacaagcauaacgggaaacuaugcaaacuaagagggguagccccauugcauuuggguaaauguaacauugcuggcuggauccugggaaauccagagugugaaucacucuccacagcaagcucaugguccuacauuguggaaacaucuaguucagacaauggaacguguuacccaggagauuucaucgauuaugaggagcuaagagagcaauugagcucagugucaucauuugaaagguuugagauauuccccaagacaaguucauggcccaaucaugacucgaacaaagguguaacggcagcauguccucaugcuggagcaaaaagcuucuacaaaaauuuaauauggcuaguuaaaaaaggaaauucauacccaaagcucagcaaauccuacauuaaugauaaagggaaagaaguccucgugcuauggggcauucaccauccaucuacuagugcugaccaacaaagucucuaucagaaugcagaugcauauguuuuuguggggacaucaagauacagcaagaaguucaagccggaaauagcaauaagacccaaagugagggaucaagaagggagaaugaacuauuacuggacacuaguagagccgggagacaaaauaacauucgaagcaacuggaaaucuagugguaccgagauaugcauucgcaauggaaagaaaugcuggaucugguauuaucauuucagauacaccaguccacgauugcaauacaacuugucagacacccaagggugcuauaaacaccagccucccauuucagaauauacauccgaucacaauuggaaaauguccaaaauauguaaaaagcacaaaauugagacuggccacaggauugaggaaugucccgucuauucaaucuagaggccuauuuggggccauugccgguuucauugaagggggguggacagggaugguagauggaugguacgguuaucaccaucaaaaugagcaggggucaggauuugcagccgaccugaagagcacacagaaugccauugacaagauuacuaacaaaguaaauucuguuauugaaaagaugaauacacaguucacagcaguagguaaagaguucaaccaccuggaaaaaagaauagagaauuuaaauaaaaaaguugaugaugguuuccuggacauuuggacuuacaaugccgaacuguugguucuauuggaaaaugaaagaacuuuggacuaccacgauucaaaugugaagaacuuauaugaaaagguaagaagccaguuaaaaaacaaugccaaggaaauuggaaacggcugcuuugaauuuuaccacaaaugcgauaacacgugcauggaaagugucaaaaaugggacuuaugacuacccaaaauacucagaggaagcaaaauuaaacagagaagaaauagaugggguaaagcuggaaucaacaaggauuuaccagauuuuggcgaucuauucaacugucgccaguucauugguacugguagucucccugggggcaaucaguuucuggaugugcucuaaugggucucuacaguguagaauauguauuuaa

SEQ ID NO: 36672 - RNA, 1701 nt, Artificial Sequence
  derived and/or modified CDS sequence (wt) from hemagglutinin__InfluenzaA__ADF87212
augaaggcaauacuaguaguucugcuauauacauuugcaaccgcaaaugcagacacauuauguauagguuaucaugcgaacaauucaacagacacuguagacacaguacuagaaaagaauguaacaguaacacacucuguuaaccuucuagaagacaagcauaacgggaaacuaugcaaacuaagagggguagccccauugcauuuggguaaauguaacauugcuggcuggauccugggaaauccagagugugaaucacucuccacagcaagcucaugguccuacauuguggaaacaucuaguucagacaauggaacguguuacccaggagauuucaucaauuaugaggagcuaagagagcaauugagcucagugucaucauuugaaagguuugagauauuccccaagacaaguucauggcccaaucaugacucgaacaaagguguaacggcugcauguccucaugcuggagcaaaaagcuucuacaaaaauuuaauauggcuaguuaaaaaaggaaauucauacccaaagcucagcaaauccuacauuaaugauaaagggaaagaaguccucgugcuauggggcauucaccauccaucuacuagugcugaccaacaaagucucuaucagaaugcagaugcauauguuuuuguggggacaucaagauacagcaagaaguucaagccggaaauagcaauaagacccaaagugagggaucaagaagggagaaugaacuauuacuggacacuaguagagccgggagacaaaauaacauucgaagcaacuggaaaucuagugguaccgagauaugcauucgcaauggaaagaaaugcuggaucugguauuaucaucucagauacaccaguccacgauugcaauacaacuugucagacacccaagggugcuauaaacaccagccucccauuucagaauauacauccgaucacaauuggaaaauguccaaaauauguaaaaagcacaaaauugaggcuggccacaggauugaggaaugucccgucuauucaaucuagaggccuauuuggggccauugccgguuucauugaagggggguggacagggaugguagauggaugguacgguuaucaccaucaaaaugagcaggggucaggauaugcagccgaccugaagagcacacagaaugccauugacaagauuacuaacaaaguaaauucuguuauugaaaagaugaauacacaguucacagcaguagguaaagaguucaaccaccuggaaaaaagaauagagaauuuaaauaaaaaaguugaugaugguuuccuggacauuuggacuuacaaugccgaacuguugguucuauuggaaaaugaaagaacuuuggacuaccacgauucaaaugugaagaacuuauaugaaaaaguaagaagccaguuaaaaaacaaugccaaggaaauuggaaacggcugcuuugaauuuuaccacaaaugcgauaacacgugcauggaaagugucaaaaaugggacuuaugacuacccaaaauacucagaggaagcaaaauuaaacagagaagaaauagaugggguaaagcuggaaucaacaaggauuuaccagauuuuggcgaucuauucaacugucgccaguucauugguacugguagucucccugggggcaaucaguuucuggaugugcucuaaugggucucuacaguguagaauauguauuuaa

SEQ ID NO: 36673 - RNA, 1701 nt, Artificial Sequence
  derived and/or modified CDS sequence (wt) from hemagglutinin__InfluenzaA__ADF87232
augaaggcaauacuaguaguucugcuauauacauuugcaaccgcaaaugcagacacauuauguauagguuaucaugcgaacaauucaacagacacuguagacacaguacuagaaaagaauguaacaguaacacacucuguuaaccuucuagaagacaagcauaacgggaaacuaugcaaacuaagaggggaagccccauugcauuuggguaaauguaacauugcuggcuggauccugggaaauccagagugugaaucacucuccacagcaagcucaugguccuacauuguggaaacaucuaguucagacaauggaacguguuacccaggagauuucaucaauuaugaggagcuaagagagcaauugagcucagugucaucauuugaaagguuugagauauuccccaagacaaguucauggcccaaucaugacucgaacaaagguguaacggcagcauguccucaugcuggagcaaaaagcuucuacaaaaauuuaauauggcuaguuaaaaaaggaaauucauacccaaagcucagcaaauccuacauuaaugauaaagggaaagaaguccucgugcuauggggcauucaccauccaucuacuagugcugaccaacaaagucucuaucagaaugcagaugcauauguuuuuguggggacaucaagauacagcaagaaguucaagccggaaauagcaauaagacccaaagugagggaucaagaagggagaaugaacuauuacuggacacuaguagagccgggagacaaaauaacauucgaagcaacuggaaaucuagugguaccgagauaugcauucgcaauggaaagaaaugcuggaucugguauuaucaucucagauacaccaguccacgauugcaauacaacuugucagacacccaagggugcuauaaacacaagccucccauuucagaauauacauccgaucacaauuggaaaauguccaaaauauguaaaaagcacaaaauugagacuggccacaggauugaggaaugucccgucuauucaaucuagaggccuauuuggggccauugccgguuucauugaagggggguggacagggaugguagauggaugguacgguuaucaucaucaaaaugagcaggggucaggauaugcagccgaccugaagagcacacagaaugccauugacaagauuacuaacaaaguaaauucuguuauugaaaagaugaauacacaguucacagcaguagguaaagaguucaaccaccuggaaaaaagaauagagaauuuaaauaaaaaaguugaugaugguuuccuggacauuuggacuuacaaugccgaacuguugguucuauuggaaaaugaaagaacuuuggacuaccacgauucaaaugugaagaacuuauaugaaaagguaagaagccaguuaaaaaacaaugccaaggaaauuggaaacggcugcuuugaauuuuaccacaaaugcgauaacacgugcauggaaagugucaaaaaugggacuuaugacuacccaaaauacucagaggaagcaaaauuaaacagagaagaaauagaugggguaaagcuggaaucaacaaggauuuaccagauuuuggcgaucuauucaacugucgccaguucauugguacugguagucucccugggggcaaucaguuucuggaugugcucuaaugggucucuacaguguagaauauguauuuaa

SEQ ID NO: 36674 - RNA, 1701 nt, Artificial Sequence; identical to SEQ ID NO: 36286
  derived and/or modified CDS sequence (wt) from hemagglutinin__InfluenzaA__ADF87242

SEQ ID NO: 36675 - RNA, 1701 nt, Artificial Sequence
  derived and/or modified CDS sequence (wt) from hemagglutinin__InfluenzaA__ADF87252
augaaggcaauacuaguaguucugcuauauacauuugcaaccgcaaaugcagacacauuauguauagguuaucaugcgaacaauucaacagacacuguagacacaguacuagaaaagaauguaacaguaacacacucuguuaaucuucuagaagacaagcauaacgggaaacuaugcaaacuaagagggguagccccauugcauuuggguaaauguaacauugcuggcuggauccugggaaauccagagugugaaucacucuccacagcaagcucaugguccuacauuguggaaacaucuaguucagacaauggaacguguuacccaggagauuucaucaauuaugaggagcuaagagagcaauugagcucagugucaucauuugaaagguuugagauauuccccaagacaaguucauggcccaaucaugacucgaacaaagguguaacggcagcauguccucaugcuggagcaaaaagcuucuacaaaaauuuaauauggcuaguuaaaaaaggaaaaucauacccaaagcucagcaaauccuacauuaaugauaaagggaaagaaguccuagugcuauggggcauucaccauccaucuacuagugcugaccaacaaagucucuaucagaaugcagaugcauauguuuuuguggggacaucaagauacagcaagaaguuuaagccggaaauagcaauaagacccaaagugagggaucaagaagggagaaugaauuauuacuggacacuaguagagccgggagacaaaauaacauucgaagcaacuggaaaucuagugguaccgagauaugcauucgcaauggaaagaaaugcuggaucugguauuaucaucucagauacaccaguccacgauugcaauacaacuugucagacacccaagggugcuauaaacaccagccucccauuucagaauauacauccgaucacaauuggaaaauguccaaaauauguaaaaagcacaaaauugagacuggccacaggauugaggaaugucccgucuauucaaucuagaggccuauuuggggccauugccgguuucauugaagggggguggacagggaugguagauggaugguacgguuaucaccaucaaaaugagcaggggucaggauaugcagccgaccugaagagcacacagaaugccauugacaagauuacuaacaaaguaaauucuguuauugaaaagaugaauacacaguucacagcaguagguaaagaguucaaccaccuggaaaaaagaauagagaauuuaaauaaaaaaguugaugaugguuuccuggacauuuggacuuacaaugccgaacuguugguucuauuggaaaaugaaagaacuuuggacuaccacgauucaaaugugaagaacuuauaugaaaagguaagaagccaguuaaaaaacaaugccaaggaaauuggaaacggcugcuuugaauuuuaccacaaaugcgauaacacgugcauggaaagugucaaaaaugggacuuaugacuacccaaaauacucagaggaagcaaaauuaaacagagaagaaauagaugggguaaagcuggaaucaacaaggauuuaccagauuuuggcgaucuauucaacugucgccaguucauugguacugguagucucccugggggcaaucaguuucuggaugugcucuaaugggucucuacaguguagaauauguauuuaa

SEQ ID NO: 36676 - RNA, 1701 nt, Artificial Sequence; identical to SEQ ID NO: 36286
  derived and/or modified CDS sequence (wt) from hemagglutinin__InfluenzaA__ADF87262

SEQ ID NO: 36677 - RNA, 1701 nt, Artificial Sequence
  derived and/or modified CDS sequence (wt) from hemagglutinin__InfluenzaA__ADF87272
augaaggcaauacuaguaguucugcuauauacauuugcaaccgcaaaugcagacacauuauguauagguuaucaugcgaacaauucaacagacacuguagacacaguacuagaaaagaauguaacaguaacacacucuguuaaccuucuagaagacaagcauaacgggaaacuaugcaaacuaagagggguagccccauugcauuuggguaaauguaacauugcuggcuggauccugggaaauccagagugugaaucacucuccacagcaagcucaugguccuacauuguggaaacaucuaguucagacaauggaacguguuacccaggagauuucaucgauuaugaggagcuaagagagcaauugagcucagugucaucauuugaaagguuugagauauuccccaagacaaguucauggcccaaucaugacucgaacaaagguguaacggcagcauguccucaugcuggagcaaaaagcuucuacaaaaauuuaauauggcuaguuaaaaaaggaaauucauacccaaagcucagcaaauccuacauuaaugauaaagggaaagaaguccucgugcuauggggcauucaccauccaucuacuagugcugaccaacaaagucucuaucagaaugcagaugcauauguuuuuguggggacaucaagauacagcaagaaguucaagccggaaauagcaauaagacccaaagugagggaucaagaagggagaaugaacuauuacuggacacuaguagagccgggagacaaaauaacauucgaagcaacuggaaaucuagugguaccgagauaugcauucgcaauggaaagaaaugcuggaucugguauuaucauuucagauacaccaguccacgauugcaauacaacuugucagacacccaagggugcuauaaacaccagccucccauuucagaauauacauccgaucacaauuggaaaauguccaaaauauguaaaaagcacaaaauugagacuggccacaggauugaggaaugucccgucuauucaaucuagaggccuauuuggggccauugccgguuucauugaagggggguggacagggaugguagauggaugguacgguuaucaccaucaaaaugagcaggggucaggauaugcagccgaccugaagagcacacagaaugccauugacaagauuacuaacaaaguaaauucuguuauugaaaagaugaauacacaguucacagcaguagguaaagaguucaaccaccuggaaaaaagaauagagaauuuaaauaaaaaaguugaugaugguuuucuggacauuuggacuuacaaugccgaacuguugguucuauuggaaaaugaaagaacuuuggacuaccacgauucaaaugugaagaacuuauaugaaaagguaagaagccaguuaaaaaacaaugccaaggaaauuggaaacggcugcuuugaauuuuaccacaaaugcgauaacacgugcauggaaagugucaaaaaugggacuuaugacuacccaaaauacucagaggaagcaaaauuaaacagagaagaaauagaugggguaaagcuggaaucaacaaggauuuaccagauuuuggcgaucuauucaacugucgccaguucauugguacugguagucucccugggggcaaucaguuucuggaugugcucuaaugggucucuacaguguagaauauguauuuaa

SEQ ID NO: 36678 - RNA, 1701 nt, Artificial Sequence; identical to SEQ ID NO: 36677
  derived and/or modified CDS sequence (wt) from hemagglutinin__InfluenzaA__ADF87282

SEQ ID NO: 36679 - RNA, 1701 nt, Artificial Sequence
  derived and/or modified CDS sequence (wt) from hemagglutinin__InfluenzaA__ADF87292
augaaggcaauacuaguaguucugcuauauacauuugcaaccgcaaaugcagacacauuauguauagguuaucacgcgaacaauucaacagacacuguagacacaguacuaaaaaagaauguaacaguaacacacucgguuaaccuucuagaagacaagcauaacgggaaacuaugcaaacuaagagggguagccccauugcauuuggguaaauguaacauugcuggcuggauccugggaaauccagagugugaaucacucuccacagcaggcucaugguccuacauuguggaaacaucuaguucagacaauggaacguguuacccaggagauuucaucgauuaugaggagcuaagagagcaauugagcucagugucaucauuugaaagguuugagauauuccccaagacaaguucauggcccaaucaugacucgaacaaagguguaacggcagcauguccucaugcuggagcaaaaagcuucuacaaaaauuuaauauggcuaguuaaaaaaggaaauucauacccaaagcucagcaaauccuacauuaaugauaaagggaaagaaguccucgugcuauggggcauucaccauccaucuacuagugcugaccaacaaagucucuaucagaaugcagaugcauauguuuuuguggggacaucaagauacagcaagaaguucaagccggaaauagcaauaagacccaaagugagggaucaagaagggagaaugaacuauuacuggacacuaguagagccgggagacaaaauaacauucgaagcaacuggaaaucuagugguaccgagauaugcauucgcuauggaaagaaaugcuggaucugguauuaucauuucagauacaccaguccacgauugcaauacaacuugucagacacccaagggugcuauaaacaccagccucccauuucagaauauacauccgaucacaauuggaaaauguccaaaauauguaaaaagcacaaaauugagacuggccacaggauugaggaaugucccgucuauucaaucuagaggccuauuuggggccauugccgguuucauugaagggggguggacagggaugguagauggaugguacgguuaucaccaucaaaaugagcaggggucaggauaugcagccgaccugaagagcacacagaaugccauugacgagauuacuaacaaaguaaauucuguuauugaaaagaugaauacacaguucacagcaguagguaaagaguucaaccaccuggaaaaaagaauagagaauuuaaauaaaaagguugaugaugguuuccuggacauuuggacuuacaaugccgaauuguugguucuauuggaaaaugaaagaacuuuggacuaccacgauucaaaugugaagaacuuauaugaaaagguaagaagccaguuaaaaaacaaugccaaggaaauuggaaacggcugcuuugaauuuuaccacaaaugcgauaacaugugcauggaaagugucaaaaaugggacuuaugacuacccaaaauacucagaggaagcaaaauuaaacagagaagaaauagaugggguaaagcuggaaucaacaaggauuuaccagauuuuggcgaucuauucaacugucgccaguucauugguacugguagucucccugggggcaaucaguuucuggaugugcucuaaugggucucuacaguguagaauauguauuuaa

SEQ ID NO: 36680 - RNA, 1701 nt, Artificial Sequence; identical to SEQ ID NO: 35845
  derived and/or modified CDS sequence (wt) from hemagglutinin__InfluenzaA__ADF87302

SEQ ID NO: 36681 - RNA, 1701 nt, Artificial Sequence
  derived and/or modified CDS sequence (wt) from hemagglutinin__InfluenzaA__ADF87331
augaaggcaauacuaguaguucugcuauauacauuugcaaccgcaaaugcagacacauuauguauagguuaucaugcgaacaauucaacagacacuguagacacaguacuagaaaagaauguaacaguaacacacucuguuaaccuucuagaagacaagcauaaugggaaacuaugcaaacuaagagggguagccccauugcauuuggguaaauguaacauugcuggcuggauccugggaaauccagagugugaaucacucuccacagcaagcucaugguccuacauuguggaaacaucuaauucagacaauggaacguguuacccaggagauuucaucaauuaugaggagcuaagagagcaauugagcucagugucaucauuugaaagguuugagauauuccccaagacaaguucauggcccaaucaugacucgaacaaagguauaacggcagcauguccucaugcuggagcaaaaagcuucuacaaaaauuuaauauggcuaguuaaaaaaggaaauucauacccaaagcucagcaaauccuacauuaaugauaaagggaaagaaguccucgugcuauggggcauucaccauccaucuacuagugcugaccaacaaagucucuaucagaaugcagaugcauauguuuuuguggggucaucaagauacagcaagaaguucaaaccggaaauagcaauaagacccaaagugagggaucaagaagggagaaugaacuauuacuggacacuaguagagccgggagacaaaauaacauucgaagcaacuggaaaucuagugguaccgagauaugcauucgcaauggaaagaaaugcuggaucugguauuaucauuucagauacaccaguccacgauugcaauacaacuugucagacacccaagggugcuauaaacaccagccucccauuucagaauauacauccgaucacaauuggaaaauguccaaaauauguaaaaagcacaaaauugagacuggccacaggauugaggaaugucccgucuauucaaucuagaggccuauuuggggccauugccgguuucauugaagggggguggacagggaugguagauggaugguacgguuaucaccaucaaaaugagcaggggucaggauaugcagccgaccugaagagcacacagaaugccauugacaagauuacuaacaaaguaaauucuguuauugaaaagaugaauacacaguucacagcaguagguaaagaguucaaccaccuggaaaaaagaauagagaauuuaaauaaaaaaguugaugaugguuuccuggacauuuggacuuacaaugccgaacuguugguucuauuggaaaaugaaagaacuuuggacuaccacgauucaaaugugaagaacuuauaugaaaagguaagaagccaguuaaaaaacaaugccaaggaaauuggaaacggcugcuuugaauuuuaccacaaaugcgauaacacgugcauggaaagugucaaaaaugggacuuaugacuacccaaaauacucagaggaagcaaaauuaaacagagaagaaauagaugggguaaagcuggaaucaacaaggauuuaccagauuuuggcgaucuauucaacugucgccaguucauugguacugguagucucccugggggcaaucaguuucuggaugugcucuaaugggucucuacaguguagaauauguauuuaa

SEQ ID NO: 36682 - RNA, 1701 nt, Artificial Sequence
  derived and/or modified CDS sequence (wt) from hemagglutinin__InfluenzaA__ADF87341
augaaggcaauacuaguaguucugcuauauacauuugcaaccgcaaaugcagacacauuauguauagguuaucaugcgaacaauucaacagacacuguagacacaguacuagaaaagaauguaacaguaacacacucuguuaaccuucuagaagacaagcauaacgggaaacuaugcaaacuaagagggguagccccauugcauuuggguaaauguaacauugcuggcuggauccugggaaauccagagugugaaucacucuccacagcaagcucaugguccuacauuguggaaacaucuaguucagacaauggaacguguuacccaggagauuucaucgauuaugaggagcuaagagagcaauugagcucagugucaucauuugaaagguuugagauauuccccaagacaaguucauggcccaaucaugacucgaacaaagguguaacggcagcauguccucaugcuggagcaaaaagcuucuacaaaaauuuaauauggcuaguuaaaaaaggaaauucauacccaaagcucagcaaauccuacauuaaugauaaagggaaagaaguccucgugcuauggggcauucaccauccaucuacuagugcugaccaacaaagucucuaucagaaugcagaugcauauguuuuuguggggacaucaagauacagcaagaaguucaagccggaaauagcaauaagacccaaagugagggaucaagaagggagaaugaacuauuacuggacacuaguagagccgggagacaaaauaacauucgaagcaacuggaaaucuagugguaccgagauaugcauucgcaauggaaagaaaugcuggaucugguauuaucauuucagauacaccaguccacgauugcaauacaacuugucagacacccaagggugcuauaaacaccagccucccauuucagaauauacauccgaucacaauuggaaaauguccaaaauauguaaaaagcacaaaauugagacuggccacaggauugaggaaugucccgucuauucaaucuagaggccuauuuggggccauugccgguuucauugaagggggguggacagggaugguagauggaugguacgguuaucaccaucaaaaugagcaggggucaggauaugcagccgaccugaagagcacacagaaugccauugacgagauuacuaacaaaguaaauucuguuauugaaaagaugaauacacaguucacagcaguagguaaagaguucaaccaccuggaaaaaagaauagagaauuuaaauaaaaagguugaugaugguuuccuggacauuuggacuuacaaugccgaacuguugguucuauuggaaaaugaaagaacuuuggacuaccacgauucaaaugugaagaacuuauaugaaaagguaagaagccaguuaaaaaacaaugccaaggaaauuggaaacggcugcuuugaauuuuaccacaaaugcgauaacacgugcauggaaaguguuaaaaaugggacuuaugacuacccaaaauacucagaggaagcaaaauuaaacagagaagaaauagaugggguaaagcuggaaucaacaaggauuuaccagauuuuggcgaucuauucaacugucgccaguucauugguacugguagucucccugggggcaaucaguuucuggaugugcucuaaugggucucuacaguguagaauauguauuuaa

SEQ ID NO: 36683 - RNA, 1701 nt, Artificial Sequence
  derived and/or modified CDS sequence (wt) from hemagglutinin__InfluenzaA__ADF87351
augaaggcaauacuaguaguucugcuauauacauuugcaaccgcaaaugcagacacauuauguauagguuaucaugcgaacaauucaacagacacuguagacacaguacuagaaaagaauguaacaguaacacacucuguuaaccuucuagaagacaagcauaacgggaaacuaugcaaacuaagagggguagccccauugcauuuggguaaauguaacauugcuggcuggauccugggaaauccagagugugacucacucuccacagcaagcucaugguccuacauuguggaaacaucuaguucagacaauggaacguguuacccaggagauuucaucgauuaugaggagcuaagagagcaauugagcucagugucaucauuugaaagguuugagauguuccccaagacaaguucauggcccaaucaugacucgaacaaagguguaacggcagcauguccucaugcuggagcaaaaagcuucuacaaaaauuuaauauggcuaguuaaaaaaggaaauucauacccaaagcucagcaaauccuacauuaaugauaaagggaaagaaguccucgugcuauggggcauucaccauccaucuacuagugcugaccaacaaagucucuaucagaaugcagaugcauauguuuuuguggggacaucaagauacagcaagaaguucaagccggaaauagcaauaagacccaaagugagggaucaagaagggagaaugaacuauuacuggacacuaguagagccgggagacaaaauaacauucgaagcaacuggaaaucuagugguaccgagauaugcauucgcaauggaaagaaaugcuggaucugguauuaucauuucagauacaccaguccacgauugcaauacaacuugucagacacccaagggugcuauaaacaccagccucccauuucagaauauacauccgaucacaauuggaaaauguccaaaauauguaaaaagcacaaaauugagacuggccacaggauugaggaaugucccgucuauucaaucuagaggccuauuuggggccauugccgguuucauugaagggggguggacagggaugguagauggaugguacgguuaucaccaucaaaaugagcaggggucaggauaugcagccgaccugaagagcacacagaaugccauugacgagauuacuaacaaaguaaauucuguuauugaaaagaugaauacacaguucacagcaguagguaaagaguucaaccaccuggaaaaaagaauagagaauuuaaauaaaaaaguugaugaugguuuccuggacauuuggacuuacaaugccgaacuguugguucuauuggaaaaugaaagaacuuuggacuaccacgauucaaaugugaagaacuuauaugaaaagguaagaagccaguuaaaaaacaaugccaaggaaauuggaaacggcugcuuugaauuuuaccacaaaugcgauaacacgugcauggaaagugucaaaaaugggacuuaugacuacccaaaauacucagaggaagcaaaauuaaacagagaagaaauagaugggguaaagcuggaaucaacaaggauuuaccagauuuuggcgaucuauucaacugucgccaguucauugguauugguagucucccugggggcaaucaguuucuggaugugcucuaaugggucucuacaguguagaauauguauuuaa

SEQ ID NO: 36684 - RNA, 1701 nt, Artificial Sequence
  derived and/or modified CDS sequence (wt) from hemagglutinin__InfluenzaA__ADF87361
augaaggcaauacuaguaguucugcuauauacauuugcaaccgcaaaugcagacacauuauguauagguuaucaugcgaacaauucaacagacacuguagacacaguacuagaaaagaauguaacaguaacacacucuguuaacauucuagaagacaagcauaacgggaaacuaugcaaacuaagagggguagccccauugcauuuggguaaauguaacauugcuggcuggauccugggaaauccagagugugaaucacucuccacagcaagcucaugguccuacauuguggaaacaucuaguucagacaauggaacguguuacccaggagauuucaucgauuaugaggagcuaagagagcaauugagcucagugucaucauuugaaagguuugagauauuccccaagacaaguucauggcccaaccaugacucgaacaaagguguaacggcagcauguccucaugcuggagcaaaaagcuucuacaaaaauuuaauuuggcuaguuaaaaaaggaaauucauacccaaagcucagcaaauccuacauuaaugauaaagggaaagaaguccucgugcuauggggcauucaccauccaucuacuagugcugaccaacaaagucucuaucagaaugcagaugcauauguuuuuguggggucaucaagauacagcaagaaguucaagccggaaauagcaauuagacccaaagugagggaucaagaagggagaaugaacuauuacuggacacuaguagagccgggagacaaaauaacauucgaagcaacuggaaaucuagugguaccgagauaugcauucgcaauggaaagaaaugcuggaucugguauuaucauuucagauacaccaguccaugauugcaauacaacuugucagacacccaagggugcuauaaacaccagccucccauuucagaauauacauccgaucacaauuggaaaauguccaaaauauguaaaaagcacaaaauugagacuggccacaggauugaggaaugucccgucuauucaaucuagaggccuauuuggggccauugccgguuucauugaagggggguggacagggaugguagauggaugguacgguuaucaccaucaaaaugagcaggggucaggauaugcagccgaccugaagagcacacagaaugccauugacgagauuacuaacaaaguaaauucuguuauugaaaagaugaauacacaguucacagcaguagguaaagaguucaaccaccuggaaaaaagaauagagaauuuaaauaaaaaaguugaugaugguuuccuggacauuuggacuuacaaugccgaacuguugguucuauuggaaaaugaaagaacuuuggacuaccacgauucaaaugugaagaacuuauaugaaaagguaagaagccagcuaaaaaacaaugccaaggaaguuggaaacggcugcuuugaauuuuaccacaaaugcgauaacacgugcauggaaagugucaaaaaugggacuuaugacuacccaaaauacucagaggaagcaaaauuaaacagagaagaaauagaugggguaaagcuggaaucaacaaggauuuaccagauuuuggcgaucuauucaacugccgccaguucauugguacugguagucucccugggggcaaucaguuucuggaugugcucuaaugggucucuacaguguagaauauguauuuaa

SEQ ID NO: 36685 - RNA, 1701 nt, Artificial Sequence; identical to SEQ ID NO: 36222
  derived and/or modified CDS sequence (wt) from hemagglutinin__InfluenzaA__ADF87371

SEQ ID NO: 36686 - RNA, 1701 nt, Artificial Sequence
  derived and/or modified CDS sequence (wt) from hemagglutinin__InfluenzaA__ADG08115
augaaggcaauacuaguaguucugcuauauacauuugcaaccgcaaaugcagacacauuaugcauagguuaucaugcgaacaauucaacagacacuguagacacaguacuagaaaagaauguaacaguaacacacucuguuaaccuucuagaagacaagcauaacgggaaacuaugcaaacuaagagggguagccccauugcauuuggguaaauguaacauugcuggcuggauccugggaaauccagagugugaaucacucuccacagcaagcucaugguccuacauuguggaaacaucuaguucaggcaauggaacguguuacccaggagauuucaucgauuaugaggagcuaagagagcaauugagcucagugucaucauuugaaagguuugagauauuccccaagacaaguucauggcccaaucaugacucgaacaaagguguaacggcagcauguccucaugcuggagcaaaaagcuucuacaaaaauuuaauauggcuaguuaaaaaaggaaacucauacccaaagcucagcaaauccuacauuaaugauaaagggaaagaaguccucgugcuauggggcauucaccauccaucuacuagugcugaccaacaaagucucuaucagaaugcagaugcauauguuuuuguggggacaucaagauacagcaagaaguucaagccggaaauagcaauaagacccaaagugaggggucaagaagggagaaugaacuauuacuggacacuaguagagccgggagacaaaauaacauucgaagcaacuggaaaucuagugguaccgagauaugcauucgcaauggaaagaaaugcuggaucugguauuaucauuucagauacaccaguccacgauugcaauacaacuugucagacacccaagggugcuauaaacaccagccucccauuucagaacauacauccgaucacaauuggaaaauguccaaaauauguaaaaagcacaaaauugagacuggccacuggauugaggaaugucccgucuauucaaucuagaggccuauuuggggccauugccgguuucauugaagggggguggacagggaugguagauggaugguacgguuaucaccaucaaaaugagcaggggucaggauaugcagccgaccugaagagcacacagaaugccauugacgagauuacuaacaaaguaaauucuguuauugaaaagaugaauacacaguucacagcaguagguaaagaguucaaccaccuggaaaaaagaauagagaauuuaaauaaaaaaguugaugaugguuuccuggacauuuggacuuacaaugccgaacuuuugguucuauuggaaaaugaaagaacuuuggacuaccacgauucaaaugugaagaacuuauaugaaaagguaagaagccaguuaaaaaacaaugccaaggaaauuggaaacggcugcuuugaauuuuaccacaaaugcgauaacacgugcauggaaagugucaaaaaugggacuuaugacuacccaaaauacucagaggaagcaaaauuaaacagagaagaaauagaugggguaaagcuggaaucaacaaggauuuaccagauuuuggcgaucuauucaacugucgccaguucauugguacugguagucucccugggggcaaucaguuucuggaugugcucuaaugggucucuacaguguagaauauguauuuaa

SEQ ID NO: 36687 - RNA, 1701 nt, Artificial Sequence; identical to SEQ ID NO: 35611
  derived and/or modified CDS sequence (wt) from hemagglutinin__InfluenzaA__ADG21004

SEQ ID NO: 36688 - RNA, 1701 nt, Artificial Sequence; identical to SEQ ID NO: 35611
  derived and/or modified CDS sequence (wt) from hemagglutinin__InfluenzaA__ADG21006

SEQ ID NO: 36689 - RNA, 1701 nt, Artificial Sequence
  derived and/or modified CDS sequence (wt) from hemagglutinin__InfluenzaA__ADG21008
augaagacuaucauugcuuugagcuacauucuaugucugguuuucgcucaaaaaauuccugggaaugacaacagcacggcaacgcugugccuugggcaccaugcaguaccaaacggaacgauagugaaaacaaucacgaaugaccaaauugaaguuacuaaugcuacugagcugguucagaguuccucaacaggugaaauaugcgacagcccucaucagauccuugauggagaaaacugcacacuaauagaugcucuauugggagacccucagugugauggcuuccaaaauaagaaaugggaccuuuuuguugaacgcagcaaauccuacagcaacuguuacccuuaugaugugccggauuaugccucccuuaggucacuaguugccucaucuggcacacuggaguuuaacaaugaaagcuucaauuggacuggagucacucaaaacggaacaagcucugcuugcauaaggaaaucuaauaacaguuucuuuaguagauugaauugguugacccacuuaaaauucaaauacccagcauugaacgugacuaugccaaacaaugaacaauuugacaaauuguacauuugggggguucaccacccggguacggacaaugaccaaaucuuccuguaugcucaagcaucaggaagaaucacagucucuaccaaaagaagccaacaaacuguaaucccgaauaucggaucuagacccagaguaaggaauaucccuagcagaauaagcaucuauuggacaauaguaaaaccgggagacauacuuuugauuaacagcacagggaaucuaauugcuccuagggguuacuucaaaauacgaagugggaaaagcucaauaaugagaucagaugcacccauuggcaaaugcaauucugaaugcaucacuccaaauggaagcauucccaaugacaaaccauuccaaaauguaaacaggaucacauacggggcaugucccagauauguuaagcaaaacacucugaaauuggcaacagggaugcgaaauguaccagagaaacaaacuagaggcauauuuggcgcaaucgcggguuucauagaaaaugguugggagggaaugguggaugguugguacgguuucaggcaucaaaauucugagggaagaggacaagcagcagaucucaaaagcacucaagcagcaaucgaucaaaucaaugggaagcugaauagauugaucgggaaaaccaacgagaaauuccaucagauugaaaaagaauucucagaagucgaagggaggauucaggaccuugagaaauauguugaggacaccaaaauagaucucuggucauacaacgcggagcuucuuguugcccuggagaaccaacauacaauugaucuaacugacucagaaaugaacaaacuguuugaaaaaacaaagaagcaacugagggaaaaugcugaggauaugggcaaugguuguuucaaaauauaccacaaaugugacaaugccugcauaggaucaaucagaaauggaacuuaugaccacgauguauacagagaugaagcauuaaacaaccgguuccagaucaagggaguugagcugaagucaggguacaaagauuggauccuauggauuuccuuugccauaucauguuuuuugcuuuguguugcuuuguugggguucaucaugugggccugccaaaaaggcaacauuaggugcaacauuugcauuuga

SEQ ID NO: 36690 - RNA, 1701 nt, Artificial Sequence
  derived and/or modified CDS sequence (wt) from hemagglutinin__InfluenzaA__ADG21009
augaagacuaucauugcuuugagcuacauucuaugucugguuuucgcucaaaaacuuccuggaaaugacaacagcacggcaacgcugugccuugggcaccaugcaguaccaaacggaacgauagugaaaacaaucacgaaugaccaaauugaaguuacuaaugcuacugagcugguucagaguuccucaacaggugaaauaugcaacaguccucaucagauccuugauggagaaaacugcacacuaauagaugcucuauugggagacccucagugugauggcuuccaaaauaagaaaugggaccuuuuuguugaacgcagcaaagccuacagcaacuguuacccuuaugaugugccggauuaugccucccuuaggucacuaguugccucauccggcacacuggaguuuaacaaugaaagcuucaauuggacuggagucacucaaaacggaacaagcucugcuugcauaaggagaucuaauaacaguuucuuuaguagauugaauugguugacccacuuaagauucaaguacccagcauugaacgugacuaugccaaacaaugaacaauuugacaaauuguacauuugggggguucaccacccggguacggacaaugaccaaaucuuccuguaugcucaagcaucaggaagaaucacagucucuaccaaaagaagccaacaaacuguaaucccgaauaucggaucuagacccagaguaaggaauaucccuagcagaauaagcaucuauuggacaauaguaaaaccgggagacauacuuuugauuaacagcacagggaaucuaauugcuccuagggguuacuucaaaauacgaagugggaaaagcucaauaaugagaucagaugcacccauuggcaaaugcaauucugaaugcaucacaccaaauggaagcauucccaaugacaaaccauuccaaaauguaaacaggaucacauacggggcuugucccagauauguuaagcaaaacacucugaaauuggcaacagggaugcgaaauguaccagagaaacaaacuagaggcauauuuggcgcaaucgcggguuucauagaaaaugguugggagggaaugguggaugguugguacgguuucaggcaucaaaauucugagggaagaggacaagcagcagaucucaaaagcacucaagcagcaaucgaucaaaucaaugggaagcugaauagauugaucggaaaaaccaacgagaaauuccaucagauugaaaaagaauucucagaagucgaagggagaauucaggaccuugagaaauauguugaggacaccaaaauagaucucuggucauacaacgcggagcuucuuguugcccuggagaaccaacauacaauugaucuaacugacucagaaaugaacaaacuguuugaaaaaacaaagaagcaacugagggaaaaugcugaggauaugggcaaugguuguuucaaaauauaccacaaaugugacaaugccugcauaggaucaaucagaaauggaacuuaugaccacgauguauacagagaugaagcauuaaacaaccgguuccagaucaagggaguugagcugaagucaggguacaaagauuggauccuauggauuuccuuugccauaucauguuuuuugcuuuguguugcuuuguugggguucaucaugugggccugccaaaaaggcaacauuaggugcaacauuugcauuuga

SEQ ID NO: 36691 - RNA, 1701 nt, Artificial Sequence
  derived and/or modified CDS sequence (wt) from hemagglutinin__InfluenzaA__ADG21010
augaagacuaucauugcuuugagcuacauucuaugucugguuuucgcucaaaaacuuccuggaaaugacaacagcacggcaacgcugugccuugggcaccaugcaguaccaaacggaacgauagugaaaacaaucacgaaugaccaaauugaaguuacuaaugcuacugagcugguucagaguuccucaacaggugaaauaugcgacaguccucaucagauccuugauggagaaaacugcacacuaauagaugcucuauugggagacccucagugugauggcuuccaaaauaagaaaugggaccuuuuuguugaacgaagcaaagccuacagcaacuguuacccuuaugaugugccggauuaugccucccuuaggucacuaguugccucauccggcacacuggaguuuaacaaugaaagcuucaauuggacuggagucacucaaaacggaacaagcucugcuugcauaaggagaucuaauaauaguuucuuuaguagauugaauugguugacccacuuaaacuucaaauacccagcauugaacgugacuaugccaaacaaugaacaauuugacaaauuguacauuugggggguucaccacccggguacggacaaggaccaaaucuuccuguaugcucaagcaucaggaagaaucacaguaucuaccaaaagaagccaacaagcuguaaucccgaauaucggaucuagacccagaguaaggaauaucccuagcagaauaagcaucuauuggacaauaguaaaaccgggagacauacuuuugauuaacagcacagggaaucuaauugcuccuagggguuacuucaaaauacgaagugggaaaagcucaauaaugagaucagaugcacccauuggcaaaugcaauucugaaugcaucacuccaaauggaagcauucccaaugacaaaccauuccaaaauguaaacaggaucacauacggggccugucccagauauguuaagcaaaacacucugaaauuggcaacaggaaugcgaaauguaccagagaaacaaacuagaggcauauuuggcgcaauagcggguuucauagaaaaugguugggagggaaugguggaugguugguacgguuucaggcaucaaaauucugagggaagaggacaagcagcagaucucaaaagcacucaagcagcaaucgaucaaaucaaugggaagcugaauagauugaucgggaaaaccaacgagaaauuccaucagauugaaaaagaauucucagaaguugaagggagaauucaggaccuugagaaauauguugaggacacuaaaauagaucucuggucauacaacgcggagcuucuuguugcccuggagaaccaacauacaauugaucuaacugacucagaaaugaacaaacuguuugaaaaaacaaagaagcaacugagggaaaaugcugaggauaugggcaaugguuguuucaaaauauaccacaaaugugacaaugccugcauaggaucaaucagaaauggaacuuaugaccacgauguauacagagaugaagcauuaaacaaccgguuccagaucaagggaguugagcugaagucaggguacaaagauuggauccuauggauuuccuuugccauaucauguuuuuugcuuuguguugcuuugcugggguucaucaugugggccugccaaaaaggcaacauuaggugcaacauuugcauuuga

SEQ ID NO: 36692 - RNA, 1701 nt, Artificial Sequence
  derived and/or modified CDS sequence (wt) from hemagglutinin__InfluenzaA__ADG21011
augaagacuaucauugcuuugagcuacauucuaugucugguuuucgcucaaaaacuuccuggaaaugacaacagcacggcaacgcugugccuugggcaccaugcaguaccaaacggaacgauagugaaaacaaucacgaaugaccaaauugaaguuacuaaugcuacugagcugguucagaguuccucaacaggugaaauaugcgacaguccucaucagauccuugauggagaaaacugcacacuaauagaugcucuauugggagacccucagugugauggcuuccaaaauaagaaaugggaccuuuuuguugaacgaagcaaagccuacagcaacuguuacccuuaugaugugccggauuaugccucccuuaggucacuaguugccucauccggcacacuggaguuuaacaaugaaagcuucaauuggacuggagucacucaaaacggaacaagcucugcuugcauaaggagaucuaauaauaguuucuuuaguagauugaauugguugacccacuuaaacuucaaauacccagcauugaacgugacuaugccaaacaaugaacaauuugacaaauuguacauuugggggguucaccacccggguacggacaaggaccaaaucuuccuguaugcucaagcaucaggaagaaucacaguaucuaccaaaagaagccaacaagcuguaaucccgaauaucggaucuagacccagaguaagggauaucccuagcagaauaagcaucuauuggacaauaguaaaaccgggagacauacuuuugauuaacagcacagggaaucuaauugcuccuagggguuacuucaaaauacgaagugggaaaagcucaauaaugagaucagaugcacccauuggcaaaugcaauucugaaugcaucacuccaaauggaagcauucccaaugacaaaccauuccaaaauguaaacaggaucacauacggggccugucccagauauguuaagcaaaacacucugaaauuggcaacaggaaugcgaaauguaccagagaaacaaacuagaggcauauuuggcgcaauagcggguuucauagaaaaugguugggagggaaugguggaugguugguaugguuucaggcaucaaaauucugagggaagaggacaagcagcagaucucaaaagcacucaagcagcaaucgaucaaaucaaugggaagcugaauagauugaucgggaaaaccaacgagaaauuccaucagauugaaaaagaauucucagaagucgaagggagaauucaggaccuugagaaauauguugaggacacuaaaauagaucucuggucauacaacgcggagcuucuuguugcccuggagaaccaacauacaauugaucuaacugacucagaaaugaacaaacuguuugaaaaaacaaagaagcaacugagggaaaaugcugaggauaugggcaaugguuguuucaaaauauaccacaaaugugacaaugccugcauaggaucaaucagaaauggaacuuaugaccacgauguauacagagaugaagcauuaaacaaccgguuccagaucaagggaguugagcugaagucaggguacaaagauuggauccuauggauuuccuuugccauaucauguuuuuugcuuuguguugcuuuguugggguucaucaugugggccugccaaaaaggcaacauuaggugcaacauuugcauuuga

SEQ ID NO: 36693 - RNA, 1701 nt, Artificial Sequence
  derived and/or modified CDS sequence (wt) from hemagglutinin__InfluenzaA__ADG21012
augaagacuaucauugcuuugagcuacauucuaugccugguuuucgcucaaaaacuuccuggaaaugacaacagcacggcaacgcuaugccuugggcaccaugcaguaccaaacggaacgauagugaaaacaaucacgaaugaccaaauugaaguuacuaaugcuacugagcugguucagaguuccucaacaggugaaauaugcgacaguccucaucagauccuugauggagaaaacugcacacuaauagaugcucuauugggagacccucagugugauggcuuccaaaauaagaaaugggaccuuuuuguugaacgaagcaaagccuacagcaacuguuacccuuaugaugugccggauuaugccucccuuaggucacuaguugccucauccggcacacuggaguuuaacaaugaaagcuucaauuggacuggagucacucaaaacggaacaagcucugcuugcauaaggagaucuaauaauaguuucuuuaguagauugaauugguugacccacuuaaacuucaaauacccagcauugaacgugacuaugccaaacaaugaacaauuugacaaauuguacauuugggggguucaccacccggguacggacaaggaccaaaucuuccuguaugcucaagcaucaggaagaaucacaguaucuaccaaaagaagccaacaagcuguaaucccgaauaucggaucuagacccagaguaaggaauaucccuagcagaauaagcaucuauuggacaauaguaaaaccgggagacauacuuuugauuaacagcacagggaaucuaauugcuccuagggguuacuucaaaauacgaagugggaaaagcucaauaaugagaucagaugcacccauuggcaaaugcaauucugaaugcaucacuccaaauggaagcauucccaaugacaaaccauuccaaaauguaaacaggaucacauacggggccugucccagauauguuaagcaaaacacucugaaauuggcaacaggaaugcgaaauguaccagagaaacaaacuagaggcauauuuggcgcaauagcggguuucauagaaaaugguugggagggaaugguggaugguugguacgguuucaggcaucaaaauucugagggaagaggacaagcagcagaucucaaaagcacucaagcagcaaucgaucaaaucaaugggaagcugaauagauugaucgggaaaaccaacgagaaauuccaucagauugaaaaagaauucucagaagucgaagggagaauucaggaccuugagaaauauguugaggacacuaaaauagaucucuggucauacaacgcggagcuucuuguugcccuggagaaccaacauacaauugaucuaacugacucagaaaugaacaaacuguuugaaaaaacaaagaagcaacugagggaaaaugcugaggauaugggcaaugguuguuucaaaauauaccacaaaugugacaaugccugcauaggaucaaucagaaauggaacuuaugaccacgauguuuacagagaugaagcauuaaacaaccgguuccagaucaagggaguugagcugaagucaggguacaaagauuggauccuauggauuuccuuugccauaucauguuuuuugcuuuguguugcuuuguugggguucaucaugugggccugccaaaaaggcaacauuaggugcaacauuugcauuuga

SEQ ID NO: 36694 - RNA, 1701 nt, Artificial Sequence
  derived and/or modified CDS sequence (wt) from hemagglutinin__InfluenzaA__ADG21013
augaagacuaucauugcuuugagcuacauucuaugucugguuuucgcucaaaaacuuccuggaaaugacaacagcacggcaacgcugugccuugggcaccaugcaguaccaaacggaacgauagugaaaacaaucacgaaugaccaaauugaaguuaccaaugcuacugagcugguucagaguuccucaacaggugaaauaugcgacaguccucaucagauccuugauggagaaaacugcacacuaauagaugcucuauugggagacccucagugugauggcuuccaaaauaagaaaugggaccuuuuuguugaacgaagcaaagccuacagcaacuguuacccuuaugaugugccggauuaugccucccuuaggucacuaguugccucauccggcacacuggaguuuaacaaugaaagcuucaauuggacuggagucacucaaaacggaacaagcucugcuugcauaaggagaucuaauaauaguuucuuuaguagauugaauugguugacccacuuaaacuucaaauacccagcauugaacgugacuaugccaaacaaugaacaauuugacaaauuguacauuugggggguucaccacccggguacggacaaggaccaaaucuuccuguaugcucaagcaucaggaagaaucacaguaucuaccaaaagaagccaacaagcuguaaucccgaauaucggaucuagacccagaguaaggaauaucccuagcagaauaagcaucuauuggacaauaguaaaaccaggagacauacuuuugauuaacagcacagggaaucuaauugcuccuagggguuacuucaaaauacgaagugggaaaagcucaauaaugagaucagaugcacccauuggcaaaugcaauucugaaugcaucacuccaaauggaagcauucccaaugacaaaccauuccaaaauguaaacaggaucacauacggggccugucccagauauguuaagcaaaacacucugaaauuggcaacaggaaugcgaaauguaccagagaaacaaacuagaggcauauuuggcgcaauagcggguuucauagaaaaugguugggagggaaugguggaugguugguacgguuucaggcaucaaaauucugagggaagaggacaagcagcagaucucaaaagcacucaagcagcaaucgaucaaaucaaugggaagcugaauagauugaucgggaaaaccaacgagaaauuccaucagauugaaaaagaauucucagaaguugaagggagaauucaggaccuugagaaauauguugaggacacuaaaauagaucucuggucauacaacgcggagcuucuuguugcccuggagaaccaacauacaauugaucuaacugacucagaaaugaacaaacuguuugaaaaaacaaagaagcaacugagggaaaaugcugaggauaugggcaaugguuguuucaaaauauaccacaaaugugacaaugccugcauagggucaaucagaaauggaacuuaugaccacgauguauacagagaugaagcauuaaacaaccgguuccagaucaagggaguugagcugaagucaggguacaaagauuggauccuauggauuuccuuugccauaucauguuuuuugcuuuguguugcuuuguugggguucaucaugugggccugccaaaaaggcaacauuaggugcaacauuugcauuuga

SEQ ID NO: 36695 - RNA, 1701 nt, Artificial Sequence
  derived and/or modified CDS sequence (wt) from hemagglutinin__InfluenzaA__ADG21014
augaagacuaucauugcuuugagcuacauucuaugucugguuuucgcucaaaaaauuccuggaaaugacaacagcacggcaacgcugugccuugggcaccaugcaguaccaaacggaacgauagugaaaacaaucacgaaugaccaaauugaaguuaccaaugcuacugagcugguucagaguuccucaacaggugaaauaugcgacaguccucaucagauccuugauggagaaaacugcacacuaauagaugcucuauugggagacccucagugugauggcuuccaaaauaagaaaugggaccuuuuuguugaacgaagcaaagccuacagcaacuguuacccuuaugaugugccggauuaugccucccuuaggucacuaguugccucauccggcacacuggaguuuaacaaugaaagcuucaauuggacuggagucacucaaaacggaacaagcucugcuugcauaaggagaucuaauaauaguuucuuuaguagauugaauugguugacccacuuaaacuucaaauacccagcauugaacgugacuaugccaaacaaugaacaauuugacaaauuguacauuugggggguucaccacccggguacggacaaggaccaaaucuuccuguaugcucaagcaucaggaagaaucacaguaucuaccaaaagaagccaacaagcuguaaucccgaauaucggaucuagacccagaguaaggaauaucccuagcagaauaagcaucuauuggacaauaguaaaaccgggagacauacuuuugauuaacagcacagggaaucuaauugcuccuagggguuacuucaaaauacgaagugggaaaagcucaauaaugagaucagaugcacccauuggcaaaugcaauucugaaugcaucacuccaaauggaagcauucccaaugacaaaccauuccaaaauguaaacaggaucacauacggggccugucccagauauguuaagcaaaacacucugaaauuggcaacaggaaugcgaaauguaccagagaaacaaacuagaggcauauuuggcgcaauagcggguuucauagaaaaugguugggagggaaugguggaugguugguacgguuucaggcaucaaaauucugagggaagaggacaagcagcagaucucaaaagcacucaagcagcaaucgaucaaaucaaugggaagcugaauagauugaucgggaaaaccaacgagaaauuccaucagauugaaaaagaauucucagaagucgaagggagaauucaggaccuugagaaauauguugaggacacuaaaauagaucucuggucauacaacgcggagcuucuuguugcccuggagaaccaacauacaauugaucuaacugacucagaaaugaacaaacuguuugaaaaaacaaagaagcaacugagggaaaaugcugaggauaugggcaaugguuguuucaaaauauaccacaaaugugacaaugccugcauagggucaaucagaaauggaacuuaugaccacgauguauacagagaugaagcauuaaacaaccgguuccagaucaagggaguugagcugaagucaggguacaaagauuggauccuauggauuuccuuugccauaucauguuuuuugcuuuguguugcuuuguugggguucaucaugugggccugccaaaaaggcaacauuaggugcaacauuugcauuuga

SEQ ID NO: 36696 - RNA, 1701 nt, Artificial Sequence
  derived and/or modified CDS sequence (wt) from hemagglutinin__InfluenzaA__ADG21017
augaagacuaucauugcuuugagcuacauucuauaucugguuuucgcucaaaaacuuccuggaaaugacaacagcacggcaacgcugugccuugggcaccaugcaguaccaaacggaacgauagugaaaacaaucacgaaugaccaaauugaaguuacuaaugcuacugagcugguucagaguuccucaacaggugaaauaugcgacaguccucaucagauccuugauggagaaaacugcacacuaauagaugcucuauugggagacccucagugugauggcuuccaaaauaagaaaugggaccuuuuuauugaacgaagcaaagccuacagcaacuguuacccuuaugaugugccggauuaugccucccuuaggucacuaguugccucauccggcacacuggaguuuaacaaugaaagcuucaauuggacuggagucacucaaaacggaacaagcucugcuugcauaaggagaucuaauaauaguuucuuuaguagauugaauugguugacccacuuaaacuucaaauacccagcauugaacgugacuaugccaaacaaugaacaauuugacaaauuguacauuugggggguucaccacccggguacggacaaggaccaaaucuuccuguaugcucaagcaucaggaagaaucacaguaucuaccaaaagaagccaacaagcuguaaucccgaauaucggaucuagacccagaguaaggaauaucccuagcagaauaagcaucuauuggacaauaguaaaaccgggagacauacuuuugauuaacagcacagggaaucuaauugcuccuagggguuacuucaaaauacgaagugggaaaagcucaauaaugagaucagaugcacccauuggcaaaugcaauucugaaugcaucacuccaaauggaagcauucccaaugacaaaccauuccaaaauguaaacaggaucacauacggggccugucccagauauguuaagcaaaacacucugaaauuggcaacaggaaugcgaaauguaccagagaaacaaacuagaggcauauuuggcgcaauagcggguuucauagaaaaugguugggagggaaugguggaugguugguaugguuucaggcaucaaaauucugagggaagaggacaagcagcagaucucaaaagcacucaagcagcaaucgaucaaaucaaugggaagcugaauagauugaucgggaaaaccaacgagaaauuccaucagauugaaaaagaauucucagaagucgaagggagaauucaggaccuugagaaauauguugaggacacuaaaauagaucucuggucauacaacgcggagcuucuuguugcccuggagaaccaacauacaauugaucuaacugacucagaaaugaacaaacuguuugaaaaaacaaagaagcaacugagggaaaaugcugaggauaugggcaaugguuguuucaaaauauaccacaaaugugacaaugccugcauaggaucaaucagaaauggaacuuaugaccacgauguauacagagaugaagcauuaaacaaccgguuccagaucaagggaguugagcugaagucaggguacaaagauuggauccuauggauuuccuuugccauaucauguuuuuugcuuuguguugcuuuguugggguucaucaugugggccugccaaaaaggcaacauuaggugcaacauuugcauuuga

SEQ ID NO: 36697 - RNA, 1701 nt, Artificial Sequence
  derived and/or modified CDS sequence (wt) from hemagglutinin__InfluenzaA__ADG21018
augaagacuaucauugcuuugagcuacauucuaugucugguuuucgcucaaaaacuuccuggaaaugacaacagcacggcaacgcugugccuugggcaccaugcaguaccaaacggaacgauagugaaaacaaucacgaaugaccaaauugaaguuacuaaugcuacugagcuaguucagaguuccucaacaggugaaauaugcgacaguccucaucagauccuugauggagaaaacugcacacuaauagaugcucuauugggagacccucagugugauggcuuccaaaauaagaaaugggaccuuuuuguugaacgaagcaaagccuacagcaacuguuacccuuaugaugugccggauuaugccucccuuaggucacuaguugccucauccggcacacuggaguuuaacaaugaaagcuucaauuggacuggagucacucaaaacggaacaagcucugcuugcauaaggagaucuaauaauaguuucuuuaguagauugaauugguugacccacucaaacuucaaauacccagcauugaacgugacuaugccaaacaaugaacaauuugacaaauuguacauuugggggguucaccacccggguacggacaaggaccaaaucuuccuguaugcucaagcaucaggaagaaucacaguaucuaccaaaagaagccaacaagcuguaaucccgaauaucggaucuagacacagaguaaggaauaucccuagcagaauaagcaucuauuggacaauaguaaaaccgggagacauacuuuugauuaacagcacagggaaucuaauugcuccuagggguuacuucaaaauacgaagugggaaaagcucaauaaugagaucagaugcacccauuggcaaaugcaauucugaaugcaucacuccaaauggaagcauucccaaugacaaaccauuccaaaauguaaacaggaucacauacggggccugucccagauauguuaagcaaaacacucugaaauuggcaacaggaaugcgaaauguaccagagaaacaaacuagaggcauauuuggcgcaauagcggguuucauagaaaaugguugggagggaaugguggaugguugguacgguuucaggcaucaaaauucugagggaagaggacaagcagcagaucucaaaagcacucaagcagcaaucgaucaaaucaaugggaagcugaauagauugaucgggaaaaccaacgagaaauuccaucagauugaaaaagaauucucagaagucgaagggagaauucaggaccuugagaaauauguugaggacacuaaaauagaucucuggucauacaacgcggagcuucuuguugcccuggagaaccaacauacaauugaucuaacugacucagaaaugaacaaacuguuugaaaaaacaaaaaagcaacugagggaaaaugcugaggauaugggcaaugguuguuucaaaauauaccacaaaugugacaaugccugcauaggaucaaucagaaauggaacuuaugaccacgauguauacagagaugaagcauuaaacaaccgguuccagaucaagggaguugagcugaagucaggguacaaagauuggauccuauggauuuccuuugccauaucauguuuuuugcuuuguguugcuuuguugggguucaucaugugggccugccaaaaaggcaacauuaggugcaacauuugcauuuga

SEQ ID NO: 36698 - RNA, 1701 nt, Artificial Sequence
  derived and/or modified CDS sequence (wt) from hemagglutinin__InfluenzaA__ADG21019
augaagacuaucauugcuuugagcuacauucuaugucugguuuucgcucaaaaacuuccuggaaaugacaacagcacggcaacgcugugccuugggcaccaugcaguaccaaacggaacgauagugaaaacaaucacgaaugaccaaauugaaguuacuaaugcuacugagcugguucagaguuccucaacaggugaaauaugcgacaguccucaucagauccuugauggaaaaaacugcacacuaauagauacucuauugggagacccucagugugauggcuuccaaaauaagaaaugggaccuuuuuguugaacgcagcaaagccuacagcaacuguuacccuuaugauguaccggauuaugccucccuuaggucacuaguugccucauccggcacacuggaguuuaacaaugaaagcuucaauuggacuggagucacucaaaacggaacaagcucugcuugcauaaggagaucuaaaaacaguuucuuuaguagauugaauugguugacccacuuaaacuucaaauacccagcauugaacgugacuaugccaaacaaugaacaauuugacaaauuguacauuugggggguucaccacccggguacggacaaagaccaaaucuuccuguaugcucaagcaucaggaaaaaucauagucucuaccaaaagaagccaacaaacuguaaucccgaauaucggaucuagacccagaguaaggaauaucccuagcauaauaagcaucuauuggacaauaguaaaaccgggagacauacuuuugauuaacagcacagggaaucuaauugcuccuagggguuacuucaaaauacgaagugggaaaagcucaauaaugagaucagaugcacccauuggcaaaugcaauucugaaugcaucacuccaaauggaagcauucccaaugacaaaccauuccaaaauguaaacaggaucacauacggggccugucccagauauguuaagcaaaacacucugaaauuggcaacagggaugcgaaauguaccagagaagcaaacuagaggcauauuuggcgcaaucgcggguuucauagaaaaugguugggagggaaugguggaugguugguacgguuucaggcaucaaaauucugagggaagaggacaagcagcagaucucaaaagcacucaagcagcaaucgaucaaaucaaugggaagcugaauagauugaucgggaaaaccaacgagaaauuccaucagauugaaaaagaauucucagaagucgaagggagaauucaggaccuugagaaauauguugaggacacuaaaauagaucucuggucauacaacgcggagcuucuuguugcccuggagaaccaacauacaauugaucuaacugacucagaaaugaacaaacuguuugaaaaaacaaagaagcaacugagggaaaaugcugaggauauaggcaaugguuguuucaaaauauaccacaaaugugacaaugccugcauaggaucaaucagaaauggaacuuaugaccacgauguauacagagaugaagcauuaaacaaccgguuucagaucaagggaguugagcugaagucaggguacaaagauuggauccuauggauuuccuuugccauaucauguuuuuugcuuuguguugcuuuguugggguucaucaugugggccugccaaaaaggcaacauuaggugcaacauuugcauuuga

SEQ ID NO: 36699 - RNA, 1701 nt, Artificial Sequence
  derived and/or modified CDS sequence (wt) from hemagglutinin__InfluenzaA__ADG21020
augaagacuaucauugcuuugagcuacauucuaugucugguuuucgcucaaaaacuuccuggaaaugacaacagcacggcaacgcugugccuugggcaccaugcaguaccaaacggaacgauagugaaaacaaucacgaaugaccaaauugaaguuacuaaugcuacugagcugguucagaguuccucaacaggugaaauaugcgacaguccucaucagauccuugauggaaaaaacugcacacuaauagaugcucuauugggagacccucagugugauggcuuccaaaauaagaaaugggaccuuuuuguugaacgcagcaaagccuacagcaacuguuacccuuaugaugugccggauuaugccucccuuaggucacuaguugccucauccggcacacuggaguuuaacaaugaaagcuucaauuggacuggagucacucaaagcggaacaagcucugcuugcauaaggagaucuaaaaacaguuucuuuaguagauugaauugguugacccacuuaaacuucaaauacccagcauugaacgugacuaugccaaacaaugaacaauuugacaaauuguacauuugggggguucaccacccggguacggacaaagaccaaaucuuccuguaugcucaagcaucaggaagaaucauagucucuaccaaaagaagccaacaaacuguaaccccgaauaucggaucuagaccuagaguaaggaauaucccuagcagaauaagcaucuauuggacaauaguaaaaccgggagacauacuuuugauuaacagcacagggaaucuaauugcuccuagggguuacuucaaaauacgaagugggaaaagcucaauaaugagaucagaugcacccauuggcaaaugcaauucugaaugcaucacuccaaauggaagcauucccaaugacaaaccauuccaaaauguaaacagaaucacauacggggccugucccagauauguuaagcaaaacacucugaaauuggcaacagggaugcgaaauguaccagagaaacaaacuagaggcauauuuggcgcaaucgcggguuucauagaaaaugguugggagggaaugguggaugguugguacgguuucaggcaucaaaauucugagggaagaggacaagcagcagaucucaaaagcacucaagcagcaaucgaucaaaucaaugggaagcugaauagauugaucgggaaaaccaacgagaaauuccaucagauugaaaaagaauucucagaagucgaagggagaauucaggaccuugagaaauauguugaggacacuaaaauagaucucuggucauacaacgcggagcuucuuguugcccuggagaaccaacauacaauugaucuaacugacucagaaaugaacaaacuguuugaaaaaacaaagaagcaacugagggaaaaugcugaggauaugggcaaugguuguuucaaaauauaccacaaaugugacaaugccugcauaggaucaaucagaaauggaacuuaugaccacgauguauacagagaugaagcauuaaacaaccgguuucagaucaagggaguugagcugaagucaggguacaaagauuggauccuauggauuuccuuugccauaucauguuuuuugcuuuguguugcuuuguugggguucaucaugugggccugccaaaaaggcaacauuaggugcaacauuugcauuuga

SEQ ID NO: 36700 - RNA, 1701 nt, Artificial Sequence
  derived and/or modified CDS sequence (wt) from hemagglutinin__InfluenzaA__ADG21022
augaagacuaucauugcuuugagcuacauucuaugucugguuuucgcucaaaaacuuccuggaaaugacaacagcacggcaacgcugugccuugggcaccaugcaguaccaaacggaacgauagugaaaacaaucacgaaugaccaaauugaaguuacuaaugcuacugagcugguucagaguuccucaacaggugaaauaugcgacaguccucaucagauccuugauggagaaaacugcacacuaauagaugcucuauugggagacccucagugugauggcuuccaaaauaagaaaugggaccuuuuuguugaacgaagcaaagccuacagcaacuguuacccuuaugaugugccggauuaugccucccuuaggucacuaguugccucauccggcacacuggaguuuaacaaugaaagcuucaauuggacuggagucacucaaaacggaacaagcucugcuugcauaaggagaucuaauaacaguuucuuuaguagauugaauugguugacccacuuaaaauucaaauacccagcauugaacgugacuaugccaaacaaugaacaauuugacaaauuguacauuugggggguucaccacccggguacggacaaugaccaaaucuuccuguaugcucaagcaucaggaagaaucacaguaucuaccaaaagaagccaacaaacuguaaucccgaauaucggaucuagacccagaguaaggaauaucccuagcagaauaagcaucuauuggacaauaguaaaaccgggagacauacuuuugauuaacagcacagggaaucuaauugcuccuagggguuacuucaaaauacgaagugggaaaagcucaauaaugagaucagaugcacccauuggcaaaugcaauucugaaugcaucacuccaaauggaagcauucccaaugacaaaccauuccaaaauguaaacaggaucacauacggggccugucccagauauguuaagcaaaacacucugaaauuggcaacaggaaugcgaaauguaccagagaaacaaacuagaggcauauuuggcgcaaucgcggguuucauagaaaaugguugggagggaaugguggaugguugguacgguuucaggcaucaaaauucugagggaagaggacaagcagcagaucucaaaagcacucaagcagcaaucgaucaaaucaaugggaagcugaauagauugaucgggaaaaccaacgagaaauuccaucagauugaaaaagaauucucagaagucgaagggagaauccaggaccuugagaaauauguugaggacacuaaaauagaucucuggucauacaacgcggagcuucuuguugcccuggagaaccaacauacaauugaucuaacugacucagaaaugaacaaacuguuugaaaaaacaaagaagcaacugagggaaaaugcugaggauaugggcaaugguuguuucaaaauauaccacaaaugugacaaugccugcauaggaucaaucagaaauggaacuuaugaccacgauguauacagagaugaagcauugaacaaccgguuccagaucaagggaguugagcugaagucaggguacaaagauuggauccuauggauuuccuuugccauaucauguuuuuugcuuuguguugcuuuguugggguucaucaugugggccugccaaaaaggcaacauuaggugcaacauuugcauuuga

SEQ ID NO: 36701 - RNA, 1701 nt, Artificial Sequence
  derived and/or modified CDS sequence (wt) from hemagglutinin__InfluenzaA__ADG21023
augaagacuaucauugcuuugagcuacauucuaugucugguuuucgcucaaaaacuuccuggaaaugacaacagcacggcaacgcugugccuugggcaccaugcaguaccaaacggaacgauagugaaaacaaucacgaaugaccaaauugaaguuacuaaugcuacugagcugguucagaguuccucaacaggugaaauaugcgacaguccucaucagauccuugauggagaaaacugcacacuaauagaugcucuauugggagacccucagugugauggcuuccaaaauaagaaaugggaccuuuuuguugaacgaagcaaagccuacagcaacuguuacccuuaugaugugccggauuaugccucccuuaggucacuaguugccucauccggcacacuggaguuuaacaaugaaagcuucaauuggacuggagucacucaaaacggaacaagcucugcuugcauaaggagaucuaauaacaguuucuuuaguagauugaauugguugacccacuuaaaauucaaauacccagcauugaacgugacuaugccaaacaaugaacaauuugacaaauuguacauuugggggguucaccacccggguacggacaaugaccaaaucuuccuguaugcucaagcaucaggaagaaucacagucucuaccaaaagaagccaacaaacuguaaucccgaauaucggaucuagacccagaguaaggaauaucccuagcagaauaagcaucuauuggacaauaguaaaaccgggagacauacuuuugauuaacagcacagggaaucuaauugcuccuagggguuacuucaaaauacgaagugggaaaagcucaauaaugagaucagaugcacccauuggcaaaugcaauucugaaugcaucacuccaaauggaagcauucccaaugacaaaccauuccaaaaugugaacaggaucacauacggggccugucccagauauguuaagcaaaacacucugaaauuggcaacagggaugcgaaauguaccagagaaacaaacuagaggcauauuuggugcaaucgcggguuucauagaaaaugguugggagggaaugguggaugguugguacgguuucaggcaucaaaauucugagggaagaggacaagcagcagaucucaaaagcacucaagcagcaaucgaucaaaucaaugggaagcugaauagauugaucgggaaaaccaacgagaaauuccaucagauugaaaaagaauucucagaagucgaagggagaauucaggaccuugagaaauauguugaggacacuaaaauagaucucuggucauacaacgcggagcuucuuguugcccuggagaaccaacauacaauugaucuaacugacucagaaaugaacaaacuguuugaaaaaacaaagaagcaacugagggaaaaugcugaggauauggguaaugguuguuucaaaauauaccacaaaugugacaaugccugcauaggaucaaucagaaauggaacuuaugaccacgauguauacagagaugaagcauuaaacaaccgguuccagaucaagggaguugagcugaagucaggguacaaagauuggauccuauggauuuccuuugccauaucauguuuuuugcuuuguguugcuuuguugggguucaucaugugggccugccaaaaaggcaacauuaggugcaacauuugcauuuga

SEQ ID NO: 36702 - RNA, 1701 nt, Artificial Sequence
  derived and/or modified CDS sequence (wt) from hemagglutinin__InfluenzaA__ADG21024
augaagacuaucauugcuuuaagcuacauucuaugucugguuuucacucaaaaacuuccuggaaaugacaacagcacggcaacgcugugccuugggcaccaugcaguaccaaacggaacgauagugaaaacaaucacgaaugaccaaauugaaguuacuaaugcuacugagcugguucagaguuccucaacaggugaaauaugcgacaguccucaucagauccuugauggagaaaacugcacacuaauagaugcucuauugggagacccucagugugauggcuuccaaaauaagaaaugggaccuuuuuguugaacgaagcaaagccuacagcaacuguuacccuuaugaugugccggauuaugccucccuuaggucacuaguugccucauccggcgcacuggaguuuaacaaugaaagcuucaauuggacuggagucacucaaaacggaacaagcucugcuugcauaaggagaucuaauaauaguuucuuuaguagauugaauugguugacccacuuaaacuucaaauacccagcauugaacgugacuaugccaaacaaugaacaauuugacaaauuguacauuugggggguucaccacccggguacggacaaggaccaaaucuuccuguaugcucaagcaucaggaagaaucacaguaucuaccaaaagaagccaacaagcuguaaucccgaauaucggaucuagacccagaguaaggaauaucccuagcagaauaagcaucuauuggacaauaguaaaaccgggagacauacuuuugauuaacagcacagggaaucuaauugcuccuagggguuacuucaaaauacaaagugggaaaagcucaauaaugagaucagaugcacccauuggcaaaugcaauucugaaugcaucacuccaaauggaagcauucccaaugacaaaccauuccaaaauguaaacaggaucacauacggggccugucccagauauguuaagcagagcacucugaaauuggcaacaggaaugcgaaauguaccagagaaacaaacuagaggcauauuuggcgcaauagcggguuucauagaaaaugguugggagggaaugguggaugguugguacgguuucaggcaucaaaauucugagggaagaggacaagcagcagaucucaaaagcacucaagcagcaaucgaucaaaucaaugggaagcugaauagauugaucgggaaaaccaacgagaaauuccaucagauugaaaaagaauucucagaagucgaagggagaauucaggaccuugagaaauauguugaggacacuaaaauagaucucuggucauacaacgcggagcuucuuguugcccuggagaaccaacauacaauugaucuaacugacucagaaaugaacaaacuguuugaaaaaacaaagaagcaacugagggaaaaugcugaggauaugggcaaugguuguuucaaaauauaccacaaaugugacaaugccugcauaggaucaaucagaaauggaacuuaugaccacgauguauacagagaugaagcauuaaacaaccgguuccagaucaagggaguugagcugaagucaggguacaaagauuggauccuauggauuuccuuugccauaucauguuuuuugcuuuguguugcuuuguugggguucaucaugugggcuugccaaaaaggcaacauuaggugcaacauuugcauuuga

SEQ ID NO: 36703 - RNA, 1701 nt, Artificial Sequence
  derived and/or modified CDS sequence (wt) from hemagglutinin__InfluenzaA__ADG21026
augaagacuaucauugcuuugagcuacauucuaugucugguuuucgcucaaaaacuuccuggaaaugacaacagcacggcaacgcugugccuugggcaccaugcaguaccaaacggaacgauagugaaaacaaucacgaaugaccaaauugaaguuacuaaugcuacugagcugguucagaguuccucaacaggugaaauaugcgacaguccucaucagauccuugauggagaaaacugcacacuaauagaugcucuauugggagacccucagugugauggcuuccaaaauaagaaaugggaccuuuuuguugaacgaagcaaagccuacagcaacuguuacccuuaugaugugccggauuaugccucccuuaggucacuaguugccucauccggcacacuggaguuuaacaaugaaagcuucaauuggacuggagucacucaaaacggaacaagcucugcuugcauaaggagaucuaauaauaguuucuuuaguagauugaauugguugacccacuuaaacuucaaauacccagcauugaacgugacuaugccaaacaaugaacaauuugacaaauuguacauuugggggguucaccacccggguacggacaaggaccaaaucuuccuguaugcucaagcaucaggaagaaucacaguaucuaccaaaagaagccaacaagcuguaaucccgaauaucggaucuagacucagaguaaggaauaucccuagcagaauaagcaucuauuggacaauaguaaaaccgggagacauacuuuugauuaacagcacagggaaucuaauugcuccuagggguuacuucaaaauacgaagugggaaaagcucaauaaugagaucagaugcacccauuggcaaaugcaauucugaaugcaucacuccaaauggaagcauucccaaugacaaaccauuccaaaauguaaacaggaucacauacggggccugucccagauauguuaagcaaagcacucugaaauuggcaacaggaaugcgaaauguaccagagaaacaaacuagaggcauauuuggcgcaauagcggguuucauagaaaaugguugggagggaaugguggaugguugguacgguuucaggcaucaaaauucugagggaagaggacaagcagcagaucucaaaagcacucaagcagcaaucgaucaaaucaaugggaagcugaauagauugaucgggaaaaccaacgagaaauuccaucagauugaaaaagaauucucagaagucgaagggagaauucaggaccuugagaaauauguugaggacacuaaaauagaucucuggucauacaacgcggagcuucuuguugcccuggagaaccaacauacaauugaucuaacugacucagaaaugaacaaacuguuugaaaaaacaaagaagcaacugagggaaaaugcugaggauaugggcaaugguuguuucacaauauaccacaaaugugacaaugccugcauaggaucaaucagaaauggaacuuaugaccacaauguauacagagaugaagcauuaaacaaccgguuccagaucaagggaguugagcugaagucaggguacaaagauuggauccuauggauuuccuuugccauaucauguuuuuugcuuuguguugcuuuguugggguucaucaugugggccugccaaaaaggcaacauuaggugcaacauuugcauuuga

SEQ ID NO: 36704 - RNA, 1701 nt, Artificial Sequence
  derived and/or modified CDS sequence (wt) from hemagglutinin__InfluenzaA__ADG21037
augaaggcaauacuaguaguucugcuauauacauuugcaaccgcaaaugcagacacauuauguauagguuaucaugcgaacaauucaacagacacuguagacacaguacuagaaaagaauguaacaguaacacacucuguuaaccuucuagaagacaagcauaacgggaaacuaugcaaacuaagagggguagccccauugcauuuggguaaauguaacauugcuggcuggauccugggaaauccagagugugaaucacucuccacagcaagcucaugguccuacauuguggaaacaucuaguucagacaauggaacguguuacccaggagauuucaucgauuaugaggagcuaagagagcaauugagcucagugucaucauuugaaagguuugagauauuccccaagacaaguucauggcccaaucaugacucgaacaaagguguaacggcagcauguccucaugcuggagcaaaaagcuucuacaaaaauuuaauauggcuaguuaaaaaaggaaauucauacccaaagcucagcaaauccuacauuaaugauaaagggaaagaaguccucgugcuauggggcauucaccauccaucuacuagugcugaccaacaaagucucuaucagaaugcagaugcauauguuuuuguggggacaucaagauacagcaagaaguucaagccggaaauagcaauaagacccaaagugagggaucaagaagggagaaugaacuauuacuggacacuaguagagccgggagacaaaauaacauucgaagcaacuggaaaucuagugguaccgagauaugcauucgcaauggaaagaaaugcuggaucugguauuaucauuucagauacaccaguccacgauugcaauacaacuugucagacacccaagggugcuauaaacaccagccucccauuucagaauauacauccgaucacaauuggaaaauguccaaaauauguaaaaagcacaaaauugagacuggccacaggauugaggaaugucccguccauucaaucuagaggccuauuuggggccauugccgguuucauugaagggggguggacagggaugguagauggaugguacgguuaucaccaucaaaaugagcaggggucaggauaugcagccgaccugaagagcacacagaaugccauugacgagauuacuaacaaaguaaauucuguuauugaaaagaugaauacacaguucacagcaguagguaaagaguucaaccaccuggaaaaaagaauagagaauuuaaauaaaaaaguugaugaugguuuccuggacauuuggacuuacaaugccgaacuguugguucuauuggaaaaugaaagaacuuuggacuaccacgauucaaaugugaagaacuuauaugaaaagguaagaagccaguuaaaaaacaaugccaaggaaauuggaaacggcugcuuugaauuuuaccacaaaugcgauaacacgugcauggaaagugucaaaaaugggacuuaugacuacccaaaauacucagaggaagcaaaauuaaacagagaagaaauagaugggguaaagcuggaaucaacaaggauuuaccagauuuuggcgaucuauucaacugucgccaguucauugguacugguagucucccugggggcaaucaguuucuggaugugcucuaaugggucucuacaguguagaauauguauuuaa

SEQ ID NO: 36705 - RNA, 1701 nt, Artificial Sequence
  derived and/or modified CDS sequence (wt) from hemagglutinin__InfluenzaA__ADG21038
augaaggcaauacuaguaguucugcuauauacauuugcaaccgcagaugcagacacauuauguauagguuaucaugcgaacaauucaacagacacuguagacacaguacuagaaaagaauguaacaguaacacacucuguuaaccuucuagaagacaagcauaacgggaaacuaugcaaacuaagagggguagccccauugcauuuggguaaauguaacauugcuggcuggauccugggaaauccagagugugaaucacucuccacagcaagcucaugguccuacauuguggaaacaucuaguucagacaauggaacguguuacccaggagauuucaucgauuaugaggagcuaagagagcaauugagcucagugucaucauuugaaagguuugagauauuccccaagacaaguucauggcccaaucaugacucgaacaaagguguaacggcagcauguccucaugcuggagcaaaaagcuucuacaaaaauuuaauauggcuaguuaaaaaaggaaauucauacccaaagcucagcaaauccuacauuaaugauaaagggaaagaaguccucgugcuauggggcauucaccauccaucuacuagugcugaccaacaaagucucuaucagaaugcagaugcauauguuuuuguggggacaucaagauacagcaagaaguucaagccggaaauagcaauaagacccaaagugagggaucaagaagggagaaugaacuauuacuggacacuaguagagccgggagacaaaauaacauucgaagcaacuggaaaucuagugguaccgagauaugcauucgcaauggaaagaaaugcuggaucugguauuaucauuucagauacaccaguccacgauugcaauacaacuugucagacacccaagggugcuauaaacaccagccucccauuucagaauauacauccgaucacaauuggaaaauguccaaaauauguaaaaagcacaaaauugagacuggccacaggauugaggaaugucccgucuauucaaucuagaggccuauuuggggccauugccgguuucauugaagggggguggacagggaugguagauggaugguacgguuaucaccaucaaaaugagcaggggucaggauaugcagccgaccugaagagcacacagaaugccauugacgagauuacuaacaaaguaaauucuguuauugaaaagaugaauacacaguucacagcaguagguaaagaguucaaccaccuggaaaaaagaauagagaauuuaaauaaaaaaguugaugaugguuuccuggacauuuggacuuacaaugccgaacuguugguucuauuggaaaaugaaagaacuuuggacuaccacgauucaaaugugaagaacuuauaugaaaagguaagaagccaguuaaaaaacaaugccaaggaaauuggaaacggcugcuuugaauuuuaccacaaaugcgauaacacgugcauggaaagugucaaaaaugggacuuaugacuacccaaaauacucagaggaagcaaaauuaaacagagaagaaauagaugggguaaagcuggaaucaacaaggauuuaccagauuuuggcgaucuauucaacugucgccaguucauugguacugguagucucccugggggcaaucaguuucuggaugugcucuaaugggucucuacaguguagaauauguauuuaa

SEQ ID NO: 36706 - RNA, 1701 nt, Artificial Sequence
  derived and/or modified CDS sequence (wt) from hemagglutinin__InfluenzaA__ADG21040
augaaggcaauacuaguaguucugcuauauacauuugcaaccgcaaaugcagacacauuauguauagguuaucaugcgaacaauucaacagacacuguagacacaguacuagaaaagaauguaacaguaacacacucuguuaaccuucuagaagacaagcauaacgggaaacuaugcaaacuaagagggguagccccauugcauuuggguaaauguaacauugcuggcuggauccugggaaauccagagugugaaucacucuccacagcaagcucaugguccuacauuguggaaacaucuaguucagacaauggaacguguuacccaggagauuucaucgauuaugaggagcuaagagagcaauugagcucagugucaucauuugaaagguuugagauauuccccaagacaaguucauggcccaaucaugacucgaacaaagguguaacggcagcauguccucaugcuggagcaaaaagcuucuacaaaaauuuaauauggcuaguuaaaaaaggaaauucauacccaaagcucagcaaauccuacauuaaugauaaagggaaagaaguccucgugcuauggggcauucaccauccaucuacuagugcugaccaacaaagucucuaucagaaugcagaugcauauguuuuuguggggacaucaagauacagcaagaaguucaagccggaaauagcaauaagacccaaagugagggaucaagaagggagaaugaacuauuacuggacacuaguagagccgggagacaaaauaacauucgaagcaacuggaaaucuagugguaccgagauaugcauucgcaauggaaagaaaugcuggaucugguauuaucauuucagauacaccaguccacgauugcaauacaacuugucagacacccaagggugcuauaaacaccagccucccauuucagaauguacauccgaucacaauuggaaaauguccaaaauauguaaaaagcacaaaauugagacuggccacaggauugaggaaugucccuucuauucaaucuagaggccuauuuggggccauugccgguuucauugaagggggguggacagggaugguagauggaugguacgguuaucaccaucaaaaugagcaggggucaggauaugcagccgaccugaagagcacacagaaugccauugacgagauuacuaacaaaguaaauucuguuauugaaaagaugaauacacaguucacagcaguagguaaagaguucaaccaccuggaaaaaagaauagagaauuuaaauaaaaaaguugaugaugguuuccuggacauuuggacuuacaaugccgaacuguugguucuauuggaaaaugaaagaacuuuggacuaccacgauucaaaugugaagaacuuauaugaaaagguaagaagccaguuaaaaaacaaugccaaggaaauuggaaacggcugcuuugaauuuuaccacaaaugcgauaacacgugcauggaaagugucaaaaaugggacuuaugacuacccaaaauacucagaggaagcaaaauuaaacagagaagaaauagaugggguaaagcuggaaucaacaaggguuuaccagauuuuggcgaucuauucaacugucgccaguucauugguacugguagucucccugggggcaaucaguuucuggaugugcucuaaugggucucuacaguguagaauauguauuuaa

SEQ ID NO: 36707 - RNA, 1701 nt, Artificial Sequence
  derived and/or modified CDS sequence (wt) from hemagglutinin__InfluenzaA__ADG21041
augaaggcaauacuaguaguucugcuauauacauuuacaaccgcaaaugcagacacauuauguauagguuaucaugcgaacaauucaacagacacuguagacacaguacuagaaaagaauguaacaguaacacacucuguuaaccuucuagaagacaagcauaacgggaaacuaugcaaacuaagagggguagccccauugcauuuggguaaauguaacauugcuggcuggauccugggaaauccagagugugaaucacucuccacagcaagcucaugguccuacauuguggaaacaucuaguucagacaauggaacguguuacccaggagauuucaucgauuaugaggagcuaagagagcaauugagcucagugucaucauuugaaagguuugagauauuccccaagacaaguucauggcccaaucaugacucgaacaaagguguaacggcagcauguccucaugcuggagcaaaaagcuucuacaaaaauuuaauauggcuaguuaaaaaaggaaauucauacccaaagcucagcaaauccuacauuaaugauaaagggaaagaaguccucgugcuauggggcauucaccauccaucuacuagugcugaccaacaaagucucuaucagaaugcagaugcauauguuuuuguggggacaucaagauacagcaagaaguucaagccggaaauagcaauaagacccaaagugagggaacaagaagggagaaugaacuauuacuggacacuaguagagccgggagacaaaauaacauucgaagcaacuggaaaucuagugguaccgagauaugcauucgcaauggaaagaaaugcuggaucugguauuaucauuucagauacaccaguccacgauugcaauacaacuugucagacacccaagggugcuauaaacaccagccucccauuucagaauauacauucgaucacaauuggaaaauguccaaaauauguaaaaagcacaaaauugagacuggccacaggauugaggaaugucccgucuauucaaucuagaggccuauuuggggccauugccgguuucauugaagggggguggacagggaugguagauggaugguacgguuaucaccaucaaaaugagcaggggucaggauaugcagccgaccugaagagcacacagaaugccauugacgagauuacuaacaaaguaaauucuguuauugaaaagaugaauacacaguucacagcaguagguaaagaguucaaccaccuggaaaaaagaauagagaauuuaaauaaaaaaguugaugaugguuuccuggacauuuggacuuacaaugccgagcuguugguucuauuggaaaaugaaagaacuuuggacuaccacgauucaaaugugaagaacuuauaugaaaagguaagaagccaguuaaaaaacaaugccaaggaaauuggaaacggcugcuuugaauuuuaccacaaaugcgauaacacgugcauggaaagugucaaaaaugggacuuaugacuacccaaaauacucagaggaagcaaaauuaaacagagaagaaauagaugggguaaagcuggaaucaacaaggauuuaccagauuuuggcgaucuauucaacugucgccaguucauugguacugguagucucccugggggcagucaguuucuggaugugcucuaaugggucucuacaguguagaauauguauuuaa

SEQ ID NO: 36708 - RNA, 1701 nt, Artificial Sequence
  derived and/or modified CDS sequence (wt) from hemagglutinin__InfluenzaA__ADG21042
augaaggcaauacuaguaguucugcuauauacauuugcaaccgcaaaugcagacacauuauguauagguuaucaugcgaacaauucaacagacacuguagacacaguacuagaaaagaauguaacaguaacacacucuguuaaccuucuagaagacaagcauaacgggaaacuaugcaaacuaagagggguagccccauugcauuuggguaaauguaacauugcuggcuggauccugggaaauccagagugugaaucacucuccacagcaagcucaugguccuacauuguggaaacaucuaguucagacaauggaacguguuacccaggagauuucaucgauuaugaggagcuaagagagcaauugagcucagugucaucauuugaaagguuugagauauuccccaagacaaguucauggcccaaucaugacucgaacaaagguguaacggcagcauguccucaugcuggagcaaaaagcuucuacaaaaauuuaauauggcuaguuaaaaaaggaaauucauacccaaagcucagcaaauccuacauuaaugauaaagggaaagaaguccucgugcuauggggcauucaccauccaucuacuagugcugaccaacaaagucuuuaucagaaugcagaugcauauguuuuuguggggacaucaagauacagcaagaaguucaagccggaaauagcaauaagacccaaagugagggaucaagaagggagaaugaacuauuacuggacacuaguagagccgggagacaaaauaacauucgaagcaacuggaaaucuagugguaccgagauaugcauucgcaauggaaagaaaugcuggaucugguauuaucauuucagauacaccaguccacgauugcaauacaacuugucagacacccaagggugcuauaaacaccagccucccauuucagaauauacauccgaucacaauuggaaaauguccaaaauaugugaaaagcacaaaauugagacuggccacaggauugaggaauaucccgucuauucaaucuagaggccuauuuggggccauugccgguuucauugaagggggguggacagggaugguagauggaugguacgguuaucaccaucaaaaugagcaggggucaggauaugcagccgaccugaagagcacacagaaugccauugacgagauuacuaacaaaguaaauucuguuauugaaaagaugaauacacaguucacagcaguagguaaagaguucaaccaccuggaaaaaagaauagagaauuuaaauaaaaaaguugaugaugguuuccuggacauuuggacuuacaaugccgaacuguugguucuauuggaaaaugaaagaacuuuggacuaccacgauucaaaugugaagaacuuauaugaaaagguaagaagccaguuaaaaaacaaugccaaggaaauuggaaacggcugcuuugaauuuuaccacaaaugcgauaacacgugcauggaaagugucaaaaaugggacuuaugacuacccaaaauacucagaggaagcaaaauuaaacagagaagaaauagaugggguaaagcuggaaucaacaaggauuuaccagauuuuggcgaucuauucaacugucgccaguucauugguacugguagucucccugggggcaaucaguuucuggaugugcucuaaugggucuuuacaguguagaauauguauuuaa

SEQ ID NO: 36709 - RNA, 1701 nt, Artificial Sequence
  derived and/or modified CDS sequence (wt) from hemagglutinin__InfluenzaA__ADG21043
augaaggcaauacuaguaguucugcuauauacauuuacaaccgcaaaugcagacacauuauguguagguuaucaugcgaacaauucaacagacacuguagacacaguacuagaaaagaauguaacaguaacacacucuguuaaccuucuagaagacaagcauaacgggaaacuaugcaaacuaagagggguagccccauugcauuuggguaaauguaacauugcuggcuggauccugggaaauccagagugugaaucacucuccacagcaagcucaugguccuacauuguggaaacaucuaguucagacaauggaacguguuacccaggagauuucaucgauuaugaggagcuaagagagcaauugagcucagugucaucauuugaaagguuugagauauuccccaagacaaguucauggcccaaucaugacucgaacaaagguguaacggcagcauguccucaugcuggagcaaaaagcuucuacaaaaauuuaauauggcuaguuaaaaaaggaaauucauacccaaagcucagcaaauccuacauuaaugauaaagggaaagaaguccucgugcuauggggcauucaccauccaucuacuagugcugaccaacaaagucucuaucagaaugcagaugcauauguuuuuguggggacaucaagauacagcaagaaguucaagccggaaauagcaauaagacccaaagugagggaacaagaagggagaaugaacuauuacuggacacuaguagagccgggagacaaaauaacauucgaagcaacuggaaaucuagugguaccgagauaugcauucgcaauggaaagaaaugcuggaucugguauuaucauuucagauacaccaguccacgauugcaauacaacuugucagacacccaaaggugcuauaaacaccagccucccauuucagaauauacauucgaucacaauuggaaaauguccaaaauauguaaaaagcacaaaauugagacuggccacaggauugaggaaugucccgucuauucaaucuagaggccuauuuggggccauugccgguuucauugaagggggguggacagggaugguagauggaugguacgguuaucaccaucaaaaugagcaggggucaggauaugcagccgaccugaagagcacacagaaugccauugacgagauuacuaacaaaguaaauucuguuauugaaaagaugaauacacaguucacagcaguagguaaagaguucaaccaccuggaaaaaagaauagagaauuuaaauaaaaaaguugaugaugguuuccuggacauuuggacuuacaaugccgaacuguugguucuauuggaaaaugaaagaacuuuggacuaccacgauucaaaugugaagaacuuauaugaaaagguaagaagccaguuaaaaaacaaugccaaggaaauuggaaacggcugcuuugaauuuuaccacaaaugcgauaacacgugcauggaaagugucaaaaaugggacuuaugacuacccaaaauacucagaggaagcaaaauuaaacagagaagaaauagaugggguaaagcuggaaucaacaaggauuuaccagauuuuggcgaucuauucaacugucgccaguucauugguacugguagucucccugggggcaaucaguuucuggaugugcucuaaugggucucuacaguguagaauauguauuuaa

SEQ ID NO: 36710 - RNA, 1701 nt, Artificial Sequence
  derived and/or modified CDS sequence (wt) from hemagglutinin__InfluenzaA__ADG21045
augaaggcaauacuaguaguucugcuauauacauuuacaaccgcaaaugcagacacauuauguauagguuaucaugcgaacaauucaacagacacuguagacacaguacuagaaaagaauguaacaguaacacacucuguuaaccuucuagaagacaagcauaacgggaaacuaugcaaacuaagagggguagccccauugcauuuggguaaauguaacauugcuggcuggauccugggaaauccagagugugaaucacucuccacagcaagcucaugguccuacauuguggaaacaucuaguucagacaauggaacguguuacccaggagauuucaucgauuaugaggagcuaagagagcaauugagcucagugucaucauuugaaagguuugagauauuccccaagacaaguucauggcccaaucaugacucgaacaaagguguaacggcagcauguccucaugcuggagcaaaaagcuucuacaaaaauuuaauauggcuaguuaaaaaaggaaauucauacccaaagcucagcaaauccuacauuaaugauaaagggaaagaaguccucgugcuauggggcauucaccauccaucuacuagugcugaccaacaaagucucuaucagaaugcagaugcauauguuuuuguggggacaucaagauacagcaagaaguucaagccggaaauagcaauaagacccaaagugagggaacaagaagggagaaugaacuauuacuggacacuaguagagccgggagacaaaauaacauucgaagcaacuggaaaucuagugguaccgagauaugcauucgcaauggaaagaaaugcuggaucugguauuaucauuucagauacaccaguccacgauugcaauacaacuugucagacacccaagggugcuauaaacaccagccucccauuucagaauauacauucgaucacaauuggaaaauguccaaaauauguaaaaagcacaaaauugagacuggccacaggauugaggaaugucccgucuauucaaucuagaggccuauuuggggccauugccgguuucauugaagggggguggacagggaugguagauggaugguacgguuaucaccaucaaaaugagcaggggucaggauaugcagccgaccugaagagcacacagaaugccauugacgagauuacuaacaaaguaaauucuguuauugaaaagaugaauacacaguucacagcaguagguaaagaguucaaccaccuggaaaaaagaauagagaauuuaaauaaaaaaguugaugaugguuuccuggacauuuggacuuacaaugccgaacuguugguucuauuggaaaaugaaagaacuuuggacuaccacgauucaaaugugaagaacuuauaugaaaagguaagaagccaguuaaaaaacaaugccaaggaaauuggaaacggcugcuuugaauuuuaccacaaaugcgauaacacgugcauggaaagugucaaaaaugggacuuaugacuacccaaaauacucagaggaagcaaaauuaaacagagaagaaauagaugggguaaagcuggaaucaacaaggauuuaccagauuuuggcgaucuauucaacugucgccaguucauugguacugguagucucccugggggcaaucaguuucuggaugugcucuaaugggucucuacaguguagaauauguauuuaa

SEQ ID NO: 36711 - RNA, 1701 nt, Artificial Sequence; identical to SEQ ID NO: 36710
  derived and/or modified CDS sequence (wt) from hemagglutinin__InfluenzaA__ADG21046

SEQ ID NO: 36712 - RNA, 1701 nt, Artificial Sequence
  derived and/or modified CDS sequence (wt) from hemagglutinin__InfluenzaA__ADG21048
augaaggcaauacuaguaguucugcuauauacauuugcaaccgcaaaugcagacacauuauguauagguuaucaugcgaacaauucaacagacacuguagacacaguacuagaaaagaauguaacaguaacacacucugucaaccuucuagaagacaagcauaacgggaaacuaugcaaacuaagagggguagccccauugcauuuggguaaauguaacauugcuggcuggauccugggaaauccagagugugaaucacucuccacagcaagcucaugguccuacauuguggaaacaucuaguucagacaauggaacguguuacccaggagauuucaucgauuaugaggagcuaagagagcaauugagcucagugucaucauuugaaagguuugagauauuccccaagacaaguucauggcccaaucaugacucgaacaaagguguaacggcagcauguccucaugcuggagcaaaaagcuucuacaaaaauuuaauauggcuaguuaaaaaaggaaauucauacccaaagcucagcaaauccuacaucaaugauaaagggaaagaaguccucgugcuauggggcauucaccauccaucuacuagugcugaccaacaaagucucuaucagaaugcagaugcauauguuuuuguggggacaucaagauacagcaagaaguucaagccggaaauagcaauaagacccaaagugagggaucaagaagggagaaugaacuauuacuggacacuaguagagccgggagacaaaauaacauucgaagcaacuggaaaucuagugguaccgagauaugcauucgcaauggaaagaaaugcuggaucugguauuaucauuucagauacaccaguccacgauugcaauacaacuugucagacacccaagggugcuauaaacaccagccucccauuucagaauauacauccgaucacaauuggaaaauguccaaaauauguaaaaagcacaaaauugagacuggccacaggcuugaggaaugucccgucuauucaaucuagaggccuauuuggggccauugccgguuucauugaagggggguggacagggaugguagauggaugguacgguuaucaccaucaaaaugagcaggggucaggauaugcagccgaccugaagagcacacagaaugccauugacaagauuacuaacaaaguaaauucuguuauugaaaagaugaauacacaguucacagcaguagguaaagaguucaaccaccuggaaaaaagaauagagaauuuaaauaaaaaaguugaugaugguuuccuggacauuuggacuuacaaugccgaacuguugguucuauuggaaaaugaaagaacuuuggacuaccacgauucaaaugugaagaacuuauaugaaaagguaagaagccaguuaaaaaacaaugccaaggaaauuggaaacggcugcuuugaauuuuaccacaaaugcgauaacacgugcauggaaagugucaaaaaugggacuuaugacuacccaaaauacucagaggaagcaaaauuaaacagagaagaaauagauggggugaagcuggaaucaacaaggauuuaccagauuuuggcgaucuauucaacugucgccaguucauugguacugguagucucccugggggcaaucaguuucuggaugugcucuaaugggucucuacaguguagaauauguauuuaa

SEQ ID NO: 36713 - RNA, 1701 nt, Artificial Sequence
  derived and/or modified CDS sequence (wt) from hemagglutinin__InfluenzaA__ADG21049
augaaggcaauacuaguaguucugcuauauacauuugcaaccgcaaaugcagacacauuauguauagguuaucaugcgaacaauucaacagacacuguagacacaguacuagaaaagaauguaacaguaacacacucuguuaaccuucuagaagacaagcauaacgggaaacuaugcaaacuaagagggguagccccauugcauuuggguaaauguaacauugcuggcuggauccugggaaauccagagugugaaucacucuccacagcaagcucaugguccuacauuguggaaacaucuaguucagacaauggaacguguuacccaggagauuucaucgauuaugaggagcuaagagagcaauugagcucagugucaucauuugaaagguuugagauauuccccaagacaaguucauggcccaaucaugacucgaacaaagguguaacggcagcauguccucaugcuggagcaaaaagcuucuacaaaaauuuaauauggcuaguuaaaaaaggaaauucauacccaaagcucagcaaauccuacauuaaugauaaagggaaagaaguccucgugcuauggggcauucaccauccaucuacuagugcugaccaacaaagucucuaucagaaugcagaugcauauguuuuuguggggacaucaagauacagcaagaaguucaagccggaaauagcaauaagacccaaagugaggaaucaagaagggagaaugaacuauuacuggacacuaguagaaccgggagacaaaauaacauucgaagcaacuggaaaucuagugguaccgagauaugcauucgcaauggaaagaaaugcuggaucugguauuaucauuucagauacaccaguccacgauugcaauacaacuugucagacauccaagggugcuauaaacaccagccucccauuucagaauauacauccgaucacaauuggaaaauguccaaaauauguaaaaagcacaaaauugagacuggccacaggauugaggaauaucccgucuauucaaucuagaggccuauuuggggccauugccgguuucauugaagggggguggacagggaugguagauggaugguacgguuaucaccaucaaaaugagcaggggucaggauaugcagccgaccugaagagcacacagaaugccauugacgagauuacuaacaaaguaaauucuguuauugaaaagaugaauacacaguucacagcaguagguaaagaguucaaccaccuggaaaaaagaauagagaauuuaaauaaaaagguugaugaugguuuccuggacauuuggacuuacaaugccgaacuguugguucuauuggaaaaugaaagaacuuuggacuaccacgauucaaaugugaagaacuuauaugaaaagguaagaagccaguuaaaaaacaaugccaaggaaauuggaaacggcugcuuugaauuuuaccacaaaugcgauaacacgugcauggaaagugucaaaaacgggacuuaugacuacccaaaauacucagaggaagcaaaauuaaacagagaagaaauagaugggguaaagcuggaaucaacaaggauuuaccagauuuuggcgaucuauucaacugucgccaguucauugguacugguagucucccugggggcaaucaguuucuggaugugcucuaaugggucucuacaguguagaauauguauuuaa

SEQ ID NO: 36714 - RNA, 1701 nt, Artificial Sequence; identical to SEQ ID NO: 35772
  derived and/or modified CDS sequence (wt) from hemagglutinin__InfluenzaA__ADG21122

SEQ ID NO: 36715 - RNA, 1701 nt, Artificial Sequence
  derived and/or modified CDS sequence (wt) from hemagglutinin__InfluenzaA__ADG21123
augaaggcaauacuaguaguucugcuauauacauuugcaaccgcaaaugcagacacauuauguauagguuaucaugcgaacaauucaacagacacuguagacacaguacuagaaaagaauguaacaguaacacacucuguuaaccuucuagaagacaagcauaacgggaaauuaugcaaacuaagagggguagccccauugcauuuggguaaauguaacauugcuggcuggauccugggaaauccagagugugaaucacucuccacagcaagcucaugguccuacauuguggaaacaucuaguucagacaauggaacguguuacccaggagauuucaucgauuaugaggagcuaagagagcaauugagcucagugucaucauuugaaagguuugagauauuccccaagacaaguucauggcccaaucaugacucgaacaaagguguaacggcagcauguccucaugcuggagcaaaaagcuucuacaaaaauuuaauauggcuaguuaaaaaaggaaauucauacccaaagcucagcaaauccuacauuaaugauaaagggaaagaaguccucgugcuauggggcauucaccauccaucuacuagugcugaccaacaaagucucuaucagaaugcagaugcauauguuuuuguggggacaucaagauacagcaagaaguucaagccggaaauagcaauaagacccaaagugagggaucaagaagggagaaugaacuauuacuggacacuaguagagccgggagacaaaauaacauucgaagcaacuggaaaucuagugguaccgagauaugcauucgcaauggaaagaaaugcuggaucugguauuaucauuucagauacaccaguccacgauugcaauacaacuugucagacacccaagggugcuauaaacaccagccucccauuucagaauauacauccgaucacaauuggaaaauguccaaaauauguaaaaagcacaaaauugagacuggccacaggauugaggaaugucccgucuauucaaucuagaggccuauuuggggccauugccgguuucauugaagggggguggacagggaugguagauggaugguacgguuaucaccaucaaaaugagcaggggucaggauaugcagccgaccugaagagcacacagaaugccauugacaagauuacuaacaaaguaaauucuguuauugaaaagaugaauacacaguucacagcaguagguaaagaguucaaccaccuggaaaaaagaauagagaauuuaaauaaaaaaguugaugaugguuuccuggacauuuggacuuacaaugccgaacuguugguucuauuggaaaaugaaagaacuuuggacuaccacgauucaaaugugaagaacuuauaugaaaagguaagaagccaguuaaaaaacaaugccaaggaaauuggaaacggcugcuuugaauuuuaccacaaaugcgauaacacgugcauggaaagugucaaaaaugggacuuaugacuacccaaaauacucagaggaagcaaaauuaaacagagaagaaauagauggggugaagcuggaaucaacaaggauuuaccagauuuuggcgaucuauucaacugucgccaguucauugguacugguagucucccugggggcaaucaguuucuggaugugcucuaaugggucucuacaguguagaauauguauuuaa

SEQ ID NO: 36716 - RNA, 1701 nt, Artificial Sequence
  derived and/or modified CDS sequence (wt) from hemagglutinin__InfluenzaA__ADG21124
augaaggcaauacuaguaguucugcuauauacauuugcaaccgcaaaugcagacacauuauguauagguuaucaugcgaacaauucaacagacacuguagacacaguacuagaaaagaauguaacaguaacacacucuguuaaccuucuagaagacaagcauaacgggaaacuaugcaaacuaagagggguagccccauugcauuuggguaaauguaacauugcuggcuggauccugggaaauccagagugugaaucacucuccacagcaagcucaugguccuacauuguggaaacaucuaguucagacaauggaacguguuacccaggagauuucaucgauuaugaggagcuaagagagcaauugagcucagugucaucauuugaaagguuugagauauuccccaagacaaguucauggcccaaucaugacucgaacaaagguguaacggcagcauguccccaugcuggagcaaaaagcuucuacaaaaauuuaauauggcuaguuaaaaaaggaaauucauacccaaagcucagcaaauccuacauuaaugauaaagggaaagaaguccucgugcuauggggcauucaccauccaucuacuagugcugaccaacaaagucucuaucagaaugcagaugcauauguuuuuguggggacaucaagauacagcaagaaguucaagccggaaauagcaauaagacccaaagugagggaucaagaagggagaaugaacuauuacuggacacuaguagagccgggagacaaaauaacauucgaagcaacuggaaaucuagugguaccgagauaugcauucgcaauggaaagaaaugcuggaucugguauuaucauuucagauacaccaguccacgauugcaauacaacuugucagacacccaagggugcuauaaacaccagccucccauuucagaauauacauccgaucacaauuggaaaauguccaaaauauguaaaaagcacaaaauugagacuggccacaggauugaggaaugucccgucuauucaaucuagaggccuauuuggggccauugccgguuucauugaagggggguggacagggaugguagauggaugguacgguuaucaccaucaaaaugagcaggggucaggauaugcagccgaccugaagagcacacagaaugccauugacgagauuacuaacaaaguaaauucuguuauugaaaagaugaauacacaguucacagcaguagguaaagaguucaaccaccuggaaaaaagaauagagaauuuaaauaaaaaaguugaugaugguuuccuggacauuuggacuuacaaugccgaacuguugguucuauuggaaaaugaaagaacuuuggacuaccacgauucaaaugugaagaacuuauaugaaaagguaagaagccaguuaaaaaacaaugccaaggaaauuggaaacggcugcuuugaauuuuaccacaaaugcgauaacacgugcauggaaagugucaaaaaugggacuuaugacuacccaaaauacucagaggaagcaaaauuaaacagagaagaaauagaugggguaaagcuggaaucaacaaggauuuaccagauuuuggcgaucuauucaacugucgccaguucauugguacugguagucucccugggggcaaucaguuucuggaugugcucuaaugggucucuacaguguagaauauguauuuaa

SEQ ID NO: 36717 - RNA, 1701 nt, Artificial Sequence
  derived and/or modified CDS sequence (wt) from hemagglutinin__InfluenzaA__ADG21125
augaaggcaauacuaguaguucugcuauauacauuugcaaccgcaaaugcagacacauuauguauagguuaucaugcgaacaauucaacagacacuguagacacaguacuagaaaagaauguaacaguaacacacucuguuaaccuucuagaagacaagcauaacgggaaacuaugcaaacuaagagggguagccccauugcauuuggguaaauguaacauugcuggcuggauccugggaaauccagagugugaaucacucuccacagcaagcucaugguccuacauuguggaaacaucuaguucagacaauggaacguguuacccaggagauuucaucgauuaugaggagcuaagagagcaauugagcucagugucaucauuuaaaagguuugagauauuccccaagacaaguucauggcccaaucaugacucgaacaaagguguaacggcagcauguccucaugcuggagcaaaaagcuucuacaaaaauuuaauauggcuaguuaaaaaaggaaauucauacccaaagcucagcaaauccuacauuaaugauaaagggaaagaaguccucgugcuauggggcauucaccauccaucuacuagugcugaccaacaaagucucuaucagaaugcagaugcauauguuuuuguggggacaucaagauacagcaagaaguucaagccggaaauagcgauaagacccaaagugagggaucaagaagggagaaugaacuauuacuggacacuaguagagccgggagacaaaauaacauucgaagcaacuggaaaucuagugguaccgagauaugcauucgcaauggaaagaaaugcuggaucugguauuaucauuucagauacaccaguccacgauugcaacacaacuugucagacacccaagggugcuauaaacaccagccucccauuucagaauauacauccgaucacaauuggaaaauguccaaaauauguaaaaagcacaaaauugagacuggccacaggauugaggaaugucccgucuauucaaucuagaggccuauuuggggccauugccgguuucauugaagggggguggacagggaugguagauggaugguacgguuaucaccaucaaaaugagcaggggucaggauaugcagccgaccugaagagcacacagaaugccauugacgagauuacuaacaaaguaaauucuguuauugaaaagaugaauacacaguucacagcaguagguaaagaguucaaccaccuggaaaaaagaauagagaauuuaaauaaaaaaguugaugaugguuuccuggacauuuggacuuacaaugccgaacuguugguucuauuggaaaaugaaagaacuuuggacuaccacgauucaaaugugaagaacuuauaugaaaagguaagaagccaguuaaaaaacaaugccaaggaaauuggaaacggcugcuuugaauuuuaccacaaaugcgauaacacgugcauggaaagugucaaaaaugggacuuaugacuacccaaaauacucagaggaagcaaaauuaaacagagaagaaauagaugggguaaagcuggaaucaacaaggauuuaccagauuuuggcgaucuauucaacugucgccaguucauugguacugguagucucccugggggcaaucaguuucuggaugugcucuaaugggucucuacaguguagaauauguauuuaa

SEQ ID NO: 36718 - RNA, 1701 nt, Artificial Sequence
  derived and/or modified CDS sequence (wt) from hemagglutinin__InfluenzaA__ADG21126
augaaggcaauacuaguaguucugcuauauacauuugcaaccgcaaaugcagacacauuauguauagguuaucaugcgaacaauucaacagacacuguagacacaguacuagaaaagaauguaacaguaacacacucuguuaaccuucuagaagacaagcauaacgggaaacuaugcaaacuaagagggguagccccauugcauuuggguaaauguaacauugcuggcuggauccugggaaauccagagugugaaucacucuccacagcaagcucaugguccuacauuguggaaacaucuaguucagacaauggaacguguuacccaggagauuucaucgauuaugaggagcuaagagagcaauugagcucagugucaucauuugaaagguuugagauauuccccaagacaaguucauggcccaaucaugacucgaacaaagguguaacggcagcauguccucaugcuggagcaaaaagcuucuacaaaaauuuaauauggcuaguuaaaaaaggaaauucauacccaaagcucagcaaauccuacauuaaugauaaagggaaagaaguccucgugcuauggggcauucaccauccaucuacuagugcugaccaacaaagucucuaucagaaugcagaugcauauguuuuuguggggucaucaagauacagcaagaaguucaagccagaaauagcaauaagacccaaagugagggaucaagaagggagaaugaacuauuacuggacacuaguagagccgggagacaaaauaacauucgaagcaacuggaaaucuagugguaccgagauaugcauucgcaauggaaagaaaugcuggaucugguauuaucauuucagauacaccaguccacgauugcaauacaacuugucagacacccaagggugcuauaaacaccagccucccauuucagaauauacauccgaucacaauuggaaaauguccaaaauauguaaaaagcacaaaauugagacuggccacaggauugaggaaugucccgucuauucaaucgagaggccuauuuggggccauugccgguuucauugaagggggguggacagggaugguagauggaugguacgguuaucaccaucaaaaugagcaggggucaggauaugcagccgaccugaagagcacacagaaugccauugacgagauuacuaacaaaguaaauucuguuauugaaaagaugaauacacaguucacagcaguagguaaagaguucaaccaccuggaaaaaagaauagagaauuuaaauaaaaaaguugaugaugguuuccuggacauuuggacuuacaaugccgaacuguugguucuauuggaaaaugaaagaacuuuggacuaccacgauucaaaugugaagaacuuauaugaaaagguaagaagccagcuaaaaaacaaugccaaggaaauuggaaacggcugcuuugaauuuuaccacaaaugcgauaacacgugcauggaaagugucaaaaaugggacuuaugacuacccaaaauacucagaggaagcaaaauuaaacagagaagaaauagaugggguaaagcuggaaucaacaaggauuuaccagauuuuggcgaucuauucaacugucgccaguucauugguacugguagucucccugggggcaaucaguuucuggaugugcucuaaugggucucuacaguguagaauauguauuuaa

SEQ ID NO: 36719 - RNA, 1701 nt, Artificial Sequence; identical to SEQ ID NO: 36718
  derived and/or modified CDS sequence (wt) from hemagglutinin__InfluenzaA__ADG21127

SEQ ID NO: 36720 - RNA, 1701 nt, Artificial Sequence; identical to SEQ ID NO: 36718
  derived and/or modified CDS sequence (wt) from hemagglutinin__InfluenzaA__ADG21128

SEQ ID NO: 36721 - RNA, 1701 nt, Artificial Sequence; identical to SEQ ID NO: 36718
  derived and/or modified CDS sequence (wt) from hemagglutinin__InfluenzaA__ADG21129

SEQ ID NO: 36722 - RNA, 1701 nt, Artificial Sequence
  derived and/or modified CDS sequence (wt) from hemagglutinin__InfluenzaA__ADG21130
augaaggcaauacuaguaguucugcuauauacauuugcaaccgcaaaugcagacacauuauguauagguuaucaugcgaacaauucaacagacacuguagacacaguacuagaaaagaauguaacaguaacacacucuguuaaccuucuagaagacaagcauaacgggaaacuaugcaaacuaagagggguagccccauugcauuuggguaaauguaacauugcuggcuggauccugggaaauccagagugugaaucacucuccacagcaagcucaugguccuacauuguggaaacaucuaguucagacaauggaacguguuacccaggagauuucaucgauuaugaggagcuaagagagcaauugagcucagugucaucauuugaaagguuugagauauuccccaagacaaguucauggcccaaucaugacucaaacaaagguguaacggcagcauguccucaugcuggagcaaaaagcuucuacaaaaauuuaauauggcuaguuaaaaaaggaaauucauacccaaagcucagcaaauccuacauuaaugauaaagggaaagaaguccucgugcuauggggcauucaccauccaucuacuagugcugaccaacaaagucucuaucagaaugcagaugcauauguuuuuguggggacaucaagauacagcaagaaguucaagccggaaauagcaauaagacccaaagugagggaucaagaagggagaaugaacuauuacuggacacuaguagagccgggagacaaaauaacauucgaagcaacuggaaaucuagugguaccgagauaugcauucgcaauggaaagaaaugcuggaucugguauuaucauuucagauacaccaguccacgauugcaauacaacuugucagacacccaagggugcuauaaacaccagccucccauuucagaauauacauccgaucacaauuggaaaauguccaaaauauguaaaaagcacaaaauugagacuggccacaggauugaggaaugucccgucuauucaaucuagaggccuauuuggggccauugccgguuucauugaagggggguggacagggaugguagauggaugguacgguuaucaccaucaaaaugagcaggggucaggauaugcagccgaccugaagagcacacagaaugccauugacgagauuacuaacaaaguaaauucuguuauugaaaagaugaacacacaguucacagcaguagguaaagaguucaaccaccuggaaaaaagaauagagaauuuaaauaaaaaaguugaugaugguuuccuggacauuuggacuuacaaugccgaacuguugguucuauuggaaaaugaaagaacuuuggacuaccacgauucaaaugugaagaacuuauaugaaaagguaagaagccaguuaaaaaacaaugccaaggaaauuggaaacggcugcuuugaauuuuaccacaaaugcgauaacacgugcauggaaagugucaaaaaugggacuuaugacuacccaaaauacucagaggaagcaaaauuaaacagagaagaaauagaugggguaaagcuggaaucaacaaggauuuaccagauuuuggcgaucuauucaacugucgccaguucauugguacugguagucucccugggggcaaucaguuucuggaugugcucuaaugggucucuacagugcagaauauguauuuaa

SEQ ID NO: 36723 - RNA, 1701 nt, Artificial Sequence
  derived and/or modified CDS sequence (wt) from hemagglutinin__InfluenzaA__ADG21131
augaaggcaauacuaguaguucugcuauauacauuugcaaccgcgaaugcagacacauuauguauagguuaucaugcgaacaauucaacagacacuguagacacaguacuagaaaagaauguaacaguaacacacucuguuaaccuucuagaagacaagcauaacgggaaacuaugcaaacuaagagggguagccccauugcauuuggguaaauguaacauugcuggcuggauccugggaaauccagagugugaaucacucuccacagcaagcucaugguccuacauuguggaaacaucuaguucagacaauggaacguguuacccaggagauuucaucgauuaugaggagcuaagagagcaauugagcucagugucaucauuugaaagauuugagauauuccccaagacaaguucauggcccaaucaugacucgaacaaagguguaacggcagcauguccucaugcuggagcaaaaagcuucuacaaaaauuuaauauggcuaguuaaaaaaggaaauucauacccaaagcucagcaaauccuacauuaaugauaaagggaaagaaguccucgugcuauggggcauucaccauccaucuacuagugcugaccaacaaagucucuaucagaaugcagaugcauauguuuuuguggggucaucaagauacagcaagaaguucaagccggaaauagcaauaagacccaaagugagggaucaagaagggagaaugaacuauuacuggacacuaguagagccgggagacaaaauaacauucgaagcaacuggaaaucuagugguaccgagauaugcauucgcaauggaaagaaaugcuggaucugguauuaucauuucagauacaccaguccacgauugcaauacaacuugucagacacccaagggugcuauaaacaccagccucccauuucagaauauacauccgaucacaauuggaaaauguccaaaauauguaaaaagcacaaaauugagacuggccacaggauugaggaaugucccgucuauucaaucuagaggccuauuuggggccauugccgguuucauugaagggggguggacagggaugguagauggaugguacgguuaucaccaucaaaaugagcaggggucaggauaugcagccgaccugaagagcacacagaaugccauugacgagauuacuaacaaaguaaauucuguuauugaaaagaugaauacacaguucacagcaguagguaaagaguucaaccaccuggaaaaaagaauagagaauuuaaauaaaaaaguugaugaugguuucuuggacauuuggacuuacaaugccgaacuguugguucuauuggaaaaugaaagaacuuuggacuaccacgauucaaaugugaagaacuuauaugaaaagguaagaagccagcuaaaaaacaaugccaaggaaauuggaaacggcugcuuugaauuuuaccacaaaugcgauaacacgugcauggaaagugucaaaaaugggacuuaugacuacccaaaauacucagaggaagcaaaauuaaacagagaagaaauagaugggguaaagcuggaaucaacaaggauuuaccagauuuuggcgaucuauucaacugucgccaguucauugguacugguagucucccugggggcaaucaguuucuggaugugcucuaaugggucucuacaguguagaauauguauuuaa

SEQ ID NO: 36724 - RNA, 1701 nt, Artificial Sequence; identical to SEQ ID NO: 36723
  derived and/or modified CDS sequence (wt) from hemagglutinin__InfluenzaA__ADG21132

SEQ ID NO: 36725 - RNA, 1701 nt, Artificial Sequence; identical to SEQ ID NO: 36723
  derived and/or modified CDS sequence (wt) from hemagglutinin__InfluenzaA__ADG21133

SEQ ID NO: 36726 - RNA, 1701 nt, Artificial Sequence; identical to SEQ ID NO: 36723
  derived and/or modified CDS sequence (wt) from hemagglutinin__InfluenzaA__ADG21134

SEQ ID NO: 36727 - RNA, 1701 nt, Artificial Sequence; identical to SEQ ID NO: 36723
  derived and/or modified CDS sequence (wt) from hemagglutinin__InfluenzaA__ADG21135

SEQ ID NO: 36728 - RNA, 1701 nt, Artificial Sequence; identical to SEQ ID NO: 36723
  derived and/or modified CDS sequence (wt) from hemagglutinin__InfluenzaA__ADG21136

SEQ ID NO: 36729 - RNA, 1701 nt, Artificial Sequence; identical to SEQ ID NO: 36723
  derived and/or modified CDS sequence (wt) from hemagglutinin__InfluenzaA__ADG21137

SEQ ID NO: 36730 - RNA, 1701 nt, Artificial Sequence
  derived and/or modified CDS sequence (wt) from hemagglutinin__InfluenzaA__ADG21138
augaaggcaauacuaguaguucugcuauauacauuugcaaccgcgaaugcagacacauuauguauagguuaucaugcgaacaauucaacagacacuguagacacaguacuagaaaagaauguaacaguaacacacucuguuaaccuucuagaagacaagcauaacgggaaacuaugcaaacuaagagggguagccccauugcauuuggguaaauguaacauugcuggcuggauccugggaaauccagagugugaaucacucuccacagcaagcucaugguccuacauuguggaaacaucuaguucagacaauggaacguguuacccaggagauuucaucgauuaugaggagcuaagagagcaauugagcucagugucaucauuugaaagauuugagauauuccccaagacaaguucauggcccaaucaugacucaaacaaagguguaacggcagcauguccucaugcuggagcaaaaagcuucuacaaaaauuuaauauggcuaguuaaaaaaggaaauucauacccaaagcucagcaaauccuacauuaaugauaaagggaaagaaguccucgugcuauggggcauucaccauccaucuacuagugcugaucaacaaagucucuaucagaaugcagaugcauauguuuuuguggggucaucaagauacagcaagaaguucaagccggaaauagcaauaagacccaaagugagggaucaagaagggagaaugaacuauuacuggacacuaguagagccgggagacaaaauaacauucgaagcaacuggaaaucuagugguaccgagauaugcauucgcaauggaaagaaaugcuggaucugguauuaucauuucagauacaccaguccacgauugcaauacaacuugucagacacccaagggugcuauaaacaccagccucccauuucagaauauacauccgaucacaauuggaaaauguccaaaauauguaaaaagcacaaaauugagacuggccacaggauugaggaaugucccgucuauucaaucuagaggccuauuuggggccauugccgguuucauugaagggggguggacagggaugguagauggaugguacgguuaucaccaucaaaaugagcaggggucaggauaugcagccgaccugaagagcacacagaaugccauugacgagauuacuaacaaaguaaauucuguuauugaaaagaugaauacacaguucacagcaguagguaaagaguucaaccaccuggaaaaaagaauagagaauuuaaauaaaaaaguugaugaugguuucuuggacauuuggacuuacaaugccgaacuguugguucuauuggaaaaugaaagaacuuuggacuaccacgauucaaaugugaagaacuuauaugaaaagguaagaagccagcuaaaaaacaaugccaaggaaauuggaaacggcugcuuugaauuuuaccacaaaugcgauaacacgugcauggaaagugucaaaaaugggacuuaugacuacccaaaauacucagaggaagcaaaauuaaacagagaagaaauagaugggguaaagcuggaaucaacaaggauuuaccagauuuuggcgaucuauucaacugucgccaguucauugguacugguagucucccugggggcaaucaguuucuggaugugcucuaaugggucucuacaguguagaauauguauuuaa

SEQ ID NO: 36731 - RNA, 1701 nt, Artificial Sequence
  derived and/or modified CDS sequence (wt) from hemagglutinin__InfluenzaA__ADG21139
augaaggcaauacuaguaguucugcuauauacauuugcaaccgcgaaugcagacacauuauguauagguuaucaugcgaacaauucaacagacacuguagacacaguacuagaaaagaauguaacaguaacacacucuguuaaccuucuagaagacaagcauaacgggaaacuaugcaaacuaagagggguagccccauugcauuuggguaaauguaacauugcuggcuggauccugggaaauccagagugugaaucacucuccacagcaagcucaugguccuacauuguggaaacaucuaguucagacaauggaacguguuacccaggagauuucaucgauuaugaggagcuaagagagcaauugagcucagugucaucauuugaaagauuugagauauuccccaagacaaguucauggcccaaucaugacucgaacaaagguguaacggcagcauguccucaugcuggagcaaaaagcuucuacaaaaauuuaauauggcuaguuaaaaaaggaaauucauacccaaagcucagcaaauccuacauuaaugauaaagggaaagaaguccucgugcuauggggcauucaccauccaucuacuagugcugaccaacaaagucucuaucagaaugcagaugcauauguuuuugugggaucaucaagauacagcaagaaguucaagccggaaauagcaauaagacccaaagugagggaucaagaagggagaaugaacuauuacuggacacuaguagagccgggagacaaaauaacauucgaagcaacuggaaaucuagugguaccgagauaugcauucgcaauggaaagaaaugcuggaucugguauuaucauuucagauacaccaguccacgauugcaauacaacuugucagacacccaagggugcuauaaacaccagccucccauuucagaauauacauccgaucacaauuggaaaauguccaaaauauguaaaaagcacaaaauugagacuggccacaggauugaggaaugucccgucuauucaaucuagaggccuauuuggggccauugccgguuucauugaagggggguggacagggaugguagauggaugguacgguuaucaccaucaaaaugagcaggggucaggauaugcagccgaccugaagagcacacagaaugccauugacgagauuacuaacaaaguaaauucuguuauugaaaagaugaauacacaguucacagcaguagguaaagaguucaaccaccuggaaaaaagaauagagaauuuaaauaaaaaaguugaugaugguuucuuggacauuuggacuuacaaugccgaacuguugguucuauuggaaaaugaaagaacuuuggacuaccacgauucaaaugugaagaacuuauaugaaaagguaagaagccagcuaaaaaacaaugccaaggaaauuggaaacggcugcuuugaauuuuaccacaaaugcgauaacacgugcauggaaagugucaaaaaugggacuuaugacuacccaaaauacucagaggaagcaaaauuaaacagagaagaaauagaugggguaaagcuggaaucaacaaggauuuaccagauuuuggcgaucuauucaacugucgccaguucauugguacugguagucucccugggggcaaucaguuucuggaugugcucuaaugggucucuacaguguagaauauguauuuaa

SEQ ID NO: 36732 - RNA, 1701 nt, Artificial Sequence
  derived and/or modified CDS sequence (wt) from hemagglutinin__InfluenzaA__ADG21140
augaaggcaauacuaguaguucugcuauauacauuugcaaccgcgaaugcagacacauuauguauagguuaucaugcgaacaauucaacagacacuguagacacaguacuagaaaagaauguaacaguaacacacucuguuaaccuucuagaagacaagcauaacgggaaacuaugcaaacuaagagggguagccccauugcauuuggguaaauguaacauugcuggcuggauccugggaaauccagagugugaaucacucuccacagcaagcucaugguccuacauuguggaaacaucuaguucagacaauggaacguguuacccaggagauuucaucgauuaugaggagcuaagagagcaauugagcucagugucaucauuugaaagauuugagauauuccccaagacaaguucauggcccaaucaugacucgaacaaagguguaacggcagcauguccucaugcuggagcaaaaagcuucuacaaaaauuuaauauggcuaguuaaaaaaggaaauucauacccaaagcucagcaaauccuacauuaaugauaaagggaaagaaguccucaugcuauggggcauucaccauccaucuacuagugcugaccaacaaagucucuaucagaaugcagaugcauauguuuuuguggggucaucaagauacagcaagaaguucaagccggaaauagcaauaagacccaaagugagggaucaagaagggagaaugaacuauuacuggacacuaguagagccgggagacaaaauaacauucgaagcaacuggaaaucuagugguaccgagauaugcauucgcaauggaaagaaaugcuggaucugguauuaucauuucagauacaccaguccacgauugcaauacaacuugucagacacccaagggugcuauaaacaccagccucccauuucagaauauacauccgaucacaauuggaaaauguccaaaauauguaaaaagcacaaaauugagacuggccacaggauugaggaaugucccgucuauucaaucuagaggccuauuuggggccauugccgguuucauugaagggggguggacagggaugguagauggaugguacgguuaucaccaucaaaaugagcaggggucaggauaugcagccgaccugaagagcacacagaaugccauugacgagauuacuaacaaaguaaauucuguuauugaaaagaugaauacacaguucacagcaguagguaaagaguucaaccaccuggaaaaaagaauagagaauuuaaauaaaaaaguugaugaugguuucuuggacauuuggacuuacaaugccgaacuguugguucuauuggaaaaugaaagaacuuuggacuaccacgauucaaaugugaagaacuuauaugaaaagguaagaagccagcuaaaaaacaaugccaaggaaauuggaaacggcugcuuugaauuuuaccacaaaugcgauaacacgugcauggaaagugucaaaaaugggacuuaugacuacccaaaauacucagaggaagcaaaauuaaacagagaagaaauagaugggguaaagcuggaaucaacaaggauuuaccagauuuuggcgaucuauucaacugucgccaguucauugguacugguagucucccugggggcaaucaguuucuggaugugcucuaaugggucucuacaguguagaauauguauuuaa

SEQ ID NO: 36733 - RNA, 1701 nt, Artificial Sequence; identical to SEQ ID NO: 35835
  derived and/or modified CDS sequence (wt) from hemagglutinin__InfluenzaA__ADG21141

SEQ ID NO: 36734 - RNA, 1701 nt, Artificial Sequence
  derived and/or modified CDS sequence (wt) from hemagglutinin__InfluenzaA__ADG21142
augaaggcaauacuaguaguucugcuauauacauuugcaaccgcgaaugcagacacauuauguauagguuaucaugcgaacaauucaacagacacuguagacacaguacuagaaaagaauguaacaguaacacacucuguuaaccuucuagaagacaagcauaacgggaaacuaugcaaacuaagagggguagccccauugcauuuggguaaauguaacauugcuggcuggauccugggaaauccagagugugaaucacucuccacagcaagcucaugguccuacauuguggaaacaucuaguucagacaauggaacguguuacccaggagauuucaucgauuaugaggagcuaagagagcaauugagcucagugucaucauuugaaagauuugagauauuccccaagacaaguucauggcccaaucaugacucgaacaaagguguaacggcagcauguccucaugcuggagaaaaaagcuucuacaaaaauuuaauauggcuaguuaaaaaaggaaauucauacccaaagcucagcaaauccuacauuaaugauaaagggaaagaaguccucgugcuauggggcauucaccauccaucuacuagugcugaccaacaaagucucuaucagaaugcagaugcauauguuuuuguggggucaucaagauacagcaagaaguucaagccggaaauagcaauaagacccaaagugagggaucaagaagggagaaugaacuauuacuggacacuaguagagccgggagacaaaauaacauucgaagcaacuggaaaucuagugguaccgagauaugcauucgcaauggaaagaaaugcuggaucugguauuaucauuucagauacaccaguccacgauugcaauacaacuugucagacacccaagggugcuauaaacaccagccucccauuucagaauauacauccgaucacaauuggaaaauguccaaaauauguaaaaagcacaaaauugagacuggccacaggauugaggaaugucccgucuauucaaucuagaggccuauuuggggccauugccgguuucauugaagggggguggacagggaugguagauggaugguacgguuaucaccaucaaaaugagcaggggucaggauaugcagccgaccugaagagcacacagaaugccauugacgagauuacuaacaaaguaaauucuguuauugaaaagaugaauacacaguucacagcaguagguaaagaguucaaccaccuggaaaaaagaauagagaauuuaaauaaaaaaguugaugaugguuucuuggacauuuggacuuacaaugccgaacuguugguucuauuggaaaaugaaagaacuuuggacuaccacgauucaaaugugaagaacuuauaugaaaagguaagaagccagcuaaaaaacaaugccaaggaaauuggaaacggcugcuuugaauuuuaccacaaaugcgauaacacgugcauggaaagugucaaaaaugggacuuaugacuacccaaaauacucagaggaagcaaaauuaaacagagaagaaauagaugggguaaagcuggaaucaacaaggauuuaccagauuuuggcgaucuauucaacugucgccaguucauugguacugguagucucccugggggcaaucaguuucuggaugugcucuaaugggucucuacaguguagaauauguauuuaa

SEQ ID NO: 36735 - RNA, 1701 nt, Artificial Sequence; identical to SEQ ID NO: 36723
  derived and/or modified CDS sequence (wt) from hemagglutinin__InfluenzaA__ADG21143

SEQ ID NO: 36736 - RNA, 1701 nt, Artificial Sequence; identical to SEQ ID NO: 36723
  derived and/or modified CDS sequence (wt) from hemagglutinin__InfluenzaA__ADG21144

SEQ ID NO: 36737 - RNA, 1701 nt, Artificial Sequence
  derived and/or modified CDS sequence (wt) from hemagglutinin__InfluenzaA__ADG21145
augaaggcaauacuaguaguucugcuauauacauuugcaaccgcgaaugcagacacauuauguauagguuaucaugcgaacaauucaacagacacuguagacacaguacuagaaaagaauguaacaguaacacacucuguuaaccuucuagaagacaagcauaacgggaaacuaugcaaacuaagagggguagccccauugcauuuggguaaauguaacauugcuggcuggauccugggaaauccagagugugaaucacucuccacagcaagcucaugguccuacauuguggaaacaucuaguucagacaauggaacguguuacccaggagauuucaucgauuaugaggagcuaagagagcaauugagcucagugucaucauuugaaagauuugagauauuccccaagacaaguucauggcccaaucaugacucgaacaaagguguaacggcagcauguccucaugcuggagcaaaaagcuucuacaaaaauuuaauauggcuaguuaaaaaaggaaauucauacccaaagcuuagcauauccuacauuaaugauaaagggaaagaaguccucgugcuauggggcauucaccauccaucuacuagugcugaccaacaaagucucuaucagaaugcagaugcauauguuuuuguggggucaucaagauacagcaagaaguucaagccggaaauagcaauaagacccaaagugagggaucaagaagggagaaugaacuauuacuggacacuaguagagccgggagacaaaauaacauucgaagcaacuggaaaucuagugguaccgagauaugcauucgcaauggaaagaaaugcuggaucugguauuaucauuucagauacaccaguccacgauugcaauacaacuugucagacacccaagggugcuauaaacaccagccucccauuucagaauauacauccgaucacaauuggaaaauguccaaaauauguaaaaagcacaaaauugagacuggccacaggauugaggaaugucccgucuauucaaucuagaggccuauuuggggccauugccgguuucauugaagggggguggacagggaugguagauggaugguacgguuaucaccaucaaaaugagcaggggucaggauaugcagccgaccugaagagcacacagaaugccauugacgagauuacuaacaaaguaaauucuguuauugaaaagaugaauacacaguucacagcaguagguaaagaguucaaccaccuggaaaaaagaauagagaauuuaaauaaaaaaguugaugaugguuucuuggacauuuggacuuacaaugccgaacuguugguucuauuggaaaaugaaagaacuuuggacuaccacgauucaaaugugaagaacuuauaugaaaagguaagaagccagcuaaaaaacaaugccaaggaaauuggaaacggcugcuuugaauuuuaccacaaaugcgauaacacgugcauggaaagugucaaaaaugggacuuaugacuacccaaaauacucagaggaagcaaaauuaaacagagaagaaauagaugggguaaagcuggaaucaacaaggauuuaccagauuuuggcgaucuauucaacugucgccaguucauugguacugguagucucccugggggcaaucaguuucuggaugugcucuaaugggucucuacaguguagaauauguauuuaa

SEQ ID NO: 36738 - RNA, 1701 nt, Artificial Sequence; identical to SEQ ID NO: 36723
  derived and/or modified CDS sequence (wt) from hemagglutinin__InfluenzaA__ADG21146

SEQ ID NO: 36739 - RNA, 1701 nt, Artificial Sequence; identical to SEQ ID NO: 36723
  derived and/or modified CDS sequence (wt) from hemagglutinin__InfluenzaA__ADG21147

SEQ ID NO: 36740 - RNA, 1701 nt, Artificial Sequence
  derived and/or modified CDS sequence (wt) from hemagglutinin__InfluenzaA__ADG21148
augaaggcaauacuaguaguucugcuauauacauuugcaaccgcaaaugcagacacauuauguauagguuaucaugcgaacaauucaacagacacuguagacacaguacuagaaaagaauguaacaguaacacacucuguuaaccuucuagaagacaagcauaacgggaaacuaugcaaacuaagagggguagccccauugcauuuggguaaauguaacauugcuggcuggauccugggaaauccagagugugaaucacucuccacagcaagcucaugguccuacauuguggaaacaucuaguucagacaauggaacguguuacccaggagauuucaucgauuaugaggagcuaagagagcaauugagcucagugucaucauuugaaagguuugagauauuccccaagacaaguucauggcccaaucaugacucaaacaaagguguaacggcagcauguccucaugcuggagcaaaaagcuucuacaaaaauuuaauauggcuaguuaaaaaaggaaauucauacccaaagcucagcaaauccuacauuaaugauaaagggaaagaaguccucgugcuauggggcauucaccauccaucuacuagugcugaccaacaaagucucuaucagaaugcagaugcauauguuuuuguggggacaucaagauacagcaagaaguucaagccggaaauagcaauaagacccaaagugagggaucaagaagggagaaugaacuauuacuggacacuaguagagccgggagacaaaauaacauucgaagcaacuggaaaucuagugguaccgagauaugcauucgcaauggaaagaaaugcuggaucugguauuaucauuucagauacaccaguccacgauugcaauacaacuugucagacacccaagggugcuauaaacaccagccucccauuucagaauauacauccgaucacaauuggaaaauguccaaaauauguaaaaagcacaaaauugagacuggccacaggauugaggaaugucccgucuauucaaucuagaggccuguuuggggccauugccgguuucauugaagggggguggacagggaugguagauggaugguacgguuaucaccaucaaaaugagcaggggucaggauaugcagccgaccugaagagcacacagaaugccauugacgagauuacuaacaaaguaaauucuguuauugaaaagaugaacacacaguucacagcaguagguaaagaguucaaccaccuggaaaaaagaauagagaauuuaaauaaaaaaguugaugaugguuuccuggacauuuggacuuacaaugccgaacuguugguucuauuggaaaaugaaagaacuuuggacuaccacgauucaaaugugaagaacuuauaugaaaagguaagaagccaguuaaaaaacaaugccaaggaaauuggaaacggcugcuuugaauuuuaccacaaaugcgauaacacgugcauggaaagugucaaaaaugggacuuaugacuacccaaaauacucagaggaagcaaaauuaaacagagaagaaauagaugggguaaagcuggaaucaacaaggauuuaccagauuuuggcgaucuauucaacugucgccaguucauugguacugguagucucccugggggcaaucaguuucuggaugugcucuaaugggucucuacagugcagaauauguauuuaa

SEQ ID NO: 36741 - RNA, 1701 nt, Artificial Sequence
  derived and/or modified CDS sequence (wt) from hemagglutinin__InfluenzaA__ADG21149
augaaggcaauacuaguaguucugcuauauacauuugcaaccgcaaaugcagacacauuauguauagguuaucaugcgaacaauucaacagacacuguagacacaguacuagaaaagaauguaacaguaacacacucuguuaaccuucuagaagacaagcauaacgggaaacuaugcaaacuaagagggguagccccauugcauuuggguaaauguaacauugcuggcuggauccugggaaauccagagugugaaucacucuccacagcaagcucaugguccuacauuguggaaacaucuaguucagacaauggaacguguuauccaggagauuucaucgauuaugaggagcuaagagagcaauugagcucagugucaucauuugaaagguuugagauauuccccaagacaaguucauggcccaaucaugacucgaacaaagguguaacggcagcauguccucaugcuggagcaaaaagcuucuacaaaaauuuaauauggcuaguuaaaaaaggaaauucauacccaaagcucagcaaauccuacauuaaugauaaagggaaagaaguccucgugcuauggggcauucaccauccaucuacuagugcugaccaacaaagccucuaucagaaugcagaugcauauguuuuuguggggacaucaagauacagcaagaaguucaagccggaaauagcaauaagacccaaagugagggaucaagaagggagaaugaacuauuacuggacacuaguagagccgggagacaaaauaacauucgaagcaacuggaaaucuagugguaccgagauaugcauucgcaauggaaagaaaugcuggaucugguauuaucauuucagauacaccaguccacgauugcaauacaacuugucagacacccaagggugcuauaaacaccagccucccauuucagaauauacauccgaucacaauuggaaaauguccaaaauauguaaaaagcacaaaauugagacuggccacaggauugaggaauaucccgucuauucaaucuagaggccuauuuggggccauugccgguuucauugaagggggguggacagggaugguagauggaugguacgguuaucaccaucaaaaugagcaggggucaggauaugcagccgaccugaagagcacacagaaugccauugacgagauuacuaacaaaguaaauucuguuauugaaaagaugaauacacaguucacagcaguagguaaagaguucaaccaccuggaaaaaagaauagagaauuuaaauaaaaaaguugaugaugguuuccuggacauuuggacuuacaaugccgaacuguugguucuauuggaaaaugaaagaacuuuggacuaccacgauucaaaugugaagaacuuauaugaaaagguaagaagccaguuaaaaaacaaugccaaggaaauuggaaacggcugcuuugaauuuuaccacaaaugcgauaacacgugcauggaaagugucaaaaaugggacuuaugacuacccaaaauacucagaggaagcaaaauuaaacagagaagaaauagaugggguaaagcuggaaucaacaaggauuuaccagauuuuggcgaucuauucaacugucgccaguucauugguacugguagucucccugggggcaaucaguuucuggaugugcucuaaugggucucuacaguguagaauauguauuuaa

SEQ ID NO: 36742 - RNA, 1701 nt, Artificial Sequence
  derived and/or modified CDS sequence (wt) from hemagglutinin__InfluenzaA__ADG21150
augaaggcaauacuaguaguucugcuauauacauuugcaaccgcaaaugcagacacauuauguauagguuaucaugcgaacaauucaacagacacuguagacacaguacuagaaaagaauguaacaguaacacacucuguuaaccuucuagaagacaagcauaacgggaaacuaugcaaacuaagagggguagccccauugcauuuggguaaauguaacauugcuggcuggauccugggaaauccagagugugaaucacucuccacagcaagcucaugguccuacauuguggaaacaucuaguucagacaauggaacguguuacccaggagauuucaucgauuaugaggagcuaagagagcaauugagcucagugucaucauuugaaagguuugagauauuccccaagacaaguucauggcccaaucaugauucgaacaaagguguaacggcagcauguccucaugcuggagcaaaaagcuucuacaaaaauuuaauauggcuaguuaaaaaaggaaauucauacccaaagcucagcaaauccuacauuaaugauaaagggaaagaaguccucgugcuauggggcauucaccauccaucuacuagugcugaccaacaaagucucuaucagaaugcagaugcauauguuuuuguagggacaucaagauacagcaagaaguucaagccggaaauagcaauaagacccaaagugagggaucaagaagggagaaugaacuauuacuggacacuaguggagccgggagacaaaauaacauucgaagcaacuggaaaucuagugguaccgagauaugcauucgcaauggaaagaaaugcuggaucugguauuaucauuucagauacaccaguccacgauugcaauacaacuugucagacacccaagggugcuauaaacaccagccucccauuucagaauauacauccgaucacaauuggaaaauguccaaaauauguaaaaagcacaaaauugagacuggccacaggauugaggaaugucccgucuauucaaucuagaggccuauuuggggccauugccgguuucauugaagggggguggacagggaugguagauggaugguacgguuaucaccaucaaaaugagcaggggucaggauaugcagccgaccugaagagcacacagaaugccauugacaagauuacuaacaaaguaaauucuguuauugaaaagaugaauacacaguucacagcaguagguaaagaguucaaccaccuggaaaaaagaauagagaauuuaaauaaaaaaguugaugaugguuuccuggacauuuggacuuacaaugccgaacuguugguucuauuggaaaaugaaagaacuuuggacuaccacgauucaaaugugaagaacuuauaugaaaagguaagaagccaguuaaaaaacaaugccaaggaaauuggaaacggcugcuuugaauuuuaccacaaaugcgauaacacgugcauggaaagugucaaaaaugggacuuaugacuacccaaaauacucagaggaagcaaaauuaaacagagaagaaauagaugggguaaagcuggaaucaacaaggauuuaccagauuuuggcgaucuauucaacugucgccaguucauugguacugguagucucccugggggcaaucaguuucuggaugugcucuaaugggucucuacaguguagaauauguauuuaa

SEQ ID NO: 36743 - RNA, 1701 nt, Artificial Sequence; identical to SEQ ID NO: 36723
  derived and/or modified CDS sequence (wt) from hemagglutinin__InfluenzaA__ADG21151

SEQ ID NO: 36744 - RNA, 1701 nt, Artificial Sequence; identical to SEQ ID NO: 36723
  derived and/or modified CDS sequence (wt) from hemagglutinin__InfluenzaA__ADG21152

SEQ ID NO: 36745 - RNA, 1701 nt, Artificial Sequence; identical to SEQ ID NO: 36722
  derived and/or modified CDS sequence (wt) from hemagglutinin__InfluenzaA__ADG21153

SEQ ID NO: 36746 - RNA, 1701 nt, Artificial Sequence; identical to SEQ ID NO: 36723
  derived and/or modified CDS sequence (wt) from hemagglutinin__InfluenzaA__ADG21154

SEQ ID NO: 36747 - RNA, 1701 nt, Artificial Sequence; identical to SEQ ID NO: 36723
  derived and/or modified CDS sequence (wt) from hemagglutinin__InfluenzaA__ADG21155

SEQ ID NO: 36748 - RNA, 1701 nt, Artificial Sequence; identical to SEQ ID NO: 36742
  derived and/or modified CDS sequence (wt) from hemagglutinin__InfluenzaA__ADG21156

SEQ ID NO: 36749 - RNA, 1701 nt, Artificial Sequence
  derived and/or modified CDS sequence (wt) from hemagglutinin__InfluenzaA__ADG21158
augaaggcaauacuaguaguucugcuauauacauuugcaaccgcaaaugcagacacauuauguauagguuaucaugcgaacaauucaacagacacuguagacacaguacuagaaaggaauguaacaguaacacacucuguuaaccuucuagaagacaagcauaacgggaaacuaugcaaacuaagagggguagccccauugcauuuggguaaauguaacauugcuggcuggauccugggaaauccagagugugaaucacucuccacagcaagcucaugguccuacauuguggaaacaucuaguucagacaauggaacguguuacccaggagauuucaucgauuaugaggagcuaagagagcaauugagcucagugucaucauuugaaagguuugagauauuccccaagacaaguucauggcccaaucaugacucgaacaaagguguaacggcagcauguccucaugcuggagcaaaaagcuucuacaaaaauuuaauauggcuaguuaaaaaaggaaauucauacccaaagcucagcaaauccuacauuaaugauaaagggaaagaaguccucgugcuauggggcauucaccauccaucuacuagugcugaccaacaaagucucuaucagaaugcagaugcauauguuuuuguggggacaucaagauacagcaagaaguucaagccggaaauagcaauaagacccaaagugagggaucaagaagggagaaugaacuauuacuggacacuaguagagccgggagacaaaauaacauucgaagcaacuggaaaucuagugguaccgagauaugcauucgcaauggaaagaaaugcuggaucugguauuaucauuucagauacaccaguccacgauugcaauacaacuugucagacacccaagggugcuauaaacaccagccucccauuucagaauauacauccgaucacaauuggaaaauguccaaaauauguaaaaagcacaaaauugagacuggccacaggauugaggaaugucccgucuauucaaucuagaggccuauuuggggccauugccgguuucauugaagggggguggacagggaugguagauggaugguacgguuaucaccaucaaaaugaacaggggucaggauaugcagccgaccugaagagcacacagaaugccauugacgaaauuacuaacaaaguaaauucuguuauugaaaagaugaauacacaguucacagcaguagguaaagaguucaaccaccuggaaaaaagaauagagaauuuaaauaaaaaaguugaugaugguuuccuggacauuuggacuuacaaugccgaacuguugguucuauuggaaaaugaaagaacuuuggacuaccacgauucaaaugugaagaacuuauaugaaaaaguaagaagccaguuaaaaaacaaugccaaggaaauuggaaacggcugcuuugaauuuuaccacaaaugcgauaacacgugcauggaaagugucaaaaaugggacuuaugacuacccaaaauacucagaggaagcaaaauuaaacagagaagaaauagaugggguaaagcuggaaucaacaaggauuuaccagauuuuggcgaucuauucaacugucgccaguucauugguacugguagucucccugggggcaaucaguuucuggaugugcucuaaugggucucuacaguguagaauauguauuuaa

SEQ ID NO: 36750 - RNA, 1701 nt, Artificial Sequence
  derived and/or modified CDS sequence (wt) from hemagglutinin__InfluenzaA__ADG21159
augaaggcaauacuaguaguucugcuauauacauuugcaaccgcaaaugcagacacauuauguauagguuaucaugcgaacaauucaacagacacuguagacacaguacuagaaaagaauguaacaguaacacacucuguuaaccuucuagaagacaagcauaacgggaaacuaugcaaacuaagagggguagccccauugcauuuggguaaauguaacauugcuggcuggauccugggaaauccagagugugaaucacucuccacagcaagcucaugguccuacauuguggaaacaucuaguucagacaauggaacguguuacccaggagauuucaucgauuaugaggagcuaagagagcaauugagcucagugucaucauuugaaagguuugagauauuccccaagacaaguucauggcccaaucaugacucgaacaaagguguaacggcagcauguccucaugcuggagcaaaaagcuucuacaaaaauuuaauauggcuaguuaaaaaaggaaauucauacccaaagcucagcaaauccuacauuaaugauaaagggaaagaaguccucgugcuauggggcauucaccauccaucuacuagugcugaccaacaaagucucuaucagaaugcagaugcauauguuuuuguggggacaucaagauacagcaagaaauucaagccggaaauagcaauaagacccaaagugagggaucaagaagggagaaugaacuauuacuggacacuaguagagccgggagacaaaauaacauucgaagcaacuggaaaucuagugguaccgagauaugcauucgcaauggaaagaaaugcuggaucugguauuaucauuucagauacaccaguccacgauugcaauacaacuugucagacacccaagggugcaauaaacaccagccucccauuucagaauauacauccgaucacaauuggaaaauguccaaaauauguaaaaagcacaaaauugagacuggccacaggauugaggaaugucccgucuauucaaucuagaggccuauuuggggccauugccgguuucauugaagggggguggacagggaugguagauggaugguacgguuaucaccaucaaaaugagcaggggucaggauaugcagccgaccugaagagcacacagaaugccauugacgagauuacuaacaaaguaaauucuguuauugaaaagaugaauacacaguucacagcaguagguaaagaguucaaccaccuggaaaaaagaauagagaauuuaaauaaaaaaguugaugaugguuuccuggacauuuggacuuacaaugccgaacuguugguucuauuggaaaaugaaagaacuuuggacuaccacgauucaaaugugaagaacuuauaugaaaagguaagaagccaguuaaaaaacaaugccaaggaaauuggaaacggcugcuuugaauuuuaccacaaaugcgauaacacgugcauggaaagugucaaaaaugggacuuaugacuacccaaaauacucagaggaagcaaaauuaaacagagaagaaauagaugggguaaagcuggaaucaacaaggauuuaccagauuuuggcgaucuauucaacugucgccaguucauugguacugcuagucucccugggggcaaucaguuucuggaugugcucuaaugggucucuacaguguagaauauguauuuaa

SEQ ID NO: 36751 - RNA, 1701 nt, Artificial Sequence; identical to SEQ ID NO: 36749
  derived and/or modified CDS sequence (wt) from hemagglutinin__InfluenzaA__ADG21160

SEQ ID NO: 36752 - RNA, 1701 nt, Artificial Sequence
  derived and/or modified CDS sequence (wt) from hemagglutinin__InfluenzaA__ADG21161
augaaggcaauacuaguaguucugcuauauacauuugcaaccgcaaaugcagacacauuauguauagguuaucaugcgaacaauucaacagacacuguagacacaguacuagaaaagaauguaacaguaacacacucuguuaaccuucuagaagacaagcauaacgggaaacuaugcaaacuaagagggguagccccauugcauuuggguaaauguaacauugcuggcuggauccugggaaauccagagugugaaucacucuccacagcaagcucaugguccuacauuguggaaacaucuaguucagacaauggaacguguuacccaggagauuucaucgauuaugaggagcuaagagagcaauugagcucagugucaucauuugaaagguuugagauauuccccaagacaaguucauggcccaaucaugacucgaacaaagguguaacggcagcauguccucaugcuggagcaaaaagcuucuacaaaaauuuaauauggcuaguuaaaaaagaaaauucauacccaaagcucagcaaauccuacauuaaugauaaagggaaagaaguccucgugcuauggggcauucaccauccaucuacuagugcugaccaacaaagucucuaucagaaugcagaugcauauguuuuuguggggacaucaagauacagcaagaaguucaagccggaaauagcaauaagacccaaagugagggaucaagaagggagaaugaacuauuacuggacacuaguagagccgggagacaaaauaacauucgaagcaacuggaaaucuagugguaccgagauaugcauucgcaauggaaagaaaugcugggucugguauuaucauuucagauacaccaguccacgauugcaauacaacuugucagacacccaagggugcuauaaacaccagccucccauuucagaauauacauccgaucacaauuggaaaauguccaaaauauguaaaaagcacaaaauugagacuggccacaggauugaggaaugucccgucuauucaaucuagaggccuauuuggggccauugccgguuucauugaagggggguggacagggaugguagauggaugguacgguuaucaccaucaaaaugagcaggggucaggauaugcagccgaccugaagagcacacagaaugccauugacgagauuacuaacaaaguaaauucuguuauugaaaagaugaauacacaguucacagcaguagguaaagaguucaaccaccuggaaaaaagaauagagaauuuaaauaaaaaaguugaugaugguuuccuggacauuuggacuuacaaugccgaacuguugguucuauuggaaaaugaaagaacuuuggacuaccacaauucaaaugugaagaacuuauaugaaaagguaagaagccaguuaaaaaacaaugccaaggaaauuggaaacggcugcuuugaauuuuaccacaaaugcgauaacacgugcauggaaagugucaaaaaugggacuuaugacuacccaaaauacucagaggaagcaaaauuaaacagagaagaaauagaugggguaaagcuggaaucaacaaggauuuaccagauuuuggcgaucuauucaacugucgccaguucauugguacugguagucucccugggggcaaucaguuucuggaugugcucuaaugggucucuacaguguagaauauguauuuaa

SEQ ID NO: 36753 - RNA, 1701 nt, Artificial Sequence
  derived and/or modified CDS sequence (wt) from hemagglutinin__InfluenzaA__ADG21163
augaaggcaauacuaguaguucugcuauauacauuugcaaccgcaaaugcagacacauuauguauagguuaucaugcgaacaauucaacagacacuguagacacaguacuagaaaagaauguaacaguaacacacucuguuaaccuucuagaagacaagcauaacgggaaacuaugcaaacuaagagggguagccccauugcauuuggguaaauguaacauugcuggcuggauccugggaaauccagagugugaaucacucuccacagcaagcucaugguccuacauuguggaaacaucuaguucagacaauggaacguguuacccaggagauuucaucgauuaugaggagcuaagagagcaauugagcucagugucaucauuugaaagguuugagauauuccccaagacaaguucauggcccaaucaugacucgaacaaagguguaacggcagcauguccucaugcuggagcaaaaagcuucuacaaaaauuuaauauggcuaguuaaaaaaggaaauucauacccaaagcucagcaaauccuacauuaaugauaaagggaaagaaguccucgugcuauggggcauucaccauccaucuacuagugcugaccaacaaagucucuaucagaaugcagaugcauauguuuuuguggggacaucaagauacagcaagaaguucaagccggaaauagcaauaagacccaaagugagggaucaagaagggagaaugaacuauuacuggacacuaguagagccgggagacaaaauaacauucgaagcaacuggaaaucuagugguaccgagauaugcauucgcaauggaaagaaaugcuggaucugguauuaucauuucagauacaccaguccacgauugcaauacaacuugucagacacccaagggugcuauaaacaccagccucccauuucagaauguacauccgaucacaauuggaaaauguccaaaauauguaaaaagcacaaaauugagacuggccacaggauugaggaaugucccgucuauucaaucuagaggccuauuuggggccauugccgguuucauugaagggggguggacagggaugguagauggaugguacgguuaucaccaucaaaaugagcaggggucaggauaugcagccgaccugaagagcacacagaaugccauugacgagauuacuaacaaaguaaauucuguuauugaaaagaugaauacacaguucacagcaguagguaaagaguucaaccaccuggaaaaaagaauagagaauuuaaauaaaaagguugaugaugguuuccuagacguuuggacuuacaaugccgaacuguugguucuauuggaaaaugaaagaacuuuggacuaccacgauucaaaugugaagaacuuauaugaaaagguaagaagccaguuaaaaaacaaugccaaggaaauuggaaacggcugcuuugaauuuuaccacaaaugcgauaacacgugcauggaaagugucaaaaaugggacuuaugacuacccaaaauacucagaggaagcaaaauuaaacagagaagaaauagaugggguaaagcuggaaucaacaaggauuuaccagauuuuggcgaucuauucaacugucgccaguucauugguacugguagucucccugggggcaaucaguuucuggaugugcucuaaugggucucuacaguguagaauauguauuuaa

SEQ ID NO: 36754 - RNA, 1701 nt, Artificial Sequence
  derived and/or modified CDS sequence (wt) from hemagglutinin__InfluenzaA__ADG21165
augaaggcaauacuaguaguucugcuauauacauuugcaaccgcaaaugcagacacauuauguauagguuaucaugcgaacaauucaacagacacuguagacacaguacuagaaaagaauguaacaguaacacacucuguuaaccuucuagaagacaagcauaacgggaaacuaugcaaacuaagagggauagccccauugcauuuggguaaauguaacauugcuggcuggauccugggaaauccagagugugaaucacucuccacagcaagcucaugguccuacauuguggaaacaucuaguucagacaauggaacguguuacccaggagauuucaucgauuaugaggagcuaagagagcaauugagcucagugucaucauuuaaaagguuugagauauuccccaagacaaauucauggcccaaucaugacucgaacaaagguguaacggcagcauguccucaugcuggagcaaaaagcuucuacaaaaauuuaauauggcuaguuaaaaaaggaaauucauacccaaagcucagcaaauccuacauuaaugauaaagggaaagaaguccucgugcuauggggcauucaccauccaucuacuagugcugaccaacaaagucucuaucagaaugcagaugcauauguuuuuguggggacaucaaaauacagcaagaaguucaagccggaaauagcaauaagacccaaagugagggaucaagaagggagaaugaacuauuacuggacacuaguagagccgggagacaaaauaacauucgaagcaacuggaaaucuagugguaccgagauaugcauucgcaauggaaagaaaugcuggaucugguauuaucauuucagauacaccaguccacgauugcaauacaacuugucagacacccaagggugcuauaaacaccagccucccauuucagaauauacauccgaucacaauuggaaaauguccaaaauauguaaaaagcacaaaauugagacuggccacaggauugaggaaugucccgucuauucaaucuagaggccuauuuggggccauugccgguuucauugaagggggguggacagggaugguagauggaugguacgguuaucaccaucaaaaugagcaggggucaggauaugcagccgaccugaagagcacacagaaugccauugacgggauuacuaacaaaguaaauucuguuauugaaaagaugaauacacaguucacagcaguagguaaagaguucaaccaccuggaaaaaagaauagagaauuuaaauaaaaaaguugaugaugguuuccuggacauuuggacuuacaaugccgaacuguugguucuauuggaaaaugaaagaacuuuggacuaccacgauucaaaugugaagaacuuauaugaaaagguaagaagccaguuaaaaaacaaugccaaggaaauuggaaacggcugcuuugaauuuuaccacaaaugcgauaacacgugcauggaaagugucaaaaaugggacuuaugacuacccaaaauacucagaggaagcaaaauuaaacagagaagaaauagaugggguaaagcuggaaucaacaaggauuuaccagauuuuggcgaucuauucaacugucgccaguucauugguacugguagucucccugggggcaaucaguuucuggaugugcucuaaugggucucuacaguguagaauauguauuuaa

SEQ ID NO: 36755 - RNA, 1701 nt, Artificial Sequence; identical to SEQ ID NO: 35835
  derived and/or modified CDS sequence (wt) from hemagglutinin__InfluenzaA__ADG21166

SEQ ID NO: 36756 - RNA, 1701 nt, Artificial Sequence
  derived and/or modified CDS sequence (wt) from hemagglutinin__InfluenzaA__ADG21168
augaaggcaauacuaguaguucugcuauauacauuugcaaccgcgaaugcagacacauuauguauagguuaucaugcgaacaauucaacagacacuguagacacaguacuagaaaagaauguaacaguaacacacucuguuaaccuucuagaagacaagcauaacgggaaacuaugcaaacuaagagggguagccccauugcauuuggguaaauguaacauugcuggcuggauccugggaaauccagagugugaaucacucuccacagcaagcucaugguccuacauuguggaaacaucuaguucagacaauggaacguguuacccaggagauuucaucgauuaugaggagcuaagagagcaauugagcucagugucaucauuugaaagguuugagauauuccccaagacaaguucauggcccaaucaugacucgaacaaagguguaacggcagcauguccucaugcuggagcaaaaagcuucuacaaaaauuuaauauggcuaguuaaaaaaggaaauucauacccaaagcucagcaaauucuacauuaaugauaaagggaaagaaguccucgugcuauggggcauucaccauccaucuacuagugcugaccaacaaagucucuaucagaaugcagaugcauauguuuuuguggggucaucaagauacagcaagaaguucaagccggaaauagcaauaagacccaaagugagggaucaagaagggagaaugaacuauuacuggacacuaguagagccgggagacaaaauaacauucgaagcaacuggaaaucuagugguaccgagauaugcauucgcaauggaaagaaaugcuggaucugguauuaucauuucagauacaccaguccacgauugcaauacaacuugucagacacccaagggugcuauaaacaccagccucccauuucagaauauacauccgaucacaauuggaaaauguccaaaauauguaaaaagcacaaaauugagacuggccacaggauugaggaaugucccgucuauucaaucuagaggccuauuuggggccauugccgguuucauugaagggggguggacagggaugguagauggaugguacgguuaucaccaucaaaaugagcaggggucaggauaugcagccgaccugaagagcacacagaaugccauugacgagauuacuaacaaaguaaauucuguuauugaaaagaugaauacacaguucacagcaguagguaaagaguucaaccaccuggaaaaaagaauagagaauuuaaauaaaaaaguugaugaugguuucuuggacauuuggacuuacaaugccgaacuguugguucuauuggaaaaugaaagaacuuuggacuaccacgauucaaaugugaagaacuuauaugaaaagguaagaagccagcuaaaaaacaaugccaaggaaauuggaaacggcugcuuugaauuuuaccacaaaugcgauaacacgugcauggaaagugucaaaaaugggacuuaugacuacccaaaauacucagaggaagcaaaauuaaacagagaagaaauagaugggguaaagcuggaaucaacaaggauuuaccagauuuuggcgaucuauucaacugucgccaguucauugguacugguagucucccugggggcaaucaguuucuggaugugcucuaaugggucucuacaguguagaauauguauuuaa

SEQ ID NO: 36757 - RNA, 1701 nt, Artificial Sequence
  derived and/or modified CDS sequence (wt) from hemagglutinin__InfluenzaA__ADG21169
augaaggcaauacuaguaguucugcuauauacauuuacaaccgcaaaugcagacacauuauguauagguuaucaugcgaacaauucaacagacacuguagacacaguacuagaaaagaauguaacaguaacacacucuguuaaccuucuagaagacaagcauaacgggaaacuaugcaaacuaagagggguagccccauugcauuuggguaaauguaacauugcuggcuggauccugggaaauccagagugugaaucacucuccacagcaagcucaugguccuacauuguggaaacaucuaguucagacaauggaacguguuacccaggagauuucaucgauuaugaggagcuaagagagcaauugagcucagugucaucauuugaaagguuugagauauuccccaagacaaguucauggcccaaucaugacucgaacaaagguguaacggcagcauguccucaugcuggagcaaaaagcuucuacaaaaauuuaauauggcuaguuaaaaaaggaaauucauacccaaagcucagcaaauccuacauuaaugauaaagggaaagaaguccucgugcuauggggcauucaccauccaucuacuagugcugaccaacaaagucucuaucagaaugcagaugcauauguuuuuguggggacaucaagauacagcaagaaguucaagccggaaauagcaauaagacccaaagugagggaacaagaagggagaaugaacuauuacuggacacuaguagagccgggagacaaaauaacauucgaagcaacuggaaaucuagugguaccgagauaugcauucgcaauggaaagaaaugcuggaucugguauuaucauuucagauacaccaguccacgauugcaauacaacuugucagacacccaagggugcuauaaacaccagccucccauuucagaauauacauucgaucacaauuggaaaauguccaaaauauguaaaaagcacaaaauugagacuggccacaggauugaggaaugucccgucuauucaaucuagaggccuauuuggggccauugccgguuucauugaagggggguggacagggaugguagauggaugguacgguuaucaccaucaaaaugagcaggggucaggauaugcagccgaccugaagagcacacagaaugccauugacgagauuacuaacaaaguaaauucuguuauugaaaagaugaauacacaguucacagcaguagguaaagaguucaaccaccuggaaaaaagaauagagaauuuaaauaaaaaaguugaugaugguuuccuggacauuuggacuuacaaugccgaacuguugguucuauuggaaaaugaaagaacuuuggacuaccacgauucaaaugugaagaacuuauaugaaaagguaagaagccaguuaaaaaacaaugccaaggaaauuggaaacggcugcuuugaauuuuaccacaaaugcgauaacacgugcauggaaagugucaaaaaugggacuuaugacuacccaaaauacucagaggaagcaaaauuaaacagagaagaaauagaugggguaaagcuggaaucaacaaggauuuaccagauuuuggcgaucuauucaacugucgccaguucauuggugcugguagucucccugggggcaaucaguuucuggaugugcucuaaugggucucuacaguguagaauauguauuuaa

SEQ ID NO: 36758 - RNA, 1701 nt, Artificial Sequence; identical to SEQ ID NO: 35835
  derived and/or modified CDS sequence (wt) from hemagglutinin__InfluenzaA__ADG21170

SEQ ID NO: 36759 - RNA, 1701 nt, Artificial Sequence; identical to SEQ ID NO: 35835
  derived and/or modified CDS sequence (wt) from hemagglutinin__InfluenzaA__ADG21173

SEQ ID NO: 36760 - RNA, 1701 nt, Artificial Sequence; identical to SEQ ID NO: 35778
  derived and/or modified CDS sequence (wt) from hemagglutinin__InfluenzaA__ADG21174

SEQ ID NO: 36761 - RNA, 1701 nt, Artificial Sequence; identical to SEQ ID NO: 35778
  derived and/or modified CDS sequence (wt) from hemagglutinin__InfluenzaA__ADG21175

SEQ ID NO: 36762 - RNA, 1701 nt, Artificial Sequence; identical to SEQ ID NO: 35835
  derived and/or modified CDS sequence (wt) from hemagglutinin__InfluenzaA__ADG21176

SEQ ID NO: 36763 - RNA, 1701 nt, Artificial Sequence; identical to SEQ ID NO: 35835
  derived and/or modified CDS sequence (wt) from hemagglutinin__InfluenzaA__ADG21177

SEQ ID NO: 36764 - RNA, 1701 nt, Artificial Sequence; identical to SEQ ID NO: 35835
  derived and/or modified CDS sequence (wt) from hemagglutinin__InfluenzaA__ADG21178

SEQ ID NO: 36765 - RNA, 1701 nt, Artificial Sequence; identical to SEQ ID NO: 36036
  derived and/or modified CDS sequence (wt) from hemagglutinin__InfluenzaA__ADG21179

SEQ ID NO: 36766 - RNA, 1701 nt, Artificial Sequence; identical to SEQ ID NO: 35835
  derived and/or modified CDS sequence (wt) from hemagglutinin__InfluenzaA__ADG21180

SEQ ID NO: 36767 - RNA, 1701 nt, Artificial Sequence; identical to SEQ ID NO: 35835
  derived and/or modified CDS sequence (wt) from hemagglutinin__InfluenzaA__ADG21181

SEQ ID NO: 36768 - RNA, 1701 nt, Artificial Sequence; identical to SEQ ID NO: 35835
  derived and/or modified CDS sequence (wt) from hemagglutinin__InfluenzaA__ADG21182

SEQ ID NO: 36769 - RNA, 1701 nt, Artificial Sequence; identical to SEQ ID NO: 35835
  derived and/or modified CDS sequence (wt) from hemagglutinin__InfluenzaA__ADG21183

SEQ ID NO: 36770 - RNA, 1701 nt, Artificial Sequence; identical to SEQ ID NO: 36742
  derived and/or modified CDS sequence (wt) from hemagglutinin__InfluenzaA__ADG21184

SEQ ID NO: 36771 - RNA, 1701 nt, Artificial Sequence
  derived and/or modified CDS sequence (wt) from hemagglutinin__InfluenzaA__ADG21185
augaaggcaauacuaguaguucugcuauauacauuugcaaccgcaaaugcagacacauuauguauagguuaucaugcgaacaauucaacagacacuguagacacaguacuagaaaagaauguaacaguaacacacucuguuaaccuucuagaagacaagcauaacgggaaacuaugcaaacuaagagggguagccccauugcauuuggguaaauguaacauugcuggcuggauccugggaaauccagagugugaaucacucuccacagcaagcucaugguccuacauuguggaaacaucuaguucagacaauggaacguguuacccaggagauuucaucgauuaugaggagcuaagagagcaauugagcucagugucaucauuugaaagguuugagauauuccccaagacaaguucauggcccaaucaugacucgaacaaagguguaacggcagcaugcccucaugcuggagcaaaaagcuucuacaaaaauuuaauauggcuaguuaaaaaaggaaauucauacccaaagcucagcaaauccuacauuaaugauaaagggaaagaaguccucgugcuauggggcauucaccauccaucuacuagugcugaccaacaaagucucuaucagaaugcagaugcauauguuuuuguggggacaucaagauacagcaagaaguucaagccggaaauagcaauaagacccaaagugagggaucaagaagggagaaugaacuauuacuggacacuaguaaagccgggagacaaaauaacauucgaagcaacuggaaaucuagugguaccgagauaugcauucgcaauggaaagaaaugcuggaucugguauuaucauuucagauacaccaguccacgauugcaauacaacuugucagacacccaagggugcuauaaacaccagccucccauuucagaauauacauccgaucacaauuggaagauguccaaaauauguaaaaagcacaaaauugagacuggccacaggauugaggaaugucccgucuauucaaucuagaggccuguuuggggccauugccgguuucauugaagggggguggacagggaugguagauggaugguacgguuaucaccaucaaaaugagcaggggucaggauaugcagccgaccugaagagcacacagaaugccauugacgagauuacuaacaaaguaaauucuguuauugaaaagaugaauacacaguucacagcaguagguaaagaguucaaccaccuggaaaaaagaauagagaauuuaaauaaaaaaguugaugaugguuuccuggacauuuggacuuacaaugccgaacuguugguucuauuggaaaaugaaagaacuuuggacuaccacgauucaaaugugaagaacuuauaugaaaagguaagaagccaguuaaaaaacaaugccaaggaaauuggaaacggcugcuuugaauuuuaccacaaaugcgauaacacgugcauggaaagugucaaaaaugggacuuaugacuacccaaaauacucagaggaagcaaaauuaaacagagaagaaauagaugggguaaagcuggaaucaacaaggauuuaccagauuuuggcgaucuauucaacugucgccaguucauugguacugguagucucccugggggcaaucaguuucuggaugugcucuaaugggucucuacaguguagaauauguauuuaa

SEQ ID NO: 36772 - RNA, 1701 nt, Artificial Sequence
  derived and/or modified CDS sequence (wt) from hemagglutinin__InfluenzaA__ADG21188
augaaggcaauacuaguaguucugcuauauacauuugcaaccgcaaaugcagacacauuauguauagguuaucaugcgaacaauucaacagacacuguagacacaguacuagaaaagaauguaacaguaacacacucuguuaaccuucuagaagacaagcauaacgggaaacuaugcaaacuaagagggguagccccauugcauuuggguaaauguaacauugcuggcuggauccugggaaauccagagugugaaucacucuccacagcaagcucaugguccuacauuguggaaacaucuaguucagacaauggaacguguuacccaggagauuucaucgauuaugaggagcuaagagagcaauugagcucagugucaucauuugaaagguuugagauauuccccaagacaaguucauggcccaaucaugacucgaacaaagguguaacggcagcauguccucaugcuggagcaaaaagcuucuacaaaaauuuaauauggcuaguuaaaaaaggaaauucauacccaaagcucaacaaauccuacauuaaugauaaagggaaagaaguccucgugcuauggggcauucaccauccaucuacuagugcugaccaacaaagucucuaucagaaugcagaugcauauguuuuuguggggacaucaagauacagcaagaaguucaagccggaaauagcaauaagacccaaagugagggaucaagaagggagaaugaacuauuacuggacacuaguagagccgggagacaaaauaacauucgaagcaacuggaaaucuagugguaccgagauaugcauucgcaauggaaagaaaugcuggaucugguauuaucauuucagauacaccaguccacgauugcaauacaacuugucagacacccaagggugcuauaaacaccagccucccauuucagaauauacauccgaucacaauuggaaaauguccaaaauauguaaaaagcacaaaauugagacuggccacaggauugaggaaugucccgucuauucaaucuagaggccuauuuggggccauugccgguuucauugaagggggguggacagggaugguagauggaugguacgguuaucaccaucaaaaugagcaggggucaggauaugcagccgaccugaagagcacacagaaugccauugacgagauuacuaacaaaguaaauucuguuauugaaaagaugaauacacaguucacagcaguagguaaagaguucaaccaccuggaaaaaagaauagagaauuuaaauaaaaagguugaugaugguuuccuggacauuuggacuuacaaugccgaacuguugguucuauuggaaaaugaaagaacuuuggacuaccacgauucaaaugugaagaacuuauaugaaaagguaagaagccaguuaaaaaacaaugccaaggaaauuggaaacggcugcuuugaauuuuaccacaaaugcgauaacacgugcauggaaagugucaaaaaugggacuuaugacuacccaaaauacucagaggaagcaaaauuaaacagagaagaaauagaugggguaaagcuggaaucaacaaggauuuaccagauuuuggcgaucuauucaacugucgccaguucauugguacugguagucucccugggggcaaucaguuucuggaugugcucuaaugggucucuacaguguagaauauguauuuaa

SEQ ID NO: 36773 - RNA, 1707 nt, Artificial Sequence
  derived and/or modified CDS sequence (wt) from hemagglutinin__InfluenzaA__ADG21402
auggagaaaauagugcuucuucuugcaauagucagucuuguuaaaagugaucagauuugcauugguuaccaugcaaacaacucgacagagcagguugacacaauaauggaaaagaacgucacuguuacacacgcccaagacauacuggaaaagacacacaacgggaaacucugcgaucuagauggagugaagccucuaauuuuaagagauuguaguguagcuggauggcuccucgggaacccaaugugugacgaauuccucaaugugccggaauggucuuacauaguggagaagaucaauccagccaaugaccucuguuacccagggaauuucaacgacuaugaagaacugaaacaccuauugagcagaauaaaccauuuugagaaaauucagaucauccccaaaaguucuuggucagaucaugaagccucaucaggagugagcucagcauguccauaccagggaagauccuccuuuuuuagaaaugugguauggcuuaucaaaaaggacaaugcauacccaacaauaaagagaaguuacaauaauaccaaccaagaagaucuuuugguacugugggggauucaccauccgaaugaugcggcagagcagacaaggcucuaucaaaacccaacuaccuauauuuccguugggacaucaacacuaaaccagagauugguaccaaaaauagcuacuagaucuaagguaaacgggcaaaguggaaggauggaguucuuuuggacaauuuuaaaaucgaaugaugcaauaaacuuugagaguaauggaaauuucauugcuccagaaaaugcauacaaaauugucaagaaaggggacucaacaauuaugaaaagugaguuggaauaugguaacugcaacaccaagugucaaacuccaauaggggcuauaaacuccaguaugccauuccacaacauccacccucucaccaucggggaaugccccaaauaugugaaaucaaacagauuaauccuugcuacugggcucagaaauagcccucaaggagagagaagaagaaaaaagagaggacuauuuggagcuauagcagguuuuauagagggaggauggcagggaaugguagaugguugguauggguaccaccauagcaacgagcaggggaguggguacgcugcagacaaagaauccacucaaaaggcaauagauggagucaccaauaaggucaacucgaucauugacaaaaugaacacucaguuugaggcuguuggaagggaauuuaauaacuuagaaaggagaauagaaaauuuaaacaagaagauggaagacggauuccuagaugucuggacuuauaaugcugaacuucugguucucauggaaaaugagagaacucuagacuuucaugacucaaaugucaagaaccuuuacgacaagguccgacuacagcuuagggauaaugcaaaggagcuugguaacgguuguuucgaguucuaucacagaugugauaaugaauguauggaaaguguaagaaacggaacauaugacuacccgcaguauucagaagaagcaagauuaaaaagagaggaaauaaguggaguaaaauuggaaucaauaggaacuuaccaaauacugucaauuuauucaacaguggcgagcucccuagcacuggcaaucaugguggcuggucuauuuuuauggaugugcuccaauggaucguuacaaugcagaauuugcauuuaa

SEQ ID NO: 36774 - RNA, 1704 nt, Artificial Sequence
  derived and/or modified CDS sequence (wt) from hemagglutinin__InfluenzaA__ADG21414
auggagaaaauagugcuucuucuugcaauagucaguauuguuaaaagugaucagauuugcauugguuaccaugcaaacaacucgacagagcauguugacacaauaauggaaaagaaugucacuguuacacacgcccaagacauacuggaaaagacacacaacgggaaacucugcaaucuagauggagugaagccucuaauuuuaagagauuguaguguagcuggauggcuccucgggaacccaaugugcgacgaauuccucaaugugccggaauggucuuacauaguggagaagaucaauccagccaaugaccucuguuauccagggaauuucaacgacuaugaagaacugaaacaccuauugagcagaauaaaccauuuugagaaaauucagaucauucccaaaaauucuuggucagaucaugaagccucaggagugagcucagcauguccauaccagggaagauccuccuuuuuuagaaaugugguauggcuuaccaaaaagaacaaugcauacccaacaauaaagaaaaguuacaauaauaccaaccaagaagaucuuuugguacuaugggggauucaccauccaaaugauggggcagagcagacaaggcuuuaucaaaacccaacuaccuauauuuccguugggacaucaacacuaaaccagagauugguaccaaaaauagcuacuagaucuaagguaaacgggcaaaguggaaggauggaguucuuuuggacaauuuuaaaaucgaaugaugcaauaaacuuugagaguaacggaaauuucauugcuccagaaaaugcauacaaaauugucaagaaaggggacucaacaauuaugaaaagugaguuggaauaugguaacugcaacaccaagugucagacuccaauaggggcgauaaacuccaguaugccauuccacaacauccacccucucaccaucggggaaugccccaaauaugugaaaucaaacagauuaguccuugcuacugggcucagaaauagcccucaaggagagagaagaagaaaaaagagaggacuauuuggagcuauagcagguuuuauagagggaggauggcagggaaugguagaugguugguauggguaccaccauagcaacgagcaggggaguggguacgcugcagacaaagaauccacucaaaaggcaauagauggagucaccaauaaggucaacucgaucauugacaaaaugaacacucaguuugaggcuguuggaagggaauuuaauaacuuagaaaggagaauagaaaauuuaaacaagaagauggaagacggauuccuagaugucuggacuuauaaugcugaacuucugguucucauggaaaaugagagaacucuagacuuucaugacucaaaugucaagaaccuuuaugacaagguccgacuacagcuuagggauaaugcaaaggagcuugguaacgguuguuuugaguucuaucacagaugugauaaugaauguauggaaaguguaagaaacggaacguaugacuacccgcaguauucagaagaagcaagauuaaaaagagaggaaauaaguggaguaaaauuggagucaauaggaacuuaccaaauacugucaauuuauucaacaguggcgagcucccuagcacuggcaaucaugguggcuggucuauuuuuauggaugugcuccaauggaucguuacaaugcagaauuugcauuuaa

SEQ ID NO: 36775 - RNA, 1704 nt, Artificial Sequence
  derived and/or modified CDS sequence (wt) from hemagglutinin__InfluenzaA__ADG21416
auggagaaaauagugcuucuucuugcaauagucaguauuguuaaaagugaucagauuugcauugguuaccaugcaaacaacucaacagagcagguugacacaauaauggaaaagaacgucacuguuacacacgcccaagacauacuggaaaagacacacaacgggaaacucugcaaucuagauggagugaagccucuaauuuuaagagauuguaguguagcuggauggcuccucgggaacccaaugugcgacgaauuccucaaugugccggaauggucuuacauaguggagaagaucaauccagccaaugaccucuguuauccagggaauuucaacgacuaugaagaacugaaacaccuauugagcagaauaaaccauuuugagaaaauucagaucauucccaaaaauucuuggucagaucaugaagccucaggagugagcucagcauguccauaccagggaagauccuccuuuuuuagaaaugugguauggcuuaccaaaaagaacaaugcauacccaacaauaaagaaaaguuacaauaauaccaaccaagaagaucuuuugguacuaugggggauucaccauccaaaugaugcggcagagcagacagggcuuuaucaaaacccaacuaccuauauuuccguugggacaucaacacuaaaccagagauugguaccaaaaauagcuacuagaucuaagguaaacgggcaaaguggaaggauggaguucuuuuggacaauuuuaaaaucgaaugauguaauaaacuuugagaguaauggaaauuucauugcuccagaaaaugcauacaaaauugucaagaaaggggacucaacaauuaugaaaagugaguuggaauaugguaacugcaacaccaagugucagacuccaauaggggcgauaaacuccaguaugccauuccacaacauccacccucucaccaucggggaaugccccaaauaugugaaaucaaacagauuaguccuugcuacugggcucagaaauagcccucaaggagagagaagaagaaaaaagagaggacuauuuggagcuauagcagguuuuauagagggaggauggcagggaaugguagaugguugguauggguaccaccacagcaacgagcaggggaguggguacgcugcagacaaagaauccacucaaaaggcaauagauggagucaccaauaaggucaacucgaucauugacaaaaugaacacucaguuugaggcuguuggaagggaauuuaauaacuuagaaaggagaauagaaaauuuaaacaagaagauggaagacggauuccuagaugucuggacuuauaaugcugaacuucugguucucauggaaaaugagagaacucuagacuuucaugacucaaaugucaagaaccuuuaugacaagguccgacuacagcuuagggauaaugcaaaggagcuugguaacgguuguuucgaguucuaucacagaugugauaaugaauguauggaaaguguaagaaacggaacguaugacuacccacaguauucagaagaagcaagauuaaaaagagaggaaauaaguggaguaaaauuggagucaauaggaacuuaccaaauacugucaauuuauucaacaguggcgagcucccuagcacuggcaaucaugguggcuggucuauuuuuauggaugugcuccaauggaucguuacaaugcagaauuugcauuuaa

SEQ ID NO: 36776 - RNA, 1704 nt, Artificial Sequence
  derived and/or modified CDS sequence (wt) from hemagglutinin__InfluenzaA__ADG21420
auggagaaaauagugcuucuucuugcaauagucaguauuguuaaaagugaucagauuugcauugguuaccaugcaaacaacucgacagagcagguugacacaauaauggaaaagaacgucacuguuacacaugcccaagacauacuggaaaagacacacaacgggaaacucugcaaucuagauggagugaagccucuaauuuuaagagauuguaguguagcuggauggcuccucgggaacccaaugugcgacgaauuccucaaugugccggaauggucuuacauaguggagaagaucaauccagccaaugaccucuguuauccagggaauuucaacgacuaugaagaacugaaacaccuauugagcagaauaaaccauuuugagaaaauucagaucauucccaaaaauucuuggucagaucaugaagccucaggagugagcucagcauguccauaccagggaagauccuccuuuuuuagaaaugugguauggcuuaccaaaaagaacaaugcauacccaacaauaaagaaaaguuacaauaauaccaaccaagaagaucuuuugguacuaugggggauucaccauccaaaugaugcggcagagcagacaaggcuuuaucaaaacccaacuaccuauauuuccguugggacaucaacacuaaaccagagauugguaccaaaaauagcuacuagaucuaagguaaacgggcaaaguggaaggauggaguucuuuuggacaauuuuaaaaucgaaugaugcaauaaacuuugagaguaauggaaauuucauugcuccagaaaaugcauacaaaauugucaagaaaggggacucaacaauuaugaaaagugaguuggaauaugguaacugcaacaccaagugucagacuccaauaggggcgauaaacuccaguaugccauuccacaacauccacccucucaccaucggggaaugccccaaauaugugaaaucaaacagauuaguccuugcuacugggcucagaaauagcccucaaggagagagaagaagaaaaaagagaggacuauuuggagcaauagcagguuuuauagagggaggauggcagggaaugguagaugguugguauggguaccaccauagcaacgagcaggggaguggguacgcugcagacaaagaauccacucaaaaggcaauagauggagucaccaauaaggucaacucgaucauugacaaaaugaacacucaguuugaggcuguuggaagggaauuuaauaacuuagaaaggagaauagaaaauuuaaacaagaagauggaagacggauuccuagaugucuggacuuauaaugcugaacuucugguucucauggaaaaugagagaacucuagacuuucaugacucaaaugucaagaaccuuuaugacaagguccgacuacagcuuagggauaaugcaaaggagcuugguaacgguuguuucgaguucuaucacagaugugauaaugaauguauggaaaguguaagaaacggaacguaugacuacccgcaguauucagaagaagcaagauuaaaaagagaggaaauaaguggaguaaaauuggagucaauaggaacuuaccaaauacugucaauuuauucaacaguggcgagcucccuagcacuggcaaucaugguggcuggucuauuuuuauggaugugcuccaauggaucguuacaaugcagaauuugcauuuaa

SEQ ID NO: 36777 - RNA, 1704 nt, Artificial Sequence
  derived and/or modified CDS sequence (wt) from hemagglutinin__InfluenzaA__ADG21422
auggagaaaauagugcuucuucuugcaauagucagucuuguuaaaagugaucagauuugcauugguuaccaugcaaacaacucgacagagcagguugacacaauaauggaaaagaacgucacuguuacacacgcccaagacauacuggaaaagacacacaaugggaaacucugcaaucuagauggagugaagccucuaauuuuaagagauuguaguguagccggauggcuccucgggaauccaaugugcgacgaguuccucaaugugccggaauggucuuacauaguggaaaagaucaauccaaccaaugaccucuguuauccagggaauuucaacgacuaugaagaacugaaacaccuauugagcagaauaaaccauuuugagaaaauucagaucauccccaaaaauucuuggucagaucaugaagccucaggagugagcucagcauguccauaccagggaagauccuccuuuuuuagaaaugugguauggcuuaccaaaaagaacaaugcauacccaacaauaaagagaaguuacaauaauaccaaccaagaagaucuuuugguacuaugggggauucaccauccaaaugaugcggcagagcagacaaggcuuuaucaaaacccaacuaccuauauuuccguugggacaucaacacuaaaccagagauugguaccaaaaauagcuacuagaucuaagguaaacgggcaaaguggaaggauggaauucuuuuggacaauuuuaaaaucgaaugaugcaauaaacuuugagaguaauggaaauuucauugcuccagaaaaugcauacaaaauugucaagaaaggggacucaacaauuaugaaaagugaguuggaauaugguaacugcaacaccaagugucagacuccaauaggggcgauaaacuccaguaugccauuccacaacauccacccucucaccaucggggaaugccccaaauaugugaaaucaaacagauuaguccuugcuacugggcucagaaauagcccucaaggagagagaagaagaaaaaagagaggacuauuuggagcuauagcagguuuuauagagggaggauggcagggaaugguagaugguugguauggguaccaccauagcaacgagcaggggaguggguacgcugcagacaaagaauccacucaaaaggcaauagauggagucaccaauaaggucaacucgaucauugacaaaaugaacacucaguuugaggcuguuggaagggaauuuaauaacuuagaaaggagaauagaaaauuuaaacaagaagauggaagacggauuccuagaugucuggacuuauaaugcugaacuucugguucucauggaaaaugagagaacucuagacuuucaugacucaaaugucaagaaucuuuacgacaagguccggcuacagcuuagggauaaugcaaaagagcuugguaacgguuguuucgaguucuaucacagaugugauaaugaauguauggaaaguguaagaaacggaacguaugacuacccgcaguauucagaagaagcaagaucaaaaagagaggaaauaaguggggugaaauuggagucaauaggaacuuaccaaauacugucaauuuauucaacaguggcgagcucccuagcacuggcaaucaugguggcuggucuauuuuuauggaugugcuccaauggaucauuacaaugcagaauuugcauuuaa

SEQ ID NO: 36778 - RNA, 1704 nt, Artificial Sequence
  derived and/or modified CDS sequence (wt) from hemagglutinin__InfluenzaA__ADG21425
auggagaaaauagugcuucuucuugcaauagucagucuuguuaaaagugaucagauuugcauugguuaccaugcaaacaacucgacagagcagguugacacaauaauggaaaagaacgucacuguuacacacgcccaagacauacuggaaaagacacacaacgggaaacucugcaaucuagauggagugaagccucuaauuuuaagagauuguaguguagccggauggcuccucgggaacccaaugugcgacgaauuccucaaugugccggaauggucuuacauaguggagaagaucaauccagccaaugaccucuguuauccagggaauuucaacgacuaugaagaacugaaacaccuauugagcagaauaaaccauuuugagaaaauucagaucauccccaaaaauucuuggucagaucauggagccucaggagugagcucagcauguccauaccagggaagauccuccuuuuuuagaaaugugguauggcuuaccaaaaagaacaaugcauacccaacaauaaagaaaaguuacaauaauaccaaccaagaagaucuuuugguacuaugggggauucaccauccaaaugaugcggaagagcagacaaggcuuuaucaaaacccaacuaccuauauuuccguugggacaucaacacuaaaccagagauugguaccaaaaauagcuacuagaucuaagguaaacgggcaaaguggaaggauggaauucuuuuggacaauuuuaaaaucgaaugaugcaauaaacuuugagagcaauggaaauuucauugcuccagaaaaugcauacaaaauugucaagaaaggggacucaacaauuaugaaaagugaguuggaauaugauaacugcaacaccaagugucagacuccaauaggggcgauaaacuccaguaugccauuccacaacauccacccucucaccaucggggaaugccccaaauaugugaaaucaaacaaauuaguccuugcuacugggcucagaaauagcccucaaggagagaaaagaagaaaaaagagaggacuauuuggagcuauagcagguuuuauagagggaggauggcagggaaugguagaugguugguauggguaccaccauagcaacgagcaggggaguggguacgcugcagacaaagaauccacucaaaaggcaauagauggagucaccaauaaggucaacucgaucauugacaaaaugaacacucaguuugaggcuguuggaagggaauuuaaugcuuuagaaaggagaauagaaaauuuaaacaagaagauggaagacggauuccuagaugucuggacuuauaaugcugaacuucugguucucauggaaaaugagagaacucuagacuuucaugacucaaaugucaagaaccuuuacgacaagguccgacuacagcuuagggauaaugcaaaggagcuuggcaacgguuguuucgaguucuaucacagaugugauaaugaauguauggaaaguguaagaaacggaacguaugacuacccgcaguauucagaagaagcaagauuaaaaagagaagaaauaaguggaguaaaauuggagucaauaggaacuuaccaaauauugucaauuuauucaacaguggcgagcucccuagcacuggcaaucaugguggcuggucuaucuuuauggauguguuccaauggaucguuacaaugcagaauuugcauuuaa

SEQ ID NO: 36779 - RNA, 1704 nt, Artificial Sequence
  derived and/or modified CDS sequence (wt) from hemagglutinin__InfluenzaA__ADG21429
auggagaaaauagugcuucuucuugcaauagucaguauuguuaaaagugaucagauuugcauugguuaccaugcaaacaacucaacagagcagguugacacaauaauggaaaagaacgucacuguuacacacgcccaagacauacuggaaaaaacacacaacgggaaacucugcaaucuagauggaguggagccucuaauuuuaagagauuguaguguagcuggauggcuccucgggaacccaaugugcgacgaauuccucaaugugccggaauggucuuacauaguggagaagaucaauccagccaaugaccucuguuauccagggaauuucaacgacuaugaagaacugaaacaccuauugagcagaauaaaccauuuugagaaaauucagaucauucccaaaaauucuuggucagaucaugaagccucaggagugagcucagcauguccauaccagggaagauccuccuuuuuuagaaaugugguauggcuuaccaaaaagaacaaugcauacccaacaauaaagaaaaguuacaauaauaccaaccaagaagaucuuuugguacuaugggggauucaccauccaaaugaugcggcagagcagacaaggcuuuaucaaaacccaacuaccuauauuuccguugggacaucaacacuaaaccagagauugguaccaaaaauagcuacuagaucuaagguaaacgggcaaaguggaaggauggaguucuuuuggacaauuuuaaaaucgaaugauguaauaaacuuugagaguaauggaaauuucauugcuccagaaaaugcauacaaaauugucaagaaaggggacucaacaauuaugaaaagugaguuggaauaugguaacugcaacaccaagugucagacuccaauaggggcgauaaacuccaguaugccauuccacaacauccacccucucaccaucggggaaugccccaaauaugugaaaucagacagacuaguccuugcuacugggcucagaaauagcccucaaggagagagaagaagaaaaaagagaggacuauuuggagcuauagcagguuuuauagagggaggauggcagggaaugguagaugguugguauggguaccaccauagcaacgagcaggggaguggguacgcugcagacaaagaauccacucaaaaggcaauagauggagucaccaauaaggucaacucgaucauugacaaaaugaacacucaguuugaggcuguuggaagggaauuuaauaacuuagaaaggagaauagaaaauuuaaacaagaagauggaagacggauuccuagaugucuggacuuauaaugcugaacuucugguucucauggaaaaugagagaacucuagacuuucaugacucaaaugucaagaaccuuuaugacaagguccgacuacagcuuagggauaaugcaaaggagcucgguaacgguuguuucgaguucuaucacagaugugauaaugaauguauggaaaguguaagaaacggaacguaugacuacccgcaguauucagaagaagcaagauuaaaaagagaggaaauaaguggaguaaaauuggagucaauaggaacuuaccaaauacugucaauuuauucaacaguggcgagcucccuagcacuggcaaucaugguggcuggucuacuuuuauggaugugcuccaauggaucguuacaaugcagaauuugcauuuaa

SEQ ID NO: 36780 - RNA, 1704 nt, Artificial Sequence
  derived and/or modified CDS sequence (wt) from hemagglutinin__InfluenzaA__ADG21437
auggagaaaauagugcuucuucuugcaauagucaguauuguuaaaagugaucagauuugcauugguuaccaugcaaacaacucaacagagcagguugacacaauaauggaaaagaacgucacuguuacacacgcccaagacauacuggaaaagacacacaacgggaaacucugcaaucuagauggagugaagccucuaauuuuaagagauuguaguguagcuggauggcuccucgggaacccaaugugcgacgaauuccucaaugugccggaauggucuuacauaguggagaagaucaauccagccaaugaccucuguuauccagggaauuucaacgacuaugaagaacugaaacaccuauugagcagaauaaaccauuuugagaaaauucagaucauucccaaaaauucuuggucagaucaugaagccucaggagugagcucagcauguccauaccagggaagauccuccuuuuuuagaaaugugguauggcuuacccaaaagaacaaugcauacccaacaauaaagaaaaguuacaauaauaccaaccaagaagaucuuuugguacuaugggggauucaccauccaaaugaugcggcagagcagacaaggcuuuaucaaaacccaacuaccuauauuuccguugggacaucaacacuaaaccagagauugguaccaaaaauagcuacuagaucuaaaguaaacgggcaaaguggaaggauggaguucuuuuggacaauuuuaaaaucgaaugauguaauaaacuuugagaguaauggaaauuucauugcuccagaaaaugcauacaaaauugucaagaaaggggacucaacaauuaugaaaagugaguuggaauaugguaacugcaacaccaagugucagacuccaauaggggcgauaaacuccaguaugccauuccacaacauccacccucucaccaucggggaaugccccaaauaugugaaaucaaacagauuaguccuugcuacugggcucagaaauagcccucaaggagagagaagaagaaaaaagagaggacuauuuggagcuauagcagguuuuauagagggaggauggcagggaaugguagaugguugguauggguaccaucauagcaacgagcaggggaguggguacgcugcagacaaagaauccacucaaaaggcaauagauggagucaccaauaaggucaacucgaucauugacaaaaugaacacucaguuugaggcuguuggaagggaauuuaauaacuuagaaaggagaauagaaaauuuaaacaagaagauggaagacggauuccuagaugucuggacuuauaaugcugaacuucugguucucauggaaaaugagagaacucuagacuuucaugacucaaaugucaagaaccuuuaugacaagguccgacuacagcuuagggauaaugcaaaggagcuugguaacgguuguuucgaguuuuaucacagaugugauaaugaauguauggaaaguguaagaaacggaacguaugacuacccgcaguauucagaagaagcaagauuaaaaagagaggaaauaaguggaguaaaauuggagucaauaggaacuuaccaaauacugucaauuuauucaacaguggcgagcucccuagcacuggcaaucaugguggcuggucuauuuuuauggaugugcuccaaugggucguuacaaugcagaauuugcauuuaa

SEQ ID NO: 36781 - RNA, 1704 nt, Artificial Sequence
  derived and/or modified CDS sequence (wt) from hemagglutinin__InfluenzaA__ADG21439
auggagaaaauagugcuucuucuugcaauagucaguauuguuaaaagugaucagauuugcauugguuaccaugcaaacaacucgacagagcagguugacacaauaauggaaaagaacgucacuguuacacacgcccaagacauacuggaaaagacacacaacgggaaacucugcaaucuagauggagugaagccucuaauuuuaagagauuguaguguagcuggauggcuccucgggaacccaaugugcgacgaauuccucaaugugccggaauggucuuacauaguggagaagaucaauccagccaaugaccucuguuauccagggaauuucaacgacuaugaagaacugaaacaccuauugagcagaauaaaccauuuugagaaaauucagaucauucccaaagguucuuggucagaucaugaagccucaggagugagcucagcauguccauaccagggaagauccuccuuuuuuagaaaugugguauggcuuaccaaaaagaacaaugcauacccaacaauaaagaaaaguuacaauaauaccaaccaagaagaucuuuugguacuaugggggauucaccauccaaaugaugcggcagagcagacaaggcuuuaucaaaacccaacuaccuauauuuccguugggacaucaacacuaaaccagagauugguaccccaaauagcuacuagaucuaagguaaacgggcaaaguggaaggauggaguucuuuuggacaauuuuaaaaucgaaugaugcaauaaacuuugagaguaauggaaauuucauugcuccagaaaaugcauacaaaauugucaagaaaggggacucaacaauuaugaaaagugaguuggaauaugguaacugcaacaccaagugucagacuccaauaggggcgauaaacuccaguaugccauuccacaacauccacccucucaccaucggggaaugccccaaauaugugaaaucaaacagauuaguccuugcuacugggcucagaaauagcccucaaggagagagaagaagaaaaaagagaggacuauuuggagcuauagcagguuuuauagagggaggauggcagggaaugguagaugguugguauggguaccaccauagcaacgagcaggggaguggguacgcugcagacaaagaauccacucaaaaggcaauagauggagucaccaauaaggucaacucgaucauugacaaaaugaacacucaguuugaggcuguuggaagggaauuuaauaacuuagaaaggagaauagaaaauuuaaacaagaagauggaagacggauuccuagaugucuggacuuauaaugcugaacuucugguucucauggaaaaugagagaacucuagacuuucaugacucaaaugucaagaaccuuuaugacaagguccgacuacagcuuagggauaaugcaaaggagcuugguaacgguuguuucgaguucuaucacagaugugauaaugaauguauggaaaguguaagaaacggaacguaugacuacccgcaguauucagaagaagcaagauuaaaaagagaggaaauaaguggaguaaaauuggagucaauaggaacuuaccaaauacugucaauuuauucaacaguggcgagcucccuagcacuggcaaucaugguggcuggucuauuuuuauggaugugcuccaauggaucgcuacaaugcagaauuugcauuuaa

SEQ ID NO: 36782 - RNA, 1704 nt, Artificial Sequence
  derived and/or modified CDS sequence (wt) from hemagglutinin__InfluenzaA__ADG21441
auggagaaaauagugcuucuucuugcaauagucaguauuguuaaaagugaucagauuugcauugguuaccaugcaaacaacucgacagagcaaguugacacaauaauggaaaagaacgucacuguuacacacgcccaagacauacuggaaaagacacacaacgggaaacucugcaaucuagauggagugaagccucuaauuuuaagagauuguaguguagcuggauggcuccucgggaacccaaugugcgacgaauuccucaaugugccggaauggucuuacauaguggagaagaucaauccauccaaugaccucuguuauccagggaauuucaacgacuaugaagaacugaaacaccuauugagcagaauaaaccauuuugagaaaauucagaucauucccaaaaauucuuggucagaucaugaagccucaggagugagcucagcauguccauaccagggaagauccuccuuuuuuagaaaugugguauggcuuaccaaaaagaacaaugcauacccaacaauaaagaaaaguuacaauaauaccaaccaagaagaucuuuugguacuaugggggauucaccauccaaaugaugaggcagagcagacaagucuuuaucaaaacccaacuaccuauauuuccguugggacaucaacacuaaaccagagauugguaccaaaaauagcuacuagaucuaagguaaaugggcaaaguggaaggauggaguucuuuuggacaauuuuaaaaucgaaugaugcaauaaacuuugagaguaauggaaauuucauugcuccagaaaaugcauacaaaauugucaagaaaggggacucaacaauuaugaaaagugaauuggaauauggcaacugcaacaccaagugucagacuccaauaggggcgauaaacuccaguaugccauuccacaacauccacccucucaccaucggggaaugccccaaauaugugaaaucaaacagauuaguccuugcuacugggcucagaaauagcccucaaggagagagaagaagaaaaaagagaggacuauuuggagcuauagcagguuuuauagagggcggauggcagggaaugguagaugguugguauggguaccaccauagcaacgagcaggggaguggguacgcugcagacaaagaauccacucaaaaggcaauagauggagucaccaauaaggucaacucgaucauugacaaaaugaacacucaguuugaggcuguuggaagggaauuuaauaacuuagaaaggagaauagaaaauuuaaacaagaagauggaagacggauuccuagaugucuggacuuauaaugcugaacuucugguucucauggaaaaugagagaacucuagacuuucaugacucaaaugucaagaaccuuuaugacaagguccgacuacagcuuagggauaaugcaaaggagcuugguaacgguugcuucgaguucuaucacagaugugauaaugaauguauggaaaguguaagaaacggaacguaugacuacccgcaguauucagaagaagcaagauuaaaaagagaggaaauaaguggaguaaaauuggagucaauaggaacuuaccaaauacugucaauuuauucaacaguggcgagcucccuagcacuggcaaucaugguggcuggucuauuuuuauggaugugcuccaauggaucguuacaaugcagaauuugcauuuaa

SEQ ID NO: 36783 - RNA, 1704 nt, Artificial Sequence
  derived and/or modified CDS sequence (wt) from hemagglutinin__InfluenzaA__ADG21443
auggagaaaauaguacuucuucuugcaauagucaguauuguuaaaagugaucagauuugcauugguuaccaugcaaacaacucgacagagcagguugacacaauaauggaaaagaacgucacuguuacacacgcccaagacauacuggaaaagacacacaacgggaaacucugcaaucuagauggagugaagccucuaauuuuaagagauuguaguguagcuggauggcuccuagggaacccaaugugcgacgaauuccucaaugugccggaauggucuuacauaguggagaagaucaauccaaccaaugaccucuguuauccagggaauuucaacgacuaugaagaacugaaacaccuauugagcagaauaaaccauuuugagaaaauucagaucauucccaaaaauucuuggucagaucaugaagccucaggagugagcucagcauguccauaccagggaagauccuccuuuuuuagaaaugugguauggcuuaccaaaaagaacaaugcauacccaacaauaaagaaaaguuacaauaauaccaaccaagaagaucuuuugguauuaugggggauucaccauccaaaugaugcggcagagcagacaaggcuuuaucaaaacccaacuaccuauauuuccguugggacaucaacacuaaaccagagauugguacccaaaauagcuacuagaucuaagguaaacgggcaaaguggaaggauggaguucuuuuggacaauuuuaaaaucgaaugaugcaauaaacuuugagaguaauggaaauuucauugcuccagaaaaugcauacaaaauugucaagaaaggggacucaacaauuaugaaaagugaguuggaauaugguaacugcaacaccaagugucagacuccaauaggggcgauaaacuccaguaugccauuccacaacauccacccucucaccaucggggaaugccccaaauaugugaaaucaaacagauuaguccuugcuacugggcucagaaauagcccucaaggagagagaagaagaaaaaagagaggacuauuuggagcuauagcagguuuuauagagggaggauggcagggaaugguagaugguugguauggguaccaccauagcaacgagcaggggaguggguacgcugcagacaaagaauccacucaaaaggcaauagauggagucaccaauaaggucaacucgaucauugacaaaaugaacacucaguuugaggcuguugggagggaauuuaauaacuuagaaaggagaauagaaaauuuaaacaagaagauggaagacggauuccuagaugucuggacuuauaaugcugaacuucugguucucauggaaaaugagagaacucuagacuuucaugacucaaaugucaagaaccuuuaugacaagguccgacuacagcuuagggauaaugcaaaggagcuugguaacgguuguuucgaguucuaucacagaugugauaaugaauguauggaaaguguaagaaacgguacguaugacuacccgcaguauucagaagaagcaagauuaaaaagagaggaaauaaguggaguaaaauuggagucaauaggaacuuaccaaauacugucaauuuauucaacaguggcgagcucccuagcacuggcaaucaugguggcuggucuauuuuuauggaugugcuccaauggaucgcuacaaugcagaauuugcauuuaa

SEQ ID NO: 36784 - RNA, 1704 nt, Artificial Sequence
  derived and/or modified CDS sequence (wt) from hemagglutinin__InfluenzaA__ADG21445
auggagaaaauagugcuucuucuugcaauagucaguauuguuaaaagugaucagauuugcauugguuaccaugcaaacaacucgacagagcaaguugacacaauaauggaaaagaacgucacuguuacacacgcccaagacauacuggaaaagacacacaacgggaaacucugcaaucuagauggagugaagccucuaauuuuaagagauuguaguguagcuggauggcuccucgggaacccaaugugcgacgaauuccucaaugugccggaauggucuuacauaguggagaagaucaauccauccaaugaccucuguuauccagggaauuucaacgacuaugaagaacugaaacaccuauugagcagaauaaaccauuuugagaaaauucagaucauucccaaaaauucuuggucagaucaugaagccucaggagugagcucagcauguccauaccagggaagauccuccuuuuuuagaaaugugguauggcuuaccaaaaagaacaaugcauacccaacaauaaagaaaaguuacaauaauaccaaccaagaagaucuuuugguacuaugggggauucaccauccaaaugaugaggcagagcagacaaggcuuuaucaaaacccaacuaccuauauuuccguugggacaucaacacuaaaccagagauugguaccaaaaauagcuacuagaucuaagguaaacgggcaaaguggaaggauggaguucuuuuggacaauuuuaaaaucgaaugaugcaauaaacuuugagaguaauggaaauuucauugcuccagaaaaugcauacaaaauugucaagaaaggggacucaacaauuaugaaaagugaauuggaauauggcaacugcaacaccaagugucagacuccaauaggggcgauaaacuccaguaugccauuccacaacauccacccucucaccaucggggaaugccccaaauaugugaaaucaaacagauuaguccuugcuacugggcucagaaauagcccucaaggagagagaagaagaaaaaagagaggacuauuuggagcuauagcagguuuuauagagggcggauggcagggaaugguagaugguugguauggguaccaccauagcaacgagcaggggaguggguacgcugcagacaaagaauccacucaaaaggcaauagauggagucaccaauaaggucaacucgaucauugacaaaaugaacacucaguuugaggcuguuggaagggaauuuaauaacuuagaaaggagaauagaaaauuuaaacaagaagauggaagacggauuccuagaugucuggacuuauaaugcugaacuucugguucucauggaaaaugagagaacucuagacuuucaugacucaaaugucaagaaccuuuaugacaagguccgacuacagcuuagggauaaugcaaaggagcuugguaacgguuguuucgaguucuaucacagaugugauaaugaauguauggaaaguguaagaaacggaacguaugacuacccgcaguauucagaagaagcaagauuaaaaagagaggaaauaaguggaguaaaauuggagucaauaggaacuuaccaaauacugucaauuuauucaacaguggcgagcucccuagcacuggcaaucaugguggcuggucuauuuuuauggaugugcuccaauggaucguuacaaugcagaauuugcauuuaa

SEQ ID NO: 36785 - RNA, 1701 nt, Artificial Sequence
  derived and/or modified CDS sequence (wt) from hemagglutinin__InfluenzaA__ADG21912
auggaggcaauacuaguaguucugcuauauacauuugcaaccgcaaaugcagacacauuauguauagguuaucaugcgaacaauucaacagacacuguagacacaguacuagaaaagaauguaacaguaacacacucuguuaaccuucuagaagacaagcauaacgggaaacuaugcaaacuaagagggguagccccauugcauuuggguaaauguaacauugcuggcuggauccugggaaauccagagugugaaucacucuccacagcaagcucaugguccuacauuguggaaacaucuaguucagacaauggaacguguuacccaggagauuucaucgauuaugaggagcuaagagagcaauugagcucagugucaucauuugaaagguuugagauauuccccaagacaaguucauggcccaaucaugacucgaacaaagguguaacggcagcauguccucaugcuggagcaaaaagcuucuacaaaaauuuaauauggcuaguuaaaaaaggaaauucauacccaaagcucagcaaauccuacauuaaugauaaagggaaagaaguccucgugcuauggggcauucaccauccaucuacuagugcugaccaacaaagucucuaucagaaugcagaugcauauguuuuuguggggucaucaagauacagcaagaaguucaagccggaaauagcaauaagacccaaagugagggaucaagaagggagaaugaacuauuacuggacacuaguagagccgggagacaaaauaacauucgaagcaacuggaaaucuagugguaccgagauaugcauucgcaauggaaagaaaugcuggaucugguauuaucauuucagauacaccaguccacgauugcaauacaacuugucagacacccaagggugcuauaaacaccagccucccauuucauaauauacauccgaucacaauuggaaaauguccaaaauauguaaaaagcacaaaauugagacuggccacaggauugaggaaugucccgucuauucaaucuagaggccuauuuggggccauugccgguuucauugaagggggguggacagggaugguggauggaugguacgguuaucaccaucaaaaugagcaggggucaggauaugcagccgaccugaagagcacacagaaugccauugacgagauuacuaacaaaguaaauucuguuauugaaaagaugaauacacaguucacagcaguagguaaagaguucaaccaccuggaaaaaagaauagagaauuuaaauaaaaaaguugaugaugguuuccuggacauuuggacuuacaaugccgaacuguugguucuauuggaaaaugaaagaacuuuggacuaccacgauucaaaugugaagaacuuauaugaaaagguaagaagccaguuaaaaaacaaugccaaggaaauuggaaacggcugcuuugaauuuuaccacaaaugcgauaacacgugcauggaaagugucaaaaaugggacuuaugacuacccaaaauacucagaggaagcaaaauuaaacagagaagaaauagaugggguaaagcuggaaucaacaaggauuuaccagauuuuggcgaucuauucaacugucgccaguucauugguacugguagucucccugggggcaaucaguuucuggaugugcucuaaugggucucuacaguguagaauauguauuuaa

SEQ ID NO: 36786 - RNA, 1701 nt, Artificial Sequence
  derived and/or modified CDS sequence (wt) from hemagglutinin__InfluenzaA__ADG21913
augaaggcaauacuaguaguucugcuauauacauuugcaaccgcaaaugcagacacauuauguauagguuaucaugcgaacaauucaacagacacuguagacacaguacuagaaaagaauguaacaguaacacacucuguuaaccuucuagaagacaagcauaacgggaaacuaugcaaacuaagagggguagccccauugcauuuggguaaauguaacauugcuggcuggauccugggaaauccagagugugaaucacucuccacagcaagcucaugguccuacauuguggaaacaucuaguucagacaauggaacguguuacccaggagauuucaucgauuaugaggagcuaagagagcaauugagcucagugucaucauuugaaagguuugagauauuccccaagacaaguucauggcccaaucaugacucgaacaaagguguaacggcagcauguccucaugcuggagcaaaaagcuucuacaaaaauuuaauauggcuaguuaaaaaaggaaauucauacccaaagcucagcaaauccuacauuaaugauaaagggaaagaaguccucgugcuauggggcauucaccauccaucuacuagugcugaccaacaaagucucuaucagaaugcagaugcauauguuuuuguggggacaucaagauacagcaagaaguucaagccggaaauagcaauaagacccaaagugagggaucaagaagggagaaugaacuauuacuggacacuaguagagccgggagacaaaauaacauucgaagcaacuggaaaucuagugguaccgagauaugcauucgcaauggaaagaaaugcuggaucugguauuaucauuucagauacaccaguccacgauugcaauacaacuugucagacacccaagggugcgauaaacaccagccuaccauuucagaauauacauccgaucacaauuggaaaauguccaaaauauguaaaaagcacaaaauugagacuggccacaggauugaggaaugucccgucuauucaaucuagaggccuauuuggggccauugccgguuucauugaagggggguggacagggaugguagauggaugguacgguuaucaccaucaaaaugagcaggggucaggauaugcagccgaccugaagagcacacagaaugccauugacgagauuacuaacaaaguaaauucuguuauugaaaagaugaauacacaguucacagcaguagguaaagaguucaaccaccuggaaaaaagaauagagaauuuaaauaaaaaaguugaugaugguuuccuggacauuuggacuuacaaugccgaacuguugguucuauuggaaaaugaaagaacuuuggacuaccacgauucaaaugugaagaacuuauaugaaaagguaagaagccaguuaaaaaacaaugccaaggaaauuggaaacggcugcuuugaauuuuaccacaaaugugauaacacgugcauggaaagugucaaaaaugggacuuaugacuacccaaaauacucagaggaagcaaaauuaaacagagaagaaauagaugggguaaagcuggaaucaacaaggauuuaccagauuuuggcgaucuauucaacugucgccaguucauugguacugguagucucccugggggcaaucaguuucuggaugugcucuaaugggucucuacaguguagaauauguauuuaa

SEQ ID NO: 36787 - RNA, 1701 nt, Artificial Sequence
  derived and/or modified CDS sequence (wt) from hemagglutinin__InfluenzaA__ADG21914
augaaggcaauaauaguaguucugcuauauacauuugcaaccgcaaaugcagacacauuauguauagguuaucaugcgaacaauucaacagacacuguagacacaguacuagaaaagaauguaacaguaacacacucuguuaaccuucuagaagacaagcauaacggaaaacuaugcaaacuaagagggguagccccauugcauuuggguaaauguaacauugcuggcuggauccugggaaauccagagugugaaucacucuccacagcaagcucaugguccuacauuguggaaacaucuaguucagacaauggaacguguuacccaggagauuucaucgauuaugaggagcuaagagagcaauugagcucagugucaucauuugaaagguuugagauauuccccaagacaaguucauggcccaaucaugacucgaacaaagguguaacggcagcauguccucaugcuggagcaaaaagcuucuacaaaaauuuaauauggcuaguuaaaaaaggaaauucauacccaaagcucagcaaauccuacauuaaugauaaagggaaagaaguccucgugcuauggggcauucaccauccaucuacuagugcugaccaacaaagucucuaucagaaugcagaugcauauguuuuuguggggacaucaagauacagcaagaaguucaagccggaaauagcaauaagacccaaagugagggaucaagaagggagaaugaacuauuacuggacacuaguagagccgggagacaaaauaacauucgaagcaacuggaaaucuagugguaccgagauaugcauucgcaauggaaagaaaugcuggaucugguauuaucauuucagauacaccaguccacgauugcaauacaacuugucagacacccaagggugcgauaaacaccagccuaccauuucagaauauacauccgaucacaauuggaaaauguccaaaauauguaaaaagcacaaaauugagacuggccacaggauugaggaaugucccgucuauucaaucuagaggccuauuuggggccauugccgguuucauugaagggggguggacagggaugguagauggaugguacgguuaucaccaucaaaaugagcaggggucaggauaugcagccgaccugaagagcacacagaaugccauugacgagauuacuaacaaaguaaauucuguuauugaaaagaugaauacacaguucacagcaguagguaaagaguucaaccaccuggaaaaaagaauagagaauuuaaauaaaaaaguugaugaugguuuccuggacauuuggacuuacaaugccgaacuguugguucuauuggaaaaugaaagaacuuuggacuaccacgauucaaaugugaagaacuuauaugaaaagguaagaagccaguuaaaaaacaaugccaaggaaauuggaaacggcugcuuugaauuuuaccacaaaugcgauaacacgugcauggaaagugucaaaaaugggacuuaugacuacccaaaauacucagaggaagcaaaauuaaacagagaagaaauagaugggguaaagcuggaaucaacaaggauuuaccagauuuuggcgaucuauucaacugucgccaguucauugguacugguagucucccugggggcaaucaguuucuggaugugcucuaaugggucucuacaguguagaauauguauuuaa

SEQ ID NO: 36788 - RNA, 1701 nt, Artificial Sequence
  derived and/or modified CDS sequence (wt) from hemagglutinin__InfluenzaA__ADG21915
auggaggcaauacuaguaguucugcuauauacauuugcaaccgcaaaugcagacacauuauguauagguuaucaugcgaacaauucaacagacacuguagacacaguacuagaaaagaaugugacaguaacacacucuguuaacauucuagaagacaagcauaacgggaaacuaugcaaacuaagagggguagccccauugcauuuggguaaauguaacauugcuggcuggauccugggaaauccagagugugaaucacucuccacagcaagcucaugguccuacauuguggaaacaucuaguucagacaauggaacguguuacccaggagauuucaucgauuaugaggagcuaagagagcaauugagcucagugucaucauuugaaagguuugagauauuccccaagacaaguucauggcccaaucaugacucgaacaaagguguaacggcagcauguccucaugcuggagcaaaaagcuucuacaaaaauuuaauauggcuaguuaaaaaaggaaauucauacccaaagcucagcaaauccuacauuaaugauaaagggaaagaaguccucgugcuauggggcauucaccauccaucuacuagugcugaccaacaaagucucuaucagaaugcagaugcauauguuuuuguggggucaucaagauacagcaagaaguucaagccagaaauagcaauaagacccaaagugagggaucaagaagggagaaugaacuauuacuggacacuaguagagccgggagacaaaauaacauucgaagcaacuggaaaucuagugguaccgagauaugcauucgcaauagaaagaaaugcuggaucugguauuaucauuucagauacaccaguccacgauugcaauacaacuugucagacacccaagggugcuauaaacaccagccucccauuucauaauauacauccgaucacaauuggaaaauguccaaaauauguaaaaagcacaaaauugagacuggccacaggauugagaaaugucccgucuauucaaucuagaggccuauuuggggccauugccgguuucauugaagggggguggacagggaugguggauggaugguacgguuaucaccaucaaaaugagcaggggucaggauaugcagccgaccugaagagcacacagaaugccauugacgagauuacuaacaaaguaaauucuguuauugaaaagaugaauacacaguucacagcaguagguaaagaguucaaccaccuggaaaaaagaauagagaauuuaaauaaaaaaguugaugaugguuuccuggacauuuggacuuacaaugccgaacuguugguucuauuggaaaaugaaagaacuuuggacuaccacgauucaaaugugaagaacuuauaugaaaagguaagaagccaguuaaaaaacaaugccaaggaaauuggaaacggcugcuuugaauuuuaccacaaaugcgauaacacgugcauggaaagugucaaaaaugggacuuaugacuacccaaaauacucagaggaagcaaaauuaaacagagaagaaauagaugggguaaagcuggaaucaacaaggauuuaccagauuuuggcgaucuauucaacugucgccaguucauugguacugguagucucccugggggcaaucaguuucuggaugugcucuaaugggucucuacaguguagaauauguauuuaa

SEQ ID NO: 36789 - RNA, 1701 nt, Artificial Sequence
  derived and/or modified CDS sequence (wt) from hemagglutinin__InfluenzaA__ADG21916
auggaggcaauacuaguaguucugcuauauacauuugcaaccgcaaaugcagacacauuauguauagguuaucaugcgaacaauucaacagacacuguagacacaguacuagaaaagaauguaacaguaacacacucuguuaaccuucuagaagacaagcauaacgggaaacuaugcaaacuaagagggguagccccauugcauuuggguaaauguaacauugcuggcuggauccugggaaauccagagugugaaucacucuccacagcaagcucaugguccuacauuguggaaacaucuaguucagacaauggaacguguuacccaggagauuucaucgauuaugaggagcuaagagagcaauugagcucagugucaucauuugaaagguuugagauauuccccaagacaaguucauggcccaaucaugacucgaacaaagguguaacggcagcauguccucaugcuggagcaaaaagcuucuacaaaaauuuaauauggcuaguuaaaaaagggaauucauacccaaagcucagcaaauccuacauuaaugauaaagggaaagaaguccucgugcuauggggcauucaccauccaucuacuagugcugaccaacaaagucucuaucagaaugcagaugcauauguuuuuguggggucaucaagauacagcaagaaguucaagccggaaauagcaauaagacccaaagugagggaucaagaagggagaaugaacuauuacuggacacuaguagagccgggagacaaaauaacauucgaagcaacuggaaaucuagugguaccgagauaugcauucgcaauggaaagaaaugcuggaucugguauuaucauuucagauacaccaguccacgauugcaauacaacuugucagacacccaagggugcuauaaacaccagccucccauuucauaauauacauccgaucacaauuggaaaauguccaaaauauguaaaaagcacaaaauugagacuggccacaggauugaggaaugucccgucuauucaaucuagaggccuauuuggggccauugccgguuucauugaagggggguggacagggaugguggauggaugguacgguuaucaccaucaaaaugagcaggggucaggauaugcagccgaccugaagagcacacagaaugccauugacgagauuacuaacaaaguaaauucuguuauugaaaagaugaauacacaguucacagcaguagguaaagaguucaaccaccuggaaaaaagaauagagaauuuaaauaaaaaaguugaugaugguuuccuggacauuuggacuuacaaugccgaacuguugguucuauuggaaaaugaaagaacuuuggacuaccacgauucaaaugugaagaacuuauaugaaaagguaagaagccaguuaaaaaacaaugccaaggaaauuggaaacggcugcuuugaauuuuaccacaaaugcgauaacacgugcauggaaagugucaaaaaugggacuuaugacuacccaaaauacucagaggaagcaaaauuaaacagagaagaaauagaugggguaaagcuggaaucaacaaggauuuaccagauuuuggcgaucuauucaacugucgccaguucauugguacugguagucucccugggggcaaucaguuucuggaugugcucuaaugggucucuacaguguagaauauguauuuaa

SEQ ID NO: 36790 - RNA, 1701 nt, Artificial Sequence
  derived and/or modified CDS sequence (wt) from hemagglutinin__InfluenzaA__ADG21917
augaaggcaauacuaguaguucugcuauauacauuugcaaccgcaaaugcagacacauuauguauagguuaucaugcgaacaauucaacagacacuguagacacaguacuagaaaagaauguaacaguaacacacucuguuaaccuucuagaagacaagcauaacgggaaacuaugcaaacuaagagggguagccccauugcauuuggguaaauguaacauugcuggcuggauccugggaaauccagagugugaaucacucuccacagcaagcucaugguccuacauuguggaaacaucuaguucagacaauggaacguguuacccaggagauuucaucgauuaugaggagcuaagagagcaauugagcucugugucaucauuugaaagguuugagauauuccccaagacaaguucauggcccaaucaugacucgaacaaagguguaacggcagcauguccucaugcuggagcaaaaagcuucuacaaaaauuuaauauggcuaguuaaaaaaggaaauucauacccaaagcucagcaaauccuacauuaaugauaaagggaaagaaguccucgugcuauggggcauucaccauccaucuacuagugcugaccaacaaagucucuaucagaaugcagaugcauauguuuuuguggggacaucaagauacagcaagaaguucaagccagaaauagcaauaagacccaaagugagggaucaagaagggagaaugaacuauuacuggacacuaguagagccgggagacaaaauaacauucgaagcaacuggaaaucuagugguaccgagauaugcauucgcaauggaaagaaaugcuggaucugguauuaucauuucagauacaccaguccacgauugcaauacaacuugucagacacccaagggugcuauaaacaccagccucccauuucagaauauacauccgaucacaauuggaaaauguccaaaauauguaaaaagcacaaaauugagacuggccacaggauugaggaaugucccgucuauucaaucuagaggccuauuuggggccauugccgguuucauugaagggggguggacagggaugguagauggaugguacgguuaucaccaucaaaaugagcaggggucaggauaugcagccgaccugaagagcacacagaaugccauugacgagauuacuaacaaaguaaauucuguuauugaaaagaugaauacacaguucacagcaguagguaaagaguucaaccaccuggaaaaaagaauagagaauuuaaauaaaaaaguugaugaugguuuccuggacauuuggacuuacaaugccgaacuguugguucuauuggaaaaugaaagaacuuuggacuaccacgauucaaaugugaagaacuuauaugaaaagguaagaagccaguuaaaaaacaaugccaaggaaauuggaaacggcugcuuugaauuuuaccacaaaugcgauaacacgugcauggaaagugucaaaaaugggacuuaugacuacccaaaauacucagaggaagcaaaauuaaacagagaagaaauagaugggguaaagcuggaaucaacaaggauuuaccagauuuuggcgaucuauucaacugucgccaguucauugguacugguagucucccugggggcaaucaguuucuggaugugcucuaaugggucucuacaguguagaauauguauuuaa

SEQ ID NO: 36791 - RNA, 1701 nt, Artificial Sequence; identical to SEQ ID NO: 36181
  derived and/or modified CDS sequence (wt) from hemagglutinin__InfluenzaA__ADG21918

SEQ ID NO: 36792 - RNA, 1701 nt, Artificial Sequence
  derived and/or modified CDS sequence (wt) from hemagglutinin__InfluenzaA__ADG21919
augaaggcaauacuaguaguucugcuauauacauuugcaaccgcaaaugcagacacauuauguauagguuaucaugcgaacaauucaacagacacuguagacacaguacuagaaaagaauguaacaguaacacacucuguuaaccuucuagaagacaagcauaacgggaaacuaugcaaacuaagagggguaaccccauugcauuuggguaaauguaacauugcuggcuggauccugggaaauccagagugugaaucacucuccacagcaagcucaugguccuacauuguggaaacaucuaguucagacaauggaacguguuacccaggagauuucaucgauuaugaggagcuaagagagcaauugagcucagugucaucauuugaaagguuugagauauuccccaagacaaguucauggcccaaucaugacucgaacaaagguguaacggcagcauguccucaugcuggagcaaaaagcuucuacaaaaauuuaauauggcuaguuaaaaaaggaaauucauacccaaagcucagcaaauccuacauuaaugauaaagggaaagaaguccucgugcuauggggcauucaccauccaucuacuagugcugaccaacaaagucucuaucagaaugcagaugcauauguuuuuguggggacaucaagauacagcaagaaguucaagccggaaauagcaauaagacccaaagugagggaucaagaagggagaaugaacuauuacuggacacuaguagagccgggagacaaaauaacauucgaagcaacuggaaaucuagugguaccgagauaugcauucgcaauggaaagaaaugcuggaucugguauuaucauuucagauacaccaguccacgauugcaauacaacuugucagacacccaagggugcuauaaacaccagccucccauuucagaauauacauccgaucacaauuggaaaauguccaaaauauguaaaaagcacaaaauugagacuggccacaggauugaggaaugucccgucuauucaaucuagaggccuauuuggggccauugccgguuucauugaagggggguggacagggaugguagauggaugguacgguuaucaccaucaaaaugagcaggggucaggauaugcagccgaccugaagagcacacagaaugccauugacgagauuacuaacaaaguaaauucuguuauugaaaagaugaauacacaguucacagcaguagguaaagaguucaaccaccuggaaaaaagaauagagaauuuaaauaaaaaaauugaugaugguuuccuggacauuuggacuuacaaugccgaacuguugguucuauuggaaaaugaaagaacuuuggacuaccacgauucaaaugugaagaacuuauaugaaaagguaagaagccaguuaaaaaacaaugccaaggaaauuggaaacggcugcuuugaauuuuaccacaaaugcgauaacacgugcauggaaagugucaaaaaugggacuuaugacuacccaaaauacucagaggaagcaaaauuaaacagagaagaaauagaugggguaaagcuggaaucaacaaggauuuaccagauuuuggcgaucuauucaacugucgccaguucauugguacugguagucucccugggggcaaucaguuucuggaugugcucuaaugggucucuacaguguagaauauguauuuaa

SEQ ID NO: 36793 - RNA, 1701 nt, Artificial Sequence
  derived and/or modified CDS sequence (wt) from hemagglutinin__InfluenzaA__ADG21921
auggaggcaauacuaguaguucugcuauauacauuugcaaccgcaaaugcagacacauuauguauagguuaucaugcgaacaauucaacagacacuguagacacaguacuagaaaagaauguaacaguaacacacucuguuaaccuucuagaagacaagcauaacgggaaacuaugcaaacuaagagggguagccccauugcauuuggguaaauguaacauugcuggcuggauccugggaaauccagagugugaaucacucuccacagcaagcucaugguccuacauuguggaaacaucuaguucagacaauggaacguguuacccaggagauuucaucgauuaugaggagcuaagagagcaauugagcucagugucaucauuugaaagguuugagauauuccccaagacaaguucauggcccaaucaugacucgaacaaagguguaacggcagcauguccucaugcuggagcaaaaagcuucuacaaaaauuuaauauggcuaguuaaaaaaggaaauucauacccaaagcucagcaaauccuacauuaaugauaaagggaaagaaguccucguguuauggggcauucaccauccaucuacuagugcugaccaacaaagucucuaucagaaugcagaugcauauguuuuuguggggucaucaagauacagcaagaaguucaagccggaaauagcaauaagacccaaagugagggaucaagaagggagaaugaacuauuacuggacacuaguagagccgggagacaaaauaacauucgaagcaacuggaaaucuagugguaccgagauaugcauucgcaauggaaagaaaugcuggaucugguauuaucauuucagauacaccaguccacgauugcaauacaacuugucagacacccaagggugcuauaaacaccagccucccauuucauaauauacauccgaucacaauuggaaaauguccaaaauauguaaaaagcacaaaauugagacuggccacaggauugaggaaugucccgucuauucaaucuagaggccuauuuggggccauugccgguuucauugaagggggguggacagggaugguggauggaugguacgguuaucaccaucaaaaugagcaggggucaggauaugcagccgaccugaagagcacacagaaugccauugacgagauuacuaacaaaguaaauucuguuauugaaaagaugaauacacaguucacagcaguagguaaagaguucaaccaccuggaaaaaagaauagagaauuuaaauaaaaaaguugaugaugguuuccuggacauuuggacuuacaaugccgaacuguugguucuauuggaaaaugaaagaacuuuggacuaccacgauucaaaugugaagaacuuauaugaaaagguaagaagccaguuaaaaaacaaugccaaggaaauuggaaacggcugcuuugaauuuuaccacaaaugcgauaacacgugcauggaaagugucaaaaaugggacuuaugacuacccaaaauacucagaggaagcaaaauuaaacagagaagaaauagaugggguaaagcuggaaucaacaaggauuuaccagauuuuggcgaucuauucaacugucgccaguucauugguacugguagucucccugggggcaaucaguuucuggaugugcucuaaugggucucuacaguguagaauauguauuuga

SEQ ID NO: 36794 - RNA, 1701 nt, Artificial Sequence
  derived and/or modified CDS sequence (wt) from hemagglutinin__InfluenzaA__ADG21922
augaaggcaauacuaguaguucugcuauauacauuugcaaccgcaaaugcagacacauuauguauagguuaucaugcgaacaauucaacagacacuguagacacaguacuagaaaagaauguaacaguaacacacucuguuaaccuucuagaagacaagcauaacgggaaacuaugcaaacuaagagggguagccccauugcauuuggguaaauguaacauugcuggcuggauccugggaaauccagagugugaaucacucuccacagcaagcucaugguccuacauuguggaaacaucuaguucagacaauggaacguguuacccaggagauuucaucgauuaugaggagcuaagagagcaauugagcucagugucaucauuugaaagguuugagauauuccccaagacaaguucauggcccaaucaugacucgaacaaagguguaacggcagcauguccucaugcuggagcaaaaagcuucuacaaaaauuuaauauggcuaguuaaaaaaggaaauucauacccaaagcucagcaaauccuacauuaaugauaaagggaaagaaguccucgugcuauggggcauucaccauccaucuacuagugcugaccaacaaagucucuaucagaaugcagaugcauauguuuuuguggggacaucaagauacagcaagaaguucaagccggaaauagcaauaagacccaaagugagggaucaagaagggagaaugaacuauuacuggacacuaguagagccgggagacaaaauaacauucgaagcaacuggaaaucuagugguaccgagauaugcauucgcaauggaaagaaaugcuggaucugguauuaucauuucagauacaccaguccacgauugcaauacaacuugucagacacccaagggugcuauaaacaccagccucccauuucagaauauacauccgaucacaauuggaaaauguccaaaauauguaaaaagcacaaaauugagacuggccacaggauugaggaaugucccgucuauucaaucuagaggccuauuuggggccauugccgguuucauugaagggggguggacagggaugguagauggaugguacgguuaucaccaucaaaaugagcaggggucaggauaugcagccgaccugaagagcacacagaaugccauugacgagauuacuaacaaaguaaauucuguuauugaaaagaugaauacacaguucacagcaguagguaaagaguucaaccaccuggaaaaaagaauagagaauuuaaauaaaaaaguugaugaugguuuccuggacauuuggacuuacaaugccgaacuguugguucuauuggaaaaugaaagaacuuuggacuaccacgauucaaaugugaagaacuuauaugaaaagguaagaagccaguuaaaaaacaaugccaaggaaauuggaaacggcugcuuugaauuuuaccacaaaugcgauaacacgugcauggaaagugucaaaaaugggacuuaugacuacccaaaauacucagaggaagcaaaauuaaacagagaagaaauagaugggguaaagcuggaaucaacaaggauuuaccagauuuuggcgaucuauucaacugucgccaguucauugguacugguagucucccugggggcaaucagcuucuggaugugcucuaaugggucucuacaguguagaauauguauuuaa

SEQ ID NO: 36795 - RNA, 1701 nt, Artificial Sequence
  derived and/or modified CDS sequence (wt) from hemagglutinin__InfluenzaA__ADG21923
augaaggcaauacuaguaguucugcuauauacauuugcaaccgcaaaugcagacacauuauguauagguuaucaugcgaacaauucaacagacacuguagacacaguacuagaaaagaauguaacaguaacacacucugcuaaccuucuagaagacaagcauaacgggaaacuaugcaaacuaagagggguagccccauugcauuuggguaaauguaacauugcuggcuggauccugggaaauccagagugugaaucacucuccacagcaagcucaugguccuacauuguggaaacaucuaguucagacaauggaacguguuacccaggagauuucaucgauuaugaggagcuaagagagcaauugagcucagugucaucauuugaaagguuugagauauuccccaagacaaguucauggcccaaucaugacucgaacaaagguguaacggcagcauguccucaugcuggagcaaaaagcuucuacaaaaauuuaauauggcuaguuaaaaaaggaaauucauacccaaagcucagcaaauccuacauuaaugauaaagggaaagaaguccucgugcuauggggcauucaccauccaucuacuagugcugaccaacaaagucucuaucagaaugcagaugcauauguuuuuguggggucaucaaaauacagcaagaaguucaagccggaaauagcaauaagacccaaagugagggaucaagaagggagaaugaacuauuacuggacacuaguagagccgggagacaaaauaacauucgaagcaacuggaaaucuagugguaccgagauaugcauucgcaauggaaagaaaugcuggaucugguauuaucauuucagauacaccaguccacgauugcaauacaacuugucagacacccaagggugcuauaaacaccagccucccauuucauaauauacauccgaucacaauuggaaaauguccaaaauauguaaaaagcacaaaauugagacuggccacaggauugaggaaugucccgucuauucaaucuagaggccuauuuggggccauugccgguuucauugaagggggguggacagggaugguggauggaugguacgguuaucaccaucaaaaugagcaggggucaggauaugcagccgaccugaagagcacacagaaugccauugacgagauuacuaacaaaguaaauucuguuauugaaaagaugaauacacaguucacagcaguagguaaagaguucaaccaccuggaaaaaagaauagagaauuuaaauaaaaaaguugaugaugguuuccuggacauuuggacuuacaaugccgaacuguugguucuauuggaaaaugaaagaacuuuggacuaccacgauucaaaugugaagaacuuauaugaaaagguaagaagccaguuaaaaaacaaugccaaggaaauuggaaacggcugcuuugaauuuuaccacaaaugcgauaacacgugcauggaaagugucaaaaaugggacuuaugacuacccaaaauacucagaggaagcaaaauuaaacagagaagaaauagaugggguaaagcuggaaucaacaaggauuuaccagauuuuggcgaucuauucaacugucgccaguucauugguacugguagucucccugggggcaaucaguuucuggaugugcucuaaugggucucuacaguguagaauauguauuuaa

SEQ ID NO: 36796 - RNA, 1701 nt, Artificial Sequence
  derived and/or modified CDS sequence (wt) from hemagglutinin__InfluenzaA__ADG21924
auggaggcaauacuaguaguucugcuauauacauuugcaaccgcaaaugcagacacauuauguauagguuaucaugcgaacaauucaacagacacuguagacacaguacuagaaaagaauguaacaguaacacacucuguuaaccuucuagaaaacaagcauaacgggaaacuaugcaaacuaagagggguagccccauugcauuuggguaaauguaacauugcuggcuggauccugggaaauccagagugugaaucacucuccacagcaagcucaugguccuacauuguggaaacaucuaguucagacaauggaacguguuacccaggagauuucaucgauuaugaggagcuaagagagcaauugagcucagugucaucauuugaaagguuugagauauuccccaagacaaguucauggcccaaucaugacucgaacaaagguguaacggcagcauguccucaugcuggagcaaaaagcuucuacaaaaauuuaauauggcuaguuaaaaaaggaaauucauacccaaagcucagcaaauccuacauuaaugauaaagggaaagaaguccucgugcuauggggcauucaccauccaucuacuagugcugaccaacaaagucucuaucagaaugcagaugcauauguuuuuguggggucaucaagauacagcaagaaguucaagccggaaauagcaauaagacccaaagugagggaucaagaagggagaaugaacuauuacuggacacuaguagaaccgggagacaaaauaacauucgaagcaacuggaaaucuagugguaccgagauaugcauucgcaauggaaagaaaugcuggaucugguauuaucauuucagauacaccaguccacgauugcaauacaacuugucagacacccaagggugcuauaaacaccagccucccauuucauaauauacauccgaucacaauuggaaaauguccaaaauauguaaaaagcacaaaauugagacuggccacaggauugaggaaugucccgucuauucaaucuagaggccuauuuggggccauugccgguuucauugaagggggguggacagggaugguggauggaugguacgguuaucaccaucaaaaugagcaggggucaggauaugcagccgaccugaagagcacacagaaugccauugacgagauuacuaacaaaguaaauucuguuauugaaaagaugaauacacaguucacagcaguagguaaagaguucaaccaccuggaaaaaagaauagagaauuuaaauaaaaaaguugaugaugguuuccuggacauuuggacuuacaaugccgaacuguugguucuauuggaaaaugaaagaacuuuggacuaccacgauucaaaugugaagaacuuauaugaaaagguaagaagccaguuaaaaaacaaugccaaggaaauuggaaacggcugcuuugaauuuuaccacaaaugcgauaacacgugcauggaaagugucaaaaaugggacuuaugacuacccaaaauacucagaggaagcaaaauuaaacagagaagaaauagaugggguaaagcuggaaucaacaaggauuuaccagauuuuggcgaucuauucaacugucgccaguucauugguacugguagucucccugggggcaaucaguuucuggaugugcucuaaugggucucuacaguguagaauauguauuuaa

SEQ ID NO: 36797 - RNA, 1701 nt, Artificial Sequence
  derived and/or modified CDS sequence (wt) from hemagglutinin__InfluenzaA__ADG21925
augaaggcaauacuaguaguucugcuauauacauuugcaaccgcaaaugcagacacauuauguauagguuaucaugcgaacaauucaacagacacuguagacacaguacuagaaaagaauguaacaguaacacacucuguuaaccuucuagaagacaagcauaacgggaaacuaugcaaacuaagagggguagccccauugcauuuggguaaauguaacauugcuggcuggauccugggaaauccagagugugaaucacucuccacagcaagcucaugguccuacauuguggaaacaucuaguucagacaauggaacguguuacccaggagauuucaucgauuaugaggagcuaagagagcaauugagcucagugucaucauuugaaagguuugagauauuccccaagacaaguucauggcccaaucaugacucgaacaaagguguaacggcagcauguccucaugcuggagcaaaaagcuucuacaaaaauuuaauauggcuaguuaaaaaaggaaauucauacccaaagcucagcaaauccuacauuaaugauaaagggaaagaaguccucgugcuauggggcauucaccauccaucuacuagugcugaccaacaaagucucuaucagaaugcagaugcauauguuuuuguggggacaucaagauacagcaagaaguucaagccggaaauagcaauaagacccaaagugagggaucaagaagggagaaugaacuauuacuggacacuaguagagccgggagacaaaauaacauucgaagcaacuggaaaucuagugguaccgagauaugcauucgcaauggaaagagaugcuggaucugguauuaucauuucagauacaccaguccacgauugcaauacaacuugucagacacccaagggugcuauaaacaccagccucccauuucagaauauacauccgaucacaauuggaaaauguccaaaauauguaaaaagcacaaaauugagacuggccacaggauugaggaaugucccgucuauucaaucuagaggccuauuuggggccauugccgguuucauugaagggggguggacagggaugguagauggaugguacgguuaucaccaucaaaaugagcaggggucaggauaugcagccgaccugaagagcacacagaaugccauugacgagauuacuaacaaaguaaauucuguuauugaaaagaugaauacacaguucacagcaguagguaaagaguucaaccaccuggaaaaaagaauagagaauuuaaauaaaaaaauugaugaugguuuccuggacauuuggacuuacaaugccgaacuguugguucuauuggaaaaugaaagaacuuuggacuaccacgauucaaaugugaagaacuuauaugaaaagguaagaagccaguuaaaaaacaaugccaaggaaauuggaaacggcugcuuugaauuuuaccacaaaugcgauaacacgugcauggaaagugucaaaaaugggacuuaugacuacccaaaauacucagaggaagcaaaauuaaacagagaagaaauagaugggguaaagcuggaaucaacaaggauuuaccagauuuuggcgaucuauucaacugucgccaguucauugguacugguagucucccugggggcaaucaguuucuggaugugcucuaaugggucucuacaguguagaauauguauuuaa

SEQ ID NO: 36798 - RNA, 1701 nt, Artificial Sequence
  derived and/or modified CDS sequence (wt) from hemagglutinin__InfluenzaA__ADG21926
augaaggcaauacuaguaguucugcuauauacauuugcaaccgcaaaugcagacacauuauguauagguuaucaugcgaacaauucaacagacacuguagacacaauacuagaaaagaauguaacaguaacacacucuguuaaccuucuagaagacaagcauaacgggaaacuaugcaaacuaagagggguagccccauugcauuuggguaaauguaacauugcuggcuggauccugggaaauccagagugugaaucacucuccacagcaagcucaugguccuacauuguggaaacaucuaguucagacaauggaacguguuacccaggagauuucaucgauuaugaggagcuaagagagcaauugagcucagugucaucauuugaaagguuugagauauuccccaagacaaguucauggcccaaucaugacucgaacaaagguguaacggcagcauguccucaugcuggagcaaaaagcuucuacaaaaauuuaauauggcuaguuaaaaaaggaaauucauacccaaagcucagcaaauccuacauuaaugauaaagggaaagaaguccucgugcuauggggcauucaccauccaucuacuagugcugaccaacaaagucucuaucagaaugcagaugcauauguuuuuguggggacaucaagauacagcaagaaguucaagccggaaauagcaauaagacccaaaguaagggaucaagaagggagaaugaacuauuacuggacacuaguagagccgggagacaaaauaacauucgaagcaacuggaaaucuagugguaccgagauaugcauucgcaauggaaagaaaugcuggaucugguauuaucauuucagauacaccaguccacgauugcaauacaacuugucagacacccaagggugcuauaaacaccagccucccauuucagaauauacauccgaucacaauuggaaaauguccaaaauauguaaaaagcacaaaauugagacuggccacaggauugaggaaugucccgucuauucaaucuagaggccuauuuggggccauugccgguuucauugaagggggguggacagggaugguagauggaugguacgguuaucaccaucaaaaugagcaggggucaggauaugcagccgaccugaagagcacacagaaugccauugacgagauuacuaacaaaguaaauucuguuauugaaaagaugaauacacaguucacagcaguagguaaagaguucaaccaccuggaaaaaagaauagagaauuuaaauaaaaaaguugaugaugguuuccuggacauuuggacuuacaaugccgaacuguugguucuauuggaaaaugaaagaaauuuggacuaccacgauucaaaugugaagaacuuauaugaaaagguaagaagccaguuaaaaaacaaugccaaggaaauuggaaacggcugcuuugaauuuuaccacaaaugcgauaacacgugcauggaaagugucaaaaaugggacuuaugacuacccaaaauacucagaggaagcaaaauuaaacagagaagaaauagaugggguaaagcuggaaucaacaaggauuuaccagauuuuggcgaucuauucaacugucgccaguucauugguacugguagucucccugggggcaaucaguuucuggaugugcucuaaugggucucuacaguguagaauauguauuuaa

SEQ ID NO: 36799 - RNA, 1701 nt, Artificial Sequence; identical to SEQ ID NO: 36785
  derived and/or modified CDS sequence (wt) from hemagglutinin__InfluenzaA__ADG21927

SEQ ID NO: 36800 - RNA, 1701 nt, Artificial Sequence
  derived and/or modified CDS sequence (wt) from hemagglutinin__InfluenzaA__ADG21928
augaaggcaacacuaguaguucugcuauauacauuugcaaccgcaaaugcagacacauuauguauagguuaucaugcgaacaauucaacagacacuguagacacaguacuagaaaagaauguaacaguaacacacucuguuaaccuucuagaagacaagcauaacgggaaacuaugcaaacuaagagggguagccccauugcauuuggguaaauguaacauugcuggcuggauccugggaaauccagaaugugaaucacucuccacagcaagcucaugguccuacauuguggaaacaucuaguucagacaauggaacguguuacccaggagauuucaucgauuaugaggagcuaagagagcaauugagcucagugucaucauuugaaagguuugagauauuccccaagacaaguucauggcccaaucaugacucgaacaaagguguaacggcagcauguccucaugcuggagcaaaaagcuucuacaaaaauuuaauauggcuaguuaaaaaaggaaauucauacccaaagcucagcaaauccuacauuaaugauaaagggaaagaaguccucgugcuauggggcauucaccauccaucuacuagugcugaccaacaaagucucuaucagaaugcagaugcauauguuuuuguggggacaucaagauacagcaagaaguucaagccggaaauagcaauaagacccagagugagggaucaagaagggagaaugaacuauuacuggacacuaguagagccgggagacaaaauaacauucgaagcaacuggaaaucuagugguaccgagauaugcauucgcaauggaaagagaugcuggaucugguauuaucauuucagauacaccaguccacgauugcaauacaacuugucagacacccaagggugcuauaaacaccagccucccauuucagaauauacauccgaucacaauuggaaaauguccaaaauauguaaaaagcacaaaauugagacuggccacaggauugaggaaugucccgucuauucaaucuagaggccuauuuggggccauugccgguuucauugaagggggguggacagggaugguagauggaugguacgguuaucaccaucaaaaugagcaggggucaggauaugcagccgaccugaagagcacacagaaugccauugacgagauuacuaacaaaguaaauucuguuauugaaaagaugaauacacaguucacagcaguagguaaagaguucaaccaccuggaaaaaagaauagagaauuuaaauaaaaaaauugaugaugguuuccuggacauuuggacuuacaaugccgaacuguugguucuauuggaaaaugaaagaacuuuggacuaccacgauucaaaugugaagaacuuauaugaaaagguaagaagccaguuaaaaaacaaugccaaggaaauuggaaacggcugcuuugaauuuuaccacaaaugcgauaacacgugcauggaaagugucaaaaaugggacuuaugacuacccaaaauacucagaggaagcaaaauuaaacagagaagaaauagaugggguaaagcuggaaucaacaaggauuuaccagauuuuggcgaucuauucaacugucgccaguucauugguacugguagucucccugggggcaaucaguuucuggaugugcucuaaugggucucuacaguguagaauauguauuuaa

SEQ ID NO: 36801 - RNA, 1701 nt, Artificial Sequence; identical to SEQ ID NO: 36797
  derived and/or modified CDS sequence (wt) from hemagglutinin__InfluenzaA__ADG21930

SEQ ID NO: 36802 - RNA, 1701 nt, Artificial Sequence; identical to SEQ ID NO: 36785
  derived and/or modified CDS sequence (wt) from hemagglutinin__InfluenzaA__ADG21931

SEQ ID NO: 36803 - RNA, 1701 nt, Artificial Sequence
  derived and/or modified CDS sequence (wt) from hemagglutinin__InfluenzaA__ADG21932
auggaggcaauacuaguaguucugcuauauacauuugcaaccgcaaaugcagacacauuauguauagguuaucaugcgaacaauucaacagacacuguagacacaguacuagaaaagaauguaacaguaacacacucuguuaaccuucuagaagacaagcauaacgggaaacuaugcaaacuaagagggguagccccauugcauuuggguaaauguaacauugcuggcuggauccugggaaauccagagugugaaucacucuccacagcaagcucaugguccuacauuguggaaacaucuaguucagacaauggaacguguuacccaggagauuucaucgauuaugaggagcuaagagagcaauugagcucagugucaucauuugaaagguuugagauauuccccaagacaaguucauggcccaaucaugacucgaacaaagguguaacggcagcauguccucaugcuggagcaaaaagcuucuacaaaaauuuaauauggcuaguuaaaaaaggaaauucauacccaaagcucagcaaauccuacauuaaugauaaagggaaagaaguccucgugcuauggggcauucaccauccaucuacuagugcugaccaacaaagucucuaucagaaugcagaugcauauguuuuuguggggucaucaagauacagcaagaaguucaagccggaaauagcaauaagacccaaagugagggaucaagaagggagaaugaacuauuacuggacacuaguagagccgggagacaaaauaacauucgaagcaacuggaaaucuagugguaccgagauaugcauucgcaauggaaagaaaugcuggaucugguauuaucauuucagauacaccaguccacgauugcaauacaacuugucagacacccaaaggugcuauaaacaccagccucccauuucauaauauacauccgaucacaauuggaaaauguccaaaauauguaaaaagcacaaaauugagacuggccacaggauugaggaaugucccgucuauucaaucuagaggccuauuuggggccauugccgguuucauugaagggggguggacagggaugguggauggaugguacgguuaucaccaucaaaaugagcaggggucaggauaugcagccgaccugaagagcacacagaaugccauugacgagauuacuaacaaaguaaauucuguuauugaaaagaugaauacacaguucacagcaguagguaaagaguucaaccaccuggaaaaaagaauagagaauuuaaauaaaaaaguugaugaugguuuccuggacauuuggacuuacaaugccgaacuguugguucuauuggaaaaugaaagaacuuuggacuaccacgauucaaaugugaagaacuuauaugaaaagguaagaagccaguuaaaaaacaaugccaaggaaauuggaaacggcugcuuugaauuuuaccacaaaugcgauaacacgugcauggaaagugucaaaaaugggacuuaugacuacccaaaauacucagaggaagcaaaauuaaacagagaagaaauagaugggguaaagcuggaaucaacaaggauuuaccagauuuuggcgaucuauucaacugucgccaguucauugguacugguagucucccugggggcaaucaguuucuggaugugcucuaaugggucucuacaguguagaauauguauuuaa

SEQ ID NO: 36804 - RNA, 1701 nt, Artificial Sequence; identical to SEQ ID NO: 36785
  derived and/or modified CDS sequence (wt) from hemagglutinin__InfluenzaA__ADG21933

SEQ ID NO: 36805 - RNA, 1701 nt, Artificial Sequence; identical to SEQ ID NO: 36797
  derived and/or modified CDS sequence (wt) from hemagglutinin__InfluenzaA__ADG21934

SEQ ID NO: 36806 - RNA, 1701 nt, Artificial Sequence
  derived and/or modified CDS sequence (wt) from hemagglutinin__InfluenzaA__ADG21935
auggaggcaauacuaguaguucugcuauauacauuugcaaccgcaaaugcagacacauuauguauagguuaucaugcgaacaauucaacagacacuguagacacaguacuagaaaagaauguaacaguaacacacucuguuaaccuucuagaagacaagcauaacgggaaacuaugcaaacuaagagggguagccccauugcauuuggguaaauguaacauugcuggcuggauccugggaaauccagagugugaaucacucuccacagcaagcucaugguccuacauuguggaaacaucuaguucagacaauggaacguguuacccaggagauuucaucgauuaugaggagcuaagagagcaauugagcucagugucaucauuugaaagguuugagauauuccccaagacaaguucauggcccaaucaugacucgaacaaagguguaacggcagcauguccucaugcuggagcaaaaagcuucuacaaaaauuuaauauggcuaguuaaaaaaggaaauucauacccaaagcucagcaaauccuacauuaaugauaaagggaaagaaguccucgugcuauggggcauucaccauccaucuacuagugcugaccaacaaagucucuaucagaaugcagaugcauauguuuuuguggggucaucaagauacagcaagaaguucaagccggaaauagcaauaagacccaaagugagggaucaagaagggagaaugaacuauuacuggacacuaguagagccgggagacaaaauaacauucgaagcaacuggaaaucuagugguaccgagauaugcauucgcaauggaaagaaaugcuggaucugguauuaucauuucagauacaccaguccacgauugcaauacaaauugucagacacccaauggugcuauaaacaccagccucccauuucauaauauacauccgaucacaauuggaaaauguccaaaauauguaaaaagcacaaaauugagacuggccacaggauugaggaaugucccgucuauucaaucuagaggccuauuuggggccauugccgguuucauugaagggggguggacagggaugguagauggaugguacgguuaucaccaucaaaaugagcaggggucaggauaugcagccgaccugaagagcacacagaaugccauugacgagauuacuaacaaaguaaauucuguuauugaaaagaugaauacacaguucacagcaguagguaaagaguucaaccaccuggaaaaaagaauagagaauuuaaauaaaaaaguugaugaugguuuccuggacauuuggacuuacaaugccgaacuguugguucuauuggaaaaugaaagaacuuuggacuaccacgauucaaaugugaagaacuuauaugaaaagguaagaagccaguuaaaaaacaaugccaaggaaauuggaaacggcugcuuugaauuuuaccacaaaugcgauaacacgugcauggaaagugucaaaaaugggacuuaugacuaccccaaauacucagaggaagcaaaauuaaacagagaagaaauagaugggguaaagcuggaaucaacaaggauuuaccagauuuuggcgaucuauucaacugucgccaguucauugguacugguagucucccugggggcaaucaguuucuggaugugcucuaaugggucucuacaguguagaauauguauuuaa

SEQ ID NO: 36807 - RNA, 1701 nt, Artificial Sequence; identical to SEQ ID NO: 36803
  derived and/or modified CDS sequence (wt) from hemagglutinin__InfluenzaA__ADG21936

SEQ ID NO: 36808 - RNA, 1701 nt, Artificial Sequence; identical to SEQ ID NO: 36803
  derived and/or modified CDS sequence (wt) from hemagglutinin__InfluenzaA__ADG21937

SEQ ID NO: 36809 - RNA, 1701 nt, Artificial Sequence
  derived and/or modified CDS sequence (wt) from hemagglutinin__InfluenzaA__ADG21938
auggaggcaauacuaguaguucugcuauauacauuugcaaccgcaaaugcagacacauuauguauagguuaucaugcgaacaauucaacagacacuguagacacaguacuagaaaagaauguaacaguaacacacucuguuaaccuucuagaagacaagcauaacgggaaacuaugcaaacuaagagggguagccccauugcauuuggguaaauguaacauugcuggcuggauccugggaaauccagagugugaaucacucuccacagcaagcucaugguccuacauuguggaaacaucuaguucagacaauggaacguguuacccaggagauuucaucgauuaugaggagcuaagagagcaauugagcucagugucaucauuugaaagguuugagauauuccccaagacaaguucauggcccaaucaugacucgaacaaagguguaacggcagcauguccucaugcuggagcaaaaagcuucuacaaaaauuuaauauggcuaguuaaaaaaggaaauucauacccaaagcucagcaaauccuacauuaaugauaaagggaaagaaguccucgugcuauggggcauucaccauccaucuacuagugcugaccaacaaagucucuaucagaaugcagaugcauauguuuuuguggggucaucaagauacagcaagaaguucaagccggaaauagcaauaagacccaaagugagggaucaagaagggagaaugaacuauuacuggacacuaguagagccgggagacaaaauaacauucgaagcaacuggaaaucuagugguaccgagauaugcauucgcaauggaaagaaaugcuggaucugguauuaucauuucagauacaccaguccacgauugcaauacaacuugucagacacccaaaggugcuauaaacaccagccucccauuucauaauauacauccgaucacaauuggaaaauguccaaaauauguaaaaagcacaaaauugagacuggccacaggauugaggaaugucccgucuauucaaucuagaggccuauuuggggccauugccgguuucauugaagggggguggacagggaugguggauggaugguacgguuaucaccaucaaaaugagcaggggucaggauaugcagccgaccugaagagcacacagaaugccauugacgagauuacuaacaaaguaaauucuguuauugaaaagaugaauacacaguucacagcaguagguaaagaguucaaccaccuggaaaaaagaauagagaauuuaaauaaaaaaguugaugaugguuuccuggacauuuggacuuacaaugccgaacuguugguucuauuggaaaaugaaagaaauuuggacuaccacgauucaaaugugaagaacuuauaugaaaagguaagaagccaguuaaaaaacaaugccaaggaaauuggaaacggcugcuuugaauuuuaccacaaaugcgauaacacgugcauggaaagugucaaaaaugggacuuaugacuacccaaaauacucagaggaagcaaaauuaaacagagaagaaauagaugggguaaagcuggaaucaacaaggauuuaccagauuuuggcgaucuauucaacugucgccaguucauugguacugguagucucccugggggcaaucaguuucuggaugugcucuaaugggucucuacaguguagaauauguauuuaa

SEQ ID NO: 36810 - RNA, 1701 nt, Artificial Sequence; identical to SEQ ID NO: 36785
  derived and/or modified CDS sequence (wt) from hemagglutinin__InfluenzaA__ADG21939

SEQ ID NO: 36811 - RNA, 1701 nt, Artificial Sequence; identical to SEQ ID NO: 36789
  derived and/or modified CDS sequence (wt) from hemagglutinin__InfluenzaA__ADG21940

SEQ ID NO: 36812 - RNA, 1701 nt, Artificial Sequence
  derived and/or modified CDS sequence (wt) from hemagglutinin__InfluenzaA__ADG21941
auggaggcaauacuaguaguucugcuauauacauucgcaaccgcaaaugcagacacauuauguauagguuaucaugcgaacaauucaacagacacuguagacacaguacuagaaaagaauguaacaguaacacacucuguuaaccuucuagaagacaagcauaacgggaaacuaugcaaacuaagagggguagccccauugcauuuggguaaauguaacauugcuggcuggauccugggaaauccagagugugaaucacucuccacagcaagcucaugguccuacauuguggaaacaucuaguucagacaauggaacguguuacccaggagauuucaucgauuaugaggagcuaagagagcaauugagcucagugucaucauuugaaagguuugagauauuccccaagacaaguucauggcccaaucaugacucgaacaaagguguaacggcagcauguccucaugcuggagcaaaaagcuucuacaaaaauuuaauauggcuaguuaaaaaaggaaauucauacccaaagcucagcaaauccuacauuaaugauaaagggaaagaaguccucgugcuauggggcauucaccauccaucuacuagugcugaccaacaaagucucuaucagaaugcagaugcauauguuuuuguggggucaucaagauacagcaagaaguucaagccggaaauagcaauaagacccaaagugagggaucaagaagggagaaugaacuauuacuggacacuaguagagccgggagacaaaauaacauucgaagcaacuggaaaucuagugguaccgagauaugcauucgcaauggaaagaaaugcuggaucugguauuaucauuucagauacaccaguccacgauugcaauacaacuugucagacacccaagggugcuauaaacaccagccucccauuucauaauauacauccgaucacaauuggaaaauguccaaaauauguaaaaagcacaaaauugagacuggccacaggauugaggaaugucccgucuauucaaucuagaggccuauuuggggccauugccgguuucauugaagggggguggacagggaugguggauggaugguacgguuaucaccaucaaaaugagcaggggucaggauaugcagccgaccugaagagcacacagaaugccauugacgagauuacuaacaaaguaaauucuguuauugaaaagaugaauacacaguucacagcaguagguaaagaguucaaccaccuggaaaaaagaauagagaauuuaaauaaaaaaauugaugaugguuuccuggacauuuggacuuacaaugccgaacuguugguucuauuggaaaaugaaagaacuuuggacuaccacgauucaaaugugaagaacuuauaugaaaagguaagaagccaguuaaaaaacaaugccaaggaaauuggaaacggcugcuuugaauuuuaccacaaaugcgauaacacgugcauggaaagugucaaaaaugggacuuaugacuacccaaaauacucagaggaagcaaaauuaaacagagaagaaauagaugggguaaagcuggaaucaacaaggauuuaccagauuuuggcgaucuauucaacugucgccaguucauugguacugguagucucccugggggcaaucaguuucuggaugugcucuaaugggucucuacaguguagaauauguauuuaa

SEQ ID NO: 36813 - RNA, 1701 nt, Artificial Sequence
  derived and/or modified CDS sequence (wt) from hemagglutinin__InfluenzaA__ADG21943
augaaggcaauacuaguaguucugcuauauacauuugcaaccgcaaaugcagacacauuauguauagguuaucaugcgaacaauucaacagacacuguagacacaguacuagaaaagaauguaacaguaacacacucuguuaaccuucuagaagacaagcauaacgggaaacuaugcaaacuaagagggguagccccauugcauuuggguaaauguaacauugcuggcuggauccugggaaauccagagugugaaucacucuccacagcaaacucaugguccuacauuguggaaacaucuaguucagacaauggaacguguuacccaggagauuucaucgauuaugaggagcuaagagagcaauugagcucagugucaucauuugaaagguuugagauauuccccaagacaaguucauggcccaaucaugacucgaacaaagguguaacggcagcauguccucaugcuggagcaaaaagcuucuacaaaaauuuaauauggcuaguuaaaaaaggaaauucauacccaaagcucagcaaauccuacauuaaugauaaagggaaagaaguccucgugcuauggggcauucaccauccaucuacuagugcugaccaacaaagucucuaucagaaugcagaugcauauguuuuuguggggacaucaagauacagcaagaaguucaagccggaaauagcaauaagacccaaagugagggaucaagaagggagaaugaacuauuacuggacacuaguagagccgggagacaaaauaacauucgaagcaacuggaaaucuagugguaccgagauaugcauucgcaauggaaagagaugcuggaucugguauuaucauuucagauacaccaguccacgauugcaauacaacuugucagacacccaagggugcuauaaacaccagccucccauuucagaauauacauccgaucacaauuggaaaauguccaaaauauguaaaaagcacaaaauugagacuggccacaggauugaggaaugucccgucuauucaaucuagaggccuauuuggggccauugccgguuucauugaagggggguggacagggaugguagauggaugguacgguuaucaccaucaaaaugagcaggggucaggauaugcagccgaccugaagagcacacagaaugccauugacgagauuacuaacaaaguaaauucuguuauugaaaagaugaauacacaguucacagcaguagguaaagaguucaaccaccuggaaaaaagaauagagaauuuaaauaaaaaaauugaugaugguuuccuggacauuuggacuuacaaugccgaacuguugguucuauuggaaaaugaaagaacuuuggacuaccacgauucaaaugugaagaacuuauaugaaaagguaagaagccaguuaaaaaacaaugccaaggaaauuggaaacggcugcuuugaauuuuaccacaaaugcgauaacacaugcauggaaagugucaaaaaugggacuuaugacuacccaaaauacucagaggaagcaaaauuaaacagagaagaaauagaugggguaaagcuggaaucaacaaggauuuaccagauuuuggcgaucuauucaacugucgccaguucauugguacugguagucucccugggggcaaucaguuucuggaugugcucuaaugggucucuacaguguagaauauguauuuaa

SEQ ID NO: 36814 - RNA, 1701 nt, Artificial Sequence
  derived and/or modified CDS sequence (wt) from hemagglutinin__InfluenzaA__ADG21944
auggaggcaauacuaauaguucugcuauauacauuugcaaccgcaaaugcagacacauuauguauagguuaucaugcgaacaauucaacagacacuguagacacaguacuagaaaagaauguaacaguaacacacucuguuaaccuucuagaagacaagcauaacgggaaacuaugcaaacuaagagggguagccccauugcauuuggguaaauguaacauugcuggcuggauccugggaaauccagagugugaaucacucuccacagcaagcucaugguccuacauuguggaaacaucuaguucagacaauggaacguguuacccaggagauuucaucgauuaugaggagcuaagagagcaauugagcucagugucaucauuugaaagguuugagauauuccccaagacaaguucauggcccaaucaugacucgaacaaagguguaacggcagcauguccucaugcuggagcaaaaagcuuuuacaaaaauuuaauauggcuaguuaaaaaaggaaauucauacccaaagcucagcaaauccuacauuaaugauaaagggaaagaaguccucgugcuauggggcauucaccauccaucuacuagugcugaccaacaaagucucuaucagaaugcagaugcauauguuuuuguggggucaucaagauacagcaagaaguucaagccggaaauagcaauaagacccaaagugagggaucaagaagggagaaugaacuauuacuggacacuaguagagccgggagacaaaauaacauucgaagcaacuggaaaucuagugguaccgagauaugcauucgcaauggaaagaaaugcuggaucugguauuaucauuucagauacaccaguccacgauugcaauacaacuugucagacacccaagggugcuauaaacaccagccucccauuucauaauauacauccgaucacaauuggaaaauguccaaaauauguaaaaagcacaaaauugagacuggccacaggauugaggaaugucccgucuauucaaucuagaggccuauuuggggccauugccgguuucauugaagggggguggacagggaugguggauggaugguacgguuaucaccaucaaaaugagcaggggucaggauaugcagccgaccugaagagcacacagaaugccauugacgagauuacuaacaaaguaaauucuguuauugaaaagaugaauacacaguucacagcaguagguaaagaguucaaccaccuggaaaaaagaauagagaauuuaaauaaaaaaguugaugaugguuuccuggacauuuggacuuacaaugccgaacuguugguucuauuggaaaaugaaagaacuuuggacuaccacgauucaaaugugaagaacuuauaugaaaagguaagaagccaguuaaaaaacaaugccaaggaaauuggaaacggcugcuuugaauuuuaccacaaaugcgauaacacgugcauggaaagugucaaaaaugggacuuaugacuacccaaaauacucagaggaagcaaaauuaaacagagaagaaauagaugggguaaagcuggaaucaacaaggauuuaccagauuuuggcgaucuauucaacugucgccaguucauugguacugguagucucccugggggcaaucaguuucuggaugugcucuaaugggucucuacaguguagaauauguauuuaa

SEQ ID NO: 36815 - RNA, 1701 nt, Artificial Sequence; identical to SEQ ID NO: 36785
  derived and/or modified CDS sequence (wt) from hemagglutinin__InfluenzaA__ADG21945

SEQ ID NO: 36816 - RNA, 1701 nt, Artificial Sequence; identical to SEQ ID NO: 36803
  derived and/or modified CDS sequence (wt) from hemagglutinin__InfluenzaA__ADG21946

SEQ ID NO: 36817 - RNA, 1701 nt, Artificial Sequence; identical to SEQ ID NO: 36785
  derived and/or modified CDS sequence (wt) from hemagglutinin__InfluenzaA__ADG21947

SEQ ID NO: 36818 - RNA, 1701 nt, Artificial Sequence
  derived and/or modified CDS sequence (wt) from hemagglutinin__InfluenzaA__ADG21948
auggaggcaauacuaguaguucugcuauauacauuugcaaccgcaaaugcagacacauuauguauagguuaucaugcgaacaauucaacagacacuguagacacaguacuagaaaagaauguaacaguaacacacucuguuaaccuucuagaagacaagcauaacgggaaacuaugcaaacuaagagggguagccccauugcauuuggguaaauguaacauugcuggcuggauccugggaaauccagagugugaaucacucuccacagcaagcucaugguccuacauuguggaaacaucuaguucagacaauggaacguguuacccaggagauuucaucgauuaugaggagcuaagagagcaauugagcucagugucaucauuugaaagguuugagauauuccccaagacaaguucauggcccaaucaugacucgaacaaagguguaacggcagcauguccucaugcuggagcaaaaagcuucuacaaaaauuuaauauggcuaguuaaaaaaggaaauucauacccaaagcucagcaaauccuacauuaaugauaaagggaaagaaguccucgugcuauggggcauucaccauccaucuacuagugcugaccaacaaagucucuaucagaaugcagaugcauauguuuuuguggggucaucaagauacagcaagaaguucaagccggaaauagcaauaagacccaaagugagggaucaagaagggagaaugaacuauuacuggacacuaguagagccgggagacaaaauaacauucgaagcaacuggaaaucuagugguaccgagauaugcauucgcaauggaaagaaaugcuggaucugguauuaucauuucagauacaccaguccacgauugcaauacaacuugucagacacccaagggugcuauaaacaccagccucccauuucauaauauacauccgaucacaauuggaaaauguccaaaauauguaaaaagcacaaaauugagacuggccacaggauugaggaaugucccgucuauucaaucuagaggccuauuuggggccauugccgguuucauugaagggggguggacagggaugguggauggaugguacgguuaucaccaucaaaaugagcaggggucaggauaugcagccgaccugaagagcacacagaaugccauugacgagauuacuaacaaaguaaauucuguuauugaaaagaugaauacacaguucacagcaguagguaaagaguucaaccaccuggaaaaaagaauagagaauuuaaauaaaaaaguugaugaugguuuccuggacauuuggacuuacaaugccgaacuguugguucuauuggaaaaugaaagaacuuuggaccaccacgauucaaaugugaagaacuuauaugaaaagguaagaagccaguuaaaaaacaaugccaaggaaauuggaaacggcugcuuugaauuuuaccacaaaugcgauaacacgugcauggaaagugucaaaaaugggacuuaugacuacccaaaauacucagaggaagcaaaauuaaacagagaagaaauagaugggguaaagcuggaaucaacaaggauuuaccagauuuuggcgaucuauucaacugucgccaguucauugguacugguagucucccugggggcaaucaguuucuggaugugcucuaaugggucucuacaguguagaauauguauuuaa

SEQ ID NO: 36819 - RNA, 1701 nt, Artificial Sequence
  derived and/or modified CDS sequence (wt) from hemagglutinin__InfluenzaA__ADG27794
augaaggcaauacuaguaguucugcuauauacauuugcaaccgcaaaugcagacacauuauguauagguuaucaugcgaacaauucaacagacacuguagacacaguacuagaaaagaauguaacaguaacacacucuguuaaccuucuagaagacaagcauaacgggaaacuaugcaaacuaagagggguagccccauugcauuuggguaaauguaacauugcuggcuggauccugggaaauccagagugugaaucacucuccacagcaagcucaugguccuacauuguggaaacaucuaguucagacaauggaacguguuacccaggagauuucaucgauuaugaggagcuaagagagcaauugagcucagugucaucauuugaaagguuugagauauuccccaagacaaguucauggcccaaucaugacucgaacaaagguguaacggcagcauguccucaugcuggagcaaaaagcuucuacaaaaauuuaauauggcuaguuaaaaaaggaaauucauacccaaagcucagcaaauccuacauuaaugauaaagggaaagagguccucgugcuauggggcauucaccauccaucuacuagugcugaccaacaaagucucuaucagaaugcagaugcauauguuuuuguggggacaucaagauacagcaagaaguucaagccggaaauagcaauaagacccaaagugagggaucaagaagggagaaugaacuauuacuggacacuaguagagccgggagacaaaauaacauucgaagcaacuggaaaucuagugguaccgagauaugcauucgcaauggaaagaaaugcuggaucugguauuaucauuucagauacaccaguccacgauugcaauacaacuugucagacacccaagggugcuauaaacaccagccucccauuucagaauauacauccgaucacaauuggaaaauguccaaaauauguaaaaagcacaaaauugagacuggccacaggauugaggaaugucccgucuauucaaucuagaggccuauuuggggccauugccgguuucauugaagggggguggacagggaugguagauggaugguacgguuaucaccaucaaaaugagcaggggucaggauaugcagccgaccugaagagcacacagaaugccauugacgagauuacuaacaaaguaaauucuguuauugaaaagaugaauacacaguucacagcaguagguaaagaguucaaccaccuggaaaaaagaauagagaauuuaaauaaaaaaguugaugaugguuuccuggacauuuggacuuacaaugccgaacuguugguucuauuggaaaaugaaagaacuuuggacuaccacgauucaaaugugaagaacuuauaugaaaagguaagaagccaguuaaaaaacaaugccaaggaaauuggaaacggcugcuuugaauuuuaccacaaaugcgauaacacgugcauggaaagugucaaaaaugggacuuaugacuacccaaaauacucagaggaagcaaaauuaaacagagaagaaauagaugggguaaagcuggaaucaacaaggacuuaccagauuuuggcgaucuauucaacugucgccaguucauugguacugguagucucccugggggcaaucaguuucuggauguguucuaaugggucucuacaguguagaauauguauuuaa

SEQ ID NO: 36820 - RNA, 1701 nt, Artificial Sequence; identical to SEQ ID NO: 34676
  derived and/or modified CDS sequence (wt) from hemagglutinin__InfluenzaA__ADG27948

SEQ ID NO: 36821 - RNA, 1701 nt, Artificial Sequence; identical to SEQ ID NO: 34676
  derived and/or modified CDS sequence (wt) from hemagglutinin__InfluenzaA__ADG27966

SEQ ID NO: 36822 - RNA, 1701 nt, Artificial Sequence
  derived and/or modified CDS sequence (wt) from hemagglutinin__InfluenzaA__ADG27974
augaaggcaauacuaguaguucugcuauauacauuugcaaccgcaaaugcagacacauuauguauagguuaucaugcgaacaauucaacagacacuguagacacaguacuagaaaagaauguaacaguaacacacucuguuaaccuucuagaagacaagcauaacgggaaacuaugcaaacuaagagggguagccccauuacauuuggguaaauguaacauugcuggcuggauccugggaaauccagagugugaaucacucuccacagcaagcucaugguccuacauuguggaaacaucuaguucagacaauggaacguguuacccaggagauuucaucgauuaugaggagcuaagagagcaauugagcucagugucaucauuugaaagguuugagauauuccccaagacaaguucauggcccaaucaugacucgaacaaagguguaacggcagcauguccucaugcuggagcaaaaagcuucuacaaaaauuuaauauggcuaguuaaaaaaggaaauucauacccaaagcucagcaaauccuacauuaaugauaaagggaaagaaguccucgugcuauggggcauucaccauccaucuacuagugcugaccaacaaagucucuaucagaaugcagaugcauauguuuuuguggggucaucaagauacagcaagaaguucaagccggaaauagcaauaaggcccaaagugagggaucaagaagggagaaugaacuauuacuggacacuaguagagccgggagacaaaauaacauucgaagcaacuggaaaucuagugguaccgagauaugcauucgcaauggaaagaaaugcuggaucugguauuaucauuucagauacaccaguccacgauugcaauacaacuugucagacacccaagggugcuauaaacaccagccucccauuucagaauauacauccgaucacaauuggaaaauguccaaaauauguaaaaagcacaaaauugagacuggccacaggauugaggaaugucccgucuauucaaucuagaggccuauuuggggccauugccgguuucauugaagggggguggacagggaugguagauggaugguacgguuaucaucaucaaaaugagcaggggucaggauaugcagccgaccugaagagcacacagaaugccauugacgagauuacuaacaaaguaaauucuguuauugaaaagaugaauacacaguucacagcaguagguaaagaguucaaccaccuggaaaaaagaauagagaauuuaaauaaaaaaguugaugaugguuuccuggacauuuggacuuacaaugccgaacuguugguucuauuggaaaaugaaagaacuuuggacuaccacgauucaaaugugaagaacuuauaugaaaagguaagaagccaguuaaaaaacaaugccaaggaaauuggaaacggcugcuuugaauuuuaccacaaaugcgauaacacgugcauggaaagugucaaaaaugggacuuaugacuacccaaaauacucagaggaagcaaaauuaaacagagaagaaauagaugggguaaagcuggaaucaacaaggauuuaccagauuuuggcgaucuauucaacugucgccaguucauugauacugguagucucccugggggcaaucaguuucuggaugugcucuaaugggucucuacaguguagaauauguauuuaa

SEQ ID NO: 36823 - RNA, 1701 nt, Artificial Sequence
  derived and/or modified CDS sequence (wt) from hemagglutinin__InfluenzaA__ADG27982
augaaggcaauacuaguaguucugcuauauacauuugcaaccgcaaaugcagacacauuauguauagguuaucaugcgaacaauucaacagacacuguagacacaguacuagaaaagaauguaacaguaacacacucuguuaaccuucuagaagacaagcauaacgggaaacuaugcaaacuaagagggguagccccauugcauuuggguaaauguaacauugcuggcuggauccugggaaauccagagugugaaucacucuccacagcaagcucaugguccuacauuguggaaacaucuaguucagacaauggaacguguuacccaggagauuucaucgauuaugaggagcuaagagagcaauugagcucagugucaucauuugaaagguuugagauauuccccaagacaaguucauggcccaaucaugacucgaacaaagguguaacggcagcauguccucaugcuggagcaaaaagcuucuacaaaaauuuaauauggcuaguuaaaaaaggaaauucauacccaaagcucagcaaauccuacauuaaugauaaagggaaagaaguccucgugcuauggggcauucaccauccaucuacuagugcugaccaacaaagucucuaucagaaugcagaugcauauguuuuuguggggucaucaagauacagcaagaaguucaagccggaaauagcaauaagacccaaagugagggaucaagaagggagaaugaacuauuacuggacacuaguagagccgggagacaaaauaacauucgaagcaacuggaaaucuagugguaccgagauaugcauucgcaauggaaagaaaugcuggaucugguauuaucauuucagauacaccaguccacgauugcaauacaacuugucagacacccaagggugcuauaaacaccagccucccauuucagaauauacauccgaucacaauuggaaaauguccaaaauauguaaaaagcacaaaauugagacuggccacaggauugaggaaugucccgucuauucaaucuagaggccuauuuggggccauugccgguuucauugaagggggguggacagggaugguagauggaugguacgguuaucaccaucaaaaugagcaggggucaggauaugcagccgaccugaagagcacacagaaugccauugacgagauuacuaacaaaguaaauucuguuauugaaaagaugaauacacaguucacagcaguagguaaagaguucaaccaccuggaaaaaagaauagagaauuuaaauaaaaaaguugaugaugguuuccuggacauuuggacuuacaaugccgaacuguugguucuauuggaaaaugaaagaacuuuggacuaccacgauucaaaugugaagaaauuauaugaaaagguaagaagccaguuaaaaaacaaugccaaggaaauuggaaacggcugcuuugaauuuuaccacaaaugcgauaacacgugcauggaaagugucaaaaaugggacuuaugacuacccaaaauacucagaggaagcaaaauuaaacagagaagaaauagaugggguaaagcuggaaucaacaaggauuuaccagauuuuggcgaucuauucaacugucgccaguucauugguacugguagucucccugggggcaaucaguuucuggaugugcucuaaugggucucuacaguguagaauauguauuuaa

SEQ ID NO: 36824 - RNA, 1701 nt, Artificial Sequence
  derived and/or modified CDS sequence (wt) from hemagglutinin__InfluenzaA__ADG27988
augaaggcaauacuaguaguucugcuauauacauuugcaaccgcaaaugcagacacauuauguauagguuaucaugcgaacaauucaacagacacuguagacacaguacuagaaaagaauguaacaguaacacacucuguuaaccuucuagaagacaagcauaacgggaaacuaugcaaacuaagagggguagccccauugcauuuggguaaauguaacauugcuggcuggauccugggaaauccagagugugaaucacucuccacagcaagcucaugguccuacauuguggaaacaucuaguucagacaauggaacguguuacccaggagauuucaucgauuaugaggagcuaagagagcaauugagcucagugucaucauuugaaagguuugagauauuccccaagacaaguucauggcccaaucaugacucgaacaaagguguaacggcagcauguccucaugcuggagcaaaaagcuucuacaaaaauuuaauauggcuaguuaaaaaaggaaauucauacccaaagcucagcaaauccuacauuaaugauaaagggaaagaaguccucgugcuauggggcauucaccauccaucuacuagugcugaccaacaaagucucuaucagaaugcagaugcauauguuuuuguggggucaucaagauacagcaagaaguucaagccggaaauagcaauaagacccaaagugagggaucaagaagggagaaugaacuauuacuggacacuaguagagccgggagacaaaauaacauucgaagcaacuggaaaucuagugguaccgagauaugcauucgcaauggaaagaaaugcuggaucugguauuaucauuucagauacaccaguccacgauugcaauacaacuugucagacacccaagggugccauaaacaccagccucccauuucagaauauacauccgaucacaauuggaaaauguccaaaauauguaaaaagcacaaaauugagacuggccacaggauugaggaaugucccgucuauucaaucuagaggccuauuuggggccauugccgguuucauugaagggggguggacagggaugguagauggaugguacgguuaucaccaucaaaaugagcaggggucaggauaugcagccgaccugaagagcacacagaaugccauugacgagauuacuaacaaaguaaauucuguuauugaaaagaugaauacacaguucacagcaguagguaaagaguucaaccaccuggaaaaaagaauagagaauuuaaauaaaaaaguugaugaugguuuccuggacauuuggacuuacaaugccgaacuguugguucuauuggaaaaugaaagaacuuuggacuaccacgauucaaaugugaagaacuuauaugaaaagguaagaagccaguuaaaaaacaaugccaaggaaauuggaaacggcugcuuugaauuuuaccacaaaugcgauaacacgugcauggaaagugucaaaaaugggacuuaugacuacccaaaauacucagaggaagcaaaauuaaacagagaagaaauagaugggguaaagcuggaaucaacaaggauuuaccagauuuuggcgaucuauucaacugucgccaguucauugguacugguagucucccugggggcaaucaguuucuggaugugcucuaaugggucucuacaguguagaauauguauuuaa

SEQ ID NO: 36825 - RNA, 1701 nt, Artificial Sequence; identical to SEQ ID NO: 34676
  derived and/or modified CDS sequence (wt) from hemagglutinin__InfluenzaA__ADG27997

SEQ ID NO: 36826 - RNA, 1701 nt, Artificial Sequence; identical to SEQ ID NO: 34676
  derived and/or modified CDS sequence (wt) from hemagglutinin__InfluenzaA__ADG28011

SEQ ID NO: 36827 - RNA, 1701 nt, Artificial Sequence; identical to SEQ ID NO: 36239
  derived and/or modified CDS sequence (wt) from hemagglutinin__InfluenzaA__ADG42093

SEQ ID NO: 36828 - RNA, 1701 nt, Artificial Sequence; identical to SEQ ID NO: 35845
  derived and/or modified CDS sequence (wt) from hemagglutinin__InfluenzaA__ADG42103

SEQ ID NO: 36829 - RNA, 1701 nt, Artificial Sequence
  derived and/or modified CDS sequence (wt) from hemagglutinin__InfluenzaA__ADG42113
augaaggcaauacuaguaguucugcuauauacauuugcaaccgcaaaugcagacacauuauguauagguuaucaugcgaacaauucaacagacacuguagacacaguacuagaaaagaauguaacaguaacacacucuguuaaccuucuagaagacaagcauaacgggaaacuaugcaaacuaagagggguagccccauugcauuuggguaaauguaacauugcuggcuggauccugggaaauccagagugugaaucacucuccacagcaagcucaugguccuacauuguggaaacaucuaguucagacaauggaacguguuacccaggagauuucaucgauuaugaggagcuaagagagcaauugagcucagugucaucauuugaaagguuugagauauuccccaagacaaguucauggcccaaucaugacucgaacaaagguguaacggcagcauguccucaugcuggagcaaaaagcuucuacaaaaauuuaauauggcuaguuaaaaaaggaaauucauacccaaagcucagcaaaucuuacauuaaugauaaagggaaagaaguccucgugcuauggggcauucaccauccaucuacuagugcugaccaacaaagucucuaucagaaugcagaugcauauguuuuuguggggacaucaagauacagcaagaaguucaagccggaaauagcaauaagacccaaagugagggaacaagaagggagaaugaacuauuacuggacacuaguagagccgggagacaaaauaacauucgaagcaacuggaaaucuagugguaccgagauaugcauucgcaauggaaagaaaugcuggaucugguauuaucauuucagauacaccaguccacgauugcaauacaacuugucagacacccaagggugcuauaaacaccagccucccauuucagaauauacauccgaucacaauuggaaaauguccaaaauauguaaaaagcacaaaauugagacuggccacaggauugaggaaugucccgucuauucaaucuagaggccuauuuggggccauugccgguuucauugaagggggguggacagggaugguagauggaugguacgguuaucaccaucaaaaugagcaggggucaggauaugcagccgaccugaagagcacacagaaugccauugacgagauuacuaacaaaguaaauucuguuauugaaaagaugaauacacaguucacagcaguagguaaagaguucaaccaccuggaaaaaagaauagagaauuuaaauaaaaaaguugaugaugguuuccuggacauuuggacuuacaaugccgaacuguugguucuauuggaaaaugaaagaacuuuggacuaccacgauucaaaugugaagaacuuauaugaaaagguaagaagccaguuaaaaaacaaugccaaggaaauuggaaacggcugcuuugaauuuuaccacaaaugcgauaacacgugcauggaaagugucaaaaaugggacuuaugacuacccaaaauacucagaagaagcaaaauuaaacagagaagaaauagaugggguaaagcuggaaucaacaaggauuuaccagauuuuggcgaucuauucaacugucgccaguucauugguacugguagucucccugggggcaaucaguuucuggaugugcucuaaugggucucuacaguguagaauauguauuuaa

SEQ ID NO: 36830 - RNA, 1701 nt, Artificial Sequence; identical to SEQ ID NO: 36626
  derived and/or modified CDS sequence (wt) from hemagglutinin__InfluenzaA__ADG42123

SEQ ID NO: 36831 - RNA, 1701 nt, Artificial Sequence
  derived and/or modified CDS sequence (wt) from hemagglutinin__InfluenzaA__ADG42133
augaaggcaauacuaguaguucugcuauauacauuugcaaccgcaaaugcagacacauuauguauagguuaucaugcgaacaauucaacagacacuguagacacaguacuagaaaagaauguaacaguaacacacucuguuaaccuucuagaagacaagcauaacgggaaacuaugcaaacuaagagggguagccccauugcauuuggguaaauguaacauugcuggcuggauccugggaaauccagagugugaaucacucuccacagcaagcucaugguccuacauuguggaaacaucuaguucagacaauggaacguguuacccaggagauuucaucgauuaugaggagcuaagagagcaauugagcucagugucaucauuugaaagguuugagauauuccccaagacaaguucauggcccaaucaugacucgaacaaagguguaacggcagcauguccuuaugcuggagcaaaaagcuucuacaaaaauuuaauauggcuaguuaaaaaaggaaauucauacccaaagcucagcaaauccuacauuaaugauaaagggaaagaaguccucgugcuauggggaauucaccauccaucuacuagugcugaccaacaaagucucuaucagaaugcagaugcauauguuuuuguggggacaucaagauacagcaagaaguucaagccggaaauagcaauaagacccaaagugagggaucaagaagggagaaugaacuauuacuggacacuaguagagccgggagacaaaauaacauucgaagcaacuggaaaucuagugguaccgagauaugcauucgcaauggaaagaaaugcuggaucugguauuaucauuucagauacaccaguccacgauugcaauacaacuugucagacacccaagggugcuauaaacaccagccucccauuucagaauauacauccgaucacaauuggaaaauguccaaaauauguaaaaagcacaaaauugagacuggucacaggauugaggaaugucccgucuauucaaucuagaggccuauuuggggccauugccgguuucauugaagggggguggacagggaugguagauggaugguacgguuaucaccaucaaaaugagcaggggucaggauaugcagccgaccugaagagcacacagcaugccauugacgagauuacuaacaaaguaaauucuguuauugaaaagaugaauacacaguucacagcaguagguaaagaguucaaccaccuggaaaaaagaauagagaauuuaaauaaaaaaguugaugaugguuuccuggacauuuggacuuacaaugccgaacuguugguucuauuggaaaaugaaagaacuuuggacuaccacgauucaaaugugaagaacuuauaugaaaagguaagaagccaguuaaaaaacaaugccaaggaaauuggaaacggcugcuuugaauuuuaccacaaaugcgauaacacgugcauggaaagugucaaaaaugggacuuaugacuacccaaaauacucagaggaagcaaaauuaaacagagaagaaauagaugggguaaagcuggaaucaacaaggauuuaccagauuuuggcgaucuauucaacugucgccaguucauugguacugguagucucccugggggcaaucaguuucuggaugugcucuaaugggucucuacaguguagaauauguauuuaa

SEQ ID NO: 36832 - RNA, 1701 nt, Artificial Sequence
  derived and/or modified CDS sequence (wt) from hemagglutinin__InfluenzaA__ADG42143
augaaggcaauacuaguaguucugcuauauacauuugcaaccgcaaaugcagacacauuauguauagguuaucaugcgaacaauucaacagacacuguagacacaguacuagaaaagaauguaacaguaacacacucuguuaacauucuagaagacaagcauaacgggaaacuaugcaaacuaagagggguagccccauugcauuuggguaaauguaacauugcuggcuggauccugggaaauccagagugugaaucacucuccacagcaagcucaugguccuacauuguggaaacaucuaguucagacaauggaacguguuacccaggagauuucaucgauuaugaggagcuaagagagcaauugagcucagugucaucauuugaaagguuugagauauuccccaagacaaguucauggcccaaucaugacucgaacaaagguguaacggcagcauguccucaugcuggagcaaaaagcuucuacaaaaauuuaauuuggcuaguuaaaaaaggaaauucauacccaaagcucagcaaauccuacauuaaugauaaagggaaagaaguccucgugcuauggggcauucaccauccaucuacuagugcugaccaacaaagucucuaucagaaugcagaugcauauguuuuuguggggucaucaagauacagcaagaaguucaagccggaaauagcaauuagacccaaagugagggaucaagaagggagaaugaacuauuacuggacacuaguagagccgggagacaaaauaacauucgaagcaacuggaaaucuagugguaccgagauaugcauucgcaauggaaaaaaaugcuggaucugguauuaucauuucagauacaccaguccaugauugcaauacaacuugucagacacccaagggugcuauaaacaccagccucccauuucagaauauacauccgaucacaauuggaaaauguccaaaauauguaaaaagcacaaaauugagacuggccacaggauugaggaaugucccgucuauucaaucuagaggccuauuuggggccauugccgguuucauugaagggggguggacagggaugguagauggaugguacgguuaucaccaucaaaaugagcaggggucaggauaugcagccgaccugaagagcacacagaaugccauugacgagauuacuaacaaaguaaauucuguuauugaaaagaugaauacacaguucacagcaguagguaaagaguucaaccaccuggaaaaaagaauagagaacuuaaauaaaaaaguugaugaugguuuccuggacauuuggacuuacaaugccgaacuguugguucuauuggaaaaugaaagaacuuuggacuaccacgauucaaaugugaagaacuuauaugaaaagguaagaagccagcuaaaaaacaaugccaaggaaguuggaaacggcugcuuugaauuuuaccacaaaugcgauaacacgugcauggaaagugucaaaaaugggacuuaugacuacccaaaauacucagaggaagcaaaauuaaacagagaagaaauagaugggguaaagcuggaaucaacaaggauuuaccagauuuuggcgaucuauucaacugccgccaguucauugguacugguagucucccugggggcaaucaguuucuggaugugcucuaaugggucucuacaguguagaauauguauuuaa

SEQ ID NO: 36833 - RNA, 1701 nt, Artificial Sequence
  derived and/or modified CDS sequence (wt) from hemagglutinin__InfluenzaA__ADG42153
augaaggcaauacuaguaguucugcuauauacauuugcaaccgcaaaugcagacacauuauguauagguuaucaugcgaacaauucaacagacacuguagacacaguacuagaaaagaauguaacaguaacacacucuguuaaccuucuagaagacaagcauaacgggaaacuaugcaaacuaagagggguagccccauugcauuuggguaaauguaacauugcuggcuggauccugggaaauccugagugugaaucacucuccacagcaagcucaugguccuacauuguggaaacaucuaguucagacaauggaacguguuacccaggagauuucaucgauuaugaggagcuaagagagcaauugagcucagugucaucauuugaaagguuugagauauuccccaagacaaguucauggcccaaucaugacucgaacaaagguauaacggcagcauguccucaugcuggagcaaaaagcuucuacaaaaauuuaauauggcuaguuaaaaaaggaaauucauacccaaagcucagcaaauccuacauuaaugauaaagggaaagaaguccucgugcuauggggcauucaccauccaucuacuagugcugaccaacaaagucucuaucagaaugcagaugcauauguuuuuguggggacaucaagauacagcaagaaguucaagccggaaauagcaauaagacccaaagugagggaucaagaagggagaaugaacuauuacuggacacuaguagagccgggagacaaaauaacauucgaagcaacuggaaaucuagugguaccgagauaugcauucgcaauggaaagaaaugcuggaucugguauuaucauuucagauacaccaguccucgauugcaauacaacuugucagacacccaagggugcuauaaacaccagccucccauuucagaauauacauccgaucacaauuggaaaauguccaaaauauguaaaaagcacaaaauugagacuggccacaggauugaggaaugucccgucuauucaaucuagaggccuauuuggggccauugccgguuucauugaagggggguggacagggaugguagauggaugguacgguuaucaccaucaaaaugagcaggggucaggauaugcagccgaccugaagagcacacagaaugccauugacgagauuacuaacaaaguaaauucuguuauugaaaagaugaauacacaguucacagcaguagguaaagaguucaaccaccuggaaaaaagaauagagaauuuaaauaaaaagguugaugaugguuuccuggacauuuggacuuacaaugccgaacuguugguucuauuggaaaaugaaagaacuuuggacuaccacgauucaaaugugaagaacuuauaugaaaagguaagaagccaguuaaaaaacaaugccaaggaaauuggaaacggcugcuuugaauuuuaccacaaaugcgauaacacgugcauggaaagugucaaaaaugggacuuaugacuacccaaaauacucagaggaagcaaaauuaaacagagaagaaauagaugggguaaagcuggaaucaacaaggauuuaccagauuuuggcgaucuauucaacugucgccaguucauugguacugguagucucccugggggcaaucaguuucuggaugugcucuaaugggucucuacaguguagaauauguauuuaa

SEQ ID NO: 36834 - RNA, 1701 nt, Artificial Sequence
  derived and/or modified CDS sequence (wt) from hemagglutinin__InfluenzaA__ADG42193
augaaggcaauacuaguaguucugcuauauacauuugcaaccgcaaaugcagacacauuauguauagguuaucaugcgaacaauucaacagacacuguagacacaguacuagaaaagaauguaacaguaacacacucuguuaaccuucuagaagacaagcauaacgggaaacuaugcaaacuaagagggguagccccauugcauuuggguaaauguaacauugcuggcuggauccugggaaauccagagugugaaucacucuccacagcaagcucaugguccuacauuguggaaacaucuaguucagacaauggaacguguuacccaggagauuucaucgauuaugaggagcuaagagagcaauugagcucagugucaucauuugaaagguuugagauauuccccaagacaaguucauggcccaaucaugacucgaacaaagguguaacggcagcauguccucaugcuggagcaaaaagcuucuacaaaaauuuaauauggcuaguuaaaaaaggaaauucauacccaaagcucagcaaauccuacauuaaugauaaagggaaagaaguccucgugcuauggggcauucaccauccaucuacuagugcugaccaacaaagucucuaucagaaugcagaugcauauguuuuuguggggacaucaagauacagcaagaaguucaagccggaaauagcaauaagacccaaagugagggaucaagaagggagaaugaacuauuacuggacacuaguagagccgggagacaaaauaacauucgaagcaacuggaaaucuagugguaccgagauaugcauucgcaauggaaagaaaugcuggaucugguauuaucauuucagauacaccaguucacgauugcaauacaacuugucagacacccaagggugcuauaaacaccagccucccauuucagaauauacauccgaucacaauuggaaaauguccaaaauauguaaaaagcacaaaauugagacuggccacaggauugaggaaugucccgucuauucaaucuagaggccuauuuggggccauugccgguuucauugaagggggguggacagggaugguagauggaugguacgguuaucaccaucaaaaugagcaggggucaggauaugcagccgaccugaagagcacacagaaugccauugacgagauuacuaauaaaguaaauucuguuauugaaaagaugaauacacaguucacagcaguagguaaagaguucaaccaccuggaaaaaagaauagagaauuuaaauaaaaaaguugaugaugguuuccuggacauuuggacuuacaaugccgaacuguugguucuauuggaaaaugaaagaacuuuggacuaccacgauucaaaugugaagaacuuauaugaaaagguaagaagccaguuaaaaaacaaugccaaggaaauuggaaacggcugcuuugaauuuuaccacaaaugcgauaacacgugcauggaaagugucaaaaaugggacuuaugacuacccaaaauacucagaggaagcaaaauuaaacagagaagaaauagaugggguaaagcuggaaucaacaaggauuuaccagauuuuggcgaucuauucaacugucgccaguucauugguacugguagucucccugggggcaaucaguuucuggaugugcucuaaugggucucuacaguguagaauauguauuuaa

SEQ ID NO: 36835 - RNA, 1701 nt, Artificial Sequence
  derived and/or modified CDS sequence (wt) from hemagglutinin__InfluenzaA__ADG42213
augaaggcaauacuaguaguucugcuauauacauuugcaaccgcaaaugcagacacauuauguauagguuaucaugcgaacaauucaacagacacuguagacacaguacuagaaaagaauguaacaguaacacacucuguuaaccuucuagaagacaagcauaacgggaaacuaugcaaacuaagagggguagccccauugcauuuggguaaauguaacauugcuggcuggauccugggaaauccagagugugaaucacucuccacagcaagcucaugguccuacauuguggaaacaucuaguucagacaauggaacguguuacccaggagauuucaucgauuaugaggagcuaagagagcaauugagcucagugucaucauuugaaagguuugagauauuccccaagacaaguucauggcccaaucaugacucgaacaaagguguaacggcagcauguccucaugcuggagcaaaaagcuucuacaaaaauuuaauauggcuaguuaaaaaaggaaauucauacccaaagcucagcaaauccuacauuaaugauaaagggaaagaaguccucgugcuauggggcauucaccauccauccacuagugcugaccaacaaagucucuaucagaaugcagaugcauauguuuuuguggggacaucaagauacagcaagaaguucaagccggaaauagcaauaagacccaaagugagggaucaagaagggagaaugaacuauuacuggacacuaguagagccgggagacaaaauaacauucgaagcaacuggaaaucuagugguaccgagauaugcauucgcaauggaaagaaaugcuggaucugguauuaucauuucagauacaccaguccacgauugcaauacaacuugucagacacccaagggugcuauaaacaccagccucccauuucagaauauacauccgaucacaauuggaaaauguccaaaauauguaaaaagcacaaaauugagacuggccacaggauugaggaaugucccgucuauucaaucuagaggccuauuuggggccauugccgguuucauugaagggggguggacagggaugguagauggaugguacgguuaucaccaucaaaaugagcaggggucaggauaugcagccgaccugaagagcacacagaaugccauugacgagauuacuaacaaaguaaauucuguuauugaaaagaugaauacacaguucacagcaguagguaaagaguucaaccaccuggaaaaaagaauagagaauuuaaauaaaaaaguugaugaugguuuccuggacauuuggacuuacaaugccgaacuguugguucuauuggaaaaugaaagaacuuuggacuaccacgauucaaaugugaagaacuuauaugaaaagguaagaagccaguuaaaaaacaaugccaaggaaauuggaaacggcugcuuugaauuuuaccacaaaugcgauaacacgugcauggaaagugucaaaaaugggacuuaugacuacccaaaauacucagaggaagcaaaauuaaacagagaagaaauagaugggguaaagcuggaaucaacaaggauuuaccagauuuuggcgaucuauucaacugucgccaguucauugguacugguagucucccugggggcaaucaguuucuggaugugcucuaaugggucucuacaguguagaauauguauuuaa

SEQ ID NO: 36836 - RNA, 1701 nt, Artificial Sequence; identical to SEQ ID NO: 34681
  derived and/or modified CDS sequence (wt) from hemagglutinin__InfluenzaA__ADG42233

SEQ ID NO: 36837 - RNA, 1701 nt, Artificial Sequence
  derived and/or modified CDS sequence (wt) from hemagglutinin__InfluenzaA__ADG42243
augaaggcaauacuaguaguucugcuauauacauuugcaaccgcaaaugcagacacauuauguauagguuaucaugcgaacaauucaacagacacuguagacacaguacuagaaaagaauguaacaguaacacacucuguuaaccuucuagaagacaagcauaacgggaaacuaugcaaacuaagagggguagccccauugcauuuggguaaauguaacauugcuggcuggauccugggaaauccagagugugaaucacucuccacagcaagcucaugguccuacauuguggaaacaucuaguucagacaauggaacguguuacccaggagauuucaucgauuaugaggagcuaagagagcaauugagcucagugucaucauuugaaagguuugagauauuccccaagacaaguucauggcccaaucaugacucgaacaaagguguaacggcagcauguccucaugcuggagcaaaaagcuucuacaaaaauuuaauauggcuaguuaaaaaaggaaauucauacccaaagcucagcaaauccuacauuaaugauaaagggaaagaaguccucgugcuauggggcauucaccauccaucuacuagugcugaccaacaaagucucuaucagaaugcagaugcauauguuuuuguggggacaucaagauacagcaagaaguucaagccggaaauagcaauaagacccaaagugagggaucaagaagggagaaugaacuauuacuggacacuaguagagccgggagacaaaauaacauucgaagcaacuggaaaucuagugguaccgagauaugcauucgcaauggaaagaaaugcuggaucugguauuaucauuucagauacaccaguccucgauugcaauacaacuugucagacacccaagggugcuauaaacaccagccucccauuucagaauauacauccgaucacaauuggaaaauguccaaaauauguaaaaagcacaaaauugagacuggccacaggauugaggaaugucccgucuauucaaucuagaggccuauuuggggccauugccgguuucauugaagggggguggacagggaugguagauggaugguacgguuaucaccaucaaaaugagcaggggucaggauaugcagccgaccugaagagcacacagcaugccauugacgagauuacuaacaaaguaaauucuguuauugaaaagaugaauacacaguucacagcaguagguaaagaguucaaccaccuggaaaaaagaauagagaauuuaaauaaaaaaguugaugaugguuuccuggacauuuggacuuacaaugccgaacuguugguucuauuggaaaaugaaagaacuuuggacuaccacgauucaaaugugaagaacuuauaugaaaagguaagaagccaguuaaaaaacaaugccaaggaaauuggaaacggcugcuuugaauuuuaccacaaaugcgauaacacgugcauggaaagugucaaaaaugggacuuaugacuacccaaaauacucagaggaagcaaaauuaaacagagaagaaauagaugggguaaagcuggaaucaacaaggauuuaccagauuuuggcgaucuauucaacugucgccaguucauugguacugguagucucccugggggcaaucaguuucuggaugugcucuaaugggucucuacaguguagaauauguauuuaa

SEQ ID NO: 36838 - RNA, 1701 nt, Artificial Sequence
  derived and/or modified CDS sequence (wt) from hemagglutinin__InfluenzaA__ADG42253
augaaggcaauacuaguaguucugcuauauacauuugcaaccgcaaaugcagacacauuauguauagguuaucaugcgaacaauucaacagacacuguagacacaguacuagaaaagaauguaacaguaacacacucuguuaaccuucuagaagacaagcauaacggaaaacuaugcaaacuaagagggguagccccauugcauuuggguaaauguaacauugcuggcuggauccugggaaauccagagugugaaucacucuccacagcaagcucaugguccuacauuguggaaacaucuaguucagacaauggaacguguuacccaggagauuucaucgauuaugaggagcuaagagagcaauugagcucagugucaucauuugaaagguuugagauauuccccaagacaaguucauggcccaaucaugacucgaacaaagguguaacggcagcauguccucaugcuggagcaaaaagcuucuacaaaaauuuaauauggcuaguuaaaaaaggaaauucauacccaaagcucagcaaauccuacauuaaugauaaagggaaagaaguccucgugcuauggggcauucaccauccaucuacuagugcugaccaacaaagucucuaucagaaugcagaugcauauguuuuuguggggacaucaagauacagcaagaaguucaagccggaaauagcaauaagacccaaagugagggaucaagaagggagaaugaacuauuacuggacacuaguagagccgggagacaaaauaacauucgaagcaacuggaaaucuagugguaccgagauaugcauucgcaauggaaagaaaugcuggaucugguauuaucauuucagauacaccaguccacgauugcaauacaacuugucagacacccaagggugcuauaaacaccagccucccauuucagaauauacauccgaucacaauuggaaaauguccaaaauauguaaaaagcacaaaauugagacuggccacaggauugaggaaugucccgucuauucaaucuagaggccuauuuggggccauugccgguuucauugaagggggguggacagggaugguagauggaugguacgguuaucaccaucaaaaugagcaggggucaggauaugcagccgaccugaagagcacacagcaugccauugacgagauuacuaacaaaguaaauucuguuauugaaaagaugaauacacaguucacagcaguagguaaagaguucaaccaccuggaaaaaagaauagagaauuuaaauaaaaaaguugaugaugguuuccuggacauuuggacuuacaaugccgaacuguugguucuauuggaaaaugaaagaacuuuggacuaccacgauucaaaugugaagaacuuauaugaaaagguaagaagccaguuaaaaaacaaugccaaggaaauuggaaacggcugcuuugaauuuuaccacaaaugcgauaacacgugcauggaaagugucaaaaaugggacuuaugacuacccaaaauacucagaggaagcaaaauuaaacagagaagaaauagaugggguaaagcuggaaucaacaaggauuuaccagauuuuggcgaucuauucaacugucgccaguucauugguacugguagucucccugggggcaaucaguuucuggaugugcucuaaugggucucuacaguguagaauauguauuuaa

SEQ ID NO: 36839 - RNA, 1701 nt, Artificial Sequence; identical to SEQ ID NO: 34714
  derived and/or modified CDS sequence (wt) from hemagglutinin__InfluenzaA__ADG42263

SEQ ID NO: 36840 - RNA, 1701 nt, Artificial Sequence; identical to SEQ ID NO: 36327
  derived and/or modified CDS sequence (wt) from hemagglutinin__InfluenzaA__ADG42273

SEQ ID NO: 36841 - RNA, 1701 nt, Artificial Sequence
  derived and/or modified CDS sequence (wt) from hemagglutinin__InfluenzaA__ADG42283
augaaggcaauacuaguaguucugcuauauacauuugcaaccgcaaaugcagacacauuauguauagguuaucaugcgaacaauucaacagacacuguagacacaguauuagaaaagaauguaacaguaacacacucuguuaaccuucuagaagacaagcauaacgggaaacuaugcaaacuaagagggguagccccauugcauuuggguaaauguaacauugcuggcuggauccugggaaauccagagugugaaucacucuccacagcaagcucaugguccuacauuguggaaacaucuaguucagacaauggaacguguuacccaggagauuucaucgauuaugaggagcuaagagagcaauugagcucagugucaucauuugaaagguuugagauauuccccaagacaaguucauggcccaaucaugacucgaacaaagguguaacggcagcauguccucaugcuggagcaaaaagcuucuacaaaaauuuaauauggcuaguuaaaaaaggaaauucauacccaaagcucagcaaauccuacauuaaugauaaagggaaagaaguccucgugcuauggggcauucaccauccaucuacuagugcugaccaacaaagucucuaucagaaugcagaugcauauguuuuuguggggacaucaagauacagcaagaaguucaagccggaaauagcaauaagacccaaagugagggaucaagaagggagaaugaacuauuacuggacacuaguagaaccgggagacaaaauaacauucgaagcaacuggaaaucuagugguaccgagauaugcauucgcaauggaaagaaaugcuggaucugguauuaucauuucagauacaccaguccacgauugcaauacaacuugucagacacccaagggugcuauaaacaccagccucccauuucagaauauacauccgaucacaauuggaaaauguccaaaauauguaaaaagcacaaaauugagacuggccacaggauugaggaauaucccgucuauucaaucuagaggccuauuuggggccauugccgguuucauugaagggggguggacagggaugguagauggaugguacgguuaucaccaucaaaaugagcaggggucaggauaugcagccgaccugaagagcacacagaaugccauugacgagauuacuaacaaaguaaauucuguuauugaaaagaugaauacacaguucacagcaguagguaaagaguucaaccaccuggaaaaaagaauagagaauuuaaauaaaaagguugaugaugguuuccuggacauuuggacuuacaaugccgaacuguugguucuauuggaaaaugaaagaacuuuggacuaccacgauucaaaugugaagaacuuauaugaaaagguaagaagccaguuaaaaaacaaugccaaggaaauuggaaacggcugcuuugaauuuuaccacaaaugcgauaacacgugcauggaaagugucaaaaacgggacuuaugacuacccaaaauacucagaggaagcaaaauuaaacagagaagaaauagaugggguaaagcuggaaucaacaaggauuuaccagauuuuggcgaucuauucaacugucgccaguucauugguacugguagucucccugggggcaaucaguuucuggaugugcucuaaugggucucuacaguguaggauauguauuuaa

SEQ ID NO: 36842 - RNA, 1701 nt, Artificial Sequence
  derived and/or modified CDS sequence (wt) from hemagglutinin__InfluenzaA__ADG42293
augaaggcaauacuaguaguucugcuauauacauuugcaaccgcaaaugcagacacauuauguauagguuaucaugcgaacaauucaacagacacuguagacacaguacuagaaaagaauguaacaguaacacacucuguuaaccuucuagaagacaagcauaacgggaaacuaugcaaacuaagagggguagccccauugcauuuggguaaauguaacauugcuggcuggauccugggaaauccagagugugaaucacucuccacagcaagcucaugguccuacauuguggaaacaucuaguucagacaauggaacguguuacccaggagacuucaccgauuaugaggagcuaagagagcaauugagcucagugucaucauuugaaagguuugagauauuccccaagacaaguucauggcccaaucaugacucgaacaaagguguaacggcagcaugcccucaugcuggagcaaaaagcuucuacaaaaauuuaauauggcuaguuaaaaaaggaaauucauacccaaagcucagcaaauccuacauuaaugauaaagggaaagaaguccucgugcuauggggcauucaccauccaucuacuagugcugaccaacaaagucucuaucagaaugcagaugcauauguuuuuguggggacaucaagauacagcaagaaguucaagccggaaauagcaauaagacccaaagugagggaucaagaagggagaaugaacuauuacuggacacuaguagagccgggagacaaaauaacauucgaagcaacuggaaaucuagugguaccgagauaugcauucgcaauggaaagaaaugcuggaucugguauuaucauuucagauacaccaguccacgauugcaauacaacuugucagacacccaagggugcuauaaacaccagccucccauuucagaauauacauccgaucacaauuggaaaauguccaaaauauguaaaaagcacaaaauugagacuggccacaggauugaggaaugucccgucuauucaaucuagaggccuauuuggggccauugccgguuucauugaagggggguggacagggaugguagauggaugguacgguuaucaccaucaaaaugagcaggggucaggauaugcagccgaccugaagagcacacagaaugccauugacgagauuacuaacaaaguaaauucuguuauugaaaaaaugaauacacaguucacagcaguagguaaagaguucaaccaccuggaaaaaagaauagagaauuuaaauaaaaaaguugaugaugguuuccuggacauuuggacuuacaaugccgaacuguugguucuauuggaaaaugaaagaacuuuggacuaccacgauucaaaugugaagaacuuauaugaaaagguaagaagccaguuaaaaaacaaugccaaggaaauuggaaacggcugcuuugaauuuuaccacaaaugcgauaacacgugcauggaaagugucaaaaaugggacuuaugacuacccaaaauacucagaggaagcaaaauuaaacagagaagaaauagaugggguaaagcuggaaucaacaaggauuuaccagauuuuggcgaucuauucaacugucgccaguucauugguacugguagucucccugggggcaaucaguuucuggaugugcucuaaugggucucuacaguguagaauauguauuuaa

SEQ ID NO: 36843 - RNA, 1701 nt, Artificial Sequence
  derived and/or modified CDS sequence (wt) from hemagglutinin__InfluenzaA__ADG42303
augaaggcaauacuaguaguucugcuauauacauuugcaaccgcaaaugcagacacauuauguauagguuaucaugcgaacaauucaacagacacuguagacacaguacuagaaaagaauguaacaguaacacacucuguuaaccuucuagaagacaagcauaacgggaaacuaugcaaacuaaaagggguagccccauugcauuuggguaaauguaacauugcuggcuggauccugggaaauccagagugugaaucacucuccacagcaagcucaugguccuacauuguggaaacaucuaguucagacaauggaacguguuacccaggagauuucaucgauuaugaggagcuaagagagcaauugagcucagugucaucauuugaaagguuugagauauuccccaagacaaguucauggcccaaucaugacucgaacaaagguguaacggcagcauguccucaugcuggagcaaaaagcuucuacaaaaauuuaauauggcuaguuaaaaaaggaaauucauacccaaagcucagcaaauccuacauuaaugauaaagggaaagaaguccucguguuauggggcauucaccauccaucuacuagugcugaccaacaaagucucuaucagaaugcagaugcauauguuuuuguggggacaucaagauacagcaagaaguucaagccggaaauagcaauaagacccaaagugagggaucaagaagggagaaugaacuauuacuggacacuaguagagccgggagacaaaauaacauucgaagcaacuggaaaucuaguaguaccgagauaugcauucgcaauggaaagaaaugcuggaucugguauugucauuucagauacaccaguccacgauugcaauacaacuugucagacacccaagggugcuauaaacaccagccucccauuucagaauauacauccgaucacaauuggaaaauguccaaaauauguaaaaagcacaaaauugagacuggccacaggauugaggaaugucccgucuauucaaucuagaggccuauuuggggccauugccgguuucauugaagggggguggacagggaugguagauggaugguacgguuaucaccaucaaaaugagcaggggucaggauaugcagccgaccugaaaagcacacagaaugccauugacgagauuacuaacaaaguaaauucuguuauugaaaagaugaauacacaguucacagcaguagguaaagaguucaaccaccuggaaaaaagaauagagaauuuaaauaaaaaaguugaugaugguuuccuggacauuuggacuuacaaugccgaacuguugguucuauuggaaaaugaaagaacuuuggacuaccacgauucaaaugugaagaacuuauaugaaaagguaagaagccaguuaaaaaacaaugccaaggaaauuggaaacggcugcuuugaauuuuaccacaaaugcgauaacacgugcauggaaagugucaaaaaugggacuuaugacuacccaaaauacucagaggaagcaaaauuaaacagagaagaaauagaugggguaaagcuggaaucaacaaggauuuaccagauuuuggcgaucuauucaacugucgccaguucauugguacugguagucucccugggggcaaucaguuucuggaugugcucuaaugggucucuacaguguagaauauguauuuaa

SEQ ID NO: 36844 - RNA, 1701 nt, Artificial Sequence
  derived and/or modified CDS sequence (wt) from hemagglutinin__InfluenzaA__ADG42313
augaaggcaauacuaguaguucugcuauauacauuugcaaccgcaaaugcagacacauuauguauagguuaucaugcgaacaauucaacagacacuguagacacaauacuagaaaagaauguaacaguaacacacucuguuaaccuucuagaagacaagcauaacgggaaacuaugcaaacuaagagggguagccccauugcauuuggguaaauguaacauugcuggcuggauccugggaaauccagagugugaaucacucuccacagcaagcucaugguccuacauuguggaaacaucuaguucagacaauggaacguguuacccaggagauuucaucgauuaugaggagcuaagagagcaauugagcucagugucaucauuugaaagguuugagauauuccccaagacaaguucauggcccaaucaugacucgaacaaagguguaacggcagcauguccucaugcuggagcaaaaagcuucuacaaaaauuuaauauggcuaguuaaaaagggaaauucauacccaaagcucagcaaauccuacauuaaugauaaagggaaagaaauccucgugcuauggggcauucaccauccaucuacuagugcugaccaacaaagucucuaucagaaugcagaugcauauguuuuuguggggacaucaagauacagcaagaaguucaagccggaaauagcaauaagacccaaagugagggaucaagaagggagaaugaacuauuacuggacacuaguagagccgggagacaaaauaacauucgaagcaacuggaaaucuagugguaccgagauaugcauucgcaauggaaagaaaugcuggaucugguauuaucauuucagauacaccaguccacgauugcaauacaacuugucagacacccaagggugcuauaaacaccagccucccauuucagaauauacauccgaucacaauuggaaaauguccaaaauauguaaaaagcacaaaauugagacuggccacaggauugaggaaugucccgucuauucaaucuagaggccuauuuggggccauugccgguuucauugaagggggguggacagggaugguagauggaugguacgguuaucaccaucaaaaugagcaggggucaggauaugcagccgaccugaagagcacacagaaugccauugacgagauuacuaacaaaguaaauucuguuauugaaaagaugaauacacaguucacagcaguagguaaagaguucaaccaccuggaaaaaagaauagagaauuuaaauaaaaagguugaugaugguuuccuggacauuuggacuuacaaugccgaacuguugguucuauuggaaaaugaaagaacuuuggacuaccacgauucaaaugugaagaacuuauaugaaaagguaagaagccaguuaaaaaacaaugccaaggaaauuggaaacggcugcuuugaauuuuaccacaaaugcgauaacacgugcauggaaagugucaaaaaugggacuuaugacuacccaaaauacucagaggaagcaaaauuaaacagagaagaaauagaugggguaaagcuggaaucaacaaggauuuaccagauuuuggcgaucuauucaacugucgccaguucauugguacugguagucucccugggggcaaucaguuucuggaugugcucuaaugggucucuacaguguagaauauguauuuaa

SEQ ID NO: 36845 - RNA, 1701 nt, Artificial Sequence
  derived and/or modified CDS sequence (wt) from hemagglutinin__InfluenzaA__ADG42323
augaaggcaauacuaguaguucugcuauauacauuugcaaccgcaaaugcagacacauuauguauagguuaucaugcgaacaauucaacagacacuguagacacaguacuagaaaagaauguaacaguaacacacucuguuaaccuucuagaagacaagcauaacgggaaacuaugcaaacuaagagggguagccccauugcauuuggguaaauguaacauugcuggcuggauccugggaaauccagagugugaaucacucuccacagcaagcucaugguccuacauuguggaaacaucuaguucagacaauggaacauguuacccaggagauuucaucgauuaugaggagcuaagagagcaauugagcucagugucaucauuugaaagguuugagauguuccccaagacaaguucauggcccaaucaugacucgaacaaagguguaacggcagcauguccucaugcuggagcaaaaagcuucuacaaaaauuuaauauggcuaguuaaaaaaggaaauucauacccaaagcucagcaaauccuacauuaaugauaaagggaaagaaguccucgugcuauggggcauucaccauccauccacuagugcugaccaacaaagucucuaucagaaugcagaugcauauguuuuuguggggacaucaagauacagcaagaaguucaagccggaaauagcaauaagacccaaagugagggaucaagaagggagaaugaacuauuacuggacacuaguagagccgggagacaaaauaacauucgaagcaacuggaaaucuagugguaccgagauacgcauucgcaauggaaagaaaugcuggaucugguauuaucauuucagauacaccaguucacgauugcaauacaacuugucagacacccaagggugcuauaaacaccagccucccauuucagaauauacauccgaucacaauuggaaaauguccaaaauauguaaaaagcacaaaauugagacuggccacaggauugaggaaugucccgucuauucaaucuagaggccuauuuggggccauugccgguuucauugaagggggguggacagggaugguagauggaugguacgguuaucaccaucaaaaugagcaggggucaggauaugcagccgaccugaagagcacacagaaugccauugacgagauuacuaacaaaguaaauucuguuauugaaaagaugaauacacaguucacagcaguagguaaagaguucaaccaccuggaaaaaagaauagagaauuuaaauaaaaaaguugaugaugguuuccuggacauuuggacuuacaaugccgaacuguugguucuauuggaaaaugaaagaacuuuggacuaccacgauucaaaugugaagaacuuauaugaaaagguaagaagccaguuaaaaaacaaugccaaggaaguuggaaacggcugcuuugaauuuuaccacaaaugcgauaacacgugcauggaaagugucaaaaaugggacuuaugacuacccaaaauacucagaggaagcaaaauuaaacagagaagaaauagaugggguaaagcuggaaucaacaaggauuuaccagauuuuggcgaucuauucaacugucgccaguucauugguacugguagucucccugggggcaaucaguuucuggaugugcucuaaugggucucuacaguguagaauauguauuuaa

SEQ ID NO: 36846 - RNA, 1701 nt, Artificial Sequence
  derived and/or modified CDS sequence (wt) from hemagglutinin__InfluenzaA__ADG42333
augaaggcaauacuaguaguucugcuauauacacuugcaaccgcaaaugcagacacauuauguauagguuaucaugcgaacaauucaacagacacuguagacacaguacuagaaaagaauguaacaguaacacacucuguuaaccuucuagaagacaagcauaacgggaaacuaugcaaacuaagagggauagccccauugcauuuggguaaauguaacauugcuggcuggauccugggaaauccagagugugaaucacucuccacagcaagcucaugguccuacauuguggaaacaucuaguucagacaauggaacguguuacccaggagauuucaucgauuaugaggagcuaagagagcaauugagcucagugucaucauuugaaagguuugagauauuccccaagacaaguucauggcccaaucaugacucgaacaaagguguaacggcagcauguccucaugcuggagcaaaaagcuucuacaaaaauuuaauauggcuaguuaaaaaaggaaauucauacccaaagcucagcaaauccuacauuaaugauaaagggaaagaaguccucgugcuauggggcauucaccauccaucuacuagugcugaccaacaaagucucuaucagaaugcagaugcauauguuuuuguggggacaucaagauacagcaagaaguucaagccggaaauagcaauaagacccaaagugagggaucaagaagggagaaugaacuauuacuggacacuaguagagccgggagacaaaauaacauucgaagcaacuggaaaucuagugguaccgagauaugcauucgcaauggaaagaaaugcuggaucugguauuaucauuucagaugcaccaguccacgauugcaauacaacuugucagacacccaagggugcuauaaacaccagccucccauuucagaauauacauccgaucacaauuggaaaauguccaaaauauguaaaaagcacaaaauugagacuggccacaggauugaggaaugucccgucuauucaaucuagaggccuauuuggggccauugccgguuucauugaagggggguggacagggaugguagauggaugguacgguuaucaccaucaaaaugagcaggggucaggauaugcagccgaccugaagagcacacagaaugccauugacgagauuacuaacaaaguaaauucuguuauugaaaagaugaauacacaguucacagcaguagguaaagaguucaaccaccuggaaaaaagaauagagaauuuaaauaaaaaaguugaugaugguuuccuggacauuuggacuuacaaugccgaacuguugguucuauuggaaaaugaaagaacuuuggacuaccacgauucaaaugugaagaacuuauaugaaaagguaagaagccaguuaaaaaacaaugccaaggaaauuggaaacggcugcuuugaauuuuaccacaaaugcgauaacacgugcauggaaagugucaaaaaugggacuuaugacuacccaaaauacucagaggaagcaaaauuaaacagagaagaaauagaugggguaaagcuggaaucaacaaggauuuaccagauuuuggcgaucuauucaacugucgccaguucauugguacugguagucucccugggggcaaucaguuucuggaugugcucuaaugggucucuacaguguagaauauguauuuaa

SEQ ID NO: 36847 - RNA, 1701 nt, Artificial Sequence
  derived and/or modified CDS sequence (wt) from hemagglutinin__InfluenzaA__ADG42343
augaaggcaauacuaguaguucugcuauauacauuugcaaccgcaaaugcagacacauuauguauagguuaucaugcgaacaauucaacagacacuguagacacaguacuagaaaagaauguaacaguaacacacucuguuaaccuucuagaagacaagcauaacgggaaacuaugcaaacuaagagggguagccccauugcauuuggguaaauguaacauugcuggcuggauccugggaaauccagagugugaaucacucuccacagcaagcucaugguccuacauuguggaaacaucuaguucagacaauggaacguguuacccaggagauuucaucgauuaugaggagcuaagagagcaauugagcucagugucaucauuugaaagguuugagauauuccccaagacaaguucauggcccaaucaugacucgaacaaagguguaacggcagcauguccucaugcuggagcaaaaagcuucuacaaaaauuuaauauggcuaguuaaaaaaggaaauucauacccaaagcucagcaaauccuacauuaaugauaaagggaaagaaguccucgugcuuuggggcauucaccauccaucuacuagugcugaccaacaaagucucuaucagaaugcagaugcauauguuuuuguggggacaucaagauacagcaagaaguucaagccggaaauagcaauaagacccaaagugagggaucaagaagggagaaugaacuauuacuggacacuaguagagccgggagacaaaauaacauucgaagcaacuggaaaucuagugguaccgagauaugcauucgcaauggaaaguaaugcuggaucugguauuaucauuucagauacaccaguccacgauugcaauacaacuugucagacacccaagggugcuauaaacaccagccucccauuucagaauauacauccgaucacaauuggaaaauguccaaaauauguaaaaagcacaaaauugagacuagccacaggauugaggaaugucccgucuauucaaucuagaggccuauuuggggccauugccgguuucauugaagggggguggacagggaugguagauggaugguacgguuaucaccaucaaaaugagcaggggucaggauaugcagccgaccugaagagcacacagcaugccauugacgagauuacuaacaaaguaaauucuguuauugaaaagaugaauacacaguucacagcaguagguaaagaguucaaccaccuggaaaaaagaauagagaauuuaaauaaaaaaguugaugaugguuuccuggacauuuggacuuacaaugccgaacuguugguucuauuggaaaaugaaagaacuuuggacuaccacgauucaaaugugaagaacuuauaugaaaagguaagaagccaguuaaaaaacaaugccaaggaaauuggaaacggcugcuuugaauuuuaccacaaaugugauaacacgugcauggaaagugucaaaaaugggacuuaugacuacccaaaauacucagaggaagcaaaauuaaacagagaagaaauagaugggguaaagcuggaaucaacaaggauuuaccagauuuuggcgaucuauucaacugucgccaguucauugguacugguagucucccugggggcaaucaguuucuggaugugcucuaaugggucucuacaguguagaauauguauuuaa

SEQ ID NO: 36848 - RNA, 1701 nt, Artificial Sequence
  derived and/or modified CDS sequence (wt) from hemagglutinin__InfluenzaA__ADG42363
augaaggcaauacuaguaguucugcuauauacauuugcaaccgcaaaugcagacacauuauguauagguuaucaugcgaacaauucaacagacacuguagacacaguacuagaaaagaauguaacaguaacacacucuguuaaccuucuagaagacaagcauaacgggaaacuaugcaaacuaagagggauagccccauugcauuuggguaaauguaacauugcuggcuggauccugggaaauccagagugugaaucacucuccacagcaagcucaugguccuacauuguggaaacaucuaguucagacaauggaacguguuacccaggagauuucaucgauuaugaggagcuaagagagcaauugagcucagugucaucauuugaaagguuugagauauuccccaagacaaguucauggcccaaucaugacucgaacaaagguguaacggcagcauguccucaugcuggagcaaaaagcuucuacaaaaauuuaauauggcuaguuaaaaaaggaaauucauacccaaagcucagcaaauccuacauuaaugauaaagggaaagaaguccucgugcuauggggcauucaccauccaucuacuagugcugaccaacaaagucucuaucagaaugcagaugcauauguuuuuguggggacaucaagauacagcaagaaguucaagccggaaauagcaauaagacccaaagugagggaucaagaagggagaaugaacuauuacuggacacuaguagagccgggagacaaaauaacauucgaagcaacuggaaaucuagugguaccgagauaugcauucgcaauggaaagaaaugcuggaucugguauuaucauuucagauacaccaguccacgauugcaauacaacuugucagacacccaagggugcuauaaacaccagccucccauuucagaauauacauccgaucacaauuggaaaauguccaaaauauguaaaaagcacaaaauugagacuggccacaggauugaggaaugucccgucuauucaaucuagaggccuauuuggggccauugccgguuucauugaagggggguggacagggaugguagauggaugguacgguuaucaccaucaaaaugagcaggggucaggauaugcagccgaccugaagagcacacagaaugccauugacgagauuacuaacaaaguaaauucuguuauugaaaagaugaauacacaguucacagcaguagguaaagaguucaaccaccuggaaaaaagaauagagaauuuaaauaaaaaaguugaugaugguuuccuggacauuuggacuuacaaugccgaacuguugguucuauuggaaaaugaaagaacuuuggacuaccacgauucaaaugugaagaacuuauaugaaaagguaagaagccaguuaaaaaacaaugccaaggaaauuggaaacggcugcuuugaauuuuaccacaaaugcgauaacacgugcauggaaagugucaaaaaugggacuuaugacuacccaaaauacucagaggaagcaaaauuaaacagagaagaaauagaugggguaaagcuggaaucaacaaggauuuaccagauuuuggcgaucuauucaacugucgccaguucauugguacugguagucucccugggggcaaucaguuucuggaugugcucuaaugggucucuacaguguagaauauguauuuaa

SEQ ID NO: 36849 - RNA, 1701 nt, Artificial Sequence
  derived and/or modified CDS sequence (wt) from hemagglutinin__InfluenzaA__ADG42373
augaaggcaauacuaguaguucugcuauauacauuugcaaccgcaaaugcagacacauuauguauagguuaucaugcgaacaauucaacagacacuguagacacaguacuagaaaagaauguaacaguaacacacucuguuaaucuucuagaagacaagcauaacgggaaacuaugcaaacuaagagggguagccccauugcauuuggguaaauguaacauugcuggcuggauccugggaaauccagagugugaaucacucuccacagcaagcucaugguccuacauuguggaaacaucuaguucagacaauggaacguguuacccaggagauuucaucgauuaugaggagcuaagagagcaauugagcucagugucaucauuugaaagguuugagauauuccccaagacaaguucauggcccaaucaugacucgaacaaagguguaacggcagcauguccucaugcuggagcaaaaagcuucuacaaaaauuuaauauggcuaguuaaaaaaggaaauucauacccaaagcucagcaaauccuacauuaaugauaaagggaaagaaguccucgugcuauggggcauucaccauccaucuacuagugcugaccaacaaagucucuaucagaaugcagaugcauauguuuuuguggggacaucaagauacagcaagaaguucaagccggaaauagcaauaagacccaaagugagggaucaagaagggagaaugaacuauuacuggacacuaguagagccgggagacaaaauaacauucgaagcaacuggaaaucuagugguaccgagauaugcauucgcaauggaaagaaaugcuggaucugguauuaucauuucagauacaccaguccacgauugcaauacaacuugucagacacccaagggugcuauaaacaccagccucccauuucagaauauacauccgaucacaauuggaaaauguccaaaauauguaaaaagcacaaaauugagacuggccacaggauugaggaaugucccgucuauucaaucuagaggccuauuuggggccauugccgguuucauugaagggggguggacagggaugguagauggaugguacgguuaucaccaucaaaaugagcaggggucaggauaugcagccgaccugaagagcacacagaaugccauugacgagauuacuaacaaaguaaauucuguuauugaaaagaugaauacacaguucacagcaguagguaaagaguucaaccaccuggaaaaaagaauagagaauuuaaauaaaaaaguugaugaugguuuccuggacauuuggacuuacaaugccgaacuguugguucuauuggaaaaugaaagaacuuuggacuaccacgauucaaaugugaagaacuuauaugaaaagguaagaaaccaguuaaaaaacaaugccaaggaaauuggaaacggcugcuuugaauuuuaccacaaaugcgauaacacgugcauggaaagugucaaaaaugggacuuaugacuacccaaaauacucagaggaagcaaaauuaaacagagaagaaauagaugggguaaagcuggaaucaacaaggauuuaccagauuuuggcgaucuauucaacugucgccaguucauugguacugguagucucccugggggcaaucaguuucuggaugugcucuaaugggucucuacaguguagaauauguauuuaa

SEQ ID NO: 36850 - RNA, 1701 nt, Artificial Sequence
  derived and/or modified CDS sequence (wt) from hemagglutinin__InfluenzaA__ADG42393
augaaggcaauacuaguaguucugcuauauacauuugcaaccgcaaaugcagacacauuauguauagguuaucaugcgaacaauucaacagacacuguagacacaguacuagaaaagaauguaacaguaacacacucuguuaaccuucuagaagacaagcauaacgagaaacuaugcaaacuaagagggguagccccauugcauuuggguaaauguaacauugcuggcuggauccugggaaauccagagugugaaucacucuccacagcaagcucaugguccuacauuguggaaacaucuaguucagacaauggaacguguuacccaggagauuucaucgauuaugaggagcuaagagagcaauugagcucagugucaucauuugaaagguuugagauauuccccaagacaaguucauggcccaaucaugacucgaacaaagguguaacggcagcauguccucaugcuggagcaaaaagcuucuacaaaaauuuaauauggcuaguuaaaaaaggaaauucauacccaaagcucagcaaauccuacauuaaugauaaagggaaagaaguccucgugcuauggggcauucaccauccaucuacuagugcugaccaacaaagucucuaucagaaugcagaugcauauguuuuuguggggacaucaagauacagcaagaaguucaagccggaaauagcaauaagacccaaagugagggaacaagaagggagaaugaacuauuacuggacacuaguagagccgggagacaaaauaacauucgaagcaacuggaaaucuagugguaccgagauaugcauucgcaauggaaagaaaugcuggaucugguauuaucauuucagauacaccaguccacgauugcaauacaacuugucagacacccaagggugcuauaaacaccagccucccauuucagaauauacauccgaucacaauuggaaaauguccaaaauauguaaaaagcacaaaauugagacuggccacaggauugaggaaugucccgucuauucaaucuagaggccuauuuggggccauugccgguuucauugaagggggguggacagggaugguagauggaugguacgguuaucaccaucaaaaugagcaggggucaggauaugcagccgaccugaagagcacacagaaugccauugacgagauuacuaacaaaguaaauucuguuauugaaaagaugaauacacaguucacagcaguagguaaagaguucaaccaccuggaaaaaagaauagagaauuuaaauaaaaaaguugaugaugguuuccuggacauuuggacuuacaaugccgaacuguugguucuauuggaaaaugaaagaacuuuggacuaccacgauucaaaugugaagaacuuauaugaaaagguaagaagccaguuaaaaaacaaugccaaggaaauuggaaacggcugcuuugaauuuuaccacaaaugcgauaacacgugcauggaaagugucaaaaaugggacuuaugacuacccaaaauacucagaggaagcaaaauuaaacagagaagaaauagaugggguaaagcuggaaucaacaaggauuuaccagauuuuggcgaucuauucaacugucgccaguucauugguacuguuagucucccugggggcaaucaguuucuggaugugcucuaaugggucucuacaguguagaauauguauuuaa

SEQ ID NO: 36851 - RNA, 1701 nt, Artificial Sequence
  derived and/or modified CDS sequence (wt) from hemagglutinin__InfluenzaA__ADG42403
augaaggcaauacuaguaguucugcuauauacauuugcaaccgcaaaugcagacacauuauguauagguuaucaugcgaacaauucaacagacacuguagacacaguacuagaaaagaauguaacaguaacacacucuguuaaccuucuagaagacaagcauaacgggaaacuaugcaaacuaagagggguagccccauugcauuuggguaaauguaacauugcuggcuggauccugggaaauccagagugugaaucacucuccacagcaagcucaugguccuacauuguggaaacaucuaguucagacaauggaacguguuacccaggagauuucaucgauuaugaggagcuaagagagcaauugagcucagugucaucauuugaaagguuugagauauuccccaagacaaguucauggcccaaucaugacucgaacaaagguguaacggcagcauguccucaugcuggagcaaaaagcuucuacaaaaauuuaauauggcuaguuaaaaaaggaaauucauacccaaagcucagcaaauccuacauuaaugauaaagggaaagaaguccucgugcuauggggcauucaccauccaucuacuagugcugaccaacaaagucucuaucagaaugcagaugcauauguuuuuguggggacaucaagauacagcaagaaguucaagccggaaauagcaauaagacccaaagugagggaucaagaagggagaaugaacuauuacuggacacuaguagagccgggagacaaaauaacauucgaagcaacuggaaaucuagugguaccgagauaugcauucgcaauggaaagaaaugcuggaucugguauuaucauuucagauacaccaguccacgauugcaauacaacuugucagacacccaagggugcuauaaacaccagccucccauuucagaauauacauccgaucacaauuggaaaauguccaaaauauguaaaaagcacgaaauugagacuggccacaggauugaggaaugucccgucuauucaaucuagaggccuauuuggggccauugccgguuucauugaagggggguggacagggaugguagauggaugguacgguuaucaccaucaaaaugagcaggggucaggauaugcagccgaccugaagagcacacagaaugccauugacaagauuacuaacaaaguaaauucuguuauugaaaagaugaauacacaguucacagcaguagguaaagaguucaaccaccuggaaaaaagaauagagaauuuaaauaaaaaaguugaugaugguuuccuggacauuuggacuuacaaugccgaacuguugguucuauuggaaaaugaaagaacuuuggacuaccacgauucaaaugugaagaacuuauaugaaaagguaagaagccaguuaaaaaacaaugccaaggaaauuggaaacggcugcuuugaauuuuaccacaaaugcgauaacacgugcauggaaagugucaaaaaugggacuuaugacuacccaaaauacucagaggaagcaaaauuaaacagagaagaaauagaugggguaaagcuggaaucaacaaggauuuaccagauuuuggcgaucuauucaacugucgccaguucauugguacugguagucucccugggggcaaucaguuucuggaugugcucuaaugggucucuacaguguagaauauguauuuaa

SEQ ID NO: 36852 - RNA, 1701 nt, Artificial Sequence
  derived and/or modified CDS sequence (wt) from hemagglutinin__InfluenzaA__ADG42413
augaaggcaauacuaguaguucugcuauauacauuugcaaccgcaaaugcagacacauuauguauagguuaucaugcgaacaauucaacagacacuguagacacaguacuagaaaagaauguaacaguaacacacucuguuaaccuucuagaagacaagcauaacgggaaacuaugcaaacuaagagggguagccccauugcauuuggguaaauguaacauugcuggcuggauccugggaaauccagagugugaaucacucuccacagcaagcucaugguccuacauuguggaaacaucuaguucagacaauggaacguguuacccaggagauuucaucgauuaugaggagcuaagagagcaauugagcucagugucaucauuugaaagguuugagauauuccccaagacaaguucauggcccaaucaugacucgaacaaagguguaacggcagcauguccucaugcuggagcaaaaagcuucuacaaaaauuuaauauggcuaguuaaaaaaggaaauucauacccaaagcucagcaaauccuacauuaaugauaaagggaaagaaguccucgugcuauggggaauucaccauccaucuacuagugcugaccaacaaagucucuaucagaaugcagaugcauauguuuuuguggggacaucaagauacagcaagaaguucaagccggaaauagcaauaagacccaaagugagggaucaagaagggagaaugaacuauuacuggacacuaguagagccgggagacaaaauaacauucgaagcaacuggaaaucuagugguaccgagauaugcauucgcaauggaaagaaaugcuggaucugguauuaucauuucagauacaccaguccacgauugcaauacaacuugucagacacccaagggugcuauaaacaccagccucccauuucagaauauacauccgaucacaauuggaaaauguccaaaauauguaaaaagcacaaaauugagacuggccacaggauugaggaaugucccgucuauucaaucuagaggccuauuuggggccauugccgguuucauugaagggggguggacagggaugguagauggaugguaugguuaucaccaucaaaaugagcaggggucaggauaugcagccgaccugaagagcacacagcaugccauugacgagauuacuaacaaaguaaauucuguuauugaaaagaugaauacacaguucacagcaguagguaaagaguucaaccaccuggaaaaaagaauagagaauuuaaauaaaaaaguugaugaugguuuccuggacauuuggacuuacaaugccgaacuguugguucuauuggaaaaugaaagaacuuuggacuaccacgauucaaaugugaagaacuuauaugaaaagguaagaagccaguuaaaaaacaaugccaaggaaauuggaaacggcugcuuugaauuuuaccacaaaugcgauaacacgugcauggaaagugucaaaaaugggacuuaugacuacccaaaauacucagaggaagcaaaauuaaacagagaagaaauagaugggguaaagcuggaaucaacaaggauuuaccagauuuuggcgaucuauucaacugucgccaguucauugguacugguagucucccugggggcaaucaguuucuggaugugcucuaaugggucucuacaguguagaauauguauuuaa

SEQ ID NO: 36853 - RNA, 1701 nt, Artificial Sequence
  derived and/or modified CDS sequence (wt) from hemagglutinin__InfluenzaA__ADG42423
augaaggcaauacuaguaguucugcuauauacauuugcaaccgcaaaugcagacacauuauguauagguuaucaugcgaacaauucaacagacacuguagacacaguacuagaaaagaauguaacaguaacacacucuguuaaccuucuagaagacaagcauaacgggaaacuaugcaaacuaagagggauagccccauugcauuuggguaaauguaacauugcuggcuggauccugggaaauccagagugugaaucacucuccacagcaagcucaugguccuacauuguggaaacaucuaguucagacaauggaacguguuacccaggagauuucaucgauuaugaggagcuaagagagcaauugagcucagugucaucauuugaaagguuugagauauuccccaagacaaguucauggcccaaucaugacucgaacaaagguguaacggcagcauguccucaugcuggagcaaaaagcuucuacaaaaauuuaauauggcuaguuaaaaaaggaaauucauacccaaagcucagcaaauccuacauuaaugauaaagggaaagaaguccucgugcuauggggcauucaccauccaucuacuagugcugaccaacaaagucucuaucagaaugcagaugcauauguuuuuguggggacaucaagauacagcaagaaguucaagccggaaauagcaauaagacccaaagugagggaucaagaagggagaaugaacuauuacuggacacuaguagagccgggagacaaaauaacauucgaagcaacuggaaaucuagugguaccgagauaugcauucgcaauggaaagaaaugcuggaucugguauuaucauuucagauacaccaguccacgauugcaauacaacuugucagacacccaagggugcuauaaacaccagccucccauuucagaauauacauccgaucacaauuggaaaauguccaaaauauguaaaaagcacaaaauugagacuggccacaggauugaggaaugucccgucuauucaaucuagaggccuauuuggggccauugccgguuucauugaagggggguggacagggaugguagauggaugguacgguuaucaccaucaaaaugagcaggggucaggauaugcagccgaccugaagagcacacagaaugccauugacgagauuacuaacaaaguaaauucuguuauugaaaagaugaauacacaguucacagcaguagguaaagaguucaaccaccuggaaaaaagaauagagaauuuaaauaaaaaaguugaugaugguuuccuggacauuuggacuuacaaugccgaacuguugguucuauuggaaaaugaaagaacuuuggacuaccacgauucaaaugugaagaacuuauaugaaaagguaagaagccaguuaaaaaacaaugccaaggaaauuggaaacggcugcuuugaauuuuaccacaaaugcgauaacacgugcauggaaagugucaaaaaugggacuuaugacuacccaaaauacucagaggaagcaaaauuaaacagagaagaaauagaugggguaaagcuggaaucaacaaggauuuaccagauuuuggcgauuuauucaacugucgccaguucauugguacugguagucucccugggggcaaucaguuucuggaugugcucuaaugggucucuacaguguagaauauguauuuaa

SEQ ID NO: 36854 - RNA, 1701 nt, Artificial Sequence
  derived and/or modified CDS sequence (wt) from hemagglutinin__InfluenzaA__ADG42443
augaaggcaauacuaguaguucugcuauauacauuugcaaccgcaaaugcagacacauuauguauagguuaucaugcgaacaauucaacagacacuguagacacaguacuagaaaagaauguaacaguaacacacucuguuaaccuucuagaagacaagcauaacgggaaacuaugcaaacuaagagggguagccccauugcauuuggguaaauguaacauugcuggcuggauccugggaaauccagagugugaaucacucuccacagcaagcucaugguccuacauuguggaaacaucuaguucagacaauggaacguguuacccaggagauuucaucgauuaugaggagcuaagagagcaauugagcucagugucaucauuugaaagguuugagauauuccccaagacaaguucauggcccaaucaugacucgaacaaagguguaacggcagcauguccucaugcuggagcaaaaagcuucuacaaaaauuuaauauggcuaguuaaaaaaggaaauucauacccaaagcucagcaaauccuacauuaaugauaaagggaaagaaguccucgugcuauggggaauucaccauccaucuacuagugcugaccaacaaagucucuaucagaaugcagaugcauauguuuuuguggggacaucaagauacagcaagaaguucaagccggaaauagcaauaagacccaaagugagggaucaagaagggagaaugaacuauuacuggacacuaguagagccgggagacaaaauaacauucgaagcaacuggaaaucuagugguaccgagauaugcauucgcaauggaaagaaaugcuggaucugguauuaucauuucagauacaccaguccacgauugcaauacaacuugucagacacccaagggugcuauaaacaccagccucccauuucagaauauacauccgaucacaauuggaaaauguccaaaauauguaaaaagcacaaaauugagacuggccacaggauugaggaaugucccgucuauucaaucuagaggccuauuuggggccauugccgguuucauugaagggggguggacagggaugguagauggaugguacgguuaucaccaucaaaaugagcaggggucaggauaugcagccgaccugaagagcacacagcaugccauugacgagauuacuaacaaaguaaauucuguuauugaaaagaugaauacacaguucacagcaguagguaaagaguucaaccaucuggaaaaaagaauagagaauuuaaauaaaaaaguugaugaugguuuccuggacauuuggacuuacaaugccgaacuguugguucuauuggaaaaugaaagaacuuuggacuaccacgauucaaaugugaagaacuuauaugaaaagguaagaagccaguuaaaaaacaaugccaaggaaauuggaaacggcugcuuugaauuuuaccacaaaugcgauaacacgugcauggaaagugucaaaaaugggacuuaugacuacccaaaauacucagaggaagcaaaauuaaacagagaagaaauagaugggguaaagcuggaaucaacaaggauuuaccagauuuuggcgaucuauucaacugucgccaguucauugguacugguagucucccugggggcaaucaguuucuggaugugcucuaaugggucucuacaguguagaauauguauuuaa

SEQ ID NO: 36855 - RNA, 1701 nt, Artificial Sequence
  derived and/or modified CDS sequence (wt) from hemagglutinin__InfluenzaA__ADG42453
augaaggcaauacuaguaguucugcuauauacauuugcaaccgcaaaugcagacacauuauguauagguuaucaugcgaacaauucaacagacacuguagacacaguacuagaaaagaauguaacaguaacacacucuguuaacauucuagaagacaagcauaacgggaaacuaugcaaacuaagagggguagccccauugcauuuggguaaauguaacauugcuggcuggauccugggaaauccagagugugaaucacucuccacagcaagcucaugguccuacauuguggaaacaucuaguucagacaauggaacguguuacccaggagauuucaucgauuaugaggagcuaagagagcaauugagcucagugucaucauuugaaagguuugagauauuccccaagacaaguucauggcccaaucaugacucgaacaaagguguaacggcagcauguccucaugcuggagcaaaaagcuucuacaaaaauuuaauauggcuaguuaaaaaaggaaauucauacccaaagcucagcaaauccuacauuaaugauaaagggaaagaaguccucgugcuauggggcauucaccauccaucuacuagugcugaccaacaaagucucuaucagaaugcagaugcauauguuuuuguggggacaucaagauacagcaagaaguucaagccggaaauagcaauaagacccaaagugagggaucaagaagggagaaugaacuauuacuggacacuaguagagccgggagacaaaauaacauucgaagcaacuggaaaucuagugguaccgagauaugcauucgcaauggaaagaaaugcuggaucugguauuaucauuucagauacaccaguccacgauugcaauacaacuugucagacacccaagggugcuauaaacaccagccucccauuucagaauauacauccgaucacaauuggaaaauguccaaaauauguaaaaagcacaaaauugagacuggccacaggauugaggaaugucccgucuauucaaucuagaggccuauuuggggccauugccgguuucauugaagggggguggacagggaugguagauggaugguacgguuaucaccaucaaaaugagcaggggucaggauaugcagccgaccugaagagcacacagaaugccauugacgagauuacuaacaaaguaaauucuguuauugaaaagaugaauacacaguucacagcaguagguaaagaguucaaccaccuggaaaaaagaguagagaauuuaaauaaaaaaguugaugaugguuuccuggacauuuggacuuacaaugccgaacuguugguucuauuggaaaaugaaagaacuuuggacuaccacgauucaaaugugaagaacuuauaugaaaagguaagaagccaguuaaaaaacaaugccaaggaaauuggaaacggcugcuuugaauuuuaccacaaaugcgauaacacgugcauggaaagugucaaaaaugggacuuaugacuaccccaaauacucagaggaagcaaaauuaaacagagaagaaauagaugggguaaagcuggaaucaacaaggauuuaccagauuuuggcgaucuauucaacugucgccaguucuuugguacugguagucucccugggggcaaucaguuucuggaugugcucuaaugggucucuacaguguagaauauguauuuaa

SEQ ID NO: 36856 - RNA, 1701 nt, Artificial Sequence
  derived and/or modified CDS sequence (wt) from hemagglutinin__InfluenzaA__ADG42463
augaaggcaauacuaguaguucugcuauauacauuugcaaccgcaaaugcagacacauuauguauagguuaucaugcgaacaauucaacagacacuguagacacaguacuagaaaagaauguaacaguaacacacucuguuaaccuucuagaagacaagcauaacgggaaacuaugcaaacuaagagggguagccccauugcauuuggguaaauguaacauugcuggcuggauccugggaaauccagagugugaaucacucuccacagcaagcucaugguccuacauuguggaaacaucuaguucagacaauggaacguguuacccaggagauuucaucgauuaugaggagcuaagagagcaauugagcucagugucaucauuugaaagguuugagauauuccccaagacaaguucauggcccaaucaugacucgaacaaagguguaacggcagcauguccucaugcuggagcaaaaagcuucuacaaaaauuuaauauggcuaguuaaaaaaggaaauucauacccaaagcucagcaaauccuacauuaaugauaaagggaaagaaguccucgugcuauggggcauucaccauccaucuacuagugcugaccaacaaagucucuaucagaaugcagaugcauauguuuuuguggggacaucaagauacagcaagaaguucaagccggaaauagcaauaagacccaaagugagggaacaagaagggagaaugaacuauuacuggacacuaguagagccgggagacaaaauaacauucgaagcaacuggaaaucuagugguaccgagauaugcauucgcaauggaaagaaaugcuggaucugguauuaucauuucagauacaccaguccacgauugcaauacaacuugucagacacccaaaggugcuauaaacaccagccucccauuucagaauauacauccgaucacaauugggaaauguccaaaauauguaaaaagcacaaaauugagacuggccacaggauugaggaaugucccgucuauucaaucuagaggccuauuuggggccauugccgguuucauugaagggggguggacagggaugguagauggaugguacgguuaucaccaucaaaaugagcaggggucaggauaugcagccgaccugaagagcacacagaaugccauugacgagauuacuaacaaaguaaauucuguuauugaaaagaugaauacacaguucacagcaguagguaaagaguucaaccaccuggaaaaaagaauagagaauuuaaauaaaaaaguugaugaugguuuccuggacauuuggacuuacaaugccgaacuguugguucuauuggaaaaugaaagaacuuuggacuaccacgauucaaaugugaagaacuuauaugaaaagguaagaagccaguuaaaaaacaaugccaaggaaauuggaaacggcugcuuugaauuuuaccacaaaugcgauaacacgugcauggaaagugucaaaaaugggacuuaugacuacccaaaauacucagaggaagcaaaauuaaacagagaagaaauagaugggguaaagcuggaaucaacaaggauuuaccagauuuuggcgaucuauucaacugucgccaguucauugguacugguagucucccugggggcaaucaguuucuggaugugcucuaaugggucucuacaguguagaauauguauuuaa

SEQ ID NO: 36857 - RNA, 1701 nt, Artificial Sequence
  derived and/or modified CDS sequence (wt) from hemagglutinin__InfluenzaA__ADG42473
augaaggcaauacuaguaguucugcuauauacauuugcaaccgcaaaugcagacacauuauguauagguuaucaugcgaacaauucaacagacacuguagacacaguacuagaaaagaauguaacaguaacacacucuguuaaccuucuagaagacaagcauaacgggaaacuaugcaaacuaagagggguagccccauugcauuuggguaaauguaacauugcuggcuggauccugggaaauccagagugugaaucacucuccacagcaagcucaugguccuacauuguggaaacaucuaguucagacaauggaacguguuacccaggagauuucaucgauuaugaggagcuaagagagcaauugagcucagugucaucauuugaaagguuugagauauuccccaagacaaguucauggcccaaucaugacucgaacaaagguguaacggcagcauguccucaugcuggagcaaaaagcuucuacaaaaauuuaauauggcuaguuaaaaaaggaaauucauacccaaagcucagcaaauccuacauuaaugauaaagggaaagaaguccucgugcuauggggcauucaccauccaucuacuagugcugaccaacaaagucucuaucagaaugcagaugcauauguuuuuguggggacaucaagauacagcaagaaguucaagccggaaauagcaauaagacccaaagugagggaucaagaagggagaaugaacuauuacuggacacuaguagagccgggagacaaaauaacauucgaagcaacuggaaaucuagugguaccgagauaugcauuugcaauggaaagaaaugcuggaucugguauuaucauuucagauacaccaguccacgauugcaauacaacuugucagacacccaagggugcuauaaacaccagccucccauuucagaauauacauccgaucacaauuggaaaauguccaaaauauguaaaaagcacaaaauugagacuggccacaggauugaggaaugucccgucuauucaaucuagaggccuauuuggggccauugccgguuucauugaagggggguggacagggaugguagauggaugguacgguuaucaccaucaaaaugagcaggggucaggauaugcagccgaccugaagagcacacagaaugccauugacgagauuacuaacaaaguaaauucuguuauugaaaagaugaauacacaguucacagcaguagguaaagaguucaaccaccuggaaaaaagaauagagaauuuaaauaaaaaaguugaugaugguuuccuggacauuuggacuuacaaugccgaacuguugguucuauuggaaaaugaaagaacuuuggacuaccacgauucaaaugugaagaacuuauaugaaaagguaagaagccaguuaaaaaacaaugccaaggaaauuggaaacggcugcuuugaauuuuaccacaaaugcgauaacacgugcauggaaagugucaaaaaugggacuuaugacuacccaaaauacucagaggaagcaaaauuaaacagagaagaaauagaugggguaaagcuggaaucaacaaggauuuaccagauuuuggcgaucuauucaacugucgccaguucauugguacugguagucucccugggggcaaucaguuucuggaugugcucuaaugggucucuacaguguagaauauguauuuaa

SEQ ID NO: 36858 - RNA, 1701 nt, Artificial Sequence
  derived and/or modified CDS sequence (wt) from hemagglutinin__InfluenzaA__ADG42483
augaaggcaauacuaguaguucugcuauauacauuugcaaccgcaaaugcagacacauuauguauagguuaucaugcaaacaauucaacagacacuguagacacaguacuagaaaagaauguaacaguaacacacucuguuaaccuucuagaagacaagcauaacgggaaacuaugcaaacuaagagggguagccccauugcauuuggguaaauguaacauugcuggcuggauccugggaaauccagagugugaaucacucuccacagcaagcucaugguccuacauuguggaaacaucuaguucagacaauggaacguguuacccaggagauuucaucgauuaugaggagcuaagagagcaauugagcucagugucaucauuugaaagguuugagauauuccccaagacaaguucauggcccaaucaugacucgaacaaagguguaacggcagcauguccucaugcuggagcaaaaagcuucuacaaaaauuuaauauggcuaguuaaaaaaggaaauucauacccaaagcucagcaaauccuacauuaaugauaaagggaaagaaguccucgugcuauggggcauucaccauccaucuacuagugcugaccaacaaagucucuaucagaaugcagaugcauauguuuuuguggggacaucaagauacagcaagaaguucaagccggaaauagcaauaagacccaaagugagggaucaagaagggagaaugaacuauuacuggacacuaguagagccgggagacaaaauaacauucgaagcaacuggaaaucuagugguaccgagauaugcauucgcaauggaaagaaaugcuggaucugguauuaucauuucagauacaccaguccacgauugcaauacaacuugucagacacccaagggugcuauaaacaccagccucccauuucagaauauacauccgaucacaauuggaaaauguccaaaauauguaaaaagcacaaaauugagacuggccacaggauugaggaaugucccgucuauccaaucuagaggccuauuuggggccauugccgguuucauugaagggggguggacagggaugguagauggaugguacgguuaucaccaucaaaaugagcaggggucaggauaugcagccgaccugaagagcacacagcaugccauugacgagauuacuaacaaaguaaauucuguuauugaaaagaugaauacacaguucacagcaguagguaaagaguucaaccaccuggaaaaaagaauagagaauuuaaauaaaaaaguugaugaugguuuccuggacauuuggacuuacaaugccgaacuguugguucuauuggaaaaugaaagaacuuuggacuaccacgauucaaaugugaagaacuuauaugaaaagguaagaagccaguuaaaaaacaaugccaaggaaauuggaaacggcugcuuugaauuuuaccacaaaugcgauaacacgugcauggaaagugucaaaaaugggacuuaugacuacccaaaauacucagaggaagcaaaauuaaacagagaagaaauagaugggguaaagcuggaaucaacaaggauuuaccagauuuuggcgaucuauucaacugucgccaguucauugguacugguagucucccugggggcaaucaguuucuggaugugcucuaaugggucucuacaguguagaauauguauuuaa

SEQ ID NO: 36859 - RNA, 1701 nt, Artificial Sequence
  derived and/or modified CDS sequence (wt) from hemagglutinin__InfluenzaA__ADG42493
augaaggcaauacuaguaguucugcuauauacauuugcaaccgcaaaugcagacacauuauguauagguuaucaugcgaacaauucaacagacacuguagacacaguacuagaaaagaauguaacaguaacacacucuguuaaccuucuagaagacaagcauaacgggaaacuaugcaaacuaagagggguagccccauugcauuuggguaaauguaacauugcuggcuggauccugggaaauccagagugugaaucacucuccacagcaagcucaugguccuacauuguggaaacaucuaguucagacaauggaacguguuacccaggagauuucaucaauuaugaggagcuaagagagcaauugagcucagugucaucauuugaaagguuugagauauuccccaagacaaguucauggcccaaucaugacucgaacaaagguguaacggcagcauguccucaugcuggagcaaaaagcuucuacaaaaauuuaauauggcuaguuaaaaaaggaaauucauacccaaagcucagcaaauccuacauuaaugauaaagggaaagaaguccucgugcuauggggcauucaccauccaucuacuagugcugaccaacaaagucucuaucagaaugcagaugcauauguuuuuguggggacaucaagauacagcaagaaguucaagccggaaauagcaauaagacccaaagugagggaucaagaagggagaaugaacuauuacuggacacuaguagagccgggagacaaaauaacauucgaagcaacuggaaaucuagugguaccgagauaugcauucgcaauggaaagaaaugcuggaucugguauuaucaucucagauacaccaguccacgauugcaauacaacuugucagacacccaagggugcuauaaacaccagccucccauuucagaauauacauccgaucacaauuggaaaauguccaaaauauguaaaaagcacaaaauugagacuggccacaggauugaggaaugucccgucuauucaaucuagaggccuauuuggggccauugccgguuucauugaagggggguggacagggaugguagauggaugguaugguuaucaccaucaaaaugagcaggggucaggauaugcagccgaccugaagagcacacagaaugccauugacaagauuacuaacaaaguaaauucuguuauugaaaagaugaauacacaguucacagcaguagguaaagaguucaaccaccuggaaaaaagaauagagaauuuaaauaaaaaaguugaugaugguuuccuggacauuuggacuuacaaugccgaacuguugguucuauuggaaaaugaaagaacuuuggacuaccacgauucaaaugugaagaacuuauaugaaaagguaagaagccaguuaaaaaacaaugccaaggaaauuggaaacggcugcuuugaauuuuaccacaaaugcgauaacacgugcauggaaagugucaaaaaugggacuuaugacuacccaaaauacucagaggaagcaaaauuaaacagagaagaaauagaugggguaaagcuggaaucaacaaggauuuaccagauuuuggcgaucuauucaacugucgccaguucauugguacugguagucucccugggggcaaucaguuucuggaugugcucuaaugggucucuacaguguagaauauguauuuaa

SEQ ID NO: 36860 - RNA, 1701 nt, Artificial Sequence
  derived and/or modified CDS sequence (wt) from hemagglutinin__InfluenzaA__ADG42503
augaaggcaauacuaguaguucugcuauauacauuugcaaccgcaaaugcagacacauuauguauagguuaucaugcgaacaauucaacagacacuguagacacaguacuagaaaagaauguaacaguaacacacucuguuaaccuucuagaagacaagcauaacgggaaacuaugcaaacuaagagggguagccccauuacauuuggguaaauguaacauugcuggcuggauccugggaaauccagagugugaaucacucuccacagcaagcucaugguccuacauuguggaaacaucuaguucagacaauggaacguguuacccaggagauuucaucgauuaugaggagcuaagagagcaauugagcucagugucaucauuugaaagguuugagauauuccccaagacaaguucauggcccaaucaugacucgaacaaagguguaacggcagcauguccucaugcuggagcaaaaagcuucuacaaaaauuuaauauggcuaguuaaaaaaggaaauucauacccaaagcucagcaaauccuacaucaaugauaaagggaaagaaguccucgugcuauggggcauucaccauccaucuacuagugcugaccaacaaagucucuaucagaaugcagauucauauguuuuuguggggacaucaagauacagcaagaaguucaagccggaaauagcaauaagacccaaagugagggaucaagaagggagaaugaacuauuacuggacacuaguagagccgggagacaaaauaacauucgaagcaacuggaaaucuagugguaccgagauaugcauucgcaauggaaagaaaugcuggaucugguauuaucauuucagauacaccaguccacgauugcaauacaacuugucagacacccgagggugcuauaaacaccagccucccauuucagaauauacauccgaucacaauuggaaaauguccaaaauauguaaaaagcacaaaauugagacuggccacaggauugaggaaugucccgucuauucaaucuagaggccuauuuggggccauugccgguuucauugaagggggguggacagggaugguagauggaugguacgguuaucaccaucaaaaugagcaggggucaggauaugcagccgaccugaagagcacacagaaugccauugacgagauuacuaacaaaguaaauucuguuauugaaaagaugaauacacaguucacagcaguagguaaagaguucaaccaccuggaaaaaagaauagagaauuuaaauaaaaaaguugaugaugguuuccuggacauuuggacuuacaaugcugaacuguugguucuauuggaaaaugaaagaacuuuggacuaccacgauucaaaugugaagaacuuauaugaaaagguaagaagccaguuaaaaaacaaugccaaggaaauuggaaacggcugcuuugaauuuuaccacaaaugcgauaacacgugcauggaaagugucaaaaaugggacuuaugacuacccaaaauacucagaggaagcaaaauuaaacagagaagaaauagaugggguaaagcuggaaucaacaaggauuuaccagauuuuggcgaucuauucaacugucgccaguucauugguacugguagucucccugggggcaaucaguuucuggaugugcucuaaugggucucuacaguguagaauauguauuuaa

SEQ ID NO: 36861 - RNA, 1701 nt, Artificial Sequence
  derived and/or modified CDS sequence (wt) from hemagglutinin__InfluenzaA__ADG42513
augaaggcaauacuaguaguucugcuauauacauuugcaaccgcaaaugcagacacauuauguauagguuaucaugcgaacaauucaacagacacuguagacacaguacuagaaaagaauguaacaguaacacacucuguuaaccuucuagaagacaagcauaacgggaaacuaugcaaacuaagagggguagccccauugcauuuggguaaauguaacauugcuggcuggauccugggaaauccagagugugaaucacucuccacagcaagcucaugguccuacauuguggaaacaucuaguucagacaauggaacguguuacccaggagauuucaucgauuaugaggagcuaagagagcaauugagcucagugucaucauuugaaagguuugagauauuccccaagacaaguucauggcccaaucaugacucgaacaaagguguaacggcagcauguccucaugcuggagcaaaaagcuucuacaaaaauuuaauauggcuaguuaaaaaaggaaauucauacccaaagcucagcaaauccuacauuaaugauaaagggaaagaaguccucgugcuauggggcauucaccauccaucuacuagugcugaccaacaaagucucuaucagaaugcagaugcauauguuuuuguggggacaucaagauacagcaagaaguucaagccggagauagcaauaagacccaaagugagggaucaagaagggagaaugaacuauuacuggacacuaguagagccgggagacaaaauaacauucgaagcaacuggaaaucuagugguaccgagauaugcauucgcaauggaaagaaaugcuggaucugguauuaucauuucagauacaccaguccacgauugcaauacaacuugucagacacccaagggugcuauaaacaccagccucccauuucagaauauacauccgaucacaauuggaaaauguccaaaauauguaaaaagcacaaaauugagacuggccacaggauugaggaauaucccgucuauucaaucuagaggccuauuuggggccauugccgguuucauugaagggggguggacagggaugguagauggaugguacgguuaucaccaucaaaaugagcaggggucaggauaugcagccgaccugaagagcacgcagaaugccauugacgagauuacuaacaaaguaaauucuguuauugaaaagaugaauacacaguucacagcaguagguaaagaguucaaccaccuggaaaaaagaauagagaauuuaaauaaaaagguugaugaugguuuccuggacauuuggacuuacaaugccgaacuguugguucuauuggaaaaugaaagaacuuuggacuaccacgauucaaaugugaagaacuuauaugaaaagguaagaagccaguuaaaaaacaaugccaaggaaauuggaaacggcugcuuugaauuuuaccacaaaugcgauaacacgugcauggaaagugucaaaaaugggacuuaugacuacccaaaauacucagaggaagcaaaauuaaacagagaagaaauagaugggguaaagcuggaaucaacaaggauuuaccagauuuuggcgaucuauucaacugucgccaguucauugguacugguagucucccugggggcaaucaguuucuggaugugcucuaaugggucucuacaguguagaauauguauuuaa

SEQ ID NO: 36862 - RNA, 1701 nt, Artificial Sequence
  derived and/or modified CDS sequence (wt) from hemagglutinin__InfluenzaA__ADG42533
augaaggcaauacuaguaguucugcuauauacauuugcaaccgcaaaagcagacacauuauguauagguuaucaugcgaacaauucaacagacacuguagacacaguacuagaaaagaauguaacaguaacacacucuguuaaccuucuagaagacaagcauaacgggaaacuaugcaaacuaagagggguagccccauugcauuuggguaaauguaacauugcuggcuggauccugggaaauccagagugugaaucacucuccacagcaagcucaugguccuacauuguggaaacaucuaguucagacaauggaacguguuacccaggagauuucaucgauuaugaggagcuaagagagcaauugagcucagugucaucauuugaaagguuugagauauuccccaagacaaguucauggcccaaucaugacucgaacaaagguguaacggcagcauguccucaugcuggagcaaaaagcuucuacaaaaauuuaauauggcuaguuaaaaaaggaaauucauacccaaagcucagcaaauccuacauuaaugauaaagggaaagaaguccucgugcuauggggcauucaccauccaucuacuagugcugaccaacaaagucucuaucagaaugcagaugcauauguuuuuguggggacaucaagauacagcaagaaguucaagccggagauagcaauaagacccaaagugagggaccaagaagggagaaugaacuauuacuggacacuaguagagccgggagacaaaauaacauucgaagcaacuggaaaucuagugguaccgagauaugcauucgcaauggaaagaaaugcuggaucugguauuaucauuucagauacaccaguccacgauugcaauacaacuugucagacacccaagggugcuauaaacaccagccucccauuucagaauauacauccgaucacaauuggaaaauguccaaaauauguaaaaagcacaaaauugagacuggccacaggauugaggaauaucccgucuauucaaucuagaggccuauuuggggccauugccgguuucauugaagggggguggacagggaugguagauggaugguacgguuaucaccaucaaaaugagcaggggucaggauaugcagccgaccugaagagcacacagaaugccauugacgagauuacuaacaaaguaaauucuguuauugaaaagaugaauacacaguucacagcaguagguaaagaguucaaccaccuggaaaaaagaauagagaauuuaaauaaaaagguugaugaugguuuccuggacauuuggacuuacaaugccgaacuguugguucuauuggaaaaugaaagaacuuuggacuaccacgauucaaaugugaagaacuuauaugaaaagguaagaagccaguuaaaaaacaaugccaaggaaauuggaaacggcugcuuugaauuuuaccacaaaugcgauaacacgugcauggaaagugucaaaaaugggacuuaugacuacccaaaauacucagaggaagcaaaauuaaacagagaagaaauagaugggguaaagcuggaaucaacaaggauuuaccagauuuuggcgaucuauucaacugucgccaguucauugguacugguagucucccugggggcaaucaguuucuggaugugcucuaaugggucucuacaguguagaauauguauuuaa

SEQ ID NO: 36863 - RNA, 1701 nt, Artificial Sequence
  derived and/or modified CDS sequence (wt) from hemagglutinin__InfluenzaA__ADG42553
augaaggcaauacuaguaguucugcuauauacauuugcaaccgcaaaugcagacacauuauguauagguuaucaugcgaacaauucaacagacacuguagacacaguacuagaaaagaauguaacaguaacacacucuguuaaccuucuagaagacaagcauaacgggaaacuaugcaaacuaagagggguagccccauugcauuuggguaaauguaacauugcuggcuggauccugggaaauccagagugugaaucacucuccacagcaagcucaugguccuacauuguggaaacaucuaguucagacaauggaacguguuacccaggagauuucaucgauuaugaggagcuaagagagcaauugagcucagugucaucauuugaaagguuugagauauuccccaagacaaguucauggcccaaucaugacucgaacaaagguguaacggcagcauguucucaugcuggagcaaaaagcuucuacaaaaauuuaauauggcuaguuaaaaaaggaaauucauacccaaagcucaacaaauccuacauuaaugauaaagggaaagaaguccucgugcuauggggcauucaccauccaucuacuagugcugaccaacaaagucucuaucagaaugcagaugcauauguuuuuguggggacaucaagauacagcaagaaguucaagccggaaauagcaauaagacccaaagugagggaacaagaagggagaaugaacuauuacuggacacuaguagagccgggagacaaaauaacauucgaagcaacuggaaaucuagugguaccgagauaugcauucgcaauggaaagaaaugcuggaucugguauuaucauuucagauacaccaguccacgauugcaauacaacuugucagacacccaagggugcuauaaacaccagccucccauuucagaauauacauccgaucacaauuggaaaauguccaaaauauguaaaaagcacaaaauugagacuggccacaggauugaggaaugucccaucuauucaaucuagaggccuauuuggggccauugccgguuucauugaagggggguggacagggaugguagauggaugguacgguuaucaccaucaaaaugagcaggggucaggauaugcagccgaccugaagagcacacagaaugccauugacgagauuacuaacaaaguaaauucuguuauugaaaagaugaauacacaguucacagcaguagguaaagaguucaaccaccuggaaaaaagaauagagaauuuaaauaaaaaaguugaugaugguuuccuggacauuuggacuuacaaugccgaacuguugguucuauuggaaaaugaaagaacuuuggacuaccacgauucaaaugugaagaacuuauacgaaaagguaagaagccaguuaaaaaacaaugccaaggaaauuggaaacggcugcuuugaauuuuaccacaaaugcgauaacacgugcauggaaagugucaaaaaugggacuuaugacuacccaaaauacucagaggaagcaaaauuaaacagagaagaaauagaugggguaaagcuggaaucaacaaggauuuaccagauuuuggcgaucuauucaacugucgccaguucauugguacugguagucucccugggggcaaucaguuucuggaugugcucuaaugggucucuacaguguagaauauguauuuaa

SEQ ID NO: 36864 - RNA, 1701 nt, Artificial Sequence
  derived and/or modified CDS sequence (wt) from hemagglutinin__InfluenzaA__ADG42573
augaaggcaauacuaguaguucugcuauauacauuugcaaccgcaaaugcagacacauuauguauagguuaucaugcgaacaauucaacagacacuguagacacaguacuagaaaagaauguaacaguaacacacucuguuaaccuucuagaagacaagcauaacgggaaacuaugcaaacuaagagggguagccccauugcauuuggguaaauguaacauugcuggcuggauccugggaaauccagagugugaaucacucuccacagcaagcucaugguccuacauuguggaaacaucuaguucagacaauggaacguguuacccaggagauuucaucgauuaugaggagcuaagagagcaauugagcucagugucaucauuugaaagguuugagauauuccccaagacaaguucauggcccaaucaugacucgaacaaagguguaacggcagcaugcccucaugcuggagcaaaaagcuucuacaaaaauuuaauauggcuaguuaaaaaaggaaauucauacccaaagcucagcaaauccuacauuaaugauaaagggaaagaaguccucgugcuauggggcauucaccauccaucuacuagugcugaccaacaaagucucuaucagaaugcagaugcauauguuuuugugggaacaucaagauacagcaagaaguucaagccggaaauagcaauaagacccaaagugagggaucaagaagggagaaugaacuauuacuggacacuaauagagccgggagacaaaauaacauucgaagcaacuggaaaucuagugguaccgagauaugcauucgcaauggaaagaaaugcuggaucugguauuaucauuucagauacaccaguccacgauugcaauacaacuugucagacacccaagggugcuauaaacaccagccucccauuucagaauauacauccgaucacaauuggaaaauguccaaaauauguaaaaagcacaaaauugagacuggccacaggauugaggaaugucccgucuauucaaucuagaggccuauuuggggccauugccgguuucauugaagggggguggacagggaugguagauggaugguacgguuaucaccaucaaaaugagcaggggucaggauaugcagccgaccugaagagcacacagaaugccauugacgagauuacaaacaaaguaaauucuguuauugaaaagaugaauacacaguucacagcaguagguaaagaguucaaccaccuggaaaaaagaauagagaauuuaaauaaaaaaguugaugaugguuuccuggacauuuggacuuacaaugccgaacuguugguucuauuggaaaaugaaagaacuuuggacuaccacgauucaaaugugaagaaauuauaugaaaagguaagaagccaguuaaaaaacaaugccaaggaaauuggaaacggcugcuuugaauuuuaccacaaaugcgauaacacgugcauggaaagugucaaaaaugggacuuaugacuacccaaaauacucagaggaagcaaaauuaaacagagaagaaauagauggaguaaagcuggaaucaacaaggauuuaccagauuuuggcgaucuauucaacugucgccaguucauugguacugguagucucccugggggcaaucaguuucuggaugugcucuaaugggucucuacaguguagaauauguauuuaa

SEQ ID NO: 36865 - RNA, 1701 nt, Artificial Sequence
  derived and/or modified CDS sequence (wt) from hemagglutinin__InfluenzaA__ADG42583
augaaggcaauacuaguaguucugcuauauacauuugcaaccgcaaaugcagacacauuauguauagguuaucaugcgaacaauucaacagacacuguagacacaguacuagaaaagaauguaacaguaacacacucuguuaaccuucuagaagacaagcauaacgggaaacuaugcaaacuaagagggguagccccauugcauuuggguaaauguaacauugcuggcuggauccugggaaauccagagugugaaucacucuccacagcaagcucaugguccuacauuguggaaacaucuaguucagacaauggaacguguuacccaggagauuucaucgauuaugaggagcuaagagagcaauugagcucagugucaucauuugaaagguuugagauauuccccaagacaaguucauggcccaaucaugacucgaacaaagguguaacggcagcauguccucaugcuggagcaaaaagcuucuacaaaaauuuaauauggcuaguuaaaaaaggaaauucauacccaaagcucagcaaauccuacauuaaugauaaagggaaagaaguccucgugcuauggggcauucaccauccaucuacuagugcugaccaacaaagucucuaucagaaugcagauucauauguuuuuguggggacaucaagauacagcaagaaguucaagccggaaauagcaauaagacccaaagugagggaucaagaagggagaaugaacuauuacuggacacuaguagagccgggagacaaaauaacauucgaagcaacuggaaaucuagugguaccgagauaugcauucgcaauggaaagaaaugcuggaucugguauuaucauuucagauacaccaguccacgauugcaauacaacuugucagacacccaagggugcuauaaacaccagccucccauuucagaauauacauccgaucacaauuggaaaauguccaaaauauguaaaaagcacaaaauugagacuggccacaggauugaggaaugucccgucuauucaaucuagaggccuauuuggggccauugccgguuucauugaagggggguggacagggaugguagauggaugguacgguuaucaccaucaaaaugagcaggggucaggauaugcagccgaccugaagagcacacagcaugccauugacgagauuacuaacaaaguaaauucuguuauugaaaagaugaauacacaguucacagcaguagguaaagaguucaaccaccuggaaaaaagaauagagaauuuaaauaaaaaaguugaugaugguuuccuggacauuuggacuuacaaugccgaacuguugguucuauuggaaaaugaaagaacuuuggacuaccacgauucaaaugugaagaacuuauaugaaaagguaagaagccaguuaaaaaacaaugccaaggaaauuggaaacggcugcuuugaauuuuaccacaaaugcgauaacacgugcauggaaagugucaaaaaugggacuuaugacuacccaaaauacucagaggaagcaaaauuaaacagagaagaaauagaugggguaaagcuggaaucaacaaggauuuaccagauuuuggcgaucuauucaacugucgccaguucauugguacugguagucucccugggggcaaucaguuucuggaugugcucuaaugggucucuacaguguagaauauguauuuaa

SEQ ID NO: 36866 - RNA, 1701 nt, Artificial Sequence
  derived and/or modified CDS sequence (wt) from hemagglutinin__InfluenzaA__ADG42593
augaaggcaauacuaguaguucugcuauauacauuugcaaccgcaaaugcagacacauuauguauagguuaucaugcgaacaauucaacagacacuguagacacaguacuagaaaagaauguaacaguaacacacucuguuaacauucuagaagacaagcauaacgggaaacuaugcaaacuaagagggguagccccauugcauuuggguaaauguaacauugcuggcuggauccugggaaauccagagugugaaucacucuccacagcaagcucaugguccuacauuguggaaacaucuaguucagacaauggaacguguuacccaggagauuucaucgauuaugaggagcuaagagagcaauugagcucagugucaucauuugaaagguuugagauauuccccaagacaaguucauggcccaaucaugacucgaacaaagguguaacggcagcauguccucaugcuggagcaaaaagcuucuacaaaaauuuaauauggcuaguuaaaaaaggaaauucauacccaaagcucagcaaauccuacauuaaugauaaagggaaagaaguccucgugcuauggggcauucaccauccaucuacuagugcugaccaacaaagucucuaucagaaugcagaugcauauguuuuuguggggacaucaagauacagcaagaaguucaagccggaaauagcaauaagacccaaagugagggaucaagaagggagaaugaacuauuacuggacacuaguagagccgggagacaaaauaacauucgaagcaacuggaaaucuagugguaccgagauaugcauucgcaauggaaagaaaugcuggaucugguauuaucauuucagauacaccaguccacgauugcaauacaacuugucagacacccaagggugcuauaaacaccagccucccauuucagaauauacauccgaucacaauuggaaaauguccaaaauauguaaaaagcacaaaauugagacuggccacaggauugaggaaugucccgucuauucaaucuagaggccuauuuggggccauugccgguuucauugaagggggguggacagggaugguagauggaugguacgguuaucaccaucaaaaugagcaggggucaggauaugcagccgaccugaagagcacacagaaugccauugacgagauuacuaacaaaguaaauucuguuauugaaaagaugaauacacaguucacagcaguagguaaagaguucaaccaccuggaaaaaagaauagagaauuuaaauaaaaaaguugaugaugguuuccuggacauuuggacuuacaaugccgaacuguugguucuauuggaaaaugaaagaacuuuggacuaccacgauucaaaugugaagaacuuauaugaaaagguaagaagccaguuaaaaaacaaugccaaggaaauuggaaacggcugcuuugaauuuuaccacaaaugcgauaacacgugcauggaaagugucaaaaaugggacuuaugacuaccccaaauacucagaggaagcaaaauuaaacagagaagaaauagaugggguaaagcuggaaucaacaaggauuuaccagauuuuggcgaucuauucaacugucgccaguucauugguacugguagucucccugggggcaaucaguuucuggaugugcucuaaugggucucuacaguguagaauauguauuuaa

SEQ ID NO: 36867 - RNA, 1701 nt, Artificial Sequence
  derived and/or modified CDS sequence (wt) from hemagglutinin__InfluenzaA__ADG42603
augaaggcaauacuaguaguucugcuauauacauuugcaaccgcaaaugcagacacauuauguauagguuaucaugcgaacaauucaacagacacuguagacacaguacuagaaaagaauguaacaguaacacacucuguuaaccuucuagaagacaagcauaaugggaaacuaugcaaacuaagagggguagccccauugcauuuggguaaauguaacauugcuggcuggauccugggaaauccagagugugaaucacucuccacagcaagcucaugguccuacauuguggaaacaucuaguucagacaauggaacguguuacccaggagauuucaucgauuaugaggagcuaagagagcaauugagcucagugucaucauuugaaagguuugagauauuccccaagacaaguucauggcccaaucaugacucgaacaaagguguaacggcagcauguccucaugcuggagcaaaaagcuucuacaaaaauuuaauauggcuaguuaaaaaaggaaauucauacccaaagcucagaaaauccuacauuaaugauaaagggaaagaaguccucgugcuauggggaauucaccauccaucuacuagugcugaccaacaaagucucuaucagaaugcagaugcauauguuuuuguggggacaucaagauacagcaagaaguucaagccggaaauagcaacaagacccaaagugagggaucaagaagggagaaugaacuauuacuggacacuaguagagccgggagacaaaauaacauucgaagcaacuggaaaucuagugguaccgagauaugcauucgcaauggaaagaaaugcuggaucugguauuaucauuucagauacaccaguccacgauugcaauacaacuugucagacacccaaggguucuauaaacaccagccucccauuucagaauauacauccgaucacaauuggaaaauguccaaaauauguaaaaagcacaaaauugagacuggccacaggauugaggaaugucccgucuauucaaucuagaggccuauuuggggccauugccgguuucauugaagggggguggacagggaugguagauggaugguacgguuaucaccaucaaaaugagcaggggucaggauaugcagccgaccugaagagcacacagcaugccauugacgagauuacuaacaaaguaaauucuguuauugaaaagaugaauacacaguucacagcaguagguaaagaguucaaccaccuggaaaaaagaauagagaauuuaaauaaaaaaguugaugaugguuuccuggacauuuggacuuacaaugccgaacuguugguucuauuggaaaaugaaagaacuuuggacuaccacgauucaaaugugaagaacuuauaugaaaagguaagaagccaguuaaaaaacaaugccaaggaaauuggaaacggcugcuuugaauuuuaccacaaaugcgauaacacgugcauggaaagugucaaaaaugggacuuaugacuacccaaaauacucagaggaagcaaaauuaaacagagaagaaauagaugggguaaagcuggaaucaacaaggauuuaccagauuuuggcgaucuauucaacugucgccaguucauugguacugguagucucccugggggcaaucaguuucuggaugugcucuaaugggucucuacaguguagaauauguauuuaa

SEQ ID NO: 36868 - RNA, 1701 nt, Artificial Sequence
  derived and/or modified CDS sequence (wt) from hemagglutinin__InfluenzaA__ADG42613
augaaggcaauacuaguaguucugcuauauacauuugcaaccgcaaaugcagacacauuauguauagguuaucaugcgaacaauucaacagacacuguagacacaguacuagaaaagaauguaacaguaacacacucuguuaacauucuagaagacaagcauaacgggaaacuaugcaaacuaagagggguagccccauugcauuuggguaaauguaacauugcuggcuggauccugggaaauccagagugugaaucacucuccacagcaagcucaugguccuacauuguggaaacaucuaguucagacaauggaacguguuacccaggagauuucaucgauuaugaggagcuaagagagcaauugagcucagugucaucauuugaaagguuugagauauuccccaagacaaguucauggcccaaucaugacucgaacaaagguguaacggcagcauguccucaugcuggagcaaaaagcuucuacaaaaauuuaauauggcuaguuaaaaaaggaaauucauacccaaagcucagcaaauccuacauuaaugauaaagggaaagaaguccucgugcuauggggcauucaccauccaucuacuagugcugaccaacaaagucucuaucagaaugcagaugcauauguuuuuguggggacaucaagauacagcaagaaguucaagccggaaauagcaauaagacccaaagugagggaucaagaagggagaaugaacuauuacuggacacuaguagagccgggagacaaaauaacauucgaagcaacuggaaaucuagugguaccgagauaugcauucgcaauggaaagaaaugcuggaucugguauuaucauuucagauacaccaguccacgauugcaauacaacuugucagacacccaagggugcuauaaacaccagccucccauuucagaauauacauccgaucacaauuggaaaauguccaaaauauguaaaaagcacaaaauugagacuggccacaggauugaggaaugucccgucuauucaaucuagaggccuauuuggggccauugccgguuucauugaagggggguggacagggaugguagauggaugguacgguuaucaccaucaaaaugagcaggggucaggauaugcagccgaccugaagagcacacagaaugccauugacgagauuacuaacaaaguaaauucuguuauugaaaagaugaauacacaguucacagcaguagguaaagaguucaaccaccuggaaaaaagaauagagaauuuaaauaaaaaaguugaugaugguuuccuggacauuuggacuuacaaugccgaacuguugguucuauuggaaaaugaaagaacuuuggacuaccacgauucaaaugugaagaacuuauaugaaaagguaagaagccaguuaaaaaacaaugccaaggaaauuggaaacggcugcuuugaauuuuaccacaaaugcgauaacacgugcauggaaagugucaaaaaugggacuuaugacuaccccaaauacucagaggaagcaaaauuaaacagagaaaaaauagaugggguaaagcuggaaucaacaaggauuuaccagauuuuggcgaucuauucaacugucgccaguucauugguacugguagucucccugggggcaaucaguuucuggaugugcucuaaugggucucuacaguguagaauauguauuuaa

SEQ ID NO: 36869 - RNA, 1701 nt, Artificial Sequence; identical to SEQ ID NO: 36354
  derived and/or modified CDS sequence (wt) from hemagglutinin__InfluenzaA__ADG42623

SEQ ID NO: 36870 - RNA, 1701 nt, Artificial Sequence
  derived and/or modified CDS sequence (wt) from hemagglutinin__InfluenzaA__ADG42633
augaaggcaauacuaguaguucugcuauauacauuugcaaccgcaaaugcagacacauuauguauagguuaucaugcgaacaauucaacagacacuguagacacaguacuagaaaagaauguaacaguaacacacucuguuaaccuucuagaagacaagcauaacgggaaacuaugcaaacuaagagggguagccccauugcauuuggguaaauguaacauugcuggcuggauccugggaaauccagagugugaaucacucuccacagcaagcucaugguccuacauuguggaaacaucuaguucagacaauggaacguguuacccaggagauuucaucgauuaugaggagcuaagagagcaauugagcucagugucaucauuugaaagguuugagauauuccccaagacaaguucauggcccaaucaugacucgaacaaagguguaacggcagcauguccucaugcuggagcaaaaagcuucuacaaaaauuuaauauggcuaguuaaaaaaggaaauucauacccaaagcucagcaaauccuacauuaaugauaaagggaaagaaguccucgugcuauggggcauucaccauccaucuacuagugcugaccaacaaagucucuaucagaaugcagaugcauauguuuuuguggggacaucaagauacagcaagaaguucaagccggaaauagcaauaagacccaaagugagggaucaagaagggagaaugaacuauuacuggacacuaguagagccgggagacaaaauaacauucgaagcaacuggaaaucuagugguaccgagauaugcauucgcaauggaaagaaaugcuggaucugguauuaucauuucagauacaccaguccacgauugcaauacaacuugucagacacccaagggugcuauaaacaccagccucccauuucagaauauacauccgaucacaauuggaaaauguccaaaauauguaaaaagcacaaaauugagacuggccacaggauugaggaaugucccgucuauucaaucuagaggccuauuuggggccauugccgguuucauugaagggggguggacagggaugguagauggaugguacgguuaucaccaucaaaaugagcaggggucaggauaugcagccgaccugaagagcacacagaaugccauugacgagauuacuaacaaaguaaauucuguuauugaaaagaugaauacacaguucacagcaguagguaaagaguucaaccaccuggaaaaaagaauagagaauuuaaauaaaaaaguugaugaugguuuccuggacauuuggacuuacaaugccgaauuguugguucuauuggaaaaugaaagaacuuuggacuaccacgauucaaaugugaagaacuuauaugaaaagguaagaagccaguuaaaaaacaaugccaaggaaauuggaaacggcugcuuugaauuuuaccacaaaugcgauaacacgugcauggaaagugucaaaaaugggacuuaugacuacccaaaauacucagaggaagcaaaauuaaacagagaagaaauagaugggguaaagcuggaaucaacaaggauuuaccagauuuuggcgaucuauucaacugucgccaguucauugguacugguagucucccugggggcaaucaguuucuggaugugcucuaaugggucucuacaguguagaauauguauuuaa

SEQ ID NO: 36871 - RNA, 1701 nt, Artificial Sequence
  derived and/or modified CDS sequence (wt) from hemagglutinin__InfluenzaA__ADG42643
augaaggcaauacuaguaguucugcuauauacauuugcaaccgcaaaugcagacacauuauguauagguuaucaugcgaacaauucaacagacacuguagacacaguacuagaaaagaauguaacaguaacacacucugcuaaccuucuagaagacaagcauaacgggaaacuaugcaaacuaagaggggcagccccauugcauuuggguaaauguaacauugcuggcuggauccugggaaauccagagugugaaucacucuccacagcaagcucaugguccuacauuguggaaacaucuaguucagacaauggaacguguuacccaggagauuucaucgauuaugaggagcuaagagagcaauugagcucagugucaucauuugaaagguuugagauguuccccaagacaaguucauggcccaaucaugacucgaacaaagguguaacggcagcauguccucaugcuggagcaaaaagcuucuacaaaaauuuaauauggcuaguuaaaaaaggaaauucauacccaaagcucagcaaauccuacguuaaugauaaagggaaagaaguccucguacuauggggcauucaccauccaucuacuagugcugaccaacaaagucucuaucagaaugcagaugcauauguuuuuguggggacaucaagauacagcaagaaguucaagccggaaauagcaauaagacccaaagugagggaucaagaagggagaaugaacuauuacuggacacuaguagagccgggagacaaaauaacauucgaagcaacuggaaaucuagugguaccgagauaugcauucgcaauggaaagaaaugcuggaucugguauuaucauuucagauacaccaguccacgauugcaauacaacuugucagacacccaagggugcuauaaacaccagccucccauuucagaauauacauccgaucacaauuggaaaauguccaaaauauguaaaaagcacaaaauugagacuggccacaggauugaggaaugucccgucuauucaaucuagaggccuauuuggggccauugccgguuucauugaagggggguggacagggaugguagauggaugguacgguuaucaccaucaaaaugagcaggggucaggauaugcagccgaccugaagagcacacagaaugccauugacgagauuacuaacaaaguaaauucuguuauugaaaagaugaauacacaguucacagcaguagguaaagaguucaaccaccuggaaaaaagaauagagaauuuaaauaaaaaaguugaugaugguuuccuggacauuuggacuuacaaugccgaacuguugguucuauuggaaaaugaaagaacuuuggacuaccacgauucaaaugugaagaacuuauaugaaaagguaagaagccaguuaaaaaacaaugccaaagaaauuggaaacggcugcuuugaauuuuaccacaaaugcgauaacacgugcauggaaagugucaaaaaugggacuuaugacuacccaaaauacucagaggaagcaaaauuaaacagagaagaaauagaugggguaaagcuggaaucaacaaggauuuaccagauuuuggcgaucuauucaacugucgccaguucauugguacugguagucucccugggggcaaucaguuucuggaugugcucuaaugggucucuacaguguagaauauguauuuaa

SEQ ID NO: 36872 - RNA, 1701 nt, Artificial Sequence
  derived and/or modified CDS sequence (wt) from hemagglutinin__InfluenzaA__ADG42653
augaaggcaauacuaguaguucugcuauauacaucugcaaccgcaaaugcagacacauuauguauagguuaucaugcgaacaauucaacagacacuguagacacaguacuagaaaagaauguaacaguaacacacucuguuaaccuucuagaagacaagcauaacgggaaacuaugcaaacuaagagggguagccccauugcauuuggguaaauguaacauugcuggcuggauccugggaaauccagagugugaaucacucuccacagcaagcucaugguccuacauuguggaaacaucuaguucagacaauggaacguguuacccaggagauuucaucgauuaugaggagcuaagagagcaauugagcucagugucaucauuugaaagguuugagauguuccccaagacaaguucauggcccaaucaugacucgaacaaagguguaacggcagcauguccucaugcuggagcaaaaagcuucuacaaaaauuuaauauggcuaguuaaaaaaggaaauucauacccaaagcucagcaaauccuacauuaaugauaaagggaaagaaguccucgugcuauggggcauucaccauccaucuacuagugcugaccaacaaagucucuaucagaaugcagaugcauauguuuuuguggggacaucaagauacagcaagaaguucaagccggaaauagcaauaagacccaaagugagggaucaagaagggagaaugaacuauuacuggacacuaguagagccgggagacaaaauaacauucgaagcaacuggaaaucuagugguaccgagauaugcauucgcaauggaaagaaaugcuggaucugguauuaucauuucagauacaccaguccacgauugcaauacaacuugucagacacccaagggugcuauaaacaccagccucccauuucagaauauacauccgaucacaauuggaaaauguccaaaauauguaaaaagcacaaaauugagacuggccacaggauugaggaaugucccgucuauucaaucuagaggccuauuuggggccauugccgguuucauugaagggggguggacagggaugguagauggaugguacgguuaucaccaucaaaaugagcaggggucaggauaugcagccgaccugaagagcacacagaaugccauugacgagauuacuaacaaaguaaauucuguuauugaaaagaugaauacacaguucacagcaguagguaaagaguucaaccacuuggaaaaaagaauagagaauuuaaauaaaaaaguugaugaugguuuccuggacauuuggacuuacaaugccgaacuguugguucuauuggaaaaugaaagaacuuuggacuaccacgauucaaaugugaagaacuuauaugaaaagguaagaagccaguuaaaaaacaaugccaaggaaauuggaaacggcugcuuugaauuuuaccacaaaugcgauaacacgugcauggaaagugucaaaaaugggacuuaugacuacccaaaauacucagaggaagcaaaauuaaacagagaagaaauagaugggguaaagcuggaaucaacaaggauuuaccagauuuuggcgaucuauucaacugucgccaguucauugguacugguagucucccugggggcaaucaguuucuggaugugcucuaaugggucucuacaguguagaauauguauuuaa

SEQ ID NO: 36873 - RNA, 1701 nt, Artificial Sequence
  derived and/or modified CDS sequence (wt) from hemagglutinin__InfluenzaA__ADG42663
augaaggcaauacuaguaguucugcuauauacauuugcaaccgcaaaugcagacacauuauguauagguuaucaugcgaacaauucaacagacacuguagacacaguacuagaaaagaauguaacaguaacacacucuguuaaccuucuagaagacaagcauaacgggaaacuaugcaaacuaagagggguagccccauugcauuuggguaaauguaacauugcuggcuggauccugggaaauccagagugugaaucacucuccacagcaagcucaugguccuacauuguggaaacaucuaguucagacaauggaacguguuacccaggagauuucaucgauuaugaggagcuaagagagcaauugagcucagugucaucauuugaaagguuugagauauuccccaagacaaguucauggcccaaucaugacucgaacaaagguguaacggcagcauguccucaugcuggagcaaaaagcuucuacaaaaauuuaauauggcuaguuaaaaaaggaaauucauacccaaagcucagcaaauccuacauuaaugauaaagggaaagaaguccucgugcuauggggcauucaccauccaucuacuagugcugaccaacaaagucucuaucagaaugcagaugcauauguuuuuguggggacaucaagauacagcaagaaguucaagccggaaauagcaauaagacccaaagugagggaucaagaagggagaaugaacuauuacuggacacuaguagagccgggagacaaaauaacauucgaagcaacuggaaaucuagugguaccgagauaugcauucgcaauggaaagaaaugcuggaucugguauuaucauuucagauacaccaguccacgauugcaauacaacuugucagacacccaagggugcuauaaacaccagccucccauuucagaauauacauccgaucacaauuggaaaauguccaaaauauguaaaaagcacaaaauugagacuggccacaggauugaggaaugucccgucuauucaaucuagaggccuauuuggggccauugccggcuucauugaagggggguggacagggaugguagauggaugguacgguuaucaccaucaaaaugagcaggggucaggauaugcagccgaccugaagagcacacagaaugccauugacaagauuacuaacaaaguaaauucuguuauugaaaagaugaauacacaguucacagcaguagguaaagaguucaaccaccuggaaaaaagaauagagaauuuaaauaaaaaaguugaugaugguuuccuggacauuuggacuuacaaugccgaacuguugguucuauuggaaaaugaaagaacuuuggacuaccacgauucaaaugugaagaacuuauaugaaaagguaagaagccaguuaaaaaacaaugccaaggaaauuggaaacggcugcuuugaauuuuaccacaaaugcgauaacacgugcauggaaagugucaaaaaugggacuuaugacuacccaaaauacucagaggaagcaaaauuaaacagagaagaaauagaugggguaaagcuggaaucaacaaggauuuaccagauuuuggcgaucuauucaacugucgccaguucauugguacugguagucucccugggggcaaucaguuucuggaugugcucuaaugggucucuacaguguagaauauguauuuaa

SEQ ID NO: 36874 - RNA, 1701 nt, Artificial Sequence
  derived and/or modified CDS sequence (wt) from hemagglutinin__InfluenzaA__ADG42673
augaaggcaauacuaguaguucugcuauauacauuugcaaccgcaaaugcagacacauuauguauagguuaucaugcgaacaauucaacagacacuguagacacaguacuagaaaagaauguaacaguaacacacucuguuaaccuucuagaagacaagcauaacgggaaacuaugcaaacuaaaagggguagccccauugcauuuggguaaauguaacauugcuggcuggauccugggaaauccagagugugaaucacucuccacagcaggcucaugguccuacauuguggaaacaucuaguucagacaauggaacguguuacccaggagauuucaucgauuaugaggagcuaagagagcaauugagcucagugucaucauuugaaagguuugagauauuccccaagacaaguucauggcccaaucaugacucgaacaaagguguaacggcagcauguccucaugcuggagcaaaaagcuucuacaaaaauuuaauauggcuaguuaaaaaaggaaauucauacccaaagcucagcaaauccuacauuaaugauaaagggaaagaaguccucgugcuauggggcauucaccauccaucuacuagugcugaccaacaaagucucuaucagaaugcagaugcauauguuuuuguggggacaucaagauacagcaagaaguucaagccggaaauagcaauaagacccaaagugagggaucaagaagggagaaugaacuauuacuggacacuaguagagccgggagacaaaauaacauucgaagcaacuggaaaucuagugguaccgagauaugcauucgcaauggaaagaaaugcuggaucugguauuaucauuucagauacaccaguccacgauugcaauacaacuugucagacacccaagggugcuauaaacaccagccucccauuucagaauauacauccgaucacaauuggaaaauguccaaaauauguaaaaagcacaaaauugagacuggccacaggauugaggaaugucccgucuauucaaucuagaggccuauuuggggccauugccgguuucauugaagggggguggacagggaugguagauggaugguacgguuaucaccaucaaaaugagcaggggucaggauaugcagccgaccugaagagcacacagaaugccauugacgggauuacuaacaaaguaaauucuguuauugaaaagaugaauacacaguucacagcaguagguaaagaguucaaccaccuggaaaaaagaauagagaauuuaaauaaaaaaguugaugaugguuuccuggacauuuggacuuacaaugccgaacuguugguucuauuggaaaaugaaagaacuuuggacuaccacgauucaaaugugaagaacuuauaugaaaagguaagaagccaguuaaaaaacaaugccaaggaaauuggaaacggcugcuuugaauuuuaccacaaaugcgauaacacgugcauggaaagugucaaaaaugggacuuaugacuacccaaaauacucagaggaagcaaaauuaaacagagaagaaauagaugggguaaagcuggaaucaacaaggauuuaccagauuuuggcgaucuauucaacugucgccaguucauugguacugguagucucccugggggcaaucaguuucuggaugugcucuaaugggucucuacaguguagaauauguauuuaa

SEQ ID NO: 36875 - RNA, 1701 nt, Artificial Sequence
  derived and/or modified CDS sequence (wt) from hemagglutinin__InfluenzaA__ADG42683
augaaggcaauacuaguaguucugcuauauacauuugcaaccgcaaaugcagacacauuauguauagguuaucaugcgaacaauucaacagacacuguagacacaguacuagaaaagaauguaacaguaacacacucuguuaacauucuagaagacaagcauaacgggaaacuaugcaaacuaagagggguagccccauugcauuuggguaaauguaacauugcuggcuggauccugggaaauccagagugugaaucacucuccacagcaagcucaugguccuacauuguggaaacaucuaguucagacaauggaacguguuacccagggaauuucaucgauuaugaggagcuaagagagcaauugagcucagugucaucauuugaaagguuugagauauuccccaagacaaguucauggcccaaucaugacucgaacaaagguguaacggcagcauguccucaugcuggagcaaaaagcuucuacaaaaauuuaauauggcuaguuaaaaaaggaaacucauacccaaagcucagcaaauccuacauuaaugauaaagggaaagaaguccucgugcuauggggcauucaccauccaucuacuagugcugaccaacaaagucucuaucagaaugcagaugcauauguuuuuguggggacaucaagauacagcaagaaguucaagccggaaauagcaauaagacccaaagugagggaucaagaagggagaaugaacuauuacuggacacuaguagagccgggagacaaaauaacauucgaagcaacuggaaaucuagugguaccgagauaugcauucgcaauggaaagaaaugcuggaucugguauuaucauuucagauacaccaguccacgauugcaauacaacuugucagacacccaagggugcuauaaacaccagccucccauuucagaauauacauccgaucacaauuggaaaauguccaaaauauguaaaaagcacaaaauugagacuggccacaggauugaggaaugucccgucuauucaaucuagaggccuauuuggggccauugccgguuucauugaagggggguggacagggaugguagauggaugguacgguuaucaccaucaaaaugagcaggggucaggauaugcagccgaccugaagagcacacagaaugccauugacgagauuacuaacaaaguaaauucuguuauugaaaagaugaauacacaguucacagcaguagguaaagaguucaaccaccuggaaaaaagaauagagaauuuaaauaaaaagguugaugaugguuuccuggacauuuggacuuacaaugccgaacuguugguucuauuggaaaaugaaagaacuuuggacuaccaugauucaaaugugaagaacuuauaugaaaagguaagaagccaguuaaaaaacaaugccaaggaaauuggaaacggcugcuuugaauuuuaccacaaaugcgauaacacgugcauggaaagugucaaaaaugggacuuaugacuacccaaaauacucagaggaagcaaaauuaaacagagaagaaauagaugggguaaagcuggaaucaacaaggauuuaccagauuuuggcgaucuauucaacugucgccaguucauugguacugguagucucccugggggcaaucaguuucuggaugugcucuaaugggucucuacaguguagaauauguauuuaa

SEQ ID NO: 36876 - RNA, 1701 nt, Artificial Sequence
  derived and/or modified CDS sequence (wt) from hemagglutinin__InfluenzaA__ADG42693
augaaggcaauacuaguaguucugcuauauacauuugcaaccgcaaaugcagacacauuauguauagguuaucaugcgaacaauucaacagacacuguagacacaguacuagaaaagaauguaacaguaacacacucuguuaaccuucuagaagacaagcauaacgggaaacuaugcaaacuaagagggguagccccauugcauuuggguaaauguaacauugcuggcuggauccugggaaauccagagugugaaucacucuccacagcaagcucaugguccuacauuguggaaacaucuaguucagacaauggaacguguuacccaggagauuucaucgauuaugaggagcuaagagagcaauugagcucagugucaucauuugaaagguuugagauauuccccaagacaaguucauggcccaaucaugacucgaacaaagguguaacggcagcauguccucaugcuggagcaaaaagcuucuacaaaaauuuaauauggcuaguuaaaaaaggaaauucauacccaaagcucagcaaauccuacauuaaugauaaagggaaagaaguccucgugcuauggggcauucaccauccaucuacuagugcugaccaacaaagucucuaucagaaugcagaugcauauguuuuuguggggacaucaagauacagcaagaaguucaagccggaaauagcaauaagacccaaagugagggaucaagaagggagaaugaacuauuacuggacacuaguagagccgggagacaaaauaacauucgaagcaacuggaaaucuagugguaccgagauaugcauucgcaauggaaagaaaugcuggaucugguauuaucauuucagauacaccaguccacgauugcaauacaacuugucagacacccaagggugcuauaaacaccagccucccauuucagaauauacauccgaucacaauuggaaaauguccaaaauauguaaaaagcacaaaauugagacuggccacaggauugaggaaugucccgucuauucaaucuagaggccuauuuggggccauugccgguuucauugaagggggguggacagggaugguagauggaugguacgguuaucaccaucaaaaugagcaggggucaggauaugcagccgaccugaagagcacacagaaugccauugacaagauuacuaacaaaguaaauucuguuauugaaaagaugaauacacaguucacagcaguagguaaagaguucaaccaccuggaaaaaagaauagagaauuuaaauaaaaaaguugaugaugguuuccuggacaucuggacuuacaaugccgaacuguugguucuauuggaaaaugaaagaacuuuggacuaccacgauucaaaugugaagaacuuauaugaaaagguaagaagccaguuaaaaaacaaugccaaggaaauuggaaacggcugcuuugaauuuuaccacaaaugcgauaacacgugcauggaaagugucaaaaaugggacuuaugacuacccaaaauacucagaggaagcaaaauuaaacagagaagaaauagaugggguaaaacuggaaucaacaaggauuuaccagauuuuggcgaucuauucaacugucgccaguucauugguacugguagucucccugggggcaaucaguuucuggaugugcucuaaugggucucuacaguguagaauauguauuuaa

SEQ ID NO: 36877 - RNA, 1701 nt, Artificial Sequence
  derived and/or modified CDS sequence (wt) from hemagglutinin__InfluenzaA__ADG42703
augaaggcaauacuaguaguucugcuauauacauuugcaaccgcaaaugcagacacauuauguauagguuaucaugcgaacaauucaacagacacuguagacacaguacuagaaaagaauguaacaguaacacacucuguuaaccuucuagaagacaagcauaacgggaaacuaugcaaacuaagagggguagccccauugcauuuggguaaauguaacauugcuggcuggauccugggaaauccagagugugaaucacucuccacagcaagcucaugguccuacauuguggaaacaucuaguucagacaauggaacguguuacccaggagauuucaucgauuaugaggagcuaagagagcaauugagcucagugucaucauuugaaagguuugagauauuccccaagacaaguucauggcccaaucaugacucgaacaaagguguaacggcagcauguccucaugcuggagcaaaaagcuucuacaaaaauuuaauauggcuaguuaaaaaaggaaauucauacccaaagcucagcaaauccuacauuaaugauaaagggaaagaaguccucgugcuauggggcauucaccauccaucuacuaguacugaccaacaaagucucuaucagaaugcagaugcauauguuuuuguggggacaucaagauacagcaagaaguucaagccggaaauagcaauaagacccaaagugagggaucaagaagggagaaugaacuauuacuggacacuaguagagccgggagacaaaauaacauucgaagcaacuggaaaucuagugguaccgagauaugcauucgcaauggaaagaaaugcuggaucugguauuaucauuucagauacaccaguccacgauugcaauacaacuugucagacacccaagggugcuauaaacaccagccucccauuucagaauauacauccgaucacaauuggaaaauguccaaaauauguaaaaagcacaaaauugagacuggccacaggauugaggaaugucccgucuauucaaucuagaggccuauuuggggccauugccgguuucauugaagggggguggacaggaaugguagauggaugguacgguuaucaccaucaaaaugagcaggggucaggauaugcagccgaccugaagagcacacagaaugccauugacaagauuacuaacaaaguaaauucuguuauugaaaagaugaauacacaguucacagcaguagguaaagaguucaaccaccuggaaaaaagaauagagaauuuaaauaaaaaaguugaugaugguuuccuggacauuuggacuuacaaugccgaacuguugguucuauuggaaaaugaaagaacuuuggacuaccacgauucaaaugugaagaacuuauaugaaaagguaagaagccaguuaaaaaacaaugccaaggaaauuggaaacggcugcuuugaauuuuaccacaaaugcgauaacacgugcauggaaagugucaaaaaugggacuuaugacuacccaaaauacucagaggaagcaaaauuaaacagagaagaaauagaugggguaaagcuggaaucaacaaggauuuaccagauuuuggcgaucuauucaacugucgccaguucauugguacugguagucucccugggggcaaucaguuucuggaugugcucuaaugggucucuacaguguagaauauguauuuaa

SEQ ID NO: 36878 - RNA, 1701 nt, Artificial Sequence
  derived and/or modified CDS sequence (wt) from hemagglutinin__InfluenzaA__ADG42723
augaaggcaauacuaguaguucugcuauauacauuugcaaccgcaaaugcagacacauuauguauagguuaucaugcgaacaauucaacagacacuguagacacaguacuagaaaagaauguaacaguaacacacucuguuaaccuucuagaagacaagcauaacgggaaacuaugcaaacuaagagggguagccccauugcauuuggguaaauguaacauugcuggcuggauccugggaaauccagagugugaaucacucuccacagcaagcucaugguccuacauuguggaaacaucuaguucagacaauggaacguguuacccaggagacuucaucgauuaugaggagcuaagagagcaauugagcucagugucaucauuugaaagguuugagauauuccccaagacaaguucauggcccaaucaugacucgaacaaagguguaacggcagcauguccucaugcuggagcaaaaagcuuuuacaaaaauuuaauauggcuaguuaaaaaaggaaauucauacccaaagcucagcaaauccuacauuaaugauaaagggaaagaaguccucgugcuauggggcauucaccauccaucuacuagugcugaccaacaaagucucuaucagaaugcagaugcauauguuuuuguggggacaucaagauacagcaagaaguucaagccggaaauggcaauaagacccaaagugagggaucaagaagggagaaugaacuauuacuggacacuaguagagccgggagacaaaauaacauucgaagcaacuggaaaucuagugguaccgagauaugcauucgcaauggaaagaaaugcuggaucugguauuaucauuucagauacaccaguccacgauugcaauacaacuugucagacacccaagggugcuauaaacaccagccucccauuucagaauauacauccgaucacaauuggaaaauguccaaaauauguaaaaagcacaaaauugagacuggccacaggauugaggaaugucccgucuauucaaucuagaggccuauuuggggccauugccgguuucauugaagggggguggacagggaugguagauggaugguacgguuaucaccaucaaaaugagcaggggucaggauaugcagccgaccugaagagcacacagaaugccauugacaagauuacuaacaaaguaaauucuguuauugaaaagaugaauacacaguucacagcaguagguaaagaguucaaccaccuggaaaaaagaauagagaauuuaaauaaaaaaguugaugaugguuuccuggacauuuggacuuacaaugccgaacuguuaguucuauuggaaaaugaaagaacuuuggacuaccacgauucaaaugugaagaacuuauaugaaaagguaagaagccaguuaaaaaacaaugccaaggaaauuggaaacggcugcuuugaauuuuaccacaaaugcgauaacacgugcauggaaagugucaaaaaugggacuuaugacuacccaaaauacucagaggaagcaaaauuaaacagagaagaaauagaugggguaaagcuggaaucaacaaggauuuaccagauuuuggcgaucuauucaacugucgccaguucauugguacugguagucucccugggggcaaucaguuucuggaugugcucuaaugggucucuacaguguagaauauguauuuaa

SEQ ID NO: 36879 - RNA, 1701 nt, Artificial Sequence; identical to SEQ ID NO: 36354
  derived and/or modified CDS sequence (wt) from hemagglutinin__InfluenzaA__ADG42743

SEQ ID NO: 36880 - RNA, 1701 nt, Artificial Sequence
  derived and/or modified CDS sequence (wt) from hemagglutinin__InfluenzaA__ADG42753
augaaggcaauacuaguaguucugcuauauacauuugcaaccgcaaaugcagacacauuauguauagguuaucaugcgaacaauucaacagacacuguagacacaguacuagaaaagaauguaacaguaacacacucuguuaaccuucuagaagacaagcauaacgggaaacuaugcaaacuaagagggguagccccauugcauuuggguaaauguaacauugcuggcuggauccugggaaauccagagugugaaucacucuccacagcaagcucaugguccuacauuguggaaacaucuaguucagacaauggaacguguuacccaggagauuucaucgauuaugaggagcuaagagagcaauugagcucagugucaucauuugaaagguuugagauauuccccaagacaaguucauggcccaaucaugacucgaacaaagguguaacggcagcauguccucaugcuggagcaaaaagcuucuacaaaaauuuaauauggcuaguuaaaaaaggaaauucauacccaaagcucagcaaauccuacauuaaugauaaagggaaagaaguccucgugcuauggggcauucaccauccaucuacuaguacugaccaacaaagucucuaucagaaugcagaugcauauguuuuuguggggacaucaagauacagcaagaaguucaagccggaaauagcaauaagacccaaagugagggaucaagaagggagaaugaacuauuacuggacacuaguagagccgggagacaaaauaacauucgaagcaacuggaaaucuagugguaccgagauaugcauucgcaauggaaagaaauucuggaucugguauuaucauuucagauacaccaguccacgauugcaauacaacuugucagacacccaagggugcuauaaacaccagccucccauuucagaauauacauccgaucacaauuggaaaauguccaaaauauguaaaaagcacaaaauugagacuggccacaggauugaggaaugucccgucuauucaaucuagaggccuauuuggggccauugccgguuucauugaagggggguggacagggaugguagauggaugguacgguuaucaccaucaaaaugagcaggggucaggauaugcagccgaccugaagagcacacagaaugccauugacgagauuacuaacaaaguaaauucuguuauugaaaagaugaauacacaguucacagcaguagguaaagaguucaaccaccuggaaaaaagaauagagaauuuaaauaaaaagguugaugaugguuuccuggacauuuggacuuacaaugccgaacuguugguucuauuggaaaaugaaagaacuuuggacuaccacgauucaaaugugaagaacuuauaugaaaagguaagaagccaguuaaaaaacaaugccaaggaaauuggaaacggcugcuuugaauuuuaccacaaaugcgauaacacgugcauggaaagugucaaaaaugggacuuaugacuacccaaaauacucagaggaagcaaaauuaaacagagaagaaauagaugggguaaagcuggaaucaacaaggauuuaccagauuuuggcgaucuauucaacugucgccaguucauugguacugguagucucccugggggcaaucaguuucuggaugugcucuaaugggucucuacaguguagaauauguauuuaa

SEQ ID NO: 36881 - RNA, 1701 nt, Artificial Sequence
  derived and/or modified CDS sequence (wt) from hemagglutinin__InfluenzaA__ADG42763
augaaggcaauacuaguaguucugcuauauacauuugcaaccgcaaaugcagacacauuauguauagguuaucaugcgaacaauucaacagacacuguagacacaguacuagaaaagaauguaacaguaacacacucuguuaaccuucuagaagacaagcauaacgggaaacuaugcaaacuaagagggguagccccauugcauuuggguaaauguaacauugcuggcuggauccugggaaauccagagugugaaucacucuccacagcaagcucaugguccuacauuguggaaaccucuaguucagacaauggaacguguuacccaggagauuucaucgauuaugaggagcuaagagagcaauugagcucagugucaucauuugaaagguuugagauauuccccaagacaaguucauggcccaaucaugacucgaacaaagguguaacggcagcauguccucaugcuggagcaaaaagcuucuacaaaaauuuaauauggcuaguuaaaaaaggaaauucauacccaaagcucagcaaauccuacauuaaugauaaagggaaagaaguccucgugcuauggggcauucaccauccaucuacuagugcugaccaacaaagucucuaucagaaugcagaugcauauguuuuuguggggacaucaagauacagcaagaaguucaagccggaaauagcaauaagacccaaagugagggaucaagaagggagaaugaacuauuacuggacacuaguagagccgggagacaaaauaacauucgaagcaacuggaaaucuagugguaccgagauacgcauucgcaauggaaagaaaugcuggaucuggcauuaucauuucagauacaccaguccacgauugcaauacaacuugucagacacccaagggugcuauaaacaccagccucccauuucagaauauacauccgaucacaauuggaaaauguccaaaauauguaaaaagcacaaaauugagacuggccacaggauugaggaaugucccgucuauucaaucuagaggccuauuuggggccauugccggcuucauugaagggggguggacagggaugguagauggaugguacgguuaucaccaucaaaaugagcaggggucaggauaugcagccgaccugaagagcacacagaaugccauugacaagauuacuaacaaaguaaauucuguuauugaaaagaugaauacacaguucacagcaguagguaaagaguucaaccaccuggaaaaaagaauagagaauuuaaauaaaaaaguugaugaugguuuccuggacauuuggacuuacaaugccgaacuguugguucuauuggaaaaugaaagaacuuuggacuaccacgauucaaaugugaagaacuuauaugaaaagguaagaagccaguuaaaaaacaaugccaaggaaauuggaaacggcugcuuugaauuuuaccacaaaugcgauaacacgugcauggaaagugucaaaaaugggacuuaugacuacccaaaauacucagaggaagcaaaauuaaacagagaagaaauagaugggguaaagcuggaaucaacaaggauuuaccagauuuuggcgaucuauucaacugucgccaguucauugguacugguagucucccugggggcaaucaguuucuggaugugcucuaaugggucucuacaguguagaauauguauuuaa

SEQ ID NO: 36882 - RNA, 1701 nt, Artificial Sequence
  derived and/or modified CDS sequence (wt) from hemagglutinin__InfluenzaA__ADG42773
augaaggcaauacuaguaguucugcuauauacauuugcaaccgcaaaugcagacacauuauguauagguuaucaugcgaacaauucaacagacacuguagacacaguacuagaaaagaauguaacaguaacacacucuguuaaccuucuagaagacaagcauaacgggaaacuaugcaaacuaagagggguagccccauugcauuuggguaaauguaacauugcuggcuggauccugggaaauccagagugugaaucacucuccacagcaagcucaugguccuacauuguggaaacaucuaguucagacaauggaacguguuacccaggagauuucaucgauuaugaggagcuaagagagcaauugagcucagugucaucauuugaaagguuugagauauuccccaagacaaguucauggcccaaucaugacucgaacaaagguguaacggcagcauguccucaugcuggagcaaaaagcuucuacaaaaauuuaauauggcuaguuaaaaaaggaaauucauacccaaagcucagcaaauccuacauuaaugauaaagggaaagaaguccucgugcuauggggcauucaccauccaucuacuagugcugaccaacaaagccucuaucagaaugcagaugcauauguuuuuguggggacaucaagauacagcaagaaguucaagccggaaauagcaauaagacccaaagugagggaucaagaagggagaaugaacuauuacuggacacuaguagagccgggagacaaaauaacauucgaagcaacuggaaaucuagugguaccgagauacgcauucgcaauggaaagaaaugcuggaucugguauuaucauuucagauacaccaguccacgauugcaauacaacuugucaaacacccaagggugcuauaaacaccagccucccauuucagaauauacauccgaucacaauuggaaaauguccaaaauauguaaaaagcacaaaauugagacuggccacaggauugaggaaugucccgucuauucaaucuagaggccuauuuggggccauugccggcuucauugaagggggguggacagggaugguagauggaugguacgguuaucaccaucaaaaugagcaggggucaggauaugcagccgaccugaagagcacacagaaugccauugacaagauuacuaacaaaguaaauucuguuauugaaaagaugaauacacaguucacagcaguagguaaagaguucaaccaccuggaaaaaagaauagagaauuuaaauaaaaaaguugaugaugguuuccuggacauuuggacuuacaaugccgaacuguugguucuauuggaaaaugaaagaacuuuggacuaccacgauucaaaugugaagaacuuauaugaaaagguaagaagccaguuaaaaaacaaugccaaggaaauuggaaacggcugcuuugaauuuuaccacaaaugcgauaacacgugcauggaaagugucaaaaaugggacuuaugacuacccaaaauacucagaggaagcaaaauuaaacagagaagaaauagaugggguaaagcuggaaucaacaaggauuuaccagauuuuggcgaucuauucaacugucgccaguucauugguacugguagucucccugggggcaaucaguuucuggaugugcucuaaugggucucuacaguguagaauauguauuuaa

SEQ ID NO: 36883 - RNA, 1701 nt, Artificial Sequence
  derived and/or modified CDS sequence (wt) from hemagglutinin__InfluenzaA__ADG42783
augaaggcaauacuaguaguucugcuauauacauuugcaaccgcaaaugcagacacauuauguauagguuaucaugcgaacaauucaacagacacuguagacacaguacuagaaaagaauguaacaguaacacacucuguuaaccuucuagaagacaagcauaacgggaaacuaugcaaacuaagagggguagccccauugcauuuggguaaauguaacauugcuggcuggauccugggaaauccagagugugaaucacucuccacagcaagcucaugguccuacauuguggaaacaucuaguucagacaauggaacguguuacccaggagauuucaucgauuaugaggagcuaagagagcaauugagcucagugucaucauuugaaagguuugagauguuccccaagacaaguucauggcccaaucaugacucgaacaaagguguaacggcagcauguccucaugcuggagcaaaaagcuucuacaaaaauuuaauauggcuaguuaaaaaaggaaauucauacccaaagcucagcaaauccuacauuaaugauaaagggaaagaaguccucgugcuauggggcauucaccauccaucuacuaguacugaccaacaaagucucuaucagaaugcagaugcauauguuuuuguggggacaucgagauacagcaagaaguucaagccggaaauagcaauaagacccaaagugagggaucaagaagggagaaugaacuauuacuggacacuaguagagccgggagacaaaauaacauucgaagcaacuggaaaucuagugguaccgagauaugcauucgcaauggaaagaaaugcuggaucugguauuaucauuucagauacaccaguccacgauugcaauacaacuugucagacacccaagggugcuauaaacaccagccucccauuucagaauauacauccgaucacaauuggaaaauguccaaaauauguaaaaagcacaaaauugagacuggccacaggauugaggaaugucccgucuauucaaucuagaggccuauuuggggccauugccgguuucauugaagggggguggacagggaugguagauggaugguacgguuaucaccaucaaaaugagcaggggucaggauaugcagccgaccugaagagcacacagaaugccauugacaagauuacuaacaaaguaaauucuguuauugaaaagaugaauacacaguucacagcaguagguaaagaguucaaccaccuggaaaaaagaauagagaauuuaaauaaaaaaguugaugaugguuuccuggacauuuggacuuacaaugccgaacuguugguucuauuggaaaaugaaagaacuuuggacuaccacgauucaaaugugaagaacuuauaugaaaagguaagaagccaguuaaaaaacaaugccaaggaaauuggaaacggcugcuuugaauuuuaccacaaaugcgauaacacuugcauggaaagugucaaaaaugggacuuaugacuacccaaaauacucagaggaagcaaaauuaaacagagaagaaauagaugggguaaagcuggaaucaacaaggauuuaccagauuuuggcgaucuauucaacugucgccaguucauugguacugguagucucccugggggcaaucaguuucuggaugugcucuaaugggucucuacaguguagaauauguauuuaa

SEQ ID NO: 36884 - RNA, 1701 nt, Artificial Sequence; identical to SEQ ID NO: 36882
  derived and/or modified CDS sequence (wt) from hemagglutinin__InfluenzaA__ADG42793

SEQ ID NO: 36885 - RNA, 1701 nt, Artificial Sequence; identical to SEQ ID NO: 36883
  derived and/or modified CDS sequence (wt) from hemagglutinin__InfluenzaA__ADG42803

SEQ ID NO: 36886 - RNA, 1701 nt, Artificial Sequence
  derived and/or modified CDS sequence (wt) from hemagglutinin__InfluenzaA__ADG42813
augaaggcaauacuaguaguucugcuauauacauuugcaaccgcaaaugcagacacauuauguauagguuaucaugcgaacaauucaacagacacuguagacacaguacuagaaaagaauguaacaguaacacacucuguuaaccuucuagaagacaagcauaacgggaaacuaugcaaacuaagagggguagccccauugcauuuggguaaauguaacauugcuggcuggauccugggaaauccagagugugaaucacucuccacagcaagcucaugguccuacauuguggaaacaucuaguucagacaauggaacguguuacccaggagauuucaucaauuaugaggagcuaagagagcaauugagcucagugucaucauuugaaagguuugagauauuccccaagacaaguucauggcccaaucaugacucgaacaaagguguaacggcagcauguccucaugcuggagcaaaaagcuucuacaaaaauuuaauauggcuaguuaaaaaaggaaauucauacccaaagcucagcaaauccuacauuaaugauaaagggaaagaaguccucgugcuauggggcauucaccauccuucuacuagugcugaccaacaaagucucuaucagaaugcagaugcauauguuuuuguggggacaucaagauacagcaagaaguucaagccggaaauagcaauaagacccaaagugagggaucaagaagggagaaugaacuauuacuggacacuaguagagccgggagacaaaauaacauucgaagcaacuggaaaucuagugguaccgagauaugcauucgcaauggaaagaaaugcuggaucugguauuaucaucucagauacaccaguccacgauugcaauacaacuugucagacacccaagggugcuauaaacaccagccucccauuucagaauauacauccgaucacaauuggaaaauguccaaaauauguaaaaagcacaaaauugagacuggccacaggauugaggaaugucccgucuauucaaucuagaggccuauuuggggccauugccgguuucauugaagggggguggacagggaugguagauggaugguacgguuaucaccaucaaaaugagcaggggucaggauaugcagccgaccugaagagcacacagaaugccauugacaagauuacuaacaaaguaaauucuguuauugaaaagaugaauacacaguucacagcaguagguaaagaguucaaccaccuggaaaaaagaauagagaauuuaaauaaaaaaguugaugaugguuuccuggacauuuggacuuacaaugccgaacuguugguucuauuggaaaaugaaagaacuuuggacuaccacgauucaaaugugaagaacuuauaugaaaagguaagaagccaguuaaaaaacaaugccaaggaaauuggaaacggcugcuuugaauuuuaccacaaaugcgauaacacgugcauggaaagugucaaaaaugggacuuaugacuacccaaaauacucagaggaagcaaaauuaaacagagaagaaauagaugggguaaagcuggaaucaacaaggauuuaccagauuuuggcgaucuauucaacugucgccaguucauugguacugguagucucccugggggcaaucaguuucuggaugugcucuaaugggucucuacaguguagaauauguauuuaa

SEQ ID NO: 36887 - RNA, 1701 nt, Artificial Sequence; identical to SEQ ID NO: 36376
  derived and/or modified CDS sequence (wt) from hemagglutinin__InfluenzaA__ADG42823

SEQ ID NO: 36888 - RNA, 1701 nt, Artificial Sequence
  derived and/or modified CDS sequence (wt) from hemagglutinin__InfluenzaA__ADG42833
augaaggcaauacuaguaguucugcuauauacauuugcaaccgcaaaugcagacacauuauguauagguuaucaugcgaacaauucaacagacacuguagacacaguacuagaaaagaauguaacaguaacacacucuguuaacauucuagaagacaagcauaacgggaaacuaugcaaacuaagagggguagccccauugcauuuggguaaauguaacauugcuggcuggauccugggaaauccagagugugaaucacucuccacagcaagcucaugguccuacauuguggaaacaucuaguucagacaauggaacguguuacccaggagauuucaucgauuaugaggagcuaagagagcaauugagcucagugucaucauuugaaagguuugagauauuccccaagacaaguucauggcccaaucaugacucgaacaaagguguaacggcagcauguccucaugcuggagcaaaaagcuucuacaaaaauuuaauauggcuaguuaaaaaaggaaacucauacccaaagcucagcaaauccuacauuaaugauaaagggaaagaaguccucgugcuauggggcauucaccauccaucuacuagugcugaccaacaaagucucuaucagaaugcagaugcauauguuuuuguggggacaucaagauacagcaagaaguucaagccggaaauagcaauaagacccaaagugagggaucaagaagggagaaugaacuauuacuggacacuaguagagccgggagacaaaauaacauucgaagcaacuggaaaucuagugguaccgagauaugcauucgcaauggaaagaaaugcuggaucugguauuaucauuucagauacaccaguccacgauugcaauacaacuugucagacacccaagggugcuauaaacaccagccucccauuucagaauauacauccgaucacaauuggaaaauguccaaaauauguaaaaagcacaaaauugagacuggccacaggauugaggaaugucccgucuauucaaucuagaggccuauuuggggccauugccgguuucauugaagggggguggacagggaugguagauggaugguacgguuaucaccaucaaaaugagcaggggucaggauaugcagccgaccugaagagcacacagaaugccauugacgaaauuacuaacaaaguaaauucuguuauugaaaagaugaauacacaguucacagcaguagguaaagaguucaaccaccuggaaaaaagaauagagaauuuaaauaaaaagguugaugaugguuuccuggacauuuggacuuacaaugccgaacuguugguucuauuggaaaaugaaagaacuuuggacuaccaugauucaaaugugaagaacuuauaugaaaagguaagaagccaguuaaaaaacaaugccaaggaaauuggaaacggcuguuuugaauuuuaccacaaaugcgauaacacgugcauggaaagugucaaaaaugggacuuaugacuacccaaaauacucagaggaagcaaaauuaaacagagaagaaauagaugggguaaagcuggaaucaacaaggauuuaccagauuuuggcgaucuauucaacugucgccaguucauugguacugguagucucccugggggcaaucaguuucuggaugugcucuaaugggucucuacaguguagaauauguauuuaa

SEQ ID NO: 36889 - RNA, 1701 nt, Artificial Sequence; identical to SEQ ID NO: 36384
  derived and/or modified CDS sequence (wt) from hemagglutinin__InfluenzaA__ADG42843

SEQ ID NO: 36890 - RNA, 1701 nt, Artificial Sequence; identical to SEQ ID NO: 36461
  derived and/or modified CDS sequence (wt) from hemagglutinin__InfluenzaA__ADG42853

SEQ ID NO: 36891 - RNA, 1701 nt, Artificial Sequence; identical to SEQ ID NO: 36399
  derived and/or modified CDS sequence (wt) from hemagglutinin__InfluenzaA__ADG42863

SEQ ID NO: 36892 - RNA, 1701 nt, Artificial Sequence; identical to SEQ ID NO: 36419
  derived and/or modified CDS sequence (wt) from hemagglutinin__InfluenzaA__ADG42883

SEQ ID NO: 36893 - RNA, 1701 nt, Artificial Sequence
  derived and/or modified CDS sequence (wt) from hemagglutinin__InfluenzaA__ADG42893
augaaggcaauacuaguaguucugcuauauacauuugcaaccgcaaaugcagacacauuauguauagguuaucaugcgaacaauucaacagacacuguagacacaguacuagaaaagaauguaacaguaacacacucuguuaaccuucuagaagacaagcauaacgggaaacuaugcaaacuaagagggguagccccauugcauuuggguaaauguaacauugcuggcuggauccugggaaauccagagugugaaucacucuccacagcaagcucaugguccuacauuguggaaacaucuaguucagacaauggaacguguuacccaggagauuucaucgauuaugaggagcuaagagagcaauugagcucagugucaucauuugaaagguuugagauauuccccaagacaaguucauggcccaaucaugacucgaacaaagguguaacggcagcauguccucaugcuggagcaaaaagcuucuacaaaaauuuaauauggcuaguuaaaaaaggaaauucauacccaaagcucagcaaauccuacauuaaugauaaagggaaagaaguccucgugcuauggggcauucaccauccaucuacuagugcugaccaacaaagucucuaucagaaugcagaugcauauguuuuuguggggacaucaagauacagcaagaaguucaagccggaaauagcaauaagacccaaagugagggaucaagaagggagaaugaacuauuacuggacacuaguagagccgggagacaaaauaacauucgaagcaacuggaaaucuagugguaccgagauaugcauucgcaauggaaagaaaugcuggaucugguauuaucauuucagauacaccaguccacgauugcaauacaacuugucagacacccaagggugcuauaaacaccagccucccauuucagaauauacauccgaucacaauuggaaaauguccaaaauauguaaaaagcacaaauuugagacuggccacaggauugaggaaugucccgucuauucaaucuagaggccuauuuggggccauugccgguuucauugaagggggguggacagggaugguagauggaugguacgguuaucaccaucaaaaugagcaagggucaggauaugcagccgaccugaagagcacacagaaugccauugacgagauuacuaacaaaguaaauucuguuauugaaaagaugaauacacaguucacagcaguagguaaagaguucaaccaccuggaaaaaagaauagagaauuuaaauaaaaaaguugaugaugguuuccuggacauuuggacuuacaaugccgaacuguugguucuauuggaaaaugaaagaacuuuggacuaccacgauucaaaugugaagaacuuauaugaaaagguaagaagccaguuaaaaaacaaugccaaggaaauuggaaacggcugcuuugaauuuuaccacaaaugcgauaacacgugcauggaaagugucaaaaaugggacuuaugacuacccaaaauacucagaggaagcaaaauuaaacagagaagaaauagauggaguaaagcuggaaucaacaaggauuuaccagauuuuggcgaucuauucaacugucgccaguucauugguacugguagucucccugggggcaaucaguuucuggaugugcucuaaugggucucuacaguguagaauauguauuuaa

SEQ ID NO: 36894 - RNA, 1701 nt, Artificial Sequence
  derived and/or modified CDS sequence (wt) from hemagglutinin__InfluenzaA__ADG42903
augaaggcaauacuaguaguucugcuauauacauuugcaaccgcaaaugcagacacauuauguauagguuaucaugcgaacaauucaacagacacuguagacacaguacuagaaaagaauguaacaguaacacacucuguuaaccuucuagaagacaagcauaacgggaaacuaugcaaacuaagagggguagccccauugcauuuggguaaauguaacauugcuggcuggauccugggaaauccagagugugaaucacucuccacagcaagcucaugguccuacauuguggaaacaucuaguucagacaauggaacguguuacccaggagauuucaucgauuaugaggagcuaagagagcaauugagcucagugucaucauuugaaagguuugagauauuccccaagacaaguucauggcccaaucaugacucgaacaaagguguaacggcagcauguccucaugcuggagcaaaaagcuucuacaaaaauuuaauauggcuaguuaaaaaaggaaauucauacccaaagcucagcaaauccuacauuaaugauaaagggaaagaaguccucgugcuauggggcauucaccauccaucuacuagugcugaccaacaaagucucuaucagaaugcagaugcauauguuuuuguggggacaucaagauacagcaagaaguucaagccggaaauagcaauaagacccaaagugagggaucaagaagggagaaugaacuauuacuggacacuaguagagccgggagacaaaauaacauucgaagcaacuggaaaucuagugguaccgagauaugcauucgcaauggaaagaaaugcuggaucugguauuaucauuucagauacaccaguccacgauugcaauacaacuugucagacacccaagggugcuauaaauaccagccucccauuucagaauauacauccgaucacaauuggaaaauguccaaaauauguaaaaagcacaaaauugagacuggccacaggauugaggaaugucccgucuauucaaucuagaggccuauuuggggccauugccgguuucauugaagggggguggacagggaugguagauggaugguacgguuaucaccaucaaaaugagcaagggucaggauaugcagccgaccugaagagcacacagaaugccauugacgagauuacuaacaaaguaaauucuguuauugaaaagaugaauacacaguucacagcaguagguaaagaguucaaccaccuggaaaaaagaauagagaauuuaaauaaaaaaguugaugaugguuuccuggacauuuggacuuacaaugccgaacuguugguucuauuggaaaaugaaagaacuuuggacuaccacgauucaaaugugaagaacuuauaugaaaagguaagaagccaguuaaaaaacaaugccaaggaaauuggaaacggcugcuuugaauuuuaccacaaaugcgauaacacgugcauggaaagugucaaaaaugggacuuaugacuacccaaaauacucagaggaagcaaaauuaaacagagaagaaauagauggaguaaagcuggaaucaacaaggauuuaccagauuuuggcgaucuauucaacugucgccaguucauugguacugguagucucccugggggcaaucaguuucuggaugugcucuaaugggucucuacaguguagaauauguauuuaa

SEQ ID NO: 36895 - RNA, 1701 nt, Artificial Sequence; identical to SEQ ID NO: 36383
  derived and/or modified CDS sequence (wt) from hemagglutinin__InfluenzaA__ADG42913

SEQ ID NO: 36896 - RNA, 1701 nt, Artificial Sequence
  derived and/or modified CDS sequence (wt) from hemagglutinin__InfluenzaA__ADG42923
augaaggcaauacuaguaguucugcuauauacauuugcaaccgcaaaugcagacacauuauguauagguuaucaugcgaacaauucaacagacacuguagacacaguacuagaaaagaauguaacaguaacacacucuguuaaccuucuagaagacaagcauaacgggaaacuaugcaaacuaagagggguagccccauugcauuuggguaaauguaacauugcuggcuggauccugggaaauccagagugugaaucacucuccacagcaagcucaugguccuacauuguggaaacaucuaguucagacaauggaacguguuacccaggagauuucaucgauuaugaggagcuaagagagcaauugagcucagugucaucauuugaaagguuugagauauuccccaagacaaguucauggcccaaucaugacucgaacaaagguguaacggcagcauguccucaugcuggagcaaaaagcuucuacaaaaauuuaauauggcuaguuaaaaaaggaaauucauacccaaagcucagcaaauccuacauuaaugauaaagggaaagaaguccucgugcuauggggcauucaccauccaucuacuaguacugaccaacaaagucucuaucagaaugcagaugcauauguuuuuguggggacaucaagauacagcaagaaguucaagccggaaauagcaauaagacccaaagugagggaucaagaagggagaaugaacuauuacuggacacuaguagagccgggagacaaaauaacauucgaagcaacuggaaaucuagugguaccgagauaugcauucgcaauggaaagaaaugcuggaucugguauuaucauuucagauacaccaguccacgauugcaauacaacuugccagacacccaagggugcuauaaacaccagccucccauuucagaauauacauccgaucacaauuggaaaauguccaaaauauguaaaaagcacaaaauugagacuggccacaggauugaggaauaucccgucuauucaaucuagaggccuauuuggggccauugccgguuucauugaagggggguggacagggaugguagauggaugguacgguuaucaccaucaaaaugagcaggggucaggauaugcagccgaccugaagagcacacagaaugccauugacgagauuacuaacaaaguaaauucuguuauugaaaagaugaauacacaguucacagcaguagguaaagaguucaaccaccuggaaaaaagaauagagaauuuaaauaaaaagguugaugaugguuuccuggacauuuggacuuacaaugccgaacuguugguucuauuggaaaaugaaagaacuuuggacuaccacgauucaaaugugaagaacuuauaugaaaagguaagaagccaguuaaaaaacaaugccaaggaaauuggaaacggcugcuuugaauuuuaccacaaaugcgauaacacgugcauggaaagugucaaaaaugggacuuaugacuacccaaaauacucagaggaagcaaaauuaaacagagaagaaauagaugggguaaagcuggaaucaacaaggauuuaccagauuuuggcgaucuauucaacugucgccaguucauugguacugguagucucccugggggcaaucaguuucuggaugugcucuaaugggucucuacaguguagaauauguauuuaa

SEQ ID NO: 36897 - RNA, 1701 nt, Artificial Sequence
  derived and/or modified CDS sequence (wt) from hemagglutinin__InfluenzaA__ADG57087
augaaggcaauacuaguaguucugcuauauacauuugcaaccgcaaaugcagacacauuauguauagguuaucaugcgaacaauucaacagacacuguagacacaguacuagaaaagaauguaacaguaacacacucuguuaaccuucuagaagacaagcauaacgggaaacuaugcaaacuaagagggguagccccauugcauuuggguaaauguaacauugcuggcuggauccugggaaauccagagugugaaucacucuccacagcaagcucaugguccuacauuguggaaacaucuaguucagacaauggaacguguuacccaggagauuucaucgauuaugaggagcuaagagagcaauugagcucagugucaucauuugaaagguuugagauauuccccaagacaaguucauggcccaaucaugacucgaacaaagguguaacggcagcauguccucaugcuggagcaaaaagcuucuacaaaaauuuaauauggcuaguuaaaaaaggaaauucauacccaaagcucagcaaauccuacauuaaugauaaagggaaagaaguccucgugcuauggggcauucaccauccaucuacuagugcugaccaacaaagucucuaucagaaugcagaugcauauguuuuuguggggacaucaagauacagcaagaaguucaagccggaaauagcaauaagacccaaagugagggaucaagaagggagaaugaacuauuacuggacacuaguagagccgggagacaaaauaacauucgaagcaacuggaaaucuagugguaccgagauaugcauucgcaauggaaagaaaugcuggaucugguauuaucauuucagauacaccaguccacgauugcaauacaacuugucagacacccaagggugcuauaaacaccagccucccauuucagaauauacauccgaucacaauuggaaaauguccaaaauauguaaaaagcacaaaauugagacuggccacaggauugaggaaugucccgucuauucaaucuagaggccuauuuggggccauugccgguuucauugaagggggguggacagggaugguagauggaugguacgguuaucaccaucaaaaugagcaggggucaggauaugcagccgaccugaagagcacacagaaugccauugacgagauuacuaacaaaguaaauucuguuauugaaaagaugaauacacaguucacagcaguagguaaagaguucaaccaccuggaaaaaagaauagagaauuuaaauaaaaaaguugaugaugguuuccuggacauuuggacuuacaaugccgaacuguugguucuauuggaaaaugaaagaacuuuggacuaccacgauucaaaugugaagaacuuauaugaaaagguaagaagccaguuaaaaaacaaugccaaggaaauuggaaacggcugcuuugaauuuuaccacaaaugcgauaacacgugcauggaaagugucaaaaaugggacuuaugacuacccaaaauacucagaggaagcaaaauuaaacagagaagaaauagaugggguaaagcuggaaucaacaaggauuuaccagauuuuggcgaucuauucaacugucgccauuucauugguacugguagucucccugggggcaaucaguuucuggaugugcucuaaugggucucuacgguguagaauauguauuuaa

SEQ ID NO: 36898 - RNA, 1701 nt, Artificial Sequence; identical to SEQ ID NO: 34681
  derived and/or modified CDS sequence (wt) from hemagglutinin__InfluenzaA__ADG57088

SEQ ID NO: 36899 - RNA, 1701 nt, Artificial Sequence
  derived and/or modified CDS sequence (wt) from hemagglutinin__InfluenzaA__ADG57089
auggaggcaauacuaguaguucugcuauauacauuugcaaccgcaaacgcagacacauuauguauagguuaucaugcgaacaauucaacagacacuguagacacaguacuagaaaagaauguaacaguaacacacucuguuaaccuucuagaagacaagcauaacgggaaacuaugcaaacuaagagggguagccccauugcauuuggguaaauguaacauugcuggcuggauccugggaaauccagagugugaaucacucuccacagcaagcucaugguccuacauuguggaaacaucuaguucagacaauggaacguguuacccaggagauuucauccaguaugaggagcugagagagcaauugagcucagugucaucauuugaaagguuugagauauuccccaagacaaguucauggcccaaucaugacucgaacaaagguguaacggcagcauguccucaugcuggagcaaaaagcuucuacaaaaauuuaauauggcuaguuaaaaaaggaaauucauacccaaagcucagcaaauccuacauuaaugauaaagggaaagaaguccucgugcuauggggcauucaccauccaucuacuagugcugaccaacaaagucucuaucagaaugcagaugcauauguuuuuguggggucaucaagauacagcaagaaguucaagccggaaauagcaauaagacccaaagugagggaucaagaagggagaaugaacuauuacuggacacuaguagagccgggagacaaaauaacauucgaagcaacuggaaaucuagugguaccgagauaugcauucgcaauggaaagaaaugcuggaucugguauuaucauuucagauacaccaguccacgauugcaauacaacuugucagacacccaagggugcuauaaacaccagccucccauuucauaauauacauccgaucacaauuggaaaauguccaaaauauguaaaaagcacaaaauugagacuggccacaggauugaggaaugucccgucuauucaaucuagaggccuauuuggggccauugccgguuucauugaagggggguggacagggaugguggauggaugguacgguuaucaccaucaaaaugagcaggggucaggauaugcagccgaccugaagagcacacagaaugccauugacgagauuacuaacaaaguaaauucuguuauugaaaagaugaauacacaguucacagcaguagguaaagaguucaaccaccuggaaaaaagaauagagaauuuaaauaaaaaaguugaugaugguuuccuggacauuuggacuuacaaugccgaacuguugguucuauuggaaaaugaaagaacuuuggacuaccacgauucaaaugugaagaacuuauaugaaaagguaagaagccaguuaaaaaacaaugccgaggaaauuggaaacggcugcuuugaauuuuaccacaaaugcgauaacacgugcauggaaagugucaaaaaugggacuuaugacuacccaaaauacucagaggaagcaaaauuaaacagagaagaaauagaugggguaaagcuggaaucaacaaggauuuaccagauuuuggcgaucuauucaacugucgccaguucauugguacugguagucucccugggggcaaucaguuucuggaugugcucuaaugggucucuacaguguagaauauguauuuaa

SEQ ID NO: 36900 - RNA, 1701 nt, Artificial Sequence
  derived and/or modified CDS sequence (wt) from hemagglutinin__InfluenzaA__ADG57090
augaaggcaauacuaguaguucugcuauauacauuugcaaccgcaaaugcagacacauuauguauagguuaucaugcgaacaauucaacagacacuguagacacaguacuagaaaagaauguaacaguaacacacucuguuaaccuucuagaagacaagcauaacgggaaacuaugcaaacuaagagggguagccccauugcauuuggguaaauguaacauugcuggcuggauccugggaaauccagagugugaaucacucuccacagcaagcucaugguccuacauuguggaaacaucuaguucagacaauggaacguguuacccaggagauuucaucgauuaugaggagcuaagagagcaauugagcucagugucaucauuugaaagguuugagauauuccccaagacaaguucauggcccaaucaugacucgaacaaagguguaacggcagcauguccucaugcuggagcaaaaagcuucuacaaaaauuuaauauggcuaguuaaaaaaggaaauucauacccaaagcucagcaaauccuacauuaaugauaaagggaaagaaguccucgugcuauggggcauucaccauccaucuacuagugcugaccaacaaaguaucuaucagaaugcagaugcauauguuuuuguggggacaucaagauacagcaagaaguucaagccggaaauagcaauaagacccaaagugagggaucaagaagggagaaugaacuauuacuggacacuaguagagccgggagacaaaauaacauucgaagcaacuggaaaucuagugguaccgagauaugcauucgcaauggaaagaaaugcuggaucugguauuaucauuucagauacaccaguccacgauugcaauacaacuugucagacacccaagggugcuauaaacaccagccucccauuucagaauauacauccgaucacaauuggaaaauguccaaaauauguaaaaagcacaaaauugagacuggccacaggauugaggaaugucccgucuauucaaucuagaggccuauuuggggccauugccgguuucauugaagggggguggacagggaugguagauggaugguacgguuaucaccaucaaaaugagcaggggucaggauaugcagccgaccugaagagcacacagaaugccauugacgagauuacuaacaaaguaaauucuguuauugaaaagaugaauacacaguucacagcaguagguaaggaguucaaccaccuggaaaaaagaauagagaauuuaaauaaaaaaguugaugaugguuuccuggacauuuggacuuacaaugcccaacuguugguucuauuggaaaaugaaagaacuuuggacuaccacgauucaaaugugaagaacuuauaugaaaagguaagaagccaguuaaaaaacaaugccaaggaaauuggaaacggcugcuuugaauuuuaccacaaaugcgauaacacgugcauggaaagugucaaaaaugggacuuaugacuacccaaaauacuccgaggaagcaaaauuaaacagagaagaaauagaugggguaaagcuggaaucaacaaggauuuaccagauuuuggcgaucuauucaacugucgccaguucauugguacugguagucucccugggggcaaucaguuucuggaugugcucuaaugggucucuacaguguagaauauguauuuaa

SEQ ID NO: 36901 - RNA, 1701 nt, Artificial Sequence
  derived and/or modified CDS sequence (wt) from hemagglutinin__InfluenzaA__ADG57091
auggaggcaauacuaguaguucugcuauauacauuugcaaccgcaaaugcagacacauuauguauagguuaucaugcgaacaauucaacagacacuguagacacaguacuagaaaagaauguaacaguaacacacucugucaaccuucuagaagacaagcauaacgggaaacuaugcaaacuaagagggguagccccauugcauuuggguaaauguaacauugcuggcuggauccugggaaauccagagugugaaucacucuccacagcaagcucaugguccuacauuguggaaacaucuaguucagacaauggaacguguuacccaggagauuucaucgauuaugaggagcuaagagagcaauugagcucagugucaucauuugaaagguuugagauauuccccaagacaaguucauggcccaaucaugacucgaacaaagguguaacggcagcauguccucaugcuggagcaaaaagcuucuacaaaaauuuaauauggcuaguuaaaaaaggaaauucauacccaaagcucagcaaauccuacauuaaugauaaagggaaagaaguccucgugcuauggggcauucaccauccaucuacuagugcugaccaacaaagucucuaucagaaugcagaugcauauguuuuuguggggucaucaagauacagcaagaaguucaagccggaaauagcaauaagacccaaagugagggaucaagaagggagaaugaacuauuacuggacacuaguagagccgggagacaaaauaacauucgaagcaacuggaaaucuagugguaccgagauaugcauucgcaauggaaagaaaugcuggaucugguauuaucauuucagauacaccaguccacgauugcaauacaacuugucagacacccaagggugcuauaaacaccagccucccauuucauaauauacauccgaucacaauuggaaaauguccaaaauauguaaaaagcacaaaauugagacuggccacaggauugaggaaugucccgucuauucaaucuagaggccuauuuggggccauugccgguuucauugaaaggggguggacagggaugguagauggaugguacgguuaucaccaucaaaaugagcaggggucaggauaugcagccgaccugaagagcacacagaacgccauugacgagauuacuaacaaaguaaauucuguuauugaaaagaugaauacacaguucacagcaguagguaaagaguucaaccaccuggaaaaaagaauagagaauuuaaauaaaaaaguugaugaugguuuccuggacauuuggacuuacaaugccgaacuguugguucuauuggaaaaugaaagaacuuuggacuaccacgauucaaaugugaagaacuuauaugaaaagguaagaagccaguuaaaaaacaaugccaaggaaauuggaaacggcugcuuugaauuuuaccacaaaugcgauaacacgugcauggaaagugucaaaaaugggacuuaugacuacccaaaauacucagaggaagcaaaauuaaacagagaagaaauagaugggguaaagcuggaaucaacaaggauuuaccagauuuuggcgaucuauucaacugucgccaguucauugguacugguagucucccugggggcaaucaguuucuggaugugcucuaaugggucucuacaguguagaauauguauuuaa

SEQ ID NO: 36902 - RNA, 1701 nt, Artificial Sequence
  derived and/or modified CDS sequence (wt) from hemagglutinin__InfluenzaA__ADG57092
augaaggcaauacuaguaguucugcuauauacauuugcaaccgcaaaugcagacacauuauguauagguuaucaugcgaacaauucaacagacacuguagacacaguacuagaaaagaauguaacaguaacacacucuguuaaccuucuagaagacaagcauaacgggaaacuaugcaaacuaagagggguagccccauugcauuuggguaaauguaacauugcuggcuggauccugggaaauccagagugugaaucacucuccacagcaagcucaugguccuacauuguggaaacaucuaguucagacaauggaacguguuacccaggagauuucaucgauuaugaggagcuaagagagcaauugagcucagugucaucauuugaaagguuugagauauuccccaagacaaguucauggcccaaucaugacucgaacaaagguguaacggcagcauguccucaugcuggagcaaaaagcuucuacaaaaauuuaauauggcuaguuaaaaaaggaaauucauacccaaagcucaucaaauccuacauuaaugauaaagggaaagaaguccucgugcuauggggcauucaccauccaucuacuagugcugaccaacaaagucucuaucagaaugcagaugcauauguuuuuguggggacaucaagauacagcaagaaguucaagccggaaauagcaauaagacccaaagugagggaucaagaagggagaaugaacuauuacuggacacuaguagagccgggagacaaaauaacauucgaagcaacuggaaaucuagugguaccgagauaugcauucgcaauggaaagaaaugcuggaucugguauuaucauuucagauacaccaguccacgauugcaauacaacuugucagacacccaagggugcuauaaacaccagccucccauuucagaauauacauccgaucacaauuggaaaauguccaaaauauguaaaaagcacaaaauugagacuggccacaggauugaggaaugucccgucuauucaaucuagaggccuauuuggggccauugccgguuucauugaagggggguggacagggaugguagauggaugguacgguuaucaccaucaaaaugagcaggggucaggauaugcagccgaccugaagagcacacagaaugccauugacgagauuacuaacaaaguaaauucuguuauugaaaagaugaauacacaguucacagcaguagguaaagaguucaaccaccuggaaaaaagaauagagaauuuaaauaaaaaaguugaugaugguuuccuggacauuuggacuuacaaugccgaacuguugguucuauuggaaaaugaaagaacuuuggacuaccacgauucaaaugugaagaacuuauaugaaaagguaagaagccaguuaaaaaacaaugccaaggaaauuggaaacggcugcuuugaauuuuaccacaaaugcgauaacacgugcauggaaagugucaaaaaugggacuuaugacuacccaaaauacucagaggaagcaaaauuaaacagagaagaaauagaugggguaaagcuggaaucaacaaggauuuaccagauuuuggcgaucuauucaacugucgccaguucauugguacugguagucucccugggggcaaucaguuucuggaugugcucuaaugggucucuacaguguagaauauguauuuaa

SEQ ID NO: 36903 - RNA, 1701 nt, Artificial Sequence
  derived and/or modified CDS sequence (wt) from hemagglutinin__InfluenzaA__ADG57093
auggaggcaauacuaguaguucugcuauauacauuugcaaccgcaaacgcagacacauuauguauagguuaucaugcgaacaauucaacagacacuguagacacaguacuagaaaagaauguaacaguaacacacucuguuaaccuucuagaagacaagcauaacgggaaacuaugcaaacuaagagggguagccccauugcauuuggguaaauguaacauugcuggcuggauccugggaaauccagagugugaaucacucuccacagcaagcucaugguccuacauuguggaaacaucuaguucagacaauggaacguguuacccaggagauuucaucgauuaugaggagcuaagagagcaauugagcucagugucaucauuugaaagguuugagauauuccccaagacaaguucauggcccaaucaugacucgaacaaagguguaacggcagcauguccucaugcuggagcaaaaagcuucuacaaaaauuuaauuuggcuaguuaaaaaaggaaauucauacccaaagcucagcaaauccuacauuaaugauaaagggaaagaaauccucgugcuauggggcauucaccauccaucuacuagugcugaccaacaaagucucuaucagaaugcagaugcauauguuuuuguguggucaucaagauacagcaagaaguucaagccggaaauagcaauaagacccaaagugagggaucaagaagggagaaugaacuauuacuggacacuaguagagccgggagacaaaauaacauucgaagcaacuggaaaucuacugguaccgagauaugcauucgcaauggaaagaaaugcuggaucugguauuaucauuucagauacaccaguccacgauugcaauacaacuugucagacacccaagggugcuauaaacaccagccucccauuucauaauauacauccgaucacaauuggaaaauguccaaaauauguaaaaagcacaaaauugagacuggccacaggauugaggaaugucccgucuauucaaucuagaggccuauuuggggccauugccgguuucauugaagggggguggacagggaugguggauggaugguacgguuaucaccaucaaaaugagcaggggucaggauaugcagccgaccugaagagcacacagaaugccauugacgagauuacuaacaaaguaaauucuguuaucgaaaagaugaauacacaguucacagcaguagguaaagaguucaaccaccuggaaaaaagaauagagaauuuaaauaaaaaaguugaugaugguuuccuggacauuuggacuuacaaugccgaacuguugguucuauuggaaaaugaaagaacuuuggacuaccacgauucaaaugugaagaacuuauaugaaaagguaagaagccaguuaaaaaacaaugccaaggaaauuggaaacggcugcuuugaauuuuaccacaaaugcgauaacacgugcauggaaagugucaaaaaugggacuuaugacuacccaaaauacucagaggaagcaaaauuaaacagagaagaaauagaugggguaaagcuggaaucaacaaggauuuaccagauuuuggcgaucuauucaacugucgccaguucauugguacugguagucucccugggggcaaucaguuucuggaugugcucuaaugggucucuacaguguagaauauguauuuaa

SEQ ID NO: 36904 - RNA, 1701 nt, Artificial Sequence
  derived and/or modified CDS sequence (wt) from hemagglutinin__InfluenzaA__ADG57094
augaaggcaauacuaguaguucugcuauauacauuugcaaccgcaaaugcagacacauuauguguagguuaucaugcgaacaauucaacagacacuguagacacaguacuagaaaagaauguaacaguaacacacucuguuaaccuucuagaagacaagcauaacgggaaacuaugcaaacuaagagggguagccccauugcauuuggguaaauguaacauugcuggcuggauccugggaaauccagagugugaaucacucuccacagcaagcucaugguccuacauuguggaaacaucuaguucagacaauggaacguguuacccaggagauuucaucgauuaugaggagcuaagagagcaauugagcucagugucaucauuugaaagguuugagauauuccccaagacaaguucauggcccaaucaugacucgaacaaagguguaacggcagcauguccucaugcuggagcaaaaagcuuuuacaaaaauuuaauauggcuaguuaaaaaaggaaauucauacccaaagcucagcaaauccuacauuaaugauaaagggaaagaaguccucgugcuauggggcauucaccauccaucuacuagugcugaccaacaaagucucuaucagaaugcagaugcauauguuuuuguggggacaucaagauacaguaagaaguucaagccggaaauagcaauaagacccaaagugagggaucgagaagggagaaugaacuauuacuggacacuaguagagccgggagacaaaauaacauucgaagcaacuggaaaucuagugguaccgagauaugcauucgcaauggaaagaaaugcuggaucugguauuaucauuucagauacaccaguccacgauugcaauacaacuugucagacacccaagggugcuauaaacaccagccucccauuucagaauauacauccgaucacaauuggaaaauguccaaaauauguaaaaagcacaaaauugagacuggccacaggauugaggaaugucccgucuauucaaucuagaggccuauuuggggccauugccgguuucauugaagggggguggacagggaugguagauggaugguacgguuaucaccaucaaaaugagcaggggucaggauaugcagccgaccugaagagcacacagaaugccauugacgagauuacuaacaaaguaaauucuguuauugaaaagaugaauacacaguucacagcaguagguaaagaguucaaccaccuggaaaaaagaauagagaauuugaauaaaaaaguugaugaugguuuccuggacauuuggacuuacaaugccgaacuguugguucuauuggaaaaugaaagaacuuuggacuaccacgauucaaaugugaagaacuuauaugaaaagguaagaagccaguuaaaaaacaaugccaaggaaauuggaaacggcugcuuugaauuuuaccacaaaugcgauaacacgugcauggaaagugucaaaaaugggacuuaugacuacccaaaauacucagaggaagcaaaauuaaacagagaagaaauagaugggguaaagcuggaaucaacaaggauuuaccagauuuuggcgaucuauucaacugucgccaguucauugguacugguagucucccugggggcaaucaguuucuggaugugcucuaaugggucucuacaguguagaauauguauuuaa

SEQ ID NO: 36905 - RNA, 1701 nt, Artificial Sequence; identical to SEQ ID NO: 35309
  derived and/or modified CDS sequence (wt) from hemagglutinin__InfluenzaA__ADG57095

SEQ ID NO: 36906 - RNA, 1701 nt, Artificial Sequence
  derived and/or modified CDS sequence (wt) from hemagglutinin__InfluenzaA__ADG57097
auggaggcaauacuaguaguucugcuauauacauuugcaaccgcaaaugcagacacauuauguauagguuaucaugcgaacaauucaacagacacuguagacacaguacuagaaaagaauguaacaguaacacacucuguaaaccuucuagaagacaagcauaacgggaaacuaugcaaacuaagagggguagccccauugcauuuggguaaauguaacauugcuggcuggauccugggaaauccagagugugaaucacucuccacagcaagcucaugguccuacauuguggaaacaucuaguucagacaauggaacguguuacccaggagauuucaucgauuaugaggagcuaagagagcaauugagcucagugucaucauuugaaagguuugagauauuccccaagacaaguucauggcccaaucaugacucgaacaaagguguaacggcagcauguccucaugcuggagcaaaaagcuucuacaaaaauuuaauauggcuaguuaaaaaaggaaauucauacccaaagcucagcaaauccuacauuaaugauaaagggaaagaaguccucgugcuauggggcauucaccauccaucuacuagugcugaccaacaaagucucuaucagaaugcagaugcauauguuuuuguggggucaucaagauacagcaagaaguucaagccggaaauagcaauaagacccaaagugaggggucaagaagggagaaugaacuauuacuggacacuaguagagccgggagacaaaauaacauucgaagcaacuggaaaucuagugguaccgagauaugcauucgcaauggaaagaaaugcuggaucugguauuaucauuucagauacaccaguccacgauugcaauacaacuugucagacacccaagggugcuauaaacaccagccucccauuucauaauauacauccgaucacaauuggaaaauguccaaaauauguaaaaagcacaaaauugagacuggccacaggauugaggaaugucccgucuauucaaucuagaggccuauuuggggccauugccgguuucauugaagggggguggacagggaugguagauggaugguacgguuaucaccaucaaaaugagcaggggucaggauaugcagccgaccugaagagcacacagaaugccauugacgagauuacuaacaaaguaaauucuguuauugaaaagaugaauacacaguucacagcaguagguaaagaguucaaccaccuggaaaaaaggauagagaauuuaaauaaaaaaguugaugaugguuuccuggacauuuggacuuacaaugccgaacuguugguucuauuggaaaaugaaagaacuuuggauuaccacgauucaaaugugaagaacuuauaugaaaagguaagaagccaguuaaaaaacaaugccaaggaaauuggaaacggcugcuuugaauuuuaccacaaaugcgauaacacgugcauggaaagugucaaaaaugggacuuaugacuacccaaaauacucagaggaagcaaaauuaaacagagaagaaauagaugggguaaagcuggaaucaacaaggauuuaccagauuuuggcgaucuauucaacugucgccaguucauugguacugguagucucccugggggcaaucaguuucuggaugugcucuaaugggucucuacaguguagaauauguauuuaa

SEQ ID NO: 36907 - RNA, 1701 nt, Artificial Sequence
  derived and/or modified CDS sequence (wt) from hemagglutinin__InfluenzaA__ADG57098
augaaggcaauacuaguaguucugcuauauacauuugcaaccgcaaaugcagacacauuauguauagguuaucaugcgaacaauucaacagacacuguagacacaguacuagagaagaauguaacaguaacacacucuguuaaccuucuagaagacaagcauaacgggaaacuaugcaaacuaagagggguagccccauugcauuuggguaaauguaacauugcuggcuggauccugggaaauccagagugugaaucacucuccacagcaagcucaugguccuacauuguggaaacaucuaguucagacaauggaacguguuacccaggagauuucaucgauuaugaggagcuaagagagcaauugagcucagugucaucauuugaaagguuugagauauuccccaagacaaguucauggcccaaucaugacucgaacaaagguguaacggcagcauguccucaugcuggagcaaaaagcuuuuacaaaaauuuaauauggcuaguuaaaaaaggaaauucauacccaaagcucagcaaauccuacauuaaugauaaagggaaagaaguccucgugcuauggggcauucaccauccaucuacuagugcugaccaacaaagucucuaucagaaugcagaugcauauguuuuuguggggacaucaagauacagcaagaaguucaagccggaaauagcaauaagacccaaagugagggaucaagaagggagaaugaacuauuacuggacacuaguagagccgggagacaaaauaacauucgaagcaacuggaaaucuagugguaccgagauaugcauucgcaauggaaagaaaugcuggaucugguauuaucauuucagauacaccaguccacgauugcaauacaacuugucagacacccaagggugcuauaaacaccagccucccauuucagaauauacauccgaucacaauuggaaaauguccaaaauauguaaaaagcacaaaauugagacuggccacaggauugaggaaugucccgucuauucaaucuagaggccuauuuggggccauugccgguuucauugaagggggguggacagggaugguagauggaugguacgguuaucaccaucaaaaugagcaggggucaggauaugcagcugaccugaagagcacacagaaugccauugacaagauuacuaacaaaguaaacucuguuauugaaaagaugaauacacaguucacagcaguagguaaagaguucaaccaccuggaaaaaagaauagagaauuuaaauaaaaaaguugaugaugguuuccuggacauuuggacuuacaaugccgaacuguugguucuauuggaaaaugaaagaacuuuggacuaccacgauucaaaugugaagaacuuauaugaaaagguaagaagccaguuaaaaaacaaugccaaggaaauuggaaacggcugcuuugaauuuuaccacaaaugcgauaacacgugcauggaaagugucaaaaaugggacuuaugacuacccaaaauacucagaggaagcaaaauuaaacagagaagaaauagaugggguaaagcuggaaucaacaaggauuuaccagauuuuggcgaucuauucaacugucgccaguucauugguacugguagucucccugggggcaaucaguuucuggaugugcucuaaugggucucuacaguguagaauauguauuuaa

SEQ ID NO: 36908 - RNA, 1701 nt, Artificial Sequence
  derived and/or modified CDS sequence (wt) from hemagglutinin__InfluenzaA__ADG57099
augaaggcaauacuaguaguucugcuauauacauuugcaaccgcaaaugcagacacauuauguauagguuaucaugcgaacaauucaacagacacuguagacacaguacuagaaaagaauguaacaguaacacacucuguuaaccuucuagaagacaagcauaacgggaaacuaugcaaacuaagagggguagccccauugcauuuggguaaauguaacauugcuggcuggauccugggaaauccagagugugaaucacucuccacagcaagcucaugguccuacauuguggaaacaucuaguucagacaauggaacguguuacccaggagauuucaucgauuaugaggagcuaagagagcaauugagcucagugucaucauuugaaagguuugagauauuccccaagacaaguucauggcccaaucaugacucgaacaaagguguaacggcagcauguccucaugcuggagcaaaaagcuuuuacaaaaauuuaauauggcuaguuaaaaaaggaaauucauacccaaaacucagcaaauccuacauuaaugauaaagggaaagaaguccucgugcuauggggcauucaccauccaucuacuagugcugaccaacaaagucucuaucagaaugcagaugcauauguuuuuguggggacaucaagauacagcaagaaguucaagccggaaauagcaauaagacccaaagugagggaucaagaagggagaaugaacuaucacuggacacuaguagagccgggagacaaaauaacauucgaagcaacuggaaaucuagugguaccgagauaugcauucgcaauggaaagaaaugcuggaucugguauuaucauuacagauacaccaguccacgauugcaauacaacuugucagacacccaagggugcuguaaacaccagccucccauuucagaauauacauccgaucacaauuggaaaauguccaaaauauguaaaaagcacaaaauugagacuggccacaggauugaggaaugucccgucuauucaaucuagaggccuauuuggggccauugccgguuucauugaagggggguggacagggaugguagauggaugguacgguuaucaccaucaaaaugagcaggggucaggauaugcagccgaccugaagagcacacagaaugccauugacaagauuacuaacaaaguaaacucuguuauugaaaagaugaauacacaguucacagcaguagguaaagaguucaaccaccuggaaaaaagaauagagaauuuaaauaaaaaaguugaugaugguuuccuggacauuuggacuuacaaugccgaacuguugguucuauuggaaaaugaaagaacuuuggacuaccacgauucaaaugugaagaacuuauaugaaaagguaagaagccaguuaaaaaacaaugccaaggaaauuggaaacggcugcuuugaauuuuaccacaaaugcgauaacacgugcauggaaagugucaaaaaugggacuuaugacuacccaaaauacucagaggaagcaaaauuaaacagagaagaaauagaugggguaaagcuggaaucaacaaggauuuaccagauuuuggcgaucuauucaacugucgccaguucauugguacugguagucucccugggggcaaucaguuucuggaugugcucuaaugggucucuacaguguagaauauguauuuaa

SEQ ID NO: 36909 - RNA, 1701 nt, Artificial Sequence
  derived and/or modified CDS sequence (wt) from hemagglutinin__InfluenzaA__ADG57100
augaaggcaauacuaguaguucugcuauauacauuugcaaccgcaaaugcagacacauuauguauagguuaucaugcgaacaauucaacagacacuguagacacaguacuagaaaagaauguaacaguaacacacucuguuaaccuucuagaagacaagcauaacgggaaacuaugcaaacuaagagggguagccccauugcauuuggguaaauguaacauugcuggcuggauccugggaaauccagagugugaaucacucuccacagcaagcucaugguccuacauuguggaaacaucuaguucagacaauggaacguguuacccaggagauuucaucgauuaugaggagcuaagagagcaauugagcucagugucaucauuugaaagguuugagauauuccccaagacaaguucauggcccaaucaugacucgaacaaagguguaacggcagcauguccucaugcuggagcaaaaagcuucuacaaaaauuuaauauggcuaguuaaaaaaggaaauucauacccaaagcucagcaaauccuacauuaaugauaaagggaaagaaguccucgugcuauggggcauucaccauccaucuacuagugcugaccaacaaagucucuaucagaaugcagaugcauauguuuuuguggggacaucaagauacagcaagaaguucaagccggaaauagcaauaagacccaaagugagggaucaagaagggagaaugaacuauuacuggacacuaguagagccgggagacaaaauaacauucgaagcaacuggaaaucuagugguaccgagauaugcauucgcaauggaaagaaaugcuggaucugguauuaucauuucagauacaccaguccacgauugcaauacaacuugucagacacccaagggugcuauaaacaccagccucccauuucagaauauacauccgaucacaauuggaaaauguccaaaauauguaaaaagcacaaaauugagacuggccacaggauugaggaaugucccgucuauucaaucuagaggccuauuuggggccauugccgguuucauugaagggggguggacagggaugguagauggaugguacgguuaucaccaucaaaaugagcaggggucaggauaugcagccgaccugaagagcacacagaaugccauugacaagauuacuaacaaaguaaauucuguuauugaaaagaugaauacacaguucacagcaggagguaaagaguucaaccaccuggaaaaaagaauagagaauuuaaauaaaaagguugaugaugguuuccuggacauuuggacuuacaaugccgaacuguugguucuauuggaaaaugaaaggacuuuggacuaccacgauucaaaugugaagaacuuauaugaaaagguaagaagccaguuaaaaaacaaugccaaggaaauuggaaacggcugcuuugaauuuuaccacaaaugcgauaacacgugcauggaaagugucaaaaaugggacuuaugacuacccaaaauacucagaggaagcaaaauuaaacagagaagaaauagauggggugaagcuggaaucaacaaggauuuaccagauuuuggcgaucuauucaacugucgccaguucauugguacugguagucucccugggggcaaucaguuucuggaugugcucuaaugggucucuacaguguagaauauguauuuaa

SEQ ID NO: 36910 - RNA, 1701 nt, Artificial Sequence; identical to SEQ ID NO: 36263
  derived and/or modified CDS sequence (wt) from hemagglutinin__InfluenzaA__ADG58939

SEQ ID NO: 36911 - RNA, 1701 nt, Artificial Sequence
  derived and/or modified CDS sequence (wt) from hemagglutinin__InfluenzaA__ADG58940
augaaggcaauacuaguaguucugcuauauacauuugcaaccgcaaaugcagacacauuauguauagguuaucaugcaaacaauucaacagacacuguagacacaguacuagaaaagaauguaacaguaacacacucuguuaaccuucuagaagacaagcauaacgggaaacuaugcaaacuaagagggguagccccauugcauuuggguaaauguaacauugcuggcuggauccugggaaauccagagugugaaucacucuccacagcaagcucaugguccuacauuguggaaacaucuaguucagacaauggaacguguuacccaggagauuucaucgauuaugaggagcuaagagagcaauugagcucagugucaucauuugaaagguuugagauauuccccaagacaaguucauggcccaaucaugacucgaacaaagguguaacggcagcauguccucaugcuggagcaaaaagcuucuacaaaaauuuaauauggcuaguuaaaaaaggaaauucauacccaaagcucagcaaauccuacauuaaugauaaagggaaagaaguccucgugcuauggggcauucaccauccaucuacuagugcugaccaacaaagucucuaucagaaugcagaugcauauguuuuuguggggacaucaagauacagcaagaaguucaagccggaaauagcaauaagacccaaagugagggaucaagaagggagaaugaacuauuacuggacacuaguagagccgggagacaaaauaacauucgaagcaacuggaaaucuagugguaccgagauaugcauucgcaauggaaagaaaugcuggaucugguauuaucauuucagauacaccaguccacgauugcaauacaacuugucagacacccaagggugcuauaaacaccagccucccauuucagaauauacauccgaucacaauuggaaaauguccaaaauauguaaaaagcacaaaauugagacuggccacaggauugaggaaugucccgucuauucaaucuagaggccuauuuggggccauugccgguuucauugaagggggguggacagggaugguagauggaugguacgguuaucaccaucaaaaugagcagggaucaggauaugcagccgaccugaagagcacacagaaugccauugacgagauuacuaacaaaguaaauucuguuauugaaaagaugaauacacaguucacagcaguagguaaagaguucaaccaucuggaaaaaagaauagagaauuuaaauaaaaaaguugaugaugguuuccuggacauuuggacuuacaaugccgaacuguugguucuauuggaaaaugaaagaacuuuggacuaccacgauucaaaugugaagaacuuauaugaaaagguaagaagccaguuaaaaaacaaugccaaggaaauuggaaacggcugcuuugaauuuuaccacaaaugcgauaacacgugcauggaaagugucaaaaaugggacuuaugacuacccaaaauacucagaggaagcaaaauuaaacagagaagaaauagaugggguaaagcuggaaucaacaaggauuuaccagauuuuggcgaucuauucaacugucgccaguucauugguacugguagucucccugggggcaaucaguuucuggaugugcucuaaugggucucuacaguguagaauauguauuuaa

SEQ ID NO: 36912 - RNA, 1701 nt, Artificial Sequence
  derived and/or modified CDS sequence (wt) from hemagglutinin__InfluenzaA__ADG58941
augaaggcaauacuaguaguucugcuauauacauuugcaaccgcaaaugcagacacauuauguauagguuaucaugcgaacaauucaacagacacuguagacacaguacuagaaaagaauguaacaguaacacacucuguuaaccuucuagaagacaagcauaacgggaaacuaugcaaacuaagagggguagccccauugcauuuggguaaauguaacauugcuggcuggauccugggaaauccagagugugaaucacucuccacagcaagcucaugguccuacauuguggaaacaucuaguucagacaauggaacguguuacccaggagauuucaucgauuaugaggagcuaagagagcaauugagcucagugucaucauuugaaagguuugagauauuccccaagacaaguucauggcccaaucaugacucgaacaaagguguaacggcagcauguccucaugcuggagcaaaaagcuucuacaaaaauuuaauauggcuaguuaaaaaaggaaauucauacccaaagcucagcaaauccuacauuaaugauaaagggaaagaaguccucgugcuauggggcauucaccauccaucuacuagugcugaccaacaaagucucuaucagaaugcagauacauauguuuuuguggggacaucaagauacagcaagaaguucaagccggaaauagcaauaagacccaaagugagggaucaagaagggagaaugaacuauuacuggacacuaguagagccgggagacaaaauaacauucgaagcaacuggaaaucuagugguaccgagauaugcauucgcaauggaaagaaaugcuggaucugguauuaucauuucagauacaccaguccacgauugcaauacaacuugucagacacccaagggugcuauaaacaccagccucccauuucagaauauacauccgaucacaauuggaaaauguccaaaauauguaaaaagcacaaaauugagacuggccacaggauugaggaaugucccgucuauucaaucuagaggccuauuuggggccauugccgguuucauugaagggggguggacagggaugguagauggaugguaugguuaucaccaugaaaaugagcaggggucaggauacgcagccgaccugaagagcacacagaaugccauugacgagauuacuaacaaaguaaauucuguuauugaaaagaugaauacacaguucacagcaguagguaaagaguucaaccaccuggaaaaaagaauagagaauuuaaauaaaaaaauugaugaugguuuccuggacauuuggacuuacaaugccgaacuguugguucuauuggaaaaugaaagaacuuuggacuaccacgauucaaaugugaagaacuuauaugaaaagguaagaagccaguuaaaaaacaaugccaaggaaauuggaaacggcugcuuugaauuuuaccacaaaugcgauaacacgugcauggaaagugucaaaaaugggacuuaugacuacccaaaauacucagaggaagcaaaauuaaacagagaagaaauagaugggguaaagcuggaaucaacaaggauuuaccagauuuuggcgaucuauucaacugucgccaguucauugguacugguagucucccugggggcaaucaguuucuggaugugcucuaaugggucucuacaguguagaauauguauuuaa

SEQ ID NO: 36913 - RNA, 1701 nt, Artificial Sequence
  derived and/or modified CDS sequence (wt) from hemagglutinin__InfluenzaA__ADG58942
augaaggcaauacuaguaguucugcuauauacauuugcaaccgcaaaugcagacacauuauguauagguuaucaugcgaacaauucaacagacacuguagacacaguacuagaaaagaauguaacaguaacacacucuguuaaccuucuagaagacaagcauaacgggaaacuaugcaaacuaagagggguagccccauugcauuuggguaaauguaacauugcuggcuggauccugggaaauccagagugugaaucacucuccacagcaagcucaugguccuacauuguggaaacaucuaguucagacaauggaacguguuacccaggagauuucaucgauuaugaggagcuaagagagcaauugagcucagugucaucauuugaaagguuugagauauuccccaagacaaguucauggcccaaucaugacucgaacaaagguguaacggcagcauguccucaugcuggagcaaaaagcuucuacaaaaauuuaauauggcuaguuaaaaaaggaaauucauacccaaagcucagcaaauccuacauuaaugauaaagggaaagaaguccucgugcuauggggcauucaccauccaucuacuagugcugaccaacaaagucucuaucagaaugcagauacauauguuuuuguggggacaucaagauacagcaagaaguucaagccggaaauagcaauaagacccaaagugagggaucaagaagggagaaugaacuauuacuggacacuaguagagccgggagacaaaauaacauucgaagcaacuggaaaucuagugguaccgagauaugcauucgcaauggaaagaaaugcuggaucugguauuaucauuucagauacaccaguccacgauugcaauacaacuugucagacacccaagggugcuauaaacaccagccucccauuucagaauauacauccgaucacaauuggaaaauguccaaaauauguaaaaagcacaaaauugagacuggccacaggauugaggaaugucccgucuauucaaucuagaggccuauuuggggccauugccgguuucauugaagggggguggacagggaugguagauggaugguacgguuaucuccaucaaaaugagcaggggucaggauacgcagccgaccugaagagcacacagaaugccauugacgagauuacuaacaaaguaaauucuguuauugaaaagaugaauacacaguucacagcaguagguaaagaguucaaccaccuggaaaaaagaauagagaauuuaaauaaaaaaauugaugaugguuuccuggacauuuggacuuacaaugccgaacuguugguucuauuggaaaaugaaagaacuuuggacuaccacgauucaaaugugaagaacuuauaugaaaagguaagaagccaguuaaaaaacaaugccaaggaaauuggaaacggcugcuuugaauuuuaccacaaaugcgauaacacgugcauggaaagugucaaaaaugggacuuaugacuacccaaaauacucagaggaagcaaaauuaaacagagaagaaauagaugggguaaagcuggaaucaacaaggauuuaccagauuuuggcgaucuauucaacugucgccaguucauugguacugguagucucccugggggcaaucaguuucuggaugugcucuaaugggucucuacaguguagaauauguauuuaa

SEQ ID NO: 36914 - RNA, 1701 nt, Artificial Sequence; identical to SEQ ID NO: 36263
  derived and/or modified CDS sequence (wt) from hemagglutinin__InfluenzaA__ADG58943

SEQ ID NO: 36915 - RNA, 1701 nt, Artificial Sequence
  derived and/or modified CDS sequence (wt) from hemagglutinin__InfluenzaA__ADG58944
augaaggcaauacuaguaguucugcuauauacauuugcaaccgcaaaugcagacacauuauguauagguuaucaugcaaacaauucaacagacacuguagacacaguacuagaaaagaauguaacaguaacacacucuguuaaccuucuagaagacaagcauaacgggaaacuaugcaaacuaagagggguagccccauugcauuuggguaaauguaacauugcuggcuggauccugggaaauccagagugugaaucacucuccacagcaagcucaugguccuacauuguggaaacaucuaguucagacaauggaacguguuacccaggagauuucaucgauuaugaggagcuaagagagcaauugagcucagugucaucauuugaaagguuugagauauuccccaagacaaguucauggcccaaucaugacucgaacaaagguguaacggcagcauguccucaugcuggagcaaaaagcuucuacaaaaauuuaauauggcuaguuaaaaaaggaaauucauacccaaagcucagcaaauccuacauuaaugauaaagggaaagaaguccucgugcuauggggcauucaccauccaucuacuagugcugaccaacaaagucucuaucagaaugcagaugcauauguuuuuguggggacaucaagauacagcaagaaguucaagccggaaauagcaauaagacccaaagugagggaucaagaagggagaaugaacuauuacuggacacuaguagagccgggagacaaaauaacauucgaagcaacuggaaaucuauugguaccgagauaugcauucgcaauggaaagaaaugcuggaucugguauuaucauuucagauacaccaguccacgauugcaauacaacuugucagacacccaagggugcuauaaacaccagccucccauuucagaauauacauccgaucacaauuggaaaauguccaaaauauguaaaaagcacaaaauugagacuggccacaggauugaggaaugucccgucuauucaaucuagaggccuauuuggggccauugccgguuucauugaagggggguggacagggaugguagauggaugguacgguuaucaccaucaaaaugagcaggggucaggauaugcagccgaccugaagagcacacagaaugccauugacgagauuacuaacaaaguaaauucuguuauugaaaagaugaauacacaguucacagcaguagguaaagaguucaaccaucuggaaaaaagaauagagaauuuaaauaaaaaaguugaugaugguuuccuggacauuuggacuuacaaugccgaacuguugguucuauuggaaaaugaaagaacuuuggacuaccacgauucaaaugugaagaacuuauaugaaaagguaagaagccaguuaaaaaacaaugccaaggaaauuggaaacggcugcuuugaauuuuaccacaaaugcgauaacacgugcauggaaagugucaaaaaugggacuuaugacuacccaaaauacucagaggaagcaaaauuaaacagagaagaaauagaugggguaaagcuggaaucaacaaggauuuaccagauuuuggcgaucuauucaacugucgccaguucauugguacugguagucucccugggggcaaucaguuucuggaugugcucuaaugggucucuacaguguagaauauguauuuaa

SEQ ID NO: 36916 - RNA, 1701 nt, Artificial Sequence; identical to SEQ ID NO: 35479
  derived and/or modified CDS sequence (wt) from hemagglutinin__InfluenzaA__ADG58946

SEQ ID NO: 36917 - RNA, 1701 nt, Artificial Sequence; identical to SEQ ID NO: 36263
  derived and/or modified CDS sequence (wt) from hemagglutinin__InfluenzaA__ADG58947

SEQ ID NO: 36918 - RNA, 1701 nt, Artificial Sequence
  derived and/or modified CDS sequence (wt) from hemagglutinin__InfluenzaA__ADG58948
augaaggcaauacuaauaguucugcuauauacauuugcaaccgcaaaugcagacacauuauguauagguuaucaugcgaacaauucaacagacacuguagacacaguacuagaaaagaauguaacaguaacacacucuguuaaccuucuagaagacaagcauaacgggaaacuaugcaaacuaagagggguagccccauugcauuuggguaaauguaacauugcuggcuggauccugggaaauccagagugugaaucacucuccacagcaagcucaugguccuacauuguggaaacaucuaguucagacaauggaacguguuacccaggagauuucaucgauuaugaggagcuaagagagcaauugagcucagugucaucauuugaaagguuugagauauuccccaagacaaguucauggcccaaucaugacucgaacaaagguguaacggcagcauguccucaugcuggagcaaaaagcuucuacaaaaauuuaauauggcuaguuaaaaaaggaaauucauacccaaagcucagcaaauccuacauuaaugauaaagggaaagaaguccucgugcuauggggcauucaccauccaucuacuagugcugaccaacaaagucucuaucagaaugcagauacauauguuuuuguggggacaucaagauacagcaagaaguucaagccggaaauagcaauaagacccaaagugagggaucaagaagggagaaugaacuauuacuggacacuaguagagccgggagacaaaauaacauucgaagcaacuggaaaucuagugguaccgagauaugcauucgcaauggaaagaaaugcuggaucugguauuaucauuucagauacaccaguccacgauugcaauacaacuugucagacacccaagggugcuauaaacaccagccucccauuucagaauauacauccgaucacaauuggaaaauguccaaaauauguaaaaagcacaaaauugagacuggccacaggauugaggaaugucccgucuauucaaucuagaggccuauuuggggccauugccgguuucauugaagggggguggacagggaugguagauggaugguacgguuaucaccaucaaaaugagcaggggucaggauacgcagccgaccugaagagcacacagaaugccauugacgagauuacuaacaaaguaaauucuguuauugaaaagaugaauacacaguucacagcaguagguaaagaguucaaccaccuggaaaaaagaauagagaauuuaaauaaaaaaauugaugaugguuuccuggacauuuggacuuacaaugccgaacuguugguucuauuggaaaaugaaagaacuuuggacuaccacgauucaaaugugaagaacuuauaugaaaagguaagaagccaguuaaaaaacaaugccaaggaaauuggaaacggcugcuuugaauuuuaccacaaaugcgauaacacgugcauggaaagugucaaaaaugggacuuaugacuacccaaaauacucagaggaagcaaaauuaaacagagaagaaauagaugggguaaagcuggaaucaacaaggauuuaccagauuuuggcgaucuauucaacugucgccaguucauugguacugguagucucccugggggcaaucaguuucuggaugugcucuaaugggucucuacaguguagaauauguauuuaa

SEQ ID NO: 36919 - RNA, 1701 nt, Artificial Sequence
  derived and/or modified CDS sequence (wt) from hemagglutinin__InfluenzaA__ADG58949
augaaggcaauacuaguaguucugcuauauacauuugcaaccgcaaaugcagacacauuauguauagguuaucaugcgaacaauucaacagacacuguagacacaguacuagaaaagaauguaacaguaacacacucuguuaaccuucuagaagacaagcauaacgggaaacuaugcaaacuaagagggguagccccauugcauuuggguaaauguaacauugcuggcuggauccugggaaauccagagugugaaucacucuccacagcaagcucaugguccuacauuguggaaacaucuaguucagacaauggaacguguuacccaggagauuucaucgauuaugaggagcuaagagagcaauugagcucagugucaucauuugaaagguuugagauauuccccaagacaaguucauggcccaaucaugacucgaacaaagguguaacggcagcauguccucaugcuggagcaaaaagcuucuacaaaaauuuaauauggcuaguuaaaaaaggaaauucauacccaaagcucagcaaauccuacauuaaugauaaagggaaagaaguccucgugcuauggggcauucaccauccaucuacuagugcugaccaacaaagucucuaucagaaugcagauacauauguuuuuguggggacaucaagauacagcaagaaguucaagccggaaauagcaauaagacccaaagugagggaucaagaagggagaaugaacuauuacuggacacuaguagagccgggagacaaaauaacauucgaagcaacuggaaaucuagugguaccgagauaugcauucgcaauggaaagaaaugcuggaucugguauuaucauuucagauacaucaguccacgauugcaauacaacuugucagacacccaagggugcuauaaacaccagccucccauuucagaauauacauccgaucacaauuggaaaauguccaaaauauguaaaaagcacaaaauugagacuggccacaggauugaggaaugucccgucuauucaaucuagaggccuauuuggggccauugccgguuucauugaagggggguggacagggaugguagauggaugguacgguuaucaccaucaaaaugagcaggggucaggauacgcagccgaccugaagagcacacagaaugccauugacgagauuacuaacaaaguaaauucuguuauugaaaagaugaauacacaguucacagcaguagguaaagaguucaaccaccuggaaaaaagaauagagaauuuaaauaaaaaaauugaugaugguuuccuggacauuuggacuuacaaugccgaacuguugguucuauuggaaaaugaaagaacuuuggacuaccacgauucaaaugugaagaacuuauaugaaaagguaagaagccaguuaaaaaacaaugccaaggaaauuggaaacggcugcuuugaauuuuaccacaaaugcgauaacacgugcauggaaagugucaaaaaugggacuuaugacuacccaaaauacucagaggaagcaaaauuaaacagagaagaaauagaugggguaaagcuggaaucaacaaggauuuaccagauuuuggcgaucuauucaacugucgccaguucauugguacugguagucucccugggggcaaucaguuucuggaugugcucuaaugggucucuacaguguagaauauguauuuaa

SEQ ID NO: 36920 - RNA, 1701 nt, Artificial Sequence
  derived and/or modified CDS sequence (wt) from hemagglutinin__InfluenzaA__ADG58951
augaaggcaauacuaguaguucugcuacauacauuugcaaccgcaaaugcagacacauuauguauagguuaucaugcgaacaauucaacagacacuguagacacaguacuagaaaagaauguaacaguaacacacucuguuaaccuucuagaagacaagcauaacgggaaacuaugcaaacuaagagggguagccccauugcauuuggguaaauguaacauugcuggcuggauccugggaaauccagagugugaaucacucuccacagcaagcucaugguccuacauuguggaaacaucuaauucaggcaauggaacguguuacccaggagaguucauagauuaugaggagcuaagagagcaauugagcucagugucaucauuugaaagguuugagauauuccccaagacaaguucauggcccaaucaugacucgaacaaagguguaacggcagcauguccucaugcuggagcaaaaagcuucuacaaaaauuuaauauggcuaguuaaaaaaggaaacucauacccaaagcucagcaaauccuacauuaaugauaaagggaaagaaguccucgugcuauggggcauucaccauccaucuacuagugcugaccaacaaagucucuaucagaaugcagaugcauauguuuuuguggggacaucaagauacagcaagaaguucaagccggaaauagcaauaagacccaaagugagggaucaagaagggagaaugaacuauuacuggacacuaguagagccgggagacaaaauaacauucgaagcaacuggaaaucuagugguaccgagauaugcauucgcaauggaaagaaaugcuggaucugguauuaucauuucagauacaccaguccacgauugcaauacaacuugucagacacccaagggugcuauaaacaccagccucccauuucagaauauacauccgaucacaauuggaaaauguccaaaauauguaaaaagcacaaaauugagacuggccacaggauugaggaaugucccgucuauucaaucuagaggccuauuuggggccauugccgguuucauugaagggggguggacagggaugguagauggaugguacgguuaucaccaucaaaaugagcaggggucaggauaugcagccgaccugaagagcacacagaaugccauugacgagauuacuaacaaaguaaauucuguuauugaaaagaugaauacacaguucacagcaguagguaaagaguucaaccaccuggaaaaaagaauagagaauuuaaauaaaaaaguugaugaugguuuccuggacauuuggacuuacaaugccgaacuguugguucuauuggaaaaugaaagaacuuuggacuaccacgauucaaaugugaagaacuuauaugaaaagguaagaagccaguuaaaaaacaaugccaaggaaauuggaaacggcugcuuugaauuuuaccacaaaugcgauaacacgugcauagaaagugucaaaaaugggacuuaugacuacccaaaauacucagaggaagcaaaauuaaacagagaagaaauagaugggguaaagcuggaaucaacaaggauuuaccagauuuuggcgaucuauucaacugucgccaguucauugguacugguagucucccugggggcaaucaguuucuggaugugcucuaaugggucucuacaguguagaauauguauuuaa

SEQ ID NO: 36921 - RNA, 1701 nt, Artificial Sequence; identical to SEQ ID NO: 36920
  derived and/or modified CDS sequence (wt) from hemagglutinin__InfluenzaA__ADG58952

SEQ ID NO: 36922 - RNA, 1701 nt, Artificial Sequence; identical to SEQ ID NO: 36920
  derived and/or modified CDS sequence (wt) from hemagglutinin__InfluenzaA__ADG58953

SEQ ID NO: 36923 - RNA, 1701 nt, Artificial Sequence; identical to SEQ ID NO: 36920
  derived and/or modified CDS sequence (wt) from hemagglutinin__InfluenzaA__ADG58954

SEQ ID NO: 36924 - RNA, 1701 nt, Artificial Sequence; identical to SEQ ID NO: 36920
  derived and/or modified CDS sequence (wt) from hemagglutinin__InfluenzaA__ADG58955

SEQ ID NO: 36925 - RNA, 1701 nt, Artificial Sequence; identical to SEQ ID NO: 36920
  derived and/or modified CDS sequence (wt) from hemagglutinin__InfluenzaA__ADG58956

SEQ ID NO: 36926 - RNA, 1701 nt, Artificial Sequence
  derived and/or modified CDS sequence (wt) from hemagglutinin__InfluenzaA__ADG58957
augaaggcaauacuaguaguucugcuacauacauuugcaaccgcaaaugcagacacauuauguauagguuaucaugcgaacaauucaacagacacuguagacacaguacuagaaaagaauguaacaguaacacacucuguuaaccuucuagaagacaagcauaacgggaaacuaugcaaacuaagagggguagccccauugcauuuggguaaauguaacauugcuggcuggauccugggaaauccagagugugaaucacucuccacagcaagcucaugguccuacauuguggaaacaucuaauucaggcaauggaacguguuacccaggagaguucauagauuaugaggagcuaagagagcaauugagcucagugucaucauuugaaagguuugagauauuccccaagacaaguucauggcccaaucaugacucgaacaaagguguaacggcagcauguccucaugcuggagcaaaaagcuucuacaaaaauuuaauauggcuaguuaaaaaaggaaacucauacccaaagcucagcaaauccuacauuaaugauaaagggaaagaaguccucgugcuauggggcauucaccauccaucuacuagugcugaccaacaaagucucuaucagaaugcagaugcauauguuuuuguggggacaucaagauacagcaagaaguucaagccggaaauagcaauaagacccaaagugagggaucaagaagggagaaugaacuauuacuggacacuaguagagccgggagacaaaauaacauucgaagcaacuggaaaucuagugguaccgagauaugcauucgcaauggaaagaaaugcuggaucugguauuaucauuucagauacaccaguccacgauugcaauacaacuugucagacacccaagggugcuauaaacaccagccucccauuucagaauauacauccgaucacaauuggaaaauguccaaaauauguaaaaagcacaaaauugagacuggccacaggauugaggaaugucccgucuauucaaucuagaggccuauuuggggccauugccgguuucauugaagggggguggacagggaugguagauggaugguacgguuaucaccaucaaaaugagcaggggucaggauaugcagccgaccugaagagcacacagaaugccauugacgagauuacuaacaaaguaaauucuguuauugaaaagaugaauacacaguucacagcaguagguaaagaguucaaccaucuggaaaaaagaauagagaauuuaaauaaaaaaguugaugaugguuuccuggacauuuggacuuacaaugccgaacuguuaguucuauuggaaaaugaaagaacuuuggacuaccacgauucaaaugugaagaacuuauaugaaaagguaagaagccaguuaaaaaacaaugccaaggaaauuggaaacggcugcuuugaauuuuaccacaaaugcgauaacacgugcauggaaagugucaaaaaugggacuuaugacuacccaaaauacucagaggaagcaaaauuaaauagagaagaaauagaugggguaaagcuggaaucaacaaggauuuaccagauuuuggcgaucuauucaacugucgccaguucauugguacugguagucucccugggggcaaucaguuucuggaugugcucuaaugggucucuacaguguagaauauguauuuaa

SEQ ID NO: 36927 - RNA, 1701 nt, Artificial Sequence
  derived and/or modified CDS sequence (wt) from hemagglutinin__InfluenzaA__ADG58959
augaaggcaauacuaguaguucugcuauauacauuugcaaccgcaaaugcagacacauuauguauagguuaucaugcaaacaauucaacagacacuguagacacaguacuagaaaagaauguaacaguaacacacucuguuaaccuucuagaagacaagcauaacgggaaacuaugcaaacuaagagggguagccccauugcauuuggguaaauguaacauugcuggcuggauccugggaaauccagagugugaaucacucuccacagcaaacucaugguccuacauuguggaaacaucuaguucagacaauggaacguguuacccaggagauuucaucgauuaugaggagcuaagagagcaauugagcucagugucaucauuugaaagguuugagauauuccccaagacaaguucauggcccaaucaugacucgaacaaagguguaacggcagcauguccucaugcuggagcaaaaagcuucuacaaaaauuuaauauggcuaguuaaaaaaggaaauucauacccaaagcucagcaaauccuacauuaaugauaaaggaaaagaaguccucgugcuauggggcauucaccauccaucuacuagugcugaccaacaaagucucuaucagaaugcagaugcauauguuuuuguggggacaucaagauacagcaagaaguucaagccggaaauagcaauaagacccaaagugagggaucaagaagggagaaugaacuauuacuggacacuaguagagccgggagacaaaauaacauucgaagcaacuggaaaucuagugguaccgagauaugcauucgcaauggaaagaaaugcuggaucugguauuaucauuucagauacaccaguccacgauugcaauacaacuugucagacacccaagggugcuauaaacaccagccucccauuucagaauauacauccgaucacaauuggaaaauguccaaaauauguaaaaagcacaaaauugagacuggccacaggauugaggaaugucccgucuauucaaucuagaggccuauuuggggccauugccgguuucauugaagggggguggacagggaugguagauggaugguacgguuaucaccaucaaaaugagcaggggucaggauaugcagccgaccugaagagcacacagaaugccauugacgagauuacuaacaaaguaaauucuguuauugaaaagaugaauacacaguucacagcaguagguaaagaguucaaccaucuggaaaaaagaauagagaauuuaaauaaaaaaguugaugaugguuuccuggacauuuggacuuacaaugccgaacuguuaguucuauuggaaaaugaaagaacuuuggacuaccacgauucaaaugugaagaacuuauaugaaaagguaagaagccaguuaaaaaacaaugccaaggaaauuggaaacggcugcuuugaauuuuaccacaaaugcgauaacacgugcauggaaagugucaaaaaugggacuuaugacuacccaaaauacucagaggaagcaaaauuaaauagagaagaaauagaugggguaaagcuggaaucaacaaggauuuaccagauuuuggcgaucuauucaacugucgccaguucauugguacugguagucucccugggggcaaucaguuucuggaugugcucuaaugggucucuacaguguagaauauguauuuaa

SEQ ID NO: 36928 - RNA, 1701 nt, Artificial Sequence
  derived and/or modified CDS sequence (wt) from hemagglutinin__InfluenzaA__ADG58960
augaaggcaauacuaguaguucugcuauauacauuugcaaccgcaaaugcagacacauuauguauagguuaucaugcgaacaauucaacagacacuguagacacaguacuagaaaagaauguaacaguaacacacucuguuaaccuucuagaagacaagcauaacgggaaacuaugcaaacuaagagggguagccccauugcauuuggguaaauguaacauugcuggcuggauccugggaaauccagagugugaaucacucuccacagcaagcucaugguccuacauuguggaaacaucuaguucagacaauggaacauguuacccaggagauuucaucgauuaugaggagcuaagagagcaauugagcucagugucaucauuugaaagguuugagauguuccccaagacaaguucauggcccaaucaugacucgaacaaagguguaacggcagcauguccucaugcuggagcaaaaagcuucuacaaaaauuuaauauggcuaguuaaaaaaggaaauucauacccaaagcucagcaaauccuacauuaaugauaaagggaaagaaguccucgugcuauggggcauucaccauccauccacuagugcugaccaacaaagucucuaucagaaugcagaugcauauguuuuuguggggacaucaagauacagcaagaaguucaagccggaaauagcaauaagacccaaagugagggaucaagaagggagaaugaacuauuacuggacacuaguagagccgggagacaaaauaacauucgaagcaacuggaaaucuagugguaccgagauacgcauucgcaauggaaagaaaugcuggaucugguauuaucauuucagauacaccaguccacgauugcaauacaaccugucagacacccaagggugcuauaaacaccagccucccauuucagaauauacauccgaucacaauuggaaaauguccaaaauauguaaaaagcacaaaauugagacuggccacaggauugaggaaugucccgucuauucaaucuagaggccuauuuggggccauugccgguuucauugaagggggguggacagggaugguagauggaugguacgguuaucaccaucaaaaugagcaggggucaggauaugcagccgaccugaagagcacacagaaugccauugacgagauuacuaacaaaguaaauucuguuauugaaaagaugaauacacaguucacagcaguagguaaagaguucaaccaccuggaaaaaagaauagagaauuuaaauaaaaaaguugaugaugguuuccuggacauuuggacuuacaaugccgaacuguugguucuauuggaaaaugaaagaacuuuggacuaccacgauucaaaugugaagaacuuauaugaaaagguaagaagccaguuaaaaaacaaugccaaggaaguuggaaacggcugcuuugaauuuuaccacaaaugcgauaacacgugcauggaaagugucaaaaaugggacuuaugacuacccaaaauacucagaggaagcaaaauuaaacagagaagaaauagaugggguaaagcuggaaucaacaaggauuuaccagauuuuggcgaucuauucaacugucgccaguucauugguacugguagucucccugggggcaaucaguuucuggaugugcucuaaugggucucuacaguguagaauauguauuuaa

SEQ ID NO: 36929 - RNA, 1701 nt, Artificial Sequence; identical to SEQ ID NO: 36928
  derived and/or modified CDS sequence (wt) from hemagglutinin__InfluenzaA__ADG58961

SEQ ID NO: 36930 - RNA, 1701 nt, Artificial Sequence; identical to SEQ ID NO: 36928
  derived and/or modified CDS sequence (wt) from hemagglutinin__InfluenzaA__ADG58962

SEQ ID NO: 36931 - RNA, 1701 nt, Artificial Sequence; identical to SEQ ID NO: 36928
  derived and/or modified CDS sequence (wt) from hemagglutinin__InfluenzaA__ADG58963

SEQ ID NO: 36932 - RNA, 1701 nt, Artificial Sequence; identical to SEQ ID NO: 36928
  derived and/or modified CDS sequence (wt) from hemagglutinin__InfluenzaA__ADG58964

SEQ ID NO: 36933 - RNA, 1701 nt, Artificial Sequence
  derived and/or modified CDS sequence (wt) from hemagglutinin__InfluenzaA__ADG58965
augaaggcaauacuaguaguucugcuauauacauuugcaaccgcaaaugcagacacauuauguauagguuaucaugcgaacaauucaacagacacuguagacacaguacuagaaaagaauguaacaguaacacacucuguuaaccuucuagaagacaagcauaacgggaaacuaugcaaacuaagagggguagccccauugcauuuggguaaauguaacauugcuggcuggauccugggaaauccagagugugaaucacucuccacagcaagcucaugguccuacauuguggaaacaucuaguucagacaauggaacauguuacccaggagauuucaucgauuaugaggagcuaagagagcaauugagcucagugucaucauuugaaagguuugagauguuccccaagacaaguucauggcccaaucaugacucgaacaaagguguaacggcagcauguccucaugcuggagcaaaaagcuucuacaaaaauuuaauauggcuaguuaaaaaaggaaauucauacccaaagcucagcaaauccuacauuaaugauaaagggaaagaaguccucgugcuauggggcauucaccauccauccacuagugcugaccaacaaagucucuaucagaaugcagaugcauauguuuuuguggggacaucaagauacagcaagaaguucaagccggaaauagcaauaagacccaaagugagggaucaagaagggagaaugaacuauuacuggacacuaguagagccgggagacaaaauaacauucgaagcaacuggaaaucuagugguaccgagauacgcauucgcaauggaaagaaaugcuggaucugguauuaucauuucagauacaccaguccacgauugcaauacaaccugucagacacccaagggugcuauaaacaccagccucccauuucagaauauacauccgaucacaauuggaaaauguccaaaauauguaaaaagcacaaaauugagacuggccacaggauugaggaaugucccgucuauucaaucuagaggccuauuuggggccauugccgguuucauugaagggggguggacagggaugguagauggaugguacgguuaucaccaucaaaaugagcaggggucaggauaugcagccgaccugaagagcacacagaaugccauugacgagauuacuaacaaaguaaauucuguuauugaaaagaugaauacacaguucacagcaguagguaaagaguucaaccaccuggaaaaaagaauagagaauuuaaauaaaaaaguugaugaugguuuccuggacauuuggacuuacaaugccgaacuguuaguucuauuggaaaaugaaagaacuuuggacuaccacgauucaaaugugaagaacuuauaugaaaagguaagaagccaguuaaaaaacaaugccaaggaaguuggaaacggcugcuuugaauuuuaccacaaaugcgauaacacgugcauggaaagugucaaaaaugggacuuaugacuacccaaaauacucagaggaagcaaaauuaaacagagaagaaauagaugggguaaagcuggaaucaacaaggauuuaccagauuuuggcgaucuauucaacugucgccaguucauugguacugguagucucccugggggcaaucaguuucuggaugugcucuaaugggucucuacaguguagaauauguauuuaa

SEQ ID NO: 36934 - RNA, 1701 nt, Artificial Sequence; identical to SEQ ID NO: 36928
  derived and/or modified CDS sequence (wt) from hemagglutinin__InfluenzaA__ADG58966

SEQ ID NO: 36935 - RNA, 1701 nt, Artificial Sequence; identical to SEQ ID NO: 36928
  derived and/or modified CDS sequence (wt) from hemagglutinin__InfluenzaA__ADG58967

SEQ ID NO: 36936 - RNA, 1701 nt, Artificial Sequence; identical to SEQ ID NO: 36928
  derived and/or modified CDS sequence (wt) from hemagglutinin__InfluenzaA__ADG58968

SEQ ID NO: 36937 - RNA, 1701 nt, Artificial Sequence
  derived and/or modified CDS sequence (wt) from hemagglutinin__InfluenzaA__ADG59628
augaaggcaauacuaguaguucugcuauauacauuugcaaccgcaaaugcagacacauuauguauagguuaucaugcgaacaauucaacagacacuguagacacaguacuagaaaagaauguaacaguaacacacucuguuaaccuucuagaagacaagcauaacgggaaacuaugcaaacuaagagggguagccccauugcauuuggguaaauguaacauugcuggcuggauccugggaaauccagagugugaaucacucuccacagcaagcucaugguccuacauuguggaaacaucuaguucagacaauggaacguguuacccaggagauuucaucgauuaugaggagcuaagagagcaauugagcucagugucaucauuugaaagguuugagauauuccccaagacaaguucauggcccaaucaugacucgaacaaagguguaacggcagcauguccucaugcuggagcaaaaagcuucuacaaaaauuuaauauggcuaguuaaaaaaggaaauucauacccaaagcucagcaaauccuacauuaaugauaaagggaaagaaguccucgugcuauggggcauucaccauccaucuacuagugcugaccaacaaagucucuaucagaaugcagaugcauauguuuuuguggggacaucaagauacagcaagaaguucaagccggaaauagcaauaagacccaaagugagggaucaagaagggagaaugaacuauuacuggacacuaguagagccgggagacaaaauaacauucgaagcaacuggaaaucuagugguaccgagauaugcauucgcaauggaaagaaaugcuggaucugguauuaucauuucagauacaccaguccacgauugcaauacaacuugucagacacccaagggugcuauaaacaccagccucccauuucagaauauacauccgaucacaauuggaaaauguccaaaauauguaaaaagcacaaaauugagacuggccacaggauugaggaaugucccgucuauucaaucuagaggccuauuuggggccauugccgguuucauugaagggggguggacagggaugguagauggaugguacgguuaucaccaucaaaaugagcaggggucaggauaugcagccgaccugaagagcacacagaaugccauugacgagauuacuaacaaaguaaauucuguuauugaaaagaugaauacacaguucacagcaguagguaaagaguucaaccaccuggaaaaaagaauagagaauuuaaauaaaaaaguugaugaugguuuccuggacauuuggacuuacaaugccgaacuguugguucuauuggaaaaugaaagaacuuuggacuaccacgauucaaaugugaagaacuuauaugaaaagguaagaagccaguuaaaaaacaaugccaaggaaauuggaaacggcugcuuugaauuuuaccacaaaugcgauaacacgugcauggaaagugucaaaaaugggacuuaugacuacccaaaauacucagaggaagcaaaauuaaacagagaagaaauagaugggguaaagcuggaaucaacaaggauuuaccagauuuuggcgaucuauucaacugucgccaguucauugguacugguagucucccugggggcaaucaguuucuggaugugcuccaaugggucucuacaguguagaauauguauuuaa

SEQ ID NO: 36938 - RNA, 1701 nt, Artificial Sequence; identical to SEQ ID NO: 36937
  derived and/or modified CDS sequence (wt) from hemagglutinin__InfluenzaA__ADG59629

SEQ ID NO: 36939 - RNA, 1701 nt, Artificial Sequence
  derived and/or modified CDS sequence (wt) from hemagglutinin__InfluenzaA__ADG59630
augaaggcaauacuaguaguucugcuauauacauuugcaaccgcaaaugcagacacauuauguauagguuaucaugcgaacaauucaacagacacuguagacacaguacuagaaaagaauguaacaguaacacacucuguuaaccuucuagaagacaagcauaacgggaaacuaugcaaacuaagagggguagccccauugcauuuggguaaauguaacauugcuggcuggauccugggaaauccagagugugaaucacucuccacagcaagcucaugguccuacauuguggaaacaucuaguucagacaauggaacguguuacccaggagauuucaucgauuaugaggagcuaagagagcaauugagcucagugucaucauuugaaagguuugagauauuccccaagacaaguucauggcccaaucaugacucgaacaaagguguaacggcagcauguccucaugcuggagcaaaaagcuucuacaaaaauuuaauauggcuaguuaaaaaaggaaauucauacccaaagcucagcaaauccuacauuaaugauaaagggaaagaaguccucgugcuauggggcauucaccauccaucuacuagugcugaccaacaaagucucuaucagaaugcagaugcauauguuuuuguggggacaucaagauacagcaagaaguucaagccggaaauagcaauaagacccaaagugagggaucaagaagggagaaugaacuauuacuggacacuaguagagccgggagacaaaauaacauucgaagcaacuggaaaucuagugguaccgagauaugcauucgcaauggaaagaaaugcuggaucugguauuaucauuucagauacaccaguccacgauugcaauacaacuugucagacacccaagggugcuauaaacaccagccucccauuucagaauauacauccgaucacaauuggaaaauguccaaaauauguaaaaagcacaaaauugagacuggccacaggauugaggaaugucccgucuauucaaucuagaggccuauuuggggccauugccgguuucauugaagggggguggacagggaugguagauggaugguacgguuaucaccaucaaaaugagcaggggucaggauaugcagccgaccugaagagcacacagaaugccauugacgagauuacuaacaaaguaaauucuguuauugaaaagaugaauacacaguucacagcaguagguaaagaguucaaccaccuggaaaaaagaauagagaauuuaaauaaaaagguugaugaugguuuccuggacauuuggacuuacaaugccgaacuguugguucuauuggaaaaugaaagaacuuuggacuaccacgauucaaaugugaagaacuuauaugaaaagguaagaagccaguuaaaaaacaaugccaaggaaauuggaaacggcugcuuugaauuuuaccacaaaugcgauaacacgugcauggaaagugucaaaaaugggacuuaugacuacccaaaauacucagaggaagcaaaauuaaacagagaagaaauagaugggguaaagcuggaaucaacaaggauuuaccagauuuuggcgaucuauucaacugucgccaguucauugguacugguagucucccugggggcaaucaguuucuggaugugcuccaaugggucucuacaguguagaauauguauuuaa

SEQ ID NO: 36940 - RNA, 1701 nt, Artificial Sequence; identical to SEQ ID NO: 36939
  derived and/or modified CDS sequence (wt) from hemagglutinin__InfluenzaA__ADG59631

SEQ ID NO: 36941 - RNA, 1701 nt, Artificial Sequence; identical to SEQ ID NO: 36939
  derived and/or modified CDS sequence (wt) from hemagglutinin__InfluenzaA__ADG59632

SEQ ID NO: 36942 - RNA, 1701 nt, Artificial Sequence
  derived and/or modified CDS sequence (wt) from hemagglutinin__InfluenzaA__ADG59633
augaaggcaauacuaguaguucugcuauauacauuugcaaccgcaaaugcagacacauuauguauagguuaucaugcgaacaauucaacagacacuguagacacaguacuagaaaagaauguaacaguaacacacucuguuaaccuucuagaagacaagcauaacgggaaacuaugcaaacuaagagggguagccccauugcauuuggguaaauguaacauugcuggcuggauccugggaaauccagagugugaaucacucuccacagcaagcucaugguccuacauuguggaaacaucuaguucagacaauggaacguguuacccaggagauuucaucgauuaugaggagcuaagagagcaauugagcucagugucaucauuugaaagguuugagauauuccccaagacaaguucauggcccaaucaugacucgaacaaagguguaacggcagcauguccucaugcuggagcaaaaagcuucuacaaaaauuuaauauggcuaguuaaaaaaggaaauucauacccaaagcucagcaaauccuacauuaaugauaaagggaaagaaguccucgugcuauggggcauucaccauccaucuacuagugcugaccaacaaagucucuaucagaaugcagaugcauauguuuuuguggggacaucaagauacagcaagaaguucaagccggaaauagcaauaagacccaaagugagggaucaagaagggagaaugaacuauuacuggacacuaguagagccgggagacaaaauaacauucgaagcaacuggaaaucuagugguaccgagauaugcauucgcaauggaaagaaaugcuggaucugguauuaucauuucagauacaccaguccacgauugcaauacaacuugucagacacccaagggugcuauaaacaccagccucccauuucagaauauacauccgaucacaauuggaaaauguccaaaauauguaaaaagcacaaaauugagacuggccacaggauugaggaauaucccgucuauucaaucuagaggccuauuuggggccauugccgguuucauugaagggggguggacagggaugguagauggaugguacgguuaucaccaucaaaaugagcaggggucaggauaugcagccgaccugaagagcacacagaaugccauugacgagauuacuaacaaaguaaauucuguuauugaaaagaugaauacacaguucacagcaguagguaaagaguucaaccaccuggaaaaaagaauagagaauuuaaauaaaaagguugaugaugguuuccuggacauuuggacuuacaaugccgaacuguugguucuauuggaaaaugaaagaacuuuggacuaccacgauucaaaugugaagaacuuauaugaaaagguaagaagccaguuaaaaaacaaugccaaggaaauuggaaacggcugcuuugaauuuuaccacaaaugcgauaacacgugcauggaaagugucaaaaaugggacuuaugacuacccaaaauacucagaggaagcaaaauuaaacagagaagaaauagaugggguaaagcuggaaucaacaaggauuuaccagauuuuggcgaucuauucaacugucgccaguucauugguacugguagucucccugggggcaaucaguuucuggaugugcuccaaugggucucuacaguguagaauauguauuuaa

SEQ ID NO: 36943 - RNA, 1701 nt, Artificial Sequence
  derived and/or modified CDS sequence (wt) from hemagglutinin__InfluenzaA__ADG59634
augaaggcaauacuaguaguucugcuauauacauuugcaaccgcaaaugcagacacauuauguauagguuaucaugcgaacaauucaacagacacuguagacacaguacuagaaaagaauguaacaguaacacacucuguuaaccuucuagaagacaagcauaacgggaaacuaugcaaacuaagagggguagccccauugcauuuggguaaauguaacauugcuggcuggauccugggaaauccagagugugaaucacucuccacagcaagcucaugguccuacauuguggaaacaucuaguucagacaauggaacguguuacccaggagauuucaucgauuaugaggagcuaagagagcaauugagcucagugucaucauuugaaagguuugagauauuccccaagacaaguucauggcccaaucaugacucgaacaaagguguaacggcagcauguccucaugcuggagcaaaaagcuucuacaaaaauuuaauauggcuaguuaaaaaaggaaauucauacccaaagcucagcaaauccuacauuaaugauaaagggaaagaaguccuagugcuauggggcauucaccauccaucuacuagugcugaccaacaaagucucuaucagaaugcagaugcauauguuuuuguggggacaucaagauacagcaagaaguucaagccggaaauagcaauaagacccaaagugagggaucaagaagggagaaugaacuauuacuggacacuaguagagccgggagacaaaauaacauucgaagcaacuggaaaucuagugguaccgagauaugcauucgcaauggaaagaaaugcuggaucugguauuaucauuucagauacaccaguccacgauugcaauacaacuugucagacacccaagggugcuauaaacaccagccucccauuucagaauauacauccgaucacaauuggaaaauguccaaaauauguaaaaagcacaaaauugagacuggccacaggauugaggaauaucccgucuauucaaucuagaggccuauuuggggccauugccgguuucauugaagggggguggacagggaugguagauggaugguacgguuaucaccaucaaaaugagcaggggucaggauaugcagccgaccugaagagcacacagaaugccauugacgagauuacuaacaaaguaaauucuguuauugaaaagaugaauacacaguucacagcaguagguaaagaguucaaccaccuggaaaaaagaauagagaauuuaaauaaaaagguugaugaugguuuccuggacauuuggacuuacaaugccgaacuguugguucuauuggaaaaugaaagaacuuuggacuaccacgauucaaaugugaagaacuuauaugaaaagguaagaagccaguuaaaaaacaaugccaaggaaauuggaaacggcugcuuugaauuuuaccacaaaugcgauaacacgugcauggaaagugucaaaaaugggacuuaugacuacccaaaauacucagaggaagcaaaauuaaacagagaagaaauagaugggguaaagcuggaaucaacaaggauuuaccagauuuuggcgaucuauucaacugucgccaguucauugguacugguagucucccugggggcaaucaguuucuggaugugcuccaaugggucucuacaguguagaauauguauuuaa

SEQ ID NO: 36944 - RNA, 1701 nt, Artificial Sequence
  derived and/or modified CDS sequence (wt) from hemagglutinin__InfluenzaA__ADG59635
augaaggcaauacuaguaguucugcuauauacauuugcaaccgcaaaugcagacacauuauguauagguuaucaugcgaacaauucaacagacacuguagacacaguacuagaaaagaauguaacaguaacacacucuguuaaccuucuagaagacaagcauaacgggaaacuaugcaaacuaagagggguagccccauugcauuuggguaaauguaacauugcuggcuggauccugggaaauccagagugugaaucacucuccacagcaagcucaugguccuacauuguggaaacaucuaguucagacaauggaacguguuacccaggagauuucaucgauuaugaggagcuaagagagcaauugagcucagugucaucauuugaaagguuugagauauuccccaagacaaguucauggcccaaucaugacucgaacaaagguguaacggcagcaugcccucaugcuggagcaaaaagcuucuacaaaaauuuaauauggcuaguuaaaaaaggaaauucauacccaaagcucagcaaauccuacauuaaugauaaagggaaagaaguccucgugcuauggggcauucaccauccaucuacuagugcugaccaacaaagucucuaucagaaugcagaugcauauguuuuuguggggacaucaagauacagcaagaaguucaagccggaaauagcaauaagacccaaagugagggaucaagaagggagaaugaacuauuacuggacacuaguagagccgggagacaaaauaacauucgaagcaacuggaaaucuagugguaccgagauaugcauucgcaauggaaagaaaugcuggaucugguauuaucauuucagauacaccaguccacgauugcaauacaacuugucagacacccaagggugcuauaaacaccagccucccauuucagaauauacauccgaucacaauuggaaaauguccaaaauauguaaaaagcacaaaauugagacuggccacaggauugaggaaugucccgucuauucaaucuagaggccuauuuggggccauugccgguuucauugaagggggguggacagggaugguagauggaugguacgguuaucaccaucaaaaugagcaggggucaggauaugcagccgaccugaagagcacacagaaugccauugacgagauuacuaacaaaguaaauucuguuauugaaaagaugaauacacaguucacagcaguagguaaagaguucaaccaccuggaaaaaagaauagagaauuuaaauaaaaaaguugaugaugguuuccuggacauuuggacuuacaaugccgaacuguugguucuauuggaaaaugaaagaacuuuggacuaccacgauucaaaugugaagaacuuauaugaaaagguaagaagccaguuaaaaaacaaugccaaggaaauuggaaacggcugcuuugaauuuuaccacaaaugcgauaacacgugcauggaaagugucaaaaaugggacuuaugacuacccaaaauacucagaggaagcaaaauuaaacagagaagaaauagaugggguaaagcuggaaucaacaaggauuuaccagauuuuggcgaucuauucaacugucgccaguucauugguacugguagucucccugggggcaaucaguuucuggaugugcuccaaugggucucuacaguguagaauauguauuuaa

SEQ ID NO: 36945 - RNA, 1701 nt, Artificial Sequence
  derived and/or modified CDS sequence (wt) from hemagglutinin__InfluenzaA__ADG59636
augaaggcaauacuaguaguucugcuauauacauuugcaaccgcaaaugcagacacauuauguauagguuaucaugcgaacaauucaacagacacuguagacacaguacuagaaaagaauguaacaguaacacacucuguuaaccuucuagaagacaagcauaacgggaaacuaugcaaacuaagagggguagccccauugcauuuggguaaauguaacauugcuggcuggauccugggaaauccagagugugaaucacucuccacagcaagcucaugguccuacauuguggaaacaucuaguucagacaauggaacguguuacccaggagauuucaucgauuaugaggagcuaagagagcaauugagcucagugucaucauuugaaagguuugagauauuccccaagacaaguucauggcccaaucaugacucgaacaaagguguaacggcagcauguccucaugcuggagcaaaaagcuucuacaaaaauuuaauauggcuaguuaaaaaaggaaauucauacccaaagcucagcaaauccuacauuaaugauaaagggaaagaaguccuagugcuauggggcauucaccauccaucuacuagugcugaccaacaaagucucuaucagaaugcagaugcauauguuuuuguggggacaucaagauacagcaagaaguucaagccggaaauagcaauaagacccaaagugaggggucaagaagggagaaugaacuauuacuggacacuaguagagccgggagacaaaauaacauucgaagcaacuggaaaucuagugguaccgagauaugcauucgcaauggaaagaaaugcuggaucugguauuaucauuucagauacaccaguccacgauugcaauacaacuugucagacacccaagggugcuauaaacaccagccucccauuucagaauauacauccgaucacaauuggaaaauguccaaaauauguaaaaagcacaaaauugagacuggccacaggauugaggaauaucccgucuauucaaucuagaggccuauuuggggccauugccgguuucauugaagggggguggacagggaugguagauggaugguacgguuaucaccaucaaaaugagcaggggucaggauaugcagccgaccugaagagcacacagaaugccauugacgagauuacuaacaaaguaaauucuguuauugaaaagaugaauacacaguucacagcaguagguaaagaguucaaccaccuggaaaaaagaauagagaauuuaaauaaaaagguugaugaugguuuccuggacauuuggacuuacaaugccgaacuguugguucuauuggaaaaugaaagaacuuuggacuaccacgauucaaaugugaagaacuuauaugaaaagguaagaagccaguuaaaaaacaaugccaaggaaauuggaaacggcugcuuugaauuuuaccacaaaugcgauaacacgugcauggaaagugucaaaaaugggacuuaugacuacccaaaauacucagaggaagcaaaauuaaacagagaagaaauagaugggguaaagcuggaaucaacaaggauuuaccagauuuuggcgaucuauucaacugucgccaguucauugguacugguagucucccugggggcaaucaguuucuggaugugcuccaaugggucucuacaguguagaauauguauuuaa

SEQ ID NO: 36946 - RNA, 1701 nt, Artificial Sequence
  derived and/or modified CDS sequence (wt) from hemagglutinin__InfluenzaA__ADG59638
augaaggcaauacuaguaguucugcuauauacauuugcaaccgcaaaugcagacacauuauguauagguuaucaugcgaacaauucaacagacacuguagacacaguacuagaaaagaauguaacaguaacacacucuguuaaccuucuagaagacaagcauaacgggaaacuaugcaaacuaagagggguagccccauugcauuuggguaaauguaacauugcuggcuggauccugggaaauccagagugugaaucacucuccacagcaagcucaugguccuacauuguggaaacaucuaguucagacaauggaacguguuacccaggagauuucaucgauuaugaggagcuaagagagcaauugagcucagugucaucauuugaaagguuugagauauuccccaagacaaguucauggcccaaucaugacucgaacaaagguguaacggcagcauguccucaugcuggagcaaaaagcuucuacaaaaauuuaauauggcuaguuaaaaaaggaaauucauacccaaagcucagcaaauccuacauuaaugauaaagggaaagaaguccucgugcuauggggcauucaccauccaucuacuagugcugaccaacaaagucucuaucagaaugcagaugcauauguuuuuguggggacaucaagauacagcaagaaguucaagccggaaauagcaauaagacccaaagugaggaaucaagaagggagaaugaacuauuacuggacacuaguagagccgggagacaaaauaacauucgaagcaacuggaaaucuagugguaccgagauaugcauucgcaauggaaagaaaugcuggaucugguauuaucauuucagauacaccaguccacgauugcaauacaacuugucagacacccaagggugcuauaaacaccagccucccauuucagaauauacauccgaucacaauuggaaaauguccaaaauauguaaaaagcacaaaauugagacuggccacaggauugaggaaugucccgucuauucaaucuagaggccuauuuggggccauugccgguuucauugaagggggguggacagggaugguagauggaugguacgguuaucaccaucaaaaugagcaggggucaggauaugcagccgaccugaagagcacacaaaaugccauugacgagauuacuaacaaaguaaauucuguuauugaaaagaugaauacacaguucacagcaguagguaaagaguucaaccaccuggaaaaaagaauagagaauuuaaauaaaaagguugaugaugguuuccuggacauuuggacuuacaaugccgaacuguugguucuauuggaaaaugaaagaacuuuggacuaccacgauucaaaugugaagaacuuauaugaaaagguaagaagccaguuaaaaaacaaugccaaggaaauuggaaacggcugcuuugaauuuuaccacaaaugcgauaacacgugcauggaaagugucaaaaaugggacuuaugacuacccaaaauacucagaggaagcaaaauuaaacagagaagaaauagaugggguaaagcuggaaucaacaaggauuuaccagauuuuggcgaucuauucaacugucgccaguucauugguacugguagucucccugggggcaaucaguuucuggaugugcuccaaugggucucuacaguguagaauauguauuuaa

SEQ ID NO: 36947 - RNA, 1701 nt, Artificial Sequence
  derived and/or modified CDS sequence (wt) from hemagglutinin__InfluenzaA__ADG59639
augaaggcaauacuaguaguucugcuauauacauuugcaaccgcaaaugcagacacauuauguauagguuaucaugcgaacaauucaacagacacuguagacacaguacuagaaaagaauguaacaguaacacacucuguuaaccuucuagaagacaagcauaacgggaaacuaugcaaacuaagagggguagccccauugcauuuggguaaauguaacauugcuggcuggauccugggaaauccagagugugaaucacucuccacagcaagcucaugguccuacauuguggaaacaucuaguucagacaauggaacguguuacccaggagauuucaucgauuaugaggagcuaagagagcaauugagcucagugucaucauuugaaagguuugagauauuccccaagacaaguucauggcccaaucaugacucgaacaaagguguaacggcagcauguccucaugcuggagcaaaaagcuucuacaaaaauuuaauauggcuaguuaaaaaaggaaauucauacccaaagcucagcaaauccuacauuaaugauaaagggaaagaaguccuagugcuauggggcauucaccauccaucuacuagugcugaccaacaaagucucuaucagaaugcagaugcauauguuuuuguggggacaucaagauacagcaagaaguucaagccggaaauagcaauaagacccaaagugagggaucaagaagggagaaugaacuauuacuggacacuaguagagccgggagacaaaauaacauucgaagcaacuggaaaucuagugguaccgagauaugcauucgcaauggaaagaaaugcuggaucugguauuaucauuucagauacaccaguccacgauugcaauacaacuugucagacacccaagggugcuauaaacaccagccucccauuucagaauauacauccgaucacaauuggaaaauguccaaaauauguaaaaagcacaaaauugagacuggccacaggauugaggaauaucccgucuauucaaucuagaggccuauuuggggccauugccgguuucauugaagggggguggacagggaugguagauggaugguacgguuaucaucaucaaaaugagcaggggucaggauaugcagccgaccugaagagcacacagaaugccauugacgagauuacuaacaaaguaaauucuguuauugaaaagaugaauacacaguucacagcaguagguaaagaguucaaccaccuggaaaaaagaauagagaauuuaaauaaaaagguugaugaugguuuccuggacauuuggacuuacaaugccgaacuguugguucuauuggaaaaugaaagaacuuuggacuaccacgauucaaaugugaagaacuuauaugaaaagguaagaagccaguuaaaaaacaaugccaaggaaauuggaaacggcugcuuugaauuuuaccacaaaugcgauaacacgugcauggaaagugucaaaaaugggacuuaugacuacccaaaauacucagaggaagcaaaauuaaacagagaagaaauagaugggguaaagcuggaaucaacaaggauuuaccagauuuuggcgaucuauucaacugucgccaguucauugguacugguagucucccugggggcaaucaguuucuggaugugcuccaaugggucucuacaguguagaauauguauuuaa

SEQ ID NO: 36948 - RNA, 1701 nt, Artificial Sequence
  derived and/or modified CDS sequence (wt) from hemagglutinin__InfluenzaA__ADG59641
augaaggcaauacuaguaguucugcuauauacauuugcaaccgcaaaugcagacacauuauguauagguuaucaugcgaacaauucaacagacacuguagacacaguacuagaaaagaauguaacaguaacacacucuguuaaccuucuagaagacaagcauaacgggaaacuaugcaaacuaagagggguagccccauugcauuuggguaaguguaacauugcuggcuggauccugggaaauccagagugugaaucacucuccacagcaagcucaugguccuacauuguggaaacaucuaguucagacaauggaacguguuacccaggagauuucaucgauuaugaggagcuaagagagcaauugagcucagugucaucauuugaaagguuugagauauuccccaagacaaguucauggcccaaucaugacucgaacaaagguguaacggcagcauguccucaugcuggagcaaaaagcuucuacaaaaauuuaauauggcuaguuaaaaaaggaaauucauacccaaagcucagcaaauccuacauuaaugauaaagggaaagaaguccucgugcuauggggcauucaccauccaucuacuagugcugaccaacaaagucucuaucagaaugcagaugcauauguuuuuguggggacaucaagauacagcaagaaguucaagccggaaauagcaauaagacccaaagugagggaacaagaagggagaaugaacuauuacuggacacuaguagagccgggagacaaaauaacauucgaagcaacuggaaaucuagugguaccgagauaugcauucgcaauggaaagaaaugcuggaucugguauuaucauuucagauacaccaguccacgauugcaauacaacuugucagacacccaaaggugcuauaaacaccagccucccauuucagaauauacauccgaucacaauuggaaaauguccaaaauauguaaaaagcacaaaauugagacuggccacaggauugaggaaugucccgucuauucaaucuagaggccuauuuggggccauugccgguuucauugaagggggguggacagggaugguagauggaugguacgguuaucaccaucaaaaugagcaggggucaggauaugcagccgaccugaagagcacacagaaugccauugacgagauuacuaacaaaguaaauucuguuauugaaaagaugaauacacaguucacagcaguagguaaagaguucaaccaccuggaaaaaagaauagagaauuuaaauaaaaaaguugaugaugguuuccuggacauuuggacuuacaaugccgaacuguugguucuauuggaaaaugaaagaacuuuggacuaccacgauucaaaugugaagaacuuauaugaaaagguaagaagccaguuaaaaaacaaugccaaggaaauuggaaacggcugcuuugaauuuuaccacaaaugcgauaacacgugcauggaaagugucaaaaaugggacuuaugacuacccaaaauacucagaggaagcaaaauuaaacagagaagaaauagaugggguaaagcuggaaucaacaaggauuuaccagauuuuggcgaucuauucaacugucgccaguucauugguacugguagucucccugggggcaaucaguuucuggaugugcuccaaugggucucuacaguguagaauauguauuuaa

SEQ ID NO: 36949 - RNA, 1701 nt, Artificial Sequence
  derived and/or modified CDS sequence (wt) from hemagglutinin__InfluenzaA__ADG59643
augaaggcaauacuaguaguucugcuauauacauuugcaaccgcaaaugcagacacauuauguauagguuaucaugcgaacaauucaacagacacuguagacacaguacuagaaaagaauguaacaguaacacacucuguuaaccuucuagaagacaagcauaacgggaaacuaugcaaacuaagagggguagccccauugcauuuggguaaauguaacauugcuggcuggauccugggaaauccagagugugaaucacucuccacagcaagcucaugguccuacauuguggaaacaucuaguucagacaauggaacguguuacccaggagauuucaucgauuaugaggagcuaagagagcaauugagcucagugucaucauuugaaagguuugagauauuccccaagacaaguucauggcccaaucaugacucgaacaaagguguaacggcagcauguccucaugcuggagcaaaaagcuucuacaaaaauuuaauauggcuaguuaaaaaaggaaauucauacccaaagcucagcaaauccuacauuaaugauaaagggaaagaaguccucgugcuauggggcauucaccauccaucuacuagugcugaccaacaaagucucuaucagaaugcagaugcauauguuuuuguggggucaucaagauacagcaagaaguucaagccggaaauagcaauaagacccaaagugagggaucaagaagggagaaugaacuauuacuggacacuaguagagccgggagacaaaauaacauucgaagcaacuggaaaucuagugguaccgagauaugcauucgcaauggaaagaaaugcuggaucugguauuaucauuucagauacaccaguccacgauugcaauacaacuugucagacacccaagggugcuauaaacaccagccucccauuucauaauauacauccgaucacaauuggaaaauguccaaaauauguaaaaagcacaaaauugagacuggccacaggauugaggaaugucccgucuauucaaucuagaggccuauuuggggccauugccgguuucauugaagggggguggacagggaugguagauggaugguacgguuaucaccaucaaaaugagcaggggucaggauaugcagccgaccugaagagcacacagaaugccauugacgagauuacuaacaaaguaaauucuguuauugaaaagaugaauacacaguucacagcaguagguaaagaguucaaccaccuggaaaaaagaauagagaauuuaaauaaaaaaguugaugaugguuuccuggacauuuggacuuacaaugccgaacuguugguucuauuggaaaaugaaagaacuuuggacuaccacgauucaaaugugaagaacuuauaugaaaagguaagaagccaguuaaaaaacaaugccaaggaaauuggaaacggcugcuuugaauuuuaccacaaaugcgauaacacgugcauggaaagugucaaaaaugggacuuaugacuacccaaaauacucagaggaagcaaaauuaaacagagaagaaauagaugggguaaagcuggaaucaacaaggauuuaccagauuuuggcgaucuauucgacugucgccaguucauugguacugguagucucccugggggcaaucaguuucuggaugugcuccaaugggucucuacaguguagaauauguauuuaa

SEQ ID NO: 36950 - RNA, 1701 nt, Artificial Sequence
  derived and/or modified CDS sequence (wt) from hemagglutinin__InfluenzaA__ADG59644
augaaggcaauacuaguaguucugcuauauacauuugcaaccgcaaaugcagacacauuauguauagguuaucaugcgaacaauucaacagacacuguagacacaguacuagaaaagaauguaacaguaacacacucuguuaaccuucuagaagacaagcauaacgggaaacuaugcaaacuaagagggguagccccauugcauuuggguaaauguaacauugcuggcuggauccugggaaauccagagugugaaucacucuccacagcaagcucaugguccuacauuguggaaacaucuaguucagacaauggaacguguuacccaggagauuucaucgauuaugaggagcuaagagagcaauugagcucagugucaucauuugaaagguuugagauauuccccaagacaaguucauggcccaaucaugacucgaacaaagguguaacggcagcauguccucaugcuggagcaaaaagcuucuacaaaaauuuaauauggcuaguuaaaaaaggaaauucauacccaaagcucagcaaauccuacauuaaugauaaagggaaagaaguccucgugcuauggggcauucaccauccaucuacuagugcugaccaacaaagucucuaucagaaugcagaugcauauguuuuuguggggucaucaagauacagcaagaaguucaagccggaaauagcaauaagacccaaagugagggaucaagaagggagaaugaacuauuacuggacacuaguagagccgggagacaaaauaacauucgaagcaacuggaaaucuagugguaccgagauaugcauucgcaauggaaagaaaugcuggaucugguauuaucauuucagauacaccaguccacgauugcaauacaacuugucagacacccaagggugcuauaaacaccagccucccauuucagaauauacauccgaucacaauuggaaaauguccaaaauauguaaaaagcacaaaauugagacuggccacaggauugaggaaugucccgucuauucaaucuagaggccuauuuggggccauugccgguuucauugaagggggguggacagggaugguagauggaugguacgguuaucaccaucaaaaugagcaggggucaggauaugcagccgaccugaagagcacacagaaugccauugacgagauuacuaacaaaguaaauucuguuauugaaaagaugaauacacaguucacagcaguagguaaagaguucaaccaccuggaaaaaagaauagagaauuuaaauaaaaaaguugaugaugguuuccuggacauuuggacuuacaaugccgaacuguugguucuauuggaaaaugaaagaacuuuggacuaccacgauucaaaugugaagaacuuauaugaaaagguaagaagccaguuaaaaaacaaugccaaggaaauuggaaacggcugcuuugaauuuuaccacaaaugcgauaacacgugcauggaaaguguuaaaaaugggacuuaugacuacccaaaauacucagaggaagcaaaauuaaacagagaagaaauagaugggguaaagcuggaaucgacaaggauuuaccagauuuuggcgaucuauucaacugucgccaguucauugguacugguagucucccugggggcaaucaguuucuggaugugcuccaaugggucucuacaguguagaauauguauuuaa

SEQ ID NO: 36951 - RNA, 1701 nt, Artificial Sequence; identical to SEQ ID NO: 36939
  derived and/or modified CDS sequence (wt) from hemagglutinin__InfluenzaA__ADG59646

SEQ ID NO: 36952 - RNA, 1701 nt, Artificial Sequence
  derived and/or modified CDS sequence (wt) from hemagglutinin__InfluenzaA__ADG59647
augaaggcaauacuaguaguucugcuauauacauuugcaaccgcaaaugcagacacauuauguauagguuaucaugcgaacaauucaacagacacuguagacacaguacuagaaaagaauguaacaguaacacacucuguuaaccuucuagaagacaagcauaacgggaaacuaugcaaacuaagagggguagccccauugcauuuggguaaauguaacauugcuggcuggauccugggaaauccagagugugagucacucuccacagcaagcucaugguccuacauuguggaaacaucuaguucagacaauggaacguguuacccaggagauuucaucgauuaugaggagcuaagagagcaauugaguucagugucaucauuugaaagguuugagauauuccccaagacaaguucauggcccaaucaugacucgaacaaagguguaacggcagcauguccucaugcuggagcaaaaagcuucuacaaaaauuuaauauggcuaguuaaaaaaggaaauucauacccaaagcucagcaaauccuacauuaaugauaaagggaaagaaguccuagugcuauggggcauucaccauccaucuacuagugcugaccaacaaagucucuaucagaaugcagaugcauauguuuuuguggggacaucaagauacagcaagaaguucaagccggaaauagcaauaagacccaaagugagggaucaagaagggagaaugaacuauuacuggacacuaguagagccgggagacaaaauaacauucgaagcaacuggaaaucuagugguaccgagauaugcauucgcaauggaaagaaaugcuggaucugguauuaucauuucagauacaccaguccacgauugcaauacaacuugucagacacccaagggugcuauaaacaccagccucccauuucagaauauacauccgaucacaauuggaaaauguccaaaauauguaaaaagcacaaaauugagacuggccacaggauugaggaauaucccgucuauucaaucuagaggccuauuuggggccauugccgguuucauugaagggggguggacagggaugguagauggaugguacgguuaucaucaucaaaaugagcaggggucaggauaugcagccgaccugaagagcacacagaaugccauugacgagauuacuaacaaaguaaauucuguuauugaaaagaugaauacacaguucacagcaguagguaaagaguucaaccaccuggaaaaaagaauagagaauuuaaauaaaaagguugaugaugguuuccuggacauuuggacuuacaaugccgaacuguugguucuauuggaaaaugaaagaacuuuggacuaccacgauucaaaugugaagaacuuauaugaaaagguaagaagccaguuaaaaaacaaugccaaggaaauuggaaacggcugcuuugaauuuuaccacaaaugcgauaacacgugcauggaaagugucaaaaaugggacuuaugacuacccaaaauacucagaggaagcaaaauuaaacagagaagaaauagaugggguaaagcuggaaucaacaaggauuuaccagauuuuggcgaucuauucaacugucgccaguucauugguacugguagucucccugggggcaaucaguuucuggaugugcuccaaugggucucuacaguguagaauauguauuuaa

SEQ ID NO: 36953 - RNA, 1701 nt, Artificial Sequence
  derived and/or modified CDS sequence (wt) from hemagglutinin__InfluenzaA__ADG59648
augaaggcaauacuaguaguucugcuauauacauuugcaaccgcaaaugcagacacauuauguauagguuaucaugcgaacaauucaacagacacuguagacacaguacuagaaaagaauguaacaguaacacacucuguuaaccuucuagaagacaagcauaacgggaaacuaugcaaacuaagagggguagccccauugcauuuggguaaauguaacauugcuggcuggauccugggaaauccagagugugaaucacucuccacagcaagcucaugguccuacauuguggaaacaucuaguucagacaauggaacguguuacccaggagauuucaucgauuaugaggagcuaagagagcaauugagcucagugucaucauuugaaagguuugagauauuccccaagacaaguucauggcccaaucaugacucgaacaaagguguaacggcagcauguccucaugcuggagcaaaaagcuucuacaaaaauuuaauauggcuaguuaaaaaaggaaauucauacccaaagcucagcaaauccuacauuaaugauaaagggaaagaaguccucgugcuauggggcauucaccauccaucuacuagugcugaccaacaaagucucuaucagaaugcagaugcauauguuuuuguggggacaucaagauacagcaagaaguucaagccggaaauagcaauaagacccaaagugagggaucaagaagggagaaugaacuauuacuggacacuaguagagccgggagacaaaauaacauucgaagcaacuggaaaucuagugguaccgagauaugcauucgcaauggaaagaaaugcuggaucugguauuaucauuucagauacaccaguccacgauugcaauacaacuugucagacacccaagggugcuauaaacaccagccucccauuucagaauauacauccgaucacaauuggaaaauguccaaaauauguaaaaagcacaaaauugagacuggccacaggauugaggaaugucccgucuauucaaucuagaggccuauuuggggccauugccgguuucauugaagggggguggacagggaugguagauggaugguacgguuaucaccaucaaaaugagcaggggucaggauaugcagccgaccugaagagcacacagaaugccauugacaagauuacuaacaaaguaaauucuguuauugaaaagaugaauacacaguucacagcaguagguaaagaguucaaccaccuggaaaaaagaauagagaauuuaaauaaaaaaguugaugaugguuuccuggacauuuggacuuacaaugccgaacuguugguucuauuggaaaaugaaagaacuuuggacuaccacgauucaaaugugaagaacuuauaugaaaagguaagaagccaguuaaaaaacaaugccaaggaaauuggaaacggcugcuuugaauuuuaccacaaaugcgauaacacgugcauggaaagugucaaaaaugggacuuaugacuacccaaaauacucagaggaagcaaaauuaaacagagaagaaauagaugggguaaagcuggaaucaacaaggauuuaccagauuuuggcgaucuauucaacugucgccaguucauugguacugguagucucccugggggcaaucaguuucuggaugugcuccaaugggucucuacaguguagaauauguauuuaa

SEQ ID NO: 36954 - RNA, 1701 nt, Artificial Sequence; identical to SEQ ID NO: 36953
  derived and/or modified CDS sequence (wt) from hemagglutinin__InfluenzaA__ADG59649

SEQ ID NO: 36955 - RNA, 1701 nt, Artificial Sequence; identical to SEQ ID NO: 36953
  derived and/or modified CDS sequence (wt) from hemagglutinin__InfluenzaA__ADG59650

SEQ ID NO: 36956 - RNA, 1701 nt, Artificial Sequence; identical to SEQ ID NO: 36953
  derived and/or modified CDS sequence (wt) from hemagglutinin__InfluenzaA__ADG59651

SEQ ID NO: 36957 - RNA, 1701 nt, Artificial Sequence
  derived and/or modified CDS sequence (wt) from hemagglutinin__InfluenzaA__ADG59652
augaaggcaauacuaguaguucugcuauauacauuugcaaccgcaaaugcagacacauuauguauagguuaucaugcgaacaauucaacagacacuguagacacaguacuagaaaagaauguaacaguaacacacucuguuaaccuucuagaagacaagcauaacgggaaacuaugcaaacuaagagggguagccccauugcauuuggguaaauguaacauugcuggcuggauccugggaaauccagagugugaaucacucuccacagcaagcucaugguccuacauuguggaaacaucuaguucagacaauggaacguguuacccaggagauuucaucgauuaugaggagcuaagagagcaauugagcucagugucaucauuugaaagguuugagauauuccccaagacaaguucauggcccaaucaugacucgaacaaagguguaacggcagcauguccucaugcuggagcaaaaagcuucuacaaaaauuuaauauggcuaguuaaaaaaggaaauucauacccaaagcucagcaaauccuauauuaaugauaaagggaaagaaguccucgugcuauggggcauucaccauccaucuacuagugcugaccaacaaagucucuaucagaaugcagaugcauauguuuuuguggggacaucaagauacagcaagaaguucaagccggaaauagcaauaagacccaaagugagggaucaagaagggagaaugaacuauuacuggacacuaguagagccgggagacaaaauaacauucgaagcaacuggaaaucuagugguaccgagauaugcauucgcaauggaaagaaaugcuggaucugguauuaucauuucagauacaccaguccacgauugcaauacaacuugucagacacccaagggugcuauaaacaccagccucccauuucagaauauacauccgaucacaauuggaaaauguccaaaauauguaaaaagcacaaaauugagacuggccacaggauugaggaaugucccgucuauucaaucuagaggccuauuuggggccauugccgguuucauugaagggggguggacagggaugguagauggaugguacgguuaucaccaucaaaaugagcaggggucaggauaugcagccgaccugaagagcacacagaaugccauugacgagauuacuaacaaaguaaauucuguuauugaaaagaugaauacacaguucacagcaguagguaaagaguucaaccaccuggaaaaaagaauagagaauuuaaauaaaaagguugaugaugguuuccuggacauuuggacuuacaaugccgaacuguugguucuauuggaaaaugaaagaacuuuggacuaccacgauucaaaugugaagaacuuauaugaaaagguaagaagccaguuaaaaaacaaugccaaggaaauuggaaacggcugcuuugaauuuuaccacaaaugcgauaacacgugcauggaaagugucaaaaaugggacuuaugacuacccaaaauacucagaggaagcaaaauuaaacagagaagaaauagaugggguaaagcuggaaucaacaaggauuuaccagauuuuggcgaucuauucaacugucgccaguucauugguacugguagucucccugggggcaaucaguuucuggaugugcuccaaugggucucuacaguguagaauauguauuuaa

SEQ ID NO: 36958 - RNA, 1701 nt, Artificial Sequence
  derived and/or modified CDS sequence (wt) from hemagglutinin__InfluenzaA__ADG59653
augaaggcaauacuaguaguucugcuauauacauuugcaaccgcaaaugcagacacauuauguauagguuaucaugcgaacaauucaacagacacuguagacacaguacuagaaaagaauguaacaguaacacacucuguuaaccuucuagaagacaagcauaacgggaaacuaugcaaacuaagagggguagccccauugcauuuggguaaauguaacauugcuggcuggauccugggaaauccagagugugaaucacucuccacagcaagcucaugguccuacauuguggaaacaucuaguucagacaauggaacguguuacccaggagauuucaucgauuaugaggagcuaagagagcaauugagcucagugucaucauuugaaagguuugagauauuccccaagacaaguucauggcccaaucaugacucgaacaaagguguaacggcagcauguccucaugcuggagcaaaaagcuucuacaaaaauuuaauauggcuaguuaaaaaaggaaauucauacccaaagcucagcaaauccuacauuaaugauaaagggaaagaaguccucgugcuauggggcauucaccauccaucuacuagugcugaccaacaaagucucuaucagaaugcagaugcauauguuuuuguggggacaucaagauacagcaagaaguucaagccggaaauagcaauaagacccaaagugagggaucaagaagggagaaugaacuauuacuggacacuaguagagccgggagacaaaauaacauucgaagcaacuggaaaucuagugguaccgagauaugcauucgcaauggaaagaaaugcuggaucugguauuaucauuucagauacaccaguccacgauugcaauacaacuugucagacacccaagggugcuauaaacaccagccucccauuucagaauauacauccgaucacaauuggaaaauguccaaaauauguaaaaagcacaaaauugagacuggccacaggauugaggaaugucccgucuauucaaucuagaggccuauuuggggccauugccgguuucauugaagggggguggacagggaugguagauggaugguacgguuaucaccaucaaaaugagcaggggucaggauaugcagccgaccugaagagcacacagaaugccauugacgagauuacuaacaaaguaaauucuguuauugaaaagaugaauacacaguucacagcaguagguaaagaguucaaccaccuggaaaaaagaauagagaauuuaaauaaaaaaguugaugaugguuuccuggacauuuggacuuacaaugccgaauuguugguucuauuggaaaaugaaagaacuuuggacuaccacgauucaaaugugaagaacuuauaugaaaagguaagaagccaguuaaaaaacaaugccaaggaaauuggaaacggcugcuuugaauuuuaccacaaaugcgauaacacgugcauggaaagugucaaaaaugggacuuaugacuacccaaaauacucagaggaagcaaaauuaaacagagaagaaauagaugggguaaagcuggaaucaacaaggauuuaccagauuuuggcgaucuauucaacugucgccaguucauugguacugguagucucccugggggcaaucaguuucuggaugugcuccaaugggucucuacaguguagaauauguauuuaa

SEQ ID NO: 36959 - RNA, 1701 nt, Artificial Sequence
  derived and/or modified CDS sequence (wt) from hemagglutinin__InfluenzaA__ADG59655
augaaggcaauacuaguaguucugcuauauacauuugcaaccgcaaaugcagacacauuauguauagguuaucaugcgaacaauucaacagacacuguagacacaguacuagaaaagaauguaacaguaacacacucuguuaaccuucuagaagacaagcauaacgggaaacuaugcaaacuaagagggguagccccauugcauuuggguaaauguaacauugcuggcuggauccugggaaauccagagugugagucacucuccacagcaagcucaugguccuacauuguggaaacaucuaguucagacaauggaacguguuacccaggagauuucaucgauuaugaggagcuaagagagcaauugaguucagugucaucauuugaaagguuugagauauuccccaagacaaguucauggcccaaucaugacucgaacaaagguguaacggcagcauguccucaugcuggagcaaaaagcuucuacaaaaauuuaauauggcuaguuaaaaaaggaaauucauacccaaagcucagcaaauccuacauuaaugauaaagggaaagaaguccuagugcuauggggcauucaccauccaucuacuagugcugaccaacaaagucucuaucagaaugcagaugcauauguuuuuguggggacaucaagauacagcaagaaguucaagccggaaauagcaauaagacccaaagugaggggucaagaagggagaaugaacuauuacuggacacuaguagagccgggagacaaaauaacauucgaagcaacuggaaaucuagugguaccgagauaugcauucgcaauggaaagaaaugcuggaucugguauuaucauuucagauacaccaguccacgauugcaauacaacuugucagacacccaagggugcuauaaacaccagccucccauuucagaauauacauccgaucacaauuggaaaauguccaaaauauguaaaaagcacaaaauugagacuggccacaggauugaggaauaucccgucuauucaaucuagaggccuauuuggggccauugccgguuucauugaagggggguggacagggaugguagauggaugguacgguuaucaucaucaaaaugagcaggggucaggauaugcagccgaccugaagagcacacagaaugccauugacgagauuacuaacaaaguaaauucuguuauugaaaagaugaauacacaguucacagcaguagguaaagaguucaaccaccuggaaaaaagaauagagaauuuaaauaaaaagguugaugaugguuuccuggacauuuggacuuacaaugccgaacuguugguucuauuggaaaaugaaagaacuuuggacuaccacgauucaaaugugaagaacuuauaugaaaagguaagaagccaguuaaaaaacaaugccaaggaaauuggaaacggcugcuuugaauuuuaccacaaaugcgauaacacgugcauggaaagugucaaaaaugggacuuaugacuacccaaaauacucagaggaagcaaaauuaaacagagaagaaauagaugggguaaagcuggaaucaacaaggauuuaccagauuuuggcgaucuauucaacugucgccaguucauugguacugguagucucccugggggcaaucaguuucuggaugugcuccaaugggucucuacaguguagaauauguauuuaa

SEQ ID NO: 36960 - RNA, 1701 nt, Artificial Sequence
  derived and/or modified CDS sequence (wt) from hemagglutinin__InfluenzaA__ADG59656
augaaggcaauacuaguaguucugcuauauacauuugcaaccgcaaaugcggacacauuauguauagguuaucaugcgaacaauucaacagacacuguagacacaguacuagaaaagaauguaacaguaacacacucuguuaaccuucuagaagacaagcauaacgggaaacuaugcaaacuaagagggguagccccauugcauuuggguaaauguaacauugcuggcuggauccugggaaauccagagugugaaucacucuccacagcaagcucaugguccuacauuguggaaacaucuaguucagacaauggaacguguuacccaggagauuucaucgauuaugaggagcuaagagagcaauugagcucagugucaucauuugaaagguuugagauauuccccaagacaaguucauggcccaaucaugacucgaacaaagguguaacggcagcauguccucaugcuggagcaaaaagcuucuacaaaaauuuaauauggcuaguuaaaaaaggaaauucauacccaaagcucagcaaauccuacauuaaugauaaagggaaagaaguccuagugcuaugggggauucaccauccaucuacuagugcugaccaacaaagucucuaucagaaugcagaugcauauguuuuuguggggacaucaagauacagcaagaaguucaagccggaaauagcaauaagacccaaagugagggaucaagaagggagaaugaacuauuacuggacacuaguagagccgggagacaaaauaacauucgaagcaacuggaaaucuagugguaccgagauaugcauucgcaauggaaagaaaugcuggaucugguauuaucauuucagauacaccaguccacgauugcaauacaacuugucagacacccaagggugcuauaaacaccagccucccauuucagaauauacauccgaucacaauuggaaaauguccaaaauauguaaaaagcacaaaauugagacuggccacaggauugaggaauaucccgucuauucaaucuagaggccuauuuggggccauugccgguuucauugaagggggguggacagggaugguagauggaugguacgguuaucaccaucaaaaugagcaggggucaggauaugcagccgaccugaagagcacacagaaugccauugacgagauuacuaauaaaguaaauucuguuauugaaaagaugaauacacaguucacagcaguagguaaagaguucaaccaccuggaaaaaagaauagagaauuuaaauaaaaagguugaugaugguuuccuggacauuuggacuuacaaugccgaacuguugguucuauuggaaaaugaaagaacuuuggacuaccacgauucaaaugugaagaacuuauaugaaaagguaagaagccaguuaaaaaacaaugccaaggaaauuggaaacggcugcuuugaauuuuaccacaaaugcgauaacacgugcauggaaagugucaaaaaugggacuuaugacuacccaaaauacucagaggaagcaaaauuaaacagagaagaaauagaugggguaaagcuggaaucaacaaggauuuaccagauuuuggcgaucuauucaacugucgccaguucauugguacugguagucucccugggggcaaucaguuucuggaugugcuccaaugggucucuacaguguagaauauguauuuaa

SEQ ID NO: 36961 - RNA, 1701 nt, Artificial Sequence
  derived and/or modified CDS sequence (wt) from hemagglutinin__InfluenzaA__ADG59657
augaaggcaauacuaguaguucugcuauauacauuugcaaccgcaaaugcagacacauuauguauagguuaucaugcgaacaauucaacagacacuguagacacaguacuagaaaagaauguaacaguaacacacucuguuaaccuucuagaagacaagcauaacgggaaacuaugcaaacuaagagggguagccccauugcauuuggguaaauguaacauugcuggcuggauccugggaaauccagagugugaaucacucuccacagcaagcucaugguccuacauuguggaaacaucuaguucagacaauggaacguguuacccaggagauuucaucgauuaugaggagcuaagagagcaauugagcucagugucaucauuugaaagguuugagauauuccccaagacaaguucauggcccaaucaugacucgaacaaagguguaacggcagcauguccucaugcuggagcaaaaagcuucuacaaaaauuuaauauggcuaguuaagaaaggaaauucauacccaaagcucagcaaauccuacauuaaugauaaagggaaagaaguccucgugcuauggggcauucaccauccaucuacuagugcugaccaacaaagucucuaucagaaugcagaugcauauguuuuuguggggucaucaaaauacagcaagaaguucaagccggaaauagcaauaagacccaaagugagggaucaagaagggagaaugaacuauuacuggacacuaguagagccgggagacaaaauaacauucgaagcaacuggaaaucuagugguaccgagauaugcauucgcaauggaaagaaaugcuggaucugguauuaucauuucagauacaccaguccacgauugcaauacaacuugucagacacccaagggugcuauaaacaccagccucccauuucagaauauacauccgaucacaauuggaaaauguccaaaauauguaaaaagcacaaaauugagacuggccacaggauugaggaaugucccgucuacucaaucuagaggccuauuuggggccauugccgguuucauugaagggggguggacagggaugguagauggaugguacgguuaucaccaucaaaaugagcaggggucaggauaugcagccgaccugaagagcacacagaaugccauugacgagauuacuaacaaaguaaauucuguuauugaaaagaugaauacacaguucacagcaguagguaaagaguucaaccaccuggaaaaaagaauagagaauuuaaauaaaaaaguugaugaugguuuccuggacauuuggacuuacaaugccgaacuguugguucuauuggaaaaugaaagaacuuuggacuaccacgauucaaaugugaagaacuuauaugaaaagguaagaagccagcuaaaaaacaaugccaaggaaauuggaaacggcugcuuugaauuuuaccacaaaugcgauaacacgugcauggaaagugucaaaaaugggacuuaugacuacccaaaauacucagaggaagcaaaauuaaacagagaagaaauagaugggguaaagcuggaaucaacaaggauuuaccagauuuuggcgaucuauucaacugucgccaguucauugguacugguagucucccugggggcaaucaguuucuggaugugcuccaaugggucucuacaguguagaauauguauuuaa

SEQ ID NO: 36962 - RNA, 1701 nt, Artificial Sequence
  derived and/or modified CDS sequence (wt) from hemagglutinin__InfluenzaA__ADG59658
augaaggcaauacuaguaguucugcuauauacauuugcaaccgcaaaugcagacacauuguguauagguuaucaugcgaacaauucaacagacacuauagacacaguacuagaaaagaauguaacaguaacacacucuguuaaccuucuagaagacaagcauaacgggaaacuaugcaaacuaagagggguagccccacugcauuuggguaaauguaacauugcuggcuggauccugggaaauccagagugugaaucacucuccacagcaagcucaugguccuacauuguggaaacaucuaguucagacaauggaacguguuacccaggagauuucaucgauuaugaggagcuaagagagcaauugagcucagugucaucauuugaaagguuugagauauuccccaagacaaguucauggcccaaucaugacucgaacaaagguguaacggcagcauguccucaugcuggagcaaaaagcuucuacaaaaauuuaauauggcuaguuaaaaaaggaaauucauacccaaagcucagcaaauccuacauuaaugauaaagggaaagaaguccuagugcuauggggcauucaccauccaucuacuagugcugaccaacaaagucucuaucagaaugcagaugcauauguuuuuguggggacaucaagauacagcaagaaguucaagccggaaauagcaauaagacccaaagugaggaaucaagaagggagaaugaacuauuacuggacacuaguagagccgggagacaaaauaacauucgaagcaacuggaaaucuagugguaccgagauaugcauucgcaauggaaagaaaugcuggaucugguauuaucauuucagauacaccaguccacgauugcaauacaacuugucagacacccaagggugcuauaaacaccagccucccauuucagaauauacauccgaucacaauuggaaaauguccaaaauauguaaaaagcacaaaauugagacuggccacaggauugaggaauaucccgucuauucaaucuagaggccuauuuggggccauugccgguuucauugaagggggguggacagggaugguagauggaugguacgguuaucaccaucaaaaugagcaggggucaggauaugcagccgaccugaagagcacacagaaugccauugacgagauuacuaacaaaguaaauucuguuauugaaaagaugaauacacaguucacagcaguagguaaagaguucaaccaccuggaaaaaagaauagagaauuuaaauaaaaagguugaugaugguuuccuggacauuuggacuuacaaugccgaacuguugguucuauuggaaaaugaaagaacuuuggacuaccacgauucaaaugugaagaacuuauaugaaaagguaagaagccaguuaaaaaacaaugccaaggaaauuggaaacggcugcuuugaauuuuaccacaaaugcgauaacacgugcauggaaagugucaaaaaugggacuuaugacuacccaaaauacucagaggaagcaaaauuaaacagagaagaaauagaugggguaaagcuggaaucaacaaggauuuaccagauuuuggcgaucuauucaacugucgccaguucauugguacugguagucucccugggggcaaucaguuucuggaugugcuccaaugggucucuacaguguagaauauguauuuaa

SEQ ID NO: 36963 - RNA, 1701 nt, Artificial Sequence
  derived and/or modified CDS sequence (wt) from hemagglutinin__InfluenzaA__ADG59659
augaaggcaauacuaguaguucugcuauauacauuugcaaccgcaaaugcagacacauuauguauagguuaucaugcgaacaauucaacagacacuguagacacaguacuagaaaagaauguaacaguaacacacucuguuaaccuucuagaagacaagcauaacgggaaacuaugcaaacuaagagggguagccccauugcauuuggguaaauguaacauugcuggcuggauccugggaaauccagagugugaaucacucuccacagcaagcucaugguccuacauuguggaaacaucuaguucagacaauggaacguguuacccaggagauuucaucgauuaugaggagcuaagagagcaauugagcucagugucaucauuugaaagguuugagauauuccccaagacaaguucauggcccaaucaugacucgaacaaagguguaacggcagcauguccucaugcuggagcaaaaagcuucuacaaaaauuuaauauggcuaguuaaaaaaggaaauucauacccaaagcucagcaaauccuacauuaaugauaaagggaaagaaguccucgugcuauggggcauucaccauccaucuacuagugcugaccaacaaagucucuaucagaaugcagaugcauauguuuuuguggggacaucaagauacagcaagaaguucaagccggaaauagcaauaagacccaaagugagggaacaagaagggagaaugaacuauuacuggacacuaguagagccgggagacaaaauaacauucgaagcaacuggaaaucuagugguaccgagauaugcauucgcaauggaaagaaaugcuggaucugguauuaucauuucagauacaccaguccacgauugcaauacaacuugucagacacccaagggugcuauaaacaccagccucccauuucagaauauacauucgaucacaauuggaaaauguccaaaauauguaaaaagcacaaaauugagacuggccacaggauugaggaaugucccgucuauucaaucuagaggccuauuuggggccauugccgguuucauugaagggggguggacagggaugguagauggaugguacgguuaucaccaucaaaaugagcaggggucaggauaugcagccgaccugaagagcacacagaaugccauugacgagauuacuaacaaaguaaauucuguuauugaaaagaugaauacacaguucacagcaguagguaaagaguucaaccaccuggaaaaaagaauagagaauuuaaauaaaaaaguugaugaugguuuccuggacauuuggacuuacaaugccgaacuguugguucuauuggaaaaugaaagaacuuuggacuaccacgauucaaaugugaagaacuuauaugaaaagguaagaagccaguuaaaaaacaaugccaaggaaauuggaaacggcugcuuugaauuuuaccacaaaugcgauaacacgugcauggaaagugucaaaaaugggacuuaugacuacccaaaauacucagaggaagcaaaauuaaacagagaagaaauagaugggguaaagcuggaaucaacaaggauuuaccagauuuuggcgaucuauucaacugucgccaguucauugguacugguagucucccugggggcaaucaguuucuggaugugcuccaaugggucucuacaguguagaauauguauuuaa

SEQ ID NO: 36964 - RNA, 1701 nt, Artificial Sequence; identical to SEQ ID NO: 36963
  derived and/or modified CDS sequence (wt) from hemagglutinin__InfluenzaA__ADG59660

SEQ ID NO: 36965 - RNA, 1701 nt, Artificial Sequence
  derived and/or modified CDS sequence (wt) from hemagglutinin__InfluenzaA__ADG59662
augaaggcaauacuaguaguucugcuauauacauuugcaaccgcaaaugcagacacauuauguauagguuaucaugcgaacaauucaacagacacuguagacacaguacuagaaaagaauguaacaguaacacacucuguuaaccuucuagaagacaagcauaacgggaaacuaugcaaacuaagagggguagccccauugcauuuggguaaauguaacauugcuggcuggauccugggaaauccagagugugaaucacucuccacagcaagcucaugguccuacauuguggaaacaucuaguucagacaauggaacguguuacccaggagauuucaucgauuaugaggagcuaagagagcaauugagcucagugucaucauuugaaagguuugagauauuccccaagacaaguucauggcccaaucaugacucgaacaaagguguaacggcagcauguccucaugcuggagcaaaaagcuucuacaaaaauuuaauauggcuaguuaaaaaaggaaauucauacccaaagcucagcaaauccuacauuaaugauaaagggaaagaaguccucgugcuauggggcauucaccauccaucuacuagugcugaccaacaaagucucuaucagaaugcagaugcauauguuuuuguggggacaucaagauacagcaagaaguucaagccggaaauagcaauaagacccaaagugagggaacaagaagggagaaugaacuauuacuggacacuaguagagccgggagacaaaauaacauucgaagcaacuggaaaucuagugguaccgagauaugcauucgcaauggaaagaaaugcuggaucugguauuaucauuucagauacaccaguccacgauugcaauacaacuugucagacacccaaaggugcuauaaacaccagccucccauuucagaauauacauccgaucacaauuggaaaauguccaaaauauguaaaaagcacaaaauugagacuggccacaggauugaggaaugucccgucuauucaaucuagaggccuauuuggggccauugccgguuucauugaagggggguggacagggaugguagauggaugguacgguuaucaccaucaaaaugagcaggggucaggauaugcagccgaccugaagagcacacagaaugccauugacgagauuacuaacaaaguaaauucuguuauugaaaagaugaauacacaguucacagcaguagguaaagaguucaaccaccuggaaaaaagaauagagaauuuaaauaaaaaaguugaugaugguuuccuggacauuuggacuuacaaugccgaacuguugguucuauuggaaaaugaaagaacuuuggacuaccacgauucaaaugugaagaacuuauaugaaaagguaagaagccaguuaaaaaacaaugccaaggaaauuggaaacggcugcuuugaauuuuaccacaaaugcgauaacacgugcauggaaagugucaaaaaugggacuuaugacuacccaaaauacucagaggaagcaaaauuaaacagagaagaaauagaugggguaaagcuggaaucaacaaggauuuaccagauuuuggcgaucuauucaacugucgccaguucauugguacugguagucucccugggggcaaucaguuucuggaugugcuccaaugggucucuacaguguagaauauguauuuaa

SEQ ID NO: 36966 - RNA, 1701 nt, Artificial Sequence
  derived and/or modified CDS sequence (wt) from hemagglutinin__InfluenzaA__ADG59663
augaaggcaauacuaguaguucugcuauauacauuugcaaccgcaaaugcagacacauuauguauagguuaucaugcgaacaauucaacagacacuguagacacaguacuagaaaagaauguaacaguaacacacucuguuaaccuucuagaagacaagcauaacgggaaacuaugcaaacuaagagggguagccccauugcauuuggguaaauguaacauugcuggcuggauccugggaaauccagagugugaaucacucuccacagcaagcucaugguccuacauuguggaaacaucuaguucagacaauggaacguguuacccaggagauuucaucgauuaugaggagcuaagagagcaauugagcucagugucaucauuugaaagguuugagauauuccccaagacaaguucauggcccaaucaugacucgaacaaagguguaacggcagcauguccucaugcuggagcaaaaagcuucuacaaaaauuuaauauggcuaguuaaaaaaggaaauucauacccaaagcucagcaaauccuacauuaaugauaaagggaaagaaguccucgugcuauggggcauucaccauccaucuacuagugcugaccaacaaagucucuaucagaaugcagaugcauauguguuuguggggacaucaagauacagcaagaaguucaagccggaaauagcaauaagacccaaagugagggaucaagaagggagaaugaacuauuacuggacacuaguagaaccgggggacaaaauaacauucgaagcaacuggaaaucuagugguaccgagauaugcauucgcaauggaaagaaaugcuggaucugguauuaucauuucagauacaccauuccacgauugcaauacaacuugucagacacccaagggugcuauaaacaccagccucccauuucagaauauacauccgaucacaauuggaaaauguccaaaauauguaaaaagcacaaaauugagacuggccacaggauugaggaauaucccgucuauucaaucuagaggccuauuuggggccauugccgguuucauugaagggggguggacagggaugguagauggaugguacgguuaucaccaucaaaaugagcaggggucaggauaugcagccgaccugaagagcacacagaaugccauugacgagauuacuaacaaaguaaauucuguuauugaaaagaugaauacacaguucacagcaguagguaaagaguucaaccaccuggaaaaaagaauagagaauuuaaauaaaaagguugaugaugguuuccuggacauuuggacuuacaaugccgaacuguugguucuauuggaaaaugaaagaacuuuggacuaccacgauucaaaugugaagaacuuauaugaaaagguaagaagccaguuaaaaaacaaugccaaggaaauuggaaacggcugcuuugaauuuuaccacaaaugcgauaacacgugcauggaaagugucaaaaacgggacuuaugacuacccaaaauacucagaggaagcaaaauuaaacagagaagaaauagaugggguaaagcuggaaucaacaaggauuuaccagauuuuggcgaucuauucaacugucgccaguucauugguacugguagucucccugggggcaaucaguuucuggaugugcuccaaugggucucuacaguguagaauauguauuuaa

SEQ ID NO: 36967 - RNA, 1701 nt, Artificial Sequence
  derived and/or modified CDS sequence (wt) from hemagglutinin__InfluenzaA__ADG59664
augaaggcaauacuaguaguucugcuauauacauuugcaaccgcaaaugcagacacauuauguauagguuaucaugcgaacaauucaacagacacuguagacacaguacuagaaaagaauguaacaguaacacacucuguuaaccuucuagaagacaagcauaacgggaaacuaugcaaacuaagagggguagccccauugcauuuggguaaauguaacauugcuggcuggauccugggaaauccagagugugaaucacucuccacagcaagcucaugguccuacauuguggaaacaucuaguucagacaauggaacguguuacccaggagauuucaucgauuaugaggagcuaagagagcaauugagcucagugucaucauuugaaagguuugagauauuccccaagacaaguucauggcccaaucaugacucgaacaaagguguaacggcagcauguccucaugcuggagcaaaaagcuucuacaaaaauuuaauauggcuaguuaaaaaaggaaauucauacccaaagcucagcaaauccuacauuaaugauaaagggaaagaaguccucgugcuauggggcauccaccauccaucuacuagugcugaccaacaaagucucuaucagaaugcagaugcauauguuuuuguggggacaucaagauacagcaagaaguucaagccggaaauagcaauaagacccaaagugagggaacaagaagggagaaugaacuauuacuggacacuaguagagccgggagacaaaauaacauucgaagcaacuggaaaucuagugguaccgagauaugcauucgcaauggaaagaaaugcuggaucugguauuaucauuucagauacaccaguccacgauugcaauacaacuugucagacacccaagggugcuauaaacaccagccucccauuucagaauauacauccgaucacaauuggaaaauguccaaaauauguaaaaagcacaaaauugagacuggccacaggauugaggaaugucccgucuauucaaucuagaggccuauuuggggccauugccgguuucauugaagggggguggacagggaugguagauggaugguacgguuaucaccaucaaaaugagcaggggucaggauaugcagccgaccugaagagcacacagaaugccauugacgagauuacuaacaaaguaaauucuguuauugaaaagaugaauacacaguucacagcaguagguaaagaguucaaccaccuggaaaaaagaauagagaauuuaaauaaaaaaguugaugaugguuuccuggacauuuggacuuacaaugccgaacuguugguucuauuggaaaaugaaagaacuuuggacuaccacgauucaaaugugaagaacuuauaugaaaagguaagaagccaguuaaaaaacaaugccaaggaaauuggaaacggcugcuuugaauuuuaccacaaaugcgauaacacgugcauggaaagugucaaaaaugggacuuaugacuacccaaaauacucagaggaagcaaaauuaaacagagaagaaauagaugggguaaagcuggaaucaacaaggauuuaccagauuuuggcgaucuauucaacugucgccaguucauugguacugguagucucccugggggcaaucaguuucuggaugugcuccaaugggucucuacaguguagaauauguauuuaa

SEQ ID NO: 36968 - RNA, 1701 nt, Artificial Sequence
  derived and/or modified CDS sequence (wt) from hemagglutinin__InfluenzaA__ADG59666
augaaggcaauacuaguaguucugcuauauacauuugcaaccgcaaaugcagacacauuauguauagguuaucaugcgaacaauucaacagacacuguagacacaguacuagaaaagaauguaacaguaacacacucuguuaaccuucuagaagacaagcauaacgggaaacuaugcaaacuaagagggguagccccauugcauuuggguaaauguaacauugcuggcuggauccugggaaauccagagugugaaucacucuccacagcaagcucaugguccuacauuguggaaacaucuaguucagacaauggaacguguuacccaggagauuucaucgauuaugaggagcuaagagagcaauugagcucagugucaucauuugaaagguuugagauauuccccaagacaaguucauggcccaaucaugacucgaacaaagguguaacggcagcauguccucaugcuggagcaaaaagcuucuacaaaaauuuaauauggcuaguuaaaaaaggaaauucauacccaaagcucagcaaauccuacauuaaugauaaagggaaagaaguccucgugcuauggggcauucaccauccaucuacuagugcugaccaacaaagucucuaucagaaugcagaugcauauguuuuuguggggacaucaagauacagcaagaaguucaagccggaaauagcaauaagacccaaagugagggaucaagaagggagaaugaacuauuacuggacacuaguagagccgggagacaaaauaacauucgaagcaacuggaaaucuagugguaccgagauaugcauucgcaauggaaagagaugcuggaucugguauuaucauuucagauacaccaguccacgauugcaauacaacuugucagacacccaagggugcuauaaacaccagccucccauuucagaauauacauccgaucacaauuggaaaauguccaaaauauguaaaaagcacaaaauugagacuggccacaggauugaggaaugucccgucuauucaaucuagaggccuauuuggggccauugccgguuucauugaagggggguggacagggaugguagauggaugguacgguuaucaccaucaaaaugagcaggggucaggauaugcagccgaccugaagagcacacagaaugccauugacgagauuacuaacaaaguaaauucuguuauugaaaagaugaauacacaguucacagcaguagguaaagaguucaaccaccuggaaaaaagaauagagaauuuaaauaaaaaaauugaugaugguuuccuggacauuuggacuuacaaugccgaacuguugguucuauuggaaaaugaaagaacuuuggacuaccacgauucaaaugugaagaacuuauaugaaaagguaagaagccaguuaaaaaacaaugccaaggaaauuggaaacggcugcuuugaauuuuaccacaaaugcgauaacacgugcauggaaagugucaaaaaugggacuuaugacuacccaaaauacucagaggaagcaaaauuaaacagagaagaaauagaugggguaaagcuggaaucaacaaggauuuaccagauuuuggcgaucuauucagcugucgccaguucauugguacugguagucucccugggggcaaucaguuucuggaugugcuccaaugggucucuacaguguagaauauguauuuaa

SEQ ID NO: 36969 - RNA, 1701 nt, Artificial Sequence
  derived and/or modified CDS sequence (wt) from hemagglutinin__InfluenzaA__ADG59667
augaaggcaauacuaguaguucugcuauauacauuugcaaccgcaaaugcagacacauuaugcauagguuaucaugcgaacaauucaacagacacuguagacacaguacuagaaaagaauguaacaguaacacacucuguuaaccuucuagaagacaagcauaacgggaaacuaugcaaacuaagagggguagccccauugcauuuggguaaauguaacauugcuggcuggauccugggaaauccagagugugaaucacucuccacagcaagcucaugguccuacauuguggaaacaucuaguucaggcaauggaacguguuacccaggagauuucaucgauuaugaggagcuaagagagcaauugagcucagugucaucauuugaaagguuugagauauuccccaagacaaguucauggcccaaucaugacucgaacaaagguguaacggcagcauguccucaugcuggagcaaaaagcuucuacaaaaauuuaauauggcuaguuaaaaaaggaaacucauacccaaagcucagcaaauccuacauuaaugauaaagggaaagaaguccucgugcuauggggcauucaccauccaucuacuagugcugaccaacaaagucucuaucagaaugcagaugcauauguuuuuguggggacaucaagauacagcaagaaguucaagccggaaauagcaauaagacccaaagugagggaucaagaagggagaaugaacuauuacuggacacuaguagagccgggagacaaaauaacauucgaagcaacuggaaaucuagugguaccgagauaugcauucgcaauggaaagaaaugcuggaucugguauuaucauuucagauacaccaguccacgauugcaauacaacuugucagacacccaagggugcuauaaacaccagccucccauuucagaacauacauccgaucacaauuggaaaauguccaaaauauguaaaaagcacaaaauugagacuggccacaggauugaggaaugucccgucuauucaaucuagaggccuauuuggggccauugccgguuucauugaagggggguggacagggaugguagauggaugguacgguuaucaccaucaaaaugagcaggggucaggauaugcagccgaccugaagagcacacagaaugccauugacgagauuacuaacaaaguaaauucuguuauugaaaagaugaauacacaguucacagcaguagguaaagaguucaaccaccuggaaaaaagaauugagaauuuaaauaaaaaaguugaugaugguuuccuggacauuuggacuuacaaugccgaacuguugguucuauuggaaaaugaaagaacuuuggacuaccacgauucaaaugugaagaacuuauaugaaaagguaagaagccaguuaaaaaacaaugccaaggaaauuggaaacggcugcuuugaauuuuaccacaaaugcgacaacacgugcauggaaagugucaaaaaugggacuuaugacuacccaaaauacucagaggaagcaaaauuaaacagagaagaaauagaugggguaaagcuggaaucaacaaggauuuaccagauuuuggcgaucuauucaacugucgccaguucauugguacugguagucucccugggggcaaucaguuucuggaugugcuccaaugggucucuacaguguagaauauguauuuaa

SEQ ID NO: 36970 - RNA, 1701 nt, Artificial Sequence
  derived and/or modified CDS sequence (wt) from hemagglutinin__InfluenzaA__ADG59669
augaaggcaauacuaguaguucugcuauauacauuugcaaccgcaaaugcagacacauuauguauagguuaucaugcgaacaauucaacagacacuguagacacaguacuagaaaagaauguaacaguaacacacucuguuaaccuucuagaagacaagcauaacgggaaacuaugcaaacuaagagggguagccccauugcauuuggguaaauguaacauugcuggcuggauccugggaaauccagagugugaaucacucuccacagcaagcucaugguccuacauuguggaaacaucuaguucagacaauggaacguguuacccaggagauuucaucgauuaugaggagcuaagagagcaauugagcucagugucaucauuugaaagguuugagauauuccccaagacaaguucauggcccaaucaugacucgaacaaagguguaacggcagcauguccucaugcuggagcaaaaagcuucuacaaaaauuuaauauggcuaguuaaaaaaggaaauucauacccaaagcucagcaaauccuacauuaaugauaaagggaaagaaguccucgugcuauggggcauucaccauccaucuacuagugcugaccaacaaagucucuaucagaaugcagaugcauauguuuuuguggggacaucaagauacagcaagaaguucaagccggaaauagcaauaagacccaaagugagggaacaagaagggagaaugaacuauuacuggacacuaguagauccgggagacaaaauaacauucgaagcaacuggaaaucuagugguaccgagauaugcauucgcaauggaaagaaaugcuggaucugguauuaucauuucagauacaccaguccacgauugcaauacaacuugucagacacccaagggugcuauaaacaccagccucccauuucagaauauacauucgaucacaauuggaaaauguccaaaauauguaaaaagcacaaaauugagacuggccacaggauugaggaaugucccgucuauucaaucuagaggccuauuuggggccauugccgguuucauugaagggggauggacagggaugguagauggaugguacgguuaucaccaucaaaaugagcaggggucaggauaugcagccgaccugaagagcacacagaaugccauugacgagauuacuaacaaaguaaauucuguuauugaaaagaugaauacacaguucacagcaguagguaaagaguucaaccaccuggaaaaaagaauagagaauuuaaauaaaaaaguugaugaugguuuccuggacauuuggacuuacaaugccgaacuguugguucuauuggaaaaugaaagaacuuuggacuaccacgauucaaaugugaagaacuuauaugaaaagguaagaagccaguuaaaaaacaaugccaaggaaauuggaaacggcugcuuugaauuuuaccacaaaugcgauaacacgugcauggaaagugucaaaaaugggacuuaugacuacccaaaauacucagaggaagcaaaauuaaacagagaagaaauagaugggguaaagcuggaaucaacaaggauuuaccagauuuuggcgaucuauucaacugucgccaguucauugguacugguagucucccugggggcaaucaguuucuggaugugcuccaaugggucucuacaguguagaauauguauuuaa

SEQ ID NO: 36971 - RNA, 1701 nt, Artificial Sequence; identical to SEQ ID NO: 36970
  derived and/or modified CDS sequence (wt) from hemagglutinin__InfluenzaA__ADG59670

SEQ ID NO: 36972 - RNA, 1701 nt, Artificial Sequence; identical to SEQ ID NO: 36970
  derived and/or modified CDS sequence (wt) from hemagglutinin__InfluenzaA__ADG59671

SEQ ID NO: 36973 - RNA, 1701 nt, Artificial Sequence; identical to SEQ ID NO: 36970
  derived and/or modified CDS sequence (wt) from hemagglutinin__InfluenzaA__ADG59672

SEQ ID NO: 36974 - RNA, 1701 nt, Artificial Sequence
  derived and/or modified CDS sequence (wt) from hemagglutinin__InfluenzaA__ADG59673
augaaggcaauacuaguaguucugcuauauacauuugcaaccgcaaaugcagacacauuauguauagguuaucaugcgaacaauucaacagacacuguagacacaguacuagaaaagaauguaacaguaacacacucuguugaccuucuagaagacaagcauaacgggaaacuaugcaaacuaagagggguagccccauugcauuugggugaauguaacauugcuggcuggauccugggaaauccagagugugaaucacucuccacagcaagcucaugguccuacauuguggaaacaucuaguucagacaauggaacguguuacccaggagauuucaucgauuaugaggagcuaagagagcaauugagcucagugucaucauuugaaagguuugagauauuccccaagacaaguucauggcccaaucaugacucgaacaaagguguaacggcagcauguccucaugcuggagcaaaaagcuucuacaaaaauuugauauggcuaguuaaaaaaggaaauucauacccaaagcucagcaaauccuacauuaaugauaaagggaaagaaguccucgugcuauggggcauucaccauccaucuacuagugcugaccaacaaagucucuaucagaaugcagaugcauauguuuuuguggggacaucaagauacagcaagaaguucaagccggaaauagcaauaagacccaaagugagggaucaagaagggagaaugaacuauuacuggacacuaguagagccgggagacaaaauaacauucgaagcaacuggaaaucuaguuguaccgagauaugcauucgcaauggaaagaaacgcuggaucugguauuaucauuucagauacaccaguccacgauugcaauacaacuugucagacacccaagggugcuauaaacaccagccucccauuucagaauauacauccgaucacaauuggaaaauguccaaaauauguaaaaagcacaaaauugagacuggccacaggauugaggaaugucccgucuauucaaucuagaggccuauuuggggccauugccgguuucauugaagggggguggacagggaugguagauggaugguacgguuaucaccaucaaaaugagcaggggucaggauaugcagccgaucugaagagcacacagaaugccauugacgagauuacuaacaaaguaaauucuguuauugaaaagaugaauacacaguucacagcaguagguaaagaguucaaccaccuggaaaaaagaauagagaauuuaaauaaaaaaguugaugaugguuuccuggacauuuggacuuacaaugccgaacuguugguucuauuggaaaaugaaagaacuuuggacuaccacgauucaaaugugaagaacuuauaugaaaagguaagaagccaguuaaaaaacaaugccaaggaaauuggaaacggcugcuuugaauuuuaccacaaaugcgauaacacgugcauggaaagugucaaaaaugggacuuaugacuacccaaaauacucagaggaagcaaaauuaaacagagaagaaauagaugggguaaagcuggaaucaacaaggauuuaccagauuuuggcgaucuauucaacugucgccaguucauugguacugguagucucccugggggcaaucaguuucuggaugugcuccaaugggucucuacaguguagaauauguauuuaa

SEQ ID NO: 36975 - RNA, 1701 nt, Artificial Sequence
  derived and/or modified CDS sequence (wt) from hemagglutinin__InfluenzaA__ADG59674
augaaggcaauacuaguaguucugcuauauacauuugcaaccgcaaaugcagacacauuauguguagguuaucaugcgaacaauucaacagacacuguagacacaguacuagaaaagaauguaacaguaacacacucuguuaaccuucuagaagacaagcauaacgggaaacuaugcaaacuaagagggguagccccauugcauuuggguaaauguaacauugcuggcuggauccugggaaauccagagugugaaucacucuccacagcaagcucaugguccuacauuguggaaacaucuaguucagacaauggaacguguuacccaggagauuucaucgauuaugaggagcuaagagagcaauugagcucagugucaucauuugaaagguuugagauauuccccaagacaaguucauggcccaaucaugacucgaacaaagguguaacggcagcauguccucaugcuggagcaaaaagcuuuuacaaaaauuuaauauggcuaguuaaaaaaggaaauucauacccaaagcucagcaaauccuacauuaaugauaaagggaaagaaguccucgugcuauggggcauucaccauccaucuacuagugcugaccaacaaagucucuaucagaaugcagaugcauauguuuuuguggggacaucaagauacagcaagaaguucaagccggaaauagcaauaagacccaaagugagggaacaagaagggagaaugaacuauuacuggacacuaguagagccgggagacaaaauaacauucgaagcaacuggaaaucuagugguaccgagauaugcauucgcaauggaaagaaaugcuggaucugguauuaucauuucagauacaccaguccacgauugcaauacaacuugucagacacccaaaggugcuauaaacaccagccucccauuucagaauguacauccgaucacaauuggaaaauguccaaaauauguaaaaagcacaaaauugagacuggccacaggauugaggaaugucccgucuauucaaucuagaggccuauuuggggccauugccgguuucauugaagggggguggacagggaugguagauggaugguacgguuaucaccaucaaaaugagcaggggucaggauaugcagccgaccugaagagcacacagaaugccauugacgagauuacuaacaaaguaaauucuguuauugaaaagaugaauacacaguucacagcaguagguaaagaguucaaccaccuggaaaaaagaauagagaauuuaaauaaaaaaguugaugaugguuuccuggacauuuggacuuacaaugccgaacuguugguucuauuggaaaaugaaagaacuuuggacuaccacgauucaaaugugaagaacuuauaugaaaagguaagaagccaguuaaaaaacaaugccaaggaaauuggaaacggcugcuuugaauuuuaccacaaaugcgauaacacgugcauggaaagugucaaaaaugggacuuaugacuacccaaaauacucagaggaagcaaaauuaaacagagaagaaauagaugggguaaagcuggaaucaacaaagauuuaccagauuuuggcgaucuauucaacugucgccaguucauugguacugguagucucccugggggcaaucaguuucuggaugugcuccaaugggucucuacaguguagaauauguauuuaa

SEQ ID NO: 36976 - RNA, 1701 nt, Artificial Sequence
  derived and/or modified CDS sequence (wt) from hemagglutinin__InfluenzaA__ADG59675
augaaggcaauacuaguaguucugcuauauacauuugcaaccgcaaaugcagacacauuauguauagguuaucaugcgaacaauucaacagacacuguagacacaguacuagaaaagaauguaacaguaacacacucuguuaaccuucuagaagacaagcauaacgggaaacuaugcaaacuaagaggaguagccccauugcauuuggguaaauguaacauugcuggcuggauccugggaaauccagagugugaaucacucuccacagcaagcucaugguccuacauuguggaaacaucuaguucagacaauggaacguguuacccaggagauuucaucgauuaugaggagcuaagagagcaauugagcucagugucaucauuugaaagguuugagauauuccccaagacaaguucauggcccaaucaugacucgaacaaagguguaacggcagcauguccucaugcuggagcaaaaagcuucuacaaaaauuuaauauggcuaguuaaaaaaggaaauucauacccaaagcuuagcaaauccuacauuaaugauaaagggaaagaaguccucgugcuauggggcauucaccauccaucuacuagugcugaccaacaaagucucuaucagaaugcagaugcauauguuuuuguggggucaucaagauacagcaagaaguucaagccggaaauagcaauaagacccaaagugagggaucaagaagggagaaugaacuauuacuggacacuaguagagccgggagacaaaauaacauucgaagcaacuggaaaucuagugguaccgagauaugcauucgcaauggaaagaaaugcuggaucugguauuaucauuucagauacaccaguccacgauugcaauacaacuugucagacacccaauggugcuauaaacaccagccucccauuucauaauauacauccgaucacaauuggaaaauguccaaaauauguaaaaagcacaaaauugagacuggccacaggauugaggaaugucccgucuauucaaucuagaggccuauuuggggccauugccgguuucauugaagggggguggacagggaugguggauggaugguacgguuaucaccaucaaaaugagcaggggucaggauaugcagccgaccugaagagcacacagaaugccauugacgagauuacuaacaaaguaaauucuguuauugaaaagaugaauacacaguucacagcaguagguaaagaguucaaccaccuggaaaaaagaauagagaauuuaaauaaaaaaguugaugaugguuuccuggacauuuggacuuacaaugccgaacuguuaguucuauuggaaaaugaaagaacuuuggacuaccacgauucaaaugugaagaacuuguaugaaaagguaagaagccaguuaaaaaacaaugccaaggaaauuggaaacggcugcuuugaauuuuaccacaaaugcgauaacacgugcauggaaagugucaaaaaugggacuuaugacuaccccaaauacucagaggaagcaaaauuaaacagagaagaaauagaugggguaaagcuggaaucaacgaggauuuaccagauuuuggcgaucuauucaacugucgccaguucauugguacugguagucucccugggggcaaucaguuucuggaugugcuccaaugggucucuacaguguagaauauguauuuaa

SEQ ID NO: 36977 - RNA, 1701 nt, Artificial Sequence
  derived and/or modified CDS sequence (wt) from hemagglutinin__InfluenzaA__ADG59676
augaaggcaauacuaguaguucugcuauauacauuugcaaccgcaaaugcagacacauuauguauagguuaucaugcgaacaauucaacagacacuguagacacaguacuagaaaagaauguaacaguaacacacucuguuaaccuucuagaagacaagcauaacgggaaacuaugcaaacuaagagggguagccccauugcauuuggguaaauguaacauugcuggcuggauccugggaaauccagagugugaaucacucuccacagcaagcucaugguccuacauuguggaaacaucuaguucagacaauggaacguguuacccaggagauuucaucgauuaugaggagcuaagagagcaauugagcucagugucaucauuugaaagguuugagauauuccccaagacaaguucauggcccaaucaugacucgaacaaagguguaacggcagcauguccucaugcuggagcaaaaagcuucuacaaaaauuuaauauggcuaguuaaaaaaggaaauucauacccaaagcucagcaaauccuacauuaaugauaaagggaaagaaguccucgugcuauggggcauucaccauccaucuacuagugcugaccaacaaagucucuaucagaaugcagaugcauauguuuuuguggggacaucaagauacagcaagaaguucaagccggaaauagcaauaagacccaaagugagggaucaagaagggagaaugaacuauuacuggacacuaguagaaccgggagacaaaauaacauucgaagcaacuggaaaucuagugguaccgagauaugcauucgcaauggaaagaaaugcuggaucugguauuaucauuucagauacaccaguccacgauugcaaugcaacuugucagacacccaagggugcuauaaacaccagccucccauuucagaauauacauccgaucacaauuggaaaauguccaaaauauguaaaaagcacaaaauugagacuggccacaggauugaggaauaucccgucuauucaaucuagaggccuauuuggggccauugccgguuucauugaagggggguggacagggaugguagauggaugguacgguuaucaccaucaaaaugagcaggggucaggauaugcagccgaccugaagagcacacagaaugccauugacgagauuacuaacaaaguaaauucuguuauugaaaagaugaauacacaguucacagcaguagguaaagaguucaaccaccuggaaaaaaggauagagaauuuaaauaaaaagguugaugaugguuuccuggacauuuggacuuacaaugccgaacuguugguucuauuggaaaaugaaagaacuuuggacuaccacgauucaaaugugaagaacuuauaugaaaagguaagaagccaguuaaaaaacaaugccaaggaaauuggaaacggcugcuuugaauuuuaccacaaaugcgauaacacgugcauggaaagugucaaaaacgggacuuaugacuacccaaaauacucagaggaagcaaaauuaaacagagaagaaauagaugggguaaagcuggaaucaacaaggauuuaccagauuuuggcgaucuauucaacugucgccaguucauugguacugguagucucccugggggcaaucaguuucuggaugugcuccaaugggucucuacaguguagaauauguauuuaa

SEQ ID NO: 36978 - RNA, 1701 nt, Artificial Sequence
  derived and/or modified CDS sequence (wt) from hemagglutinin__InfluenzaA__ADG59678
augaaggcaauacuaguaguucugcuauauacauuugcaaccgcaaaugcagacacauuauguauagguuaucaugcgaacaauucaacagacacuguagacacaguacuagaaaagaauguaacaguaacacacucuguuaaccuucuagaagacaagcauaacgggaaacuaugcaaacuaagagggguagccccauugcauuuggguaaauguaacauugcuggcuggauccugggaaauccagagugugagucacucuccacagcaagcucaugguccuacauuguggaaacaucuaguucagacaauggaacguguuacccaggagauuucaucgauuaugaggagcuaagagagcaauugaguucagugucaucauuugaaagguuugagauauuccccaagacaaguucauggcccaaucaugacucgaacaaagguguaacggcagcauguccucaugcuggagcaaaaagcuucuacaaaaauuuaauauggcuaguuaaaaaaggaaauucauacccaaagcucagcaaauccuacauuaaugauaaagggaaagaaguccuagugcuauggggcauucaccauccaucuacuagugcugaccaacaaagucucuaucagaaugcagaugcauauguuuuuguggggacaucaagauacagcaagaaguucaagccggaaauagcaauaagacccaaagugagggaucaagaagggagaaugaacuauuacuggacacuaguagagccgggagacaaaauaacauucgaagcaacuggaaaucuagugguaccgagauaugcauucgcaauggaaagaaaugcuggaucugguauuaucauuucagauacaccaguccacgauugcaauacaacuugucagacacccaagggugcuauaaacaccagccucccauuucagaauauacauccgaucacaauuggaaaauguccaaaauauguaaaaagcacaaaauugagacuggccacaggauugaggaauaucccgucuauucaaucuagaggucuauuuggggccauugccgguuucauugaagggggguggacagggaugguagauggaugguacgguuaucaucaucaaaaugagcaggggucaggauaugcagccgaccugaagagcacacagaaugccauugacgagauuacuaacaaaguaaauucuguuauugaaaagaugaauacacaguucacagcaguagguaaagaguucaaccaccuggaaaaaagaauagagaauuuaaauaaaaagguugaugaugguuuccuggacauuuggacuuacaaugccgaacuguugguucuauuggaaaaugaaagaacuuuggacuaccacgauucaaaugugaagaacuuauaugaaaagguaagaagccaguuaaaaaacaaugccaaggaaauuggaaacggcugcuuugaauuuuaccacaaaugcgauaacacgugcauggaaagugucaaaaaugggacuuaugacuacccaaaauacucagaggaagcaaaauuaaacagagaagaaauagaugggguaaagcuggaaucaacaaggauuuaccagauuuuggcgaucuauucaacugucgccaguucauugguacugguagucucccugggggcaaucaguuucuggaugugcuccaaugggucucuacaguguagaauauguauuuaa

SEQ ID NO: 36979 - RNA, 1701 nt, Artificial Sequence
  derived and/or modified CDS sequence (wt) from hemagglutinin__InfluenzaA__ADG59680
augaaggcaauacuaguaguucugcuauauacauuugcaaccgcaaaugcagacacauuauguauagguuaucaugcgaacaauucaacagacacuguagacacaguacuagaaaagaauguaacaguaacacacucuguuaaccuucuagaagacaagcauaacgggaaacuaugcaaacuaagagggguagccccauugcauuuggguaaauguaacauugcuggcuggauccugggaaauccagagugugaaucacucuccacagcaagcucaugguccuacauuguggaaacaucuaguucagacaauggaacguguuacccaggagauuucaucgauuaugaggagcuaagagagcaauugagcucagugucaucauuugaaagguuugagauauuccccaagacaaguucauggcccaaucaugacucgaacaaagguguaacggcagcauguccucaugcuggagcaaaaagcuucuacaaaaauuuaauauggcuaguuaaaaaaggaaauucauacccaaagcucagcaaauccuacauuaaugauaaagggaaagaaguccuagugcuauggggcauucaccauccaucuacuagugcugaccaacaaagucucuaucagaaugcagaugcauauguuuuuguggggacaucaagauacagcaagaaguucaagccggaaauagcaauaagacccaaagugaggggucaagaagggagaaugaacuauuacuggacacuaguagagccgggagacaaaauaacauucgaagcaacuggaaaucuagugguaccgagauaugcauucgcaauggaaagaaaugcuggaucugguauuaucauuucagauacaccaguccacgauugcaauacaacuugucagacacccaagggugcuauaaacaccagccucccauuucagaauauacauccgaucacaauuggaaaauguccaaaauaugugaaaagcacaaaauugagacuggccacaggauugaggaauaucccgucuauucaaucuagaggccuauuuggggccauugccgguuucauugaagggggguggacagggaugguagauggaugguacgguuaucaccaucaaaaugagcaggggucaggauaugcagccgaccugaagagcacacagaaugccauugacgagauuacuaacaaaguaaauucuguuauugaaaagaugaauacacaguucacagcaguagguaaagaguucaaccaccuggaaaaaagaauagagaauuuaaauaaaaagguugaugaugguuuccuggacauuuggacuuacaaugccgaacuguugguucuauuggaaaaugaaagaacuuuggacuaccacgauucaaaugugaagaacuuauaugaaaagguaagaagccaguuaaaaaacaaugccaaggaaauuggaaacggcugcuuugaauuuuaccacaaaugcgauaacacgugcauggaaagugucaaaaaugggacuuaugacuacccaaaauacucagaggaagcaaaauuaaacagagaagaaauagaugggguaaagcuggaaucaacaaggauuuaccagauuuuggcgaucuauucaacugucgccaguucauugguacugguagucucccugggggcaaucaguuucuggaugugcuccaaugggucucuacaguguagaauauguauuuaa

SEQ ID NO: 36980 - RNA, 1701 nt, Artificial Sequence
  derived and/or modified CDS sequence (wt) from hemagglutinin__InfluenzaA__ADG59681
augaaggcaauacuaguaguucugcuauauacauuugcaaccgcaaaugcagacacauuauguauagguuaucaugcgaacaauucaacagacacuguagacacaguacuagaaaagaauguaacaguaacacacucuguuaaccuucuagaagacaagcauaacgggaaacuaugcaaacuaagagggguagccccauugcauuuggguaaauguaacauugcuggcuggauccugggaaauccagagugugaaucacucuccacagcaagcucaugguccuacauuguggaaacaucuaguucagacaauggaacguguuacccaggagauuucaucgauuaugaggagcuaagagagcaauugagcucagugucaucauuugaaagguuugagauauuccccaagacaaguucauggcccaaucaugacucgaacaaagguguaacggcagcauguccucaugcuggagcaaaaagcuucuacaaaaauuuaauauggcuaguuaaaaaaggaaauucauacccaaagcucagcaaauccuacauuaaugauaaagggaaagaaguccuagugcuauggggcauucaccauccaucuacuagugcugaccaacaaagucucuaucagaaugcagaugcauauguuuuugugggaacaucaagauacagcaagaaguucaagccggaaauagcaauaagacccaaagugaggggucaagaagggagaaugaacuauuacuggacacuaguagagccgggagacaaaauaacauucgaagcaacuggaaaucuagugguaccgagauaugcauucgcaauggaaagaaaugcuggaucugguauuaucauuucagauacaccaguccacgauugcaauacaacuugucagacacccaagggugcuauaaacaccagccucccauuucagaauauacauccgaucacaauuggaaaauguccaaaauauguaaaaagcacaaaauugagacuggccacaggauugaggaauaucccgucuauucaaucuagaggccuauuuggggccauugccgguuucauugaagggggguggacagggaugguagauggaugguacgguuaucaccaucaaaaugagcaggggucaggauaugcagccgaccugaagagcacacagaaugccauugacgagauuacuaacaaaguaaauucuguuauugaaaagaugaauacacaguucacagcaguagguaaagaguucaaccaccuggaaaaaagaauagagaauuuaaauaaaaagguugaugaugguuuccuggacauuuggacuuacaaugccgaacuguugguucuauuggaaaaugaaagaacuuuggacuaccacgauucaaaugugaagaacuuauaugaaaagguaagaagccaguuaaaaaacaaugccaaggaaauuggaaacggcugcuuugaauuuuaccacaaaugcgauaacacgugcauggaaagugucaaaaaugggacuuaugacuacccaaaauacucagaggaagcaaaauuaaacagagaagaaauagaugggguaaagcuggaaucaacaaggauuuaccagauuuuggcgaucuauucaacugucgccaguucauugguacugguagucucccugggggcaaucaguuucuggaugugcuccaaugggucucuacaguguagaauauguauuuaa

SEQ ID NO: 36981 - RNA, 1701 nt, Artificial Sequence
  derived and/or modified CDS sequence (wt) from hemagglutinin__InfluenzaA__ADG59683
augaaggcaauacuaguaguucugcuauauacauuugcaaucgcaaaugcagacacauuauguauagguuaucaugcgaacaauucaacagacacuguagacacaguacuaaaaaagaauguaacaguaacacacucuguuaaccuucuagaagacaagcauaacgggaaacuaugcaaacuaagagggguagccccauugcauuuggguaaauguaacauugcuggcuggauccugggaaauccagagugugaaucacucuccacagcaagcucaugguccuacauuguggaaacaucuaguucagacaauggaacguguuacccaggagauuucaucgauuaugaggagcuaagagagcaauugagcucagugucaucauuugaaagguuugagauauuccccaagacaaguucauggcccaaucaugacucgaacaaagguguaacggcagcauguccucaugcuggagcaaaaagcuucuacaaaaauuuaauauggcuaguuaaaaaaggaaauucauacccaaagcucagcaaauccuauauuaaugauaaagggaaagaaguccucgugcuauggggcauucaccauccaucuacuagugcugaccaacaaagucucuaucagaaugcagaugcauauguuuuuguggggacaucaagauacagcaagaaguucaagccggaaauagcaauaagacccaaagugagggaucaagaagggagaaugaacuauuacuggacacuaguagagccgggagacaaaauaacauucgaagcaacuggaaaucuagugguaccgagauaugcauucgcaauggaaagaaaugcuggaucugguauugucauuucagauacaccaguccacgauugcaauacaacuugucagacacccaagggugcuauaaacaccagccucccauuucagaauauacauccgaucacaauuggaaaauguccaaaauauguaaaaagcacaaaauugagacuggccacaggauugaggaaugucccgucuauucaaucuagaggccuauuuggggccauugccgguuucauugaagggggguggacagggaugguagauggaugguacgguuaucaccaucaaaaugagcaggggucaggauaugcagccgaccugaagagcacacagaaugccauugacgagauuacuaacaaaguaaauucuguuauugaaaagaugaauacacaguucacagcaguagguaaagaguucaaccaccuggaaaaaagaauagagaauuuaaauaaaaagguugaugaugguuuccuggacauuuggacuuacaaugcugaacuguugguucuauuggaaaaugaaagaacuuuggacuaccacgauucaaaugugaagaacuuauaugaaaagguaagaagccaguuaaaaaacaaugccaaggaaauuggaaacggcugcuuugaauuuuaccacaaaugcgauaacacgugcauggaaagugucaaaaaugggacuuaugacuacccaaaauacucagaggaagcaaaauuaaacagagaagaaauagaugggguaaagcuggaaucaacaaggauuuaccagauuuuggcgaucuauucaacugucgccaguucauugguacugguagucucccugggggcaaucaguuucuggaugugcuccaaugggucucuacaguguagaauauguauuuaa

SEQ ID NO: 36982 - RNA, 1701 nt, Artificial Sequence
  derived and/or modified CDS sequence (wt) from hemagglutinin__InfluenzaA__ADG59684
augaaggcaauacuaguaguucugcuauauacauuugcaaccgcaaaugcagacacauuauguauagguuaucaugcgaacaauucaacagacacuguagacacaguacuagaaaagaauguaacaguaacacacucuguuaaccuucuagaagacaagcauaacgggaaacuaugcaaacuaagagggguagccccauugcauuuggguaaauguaacauugcuggcuggauccugggaaauccagagugugagucacucuccacagcaagcucaugguccuacauuguggaaacaucuaguucagacaauggaacguguuacccaggagauuucaucgauuaugaggagcuaagagagcaauugaguucagugucaucauuugaaagguuugagauauuccccaagacaaguucauggcccaaucaugacucgaacaaagguguaacggcagcauguccucaugcuggagcaaaaagcuucuacaaaaauuuaauauggcuaguuaaaaaaggaaauucauacccaaagcucagcaaauccuacauuaaugauaaagggaaagaaguccuagugcuauggggcauucaccauccaucuacuagugcugaccaacaaagucucuaucagaaugcagaugcauauguuuuuguggggacaucaagauacagcaagaaguucaaaccggaaauagcaauaagacccaaagugagggaucaagaagggagaaugaacuauuacuggacacuaguagagccgggagacaaaauaacauucgaagcaacuggaaaucuagugguaccgagauaugcauucgcaauggaaagaaaugcuggaucugguauuaucauuucagauacaccaguccacgauugcaauacaacuugucagacacccaagggugcuauaaacaccagccucccauuucagaauauacauccgaucacaauuggaaaauguccaaaauauguaaaaagcacaaaauugagacuggccacaggauugaggaauaucccgucuauucaaucuagaggccuauuuggggccauugccgguuucauugaagggggguggacagggaugguagauggaugguacgguuaucaucaucaaaaugagcaggggucaggauaugcagccgaccugaagagcacacagaaugccauugacgagauuacuaacaaaguaaauucuguuauugaaaagaugaauacacaguucacagcaguagguaaagaguucaaccaccuggaaaaaagaauagagaauuuaaauaaaaagguugaugaugguuuccuggacauuuggacuuacaaugccgaacuguugguucuauuggaaaaugaaagaacuuuggacuaccacgauucaaaugugaagaacuuauaugaaaagguaagaagccaguuaaaaaacaaugccaaggaaauuggaaacggcugcuuugaauuuuaccacaaaugcgauaacacgugcauggaaagugucaaaaaugggacuuaugacuacccaaaauacucagaggaagcaaaauuaaacagagaagaaauagaugggguaaagcuggaaucaacaaggauuuaccagauuuuggcgaucuauucaacugucgccaguucauugguacugguagucucccugggggcaaucaguuucuggaugugcuccaaugggucucuacaguguagaauauguauuuaa

SEQ ID NO: 36983 - RNA, 1701 nt, Artificial Sequence
  derived and/or modified CDS sequence (wt) from hemagglutinin__InfluenzaA__ADG59685
augaaggcaauacuaguaguucugcuauauacauuugcaaccgcaaaugcagacacauuguguauagguuaucaugcgaacaauucaacagacacuauagacacaguacuagaaaagaauguaacaguaacacacucuguuaaccuucuagaagacaagcauaacgggaaacuaugcaaacuaagagggguagccccauugcauuuggguaaauguaacauugcuggcuggauccugggaaauccagagugugaaucacucuccacagcaagcucaugguccuacauuguggaaacaucuaguucagacaauggaacguguuacccaggagauuucaucgauuaugaggagcuaagagagcaauugagcucagugucaucauuugaaagguuugagauauuccccaagacaaguucauggcccaaucaugacucgaacaaagguguaacggcagcauguccucaugcuggagcaaaaagcuucuacaaaaauuuaauauggcuaguuaaaaaaggaaauucauacccaaagcucagcaaauccuacauuaaugauaaagggaaagaaguccuagugcuauggggcauucaccauccaucuacuagugcugaccaacaaagucucuaucagaaugcagaugcauauguuuuuguggggacaucaagauacagcaagaaguucaagccggaaauagcaauaagacccaaagugagggaucaagaagggagaaugaacuauuacuggacacuaguagagccgggagacaaaauaacauucgaagcaacuggaaaucuagugguaccgagauaugcauucgcaauggaaagaaaugcuggaucugguauuaucauuucagauacaccaguccacgauugcaauacaacuugucagacacccaagggugcuauaaacaccagccucccauuucagaauauacauccgaucacaauuggaaaauguccaaaauauguaaaaagcacaaaauugagacuggccacaggauugaggaauaucccgucuauucaaucuagaggccuauuuggggccauugccgguuucauugaagggggguggacagggaugguagauggaugguacgguuaucaccaucaaaaugagcaggggucaggauaugcagccgaccugaagagcacacagaaugccauugacgagauuacuaacaaaguaaauucuguuauugaaaagaugaauacacaguucacagcaguagguaaagaguucaaccaccuggaaaaaagaauagagaauuuaaauaaaaagguugaugaugguuuccuggacauuuggacuuacaaugccgaacuguugguucuauuggaaaaugaaagaacuuuggacuaccacgauucaaaugugaagaacuuauaugaaaagguaagaagccaguuaaaaaacaaugccaaggaaauuggaaacggcugcuuugaauuuuaccacaaaugcgauaacacgugcauggaaagugucaaaaaugggacuuaugacuacccaaaauacucagaggaagcaaaauuaaacagagaagaaauagaugggguaaagcuggaaucaacaaggauuuaccagauuuuggcgaucuauucaacugucgccaguucauugguacugguagucucccugggggcaaucaguuucuggaugugcuccaaugggucucuacaguguagaauauguauuuaa

SEQ ID NO: 36984 - RNA, 1701 nt, Artificial Sequence
  derived and/or modified CDS sequence (wt) from hemagglutinin__InfluenzaA__ADG59686
augaaggcaauacuaguaguucugcuauauacauuugcaaccgcaaaugcagacacauuauguauagguuaucaugcgaacaauucaacagacacuguagacacaguacuagaaaagaauguaacaguaacacacucuguuaaccuucuagaagacaagcauaacgggaaacuaugcaaacuaagagggguagccccauugcauuuggguaaauguaacauugcuggcuggauccugggaaauccagagugugaaucacucuccacagcaagcucaugguccuacauuguggaaacaucuaguucagacaauggaacguguuacccaggagauuucaucgauuaugaggagcuaagagagcaauugagcucagugucaucauuugaaagguuugagauauuccccaagacaaguucauggcccaaucaugacucgaacaaagguguaacggcagcauguccucaugcuggagcaaaaagcuucuacaaaaauuuaauauggcuaguuaaaaaaggaaauucauacccaaagcucagcaaauccuacauuaaugauaaagggaaagaaguccuagugcuauggggcauucaccauccaucuacuagugcugaccaacaaagucucuaucagaaugcagaugcauauguuuuuguggggacaucaagauacagcaagaaguucaagccggaaauagcaauaagacccaaagugagggaucaagaagggagaaugaacuauuacuggacacuaguagagccgggagacaaaauaacauucgaagcaacuggaaaucuagugguaccgagauaugcauucgcaauggaaagaaaugcuggaucugguauuaucauuucagauacaccaguccacgauugcaauacaacuugucagacacccaagggugcuauaaacaccagccucccauuucagaauauacauccgaucacaauuggaaaauguccaaaauaugugaaaagcacaaaauugagacuggccacaggauugaggaauaucccgucuauucaaucuagaggccuauuuggggccauugccgguuucauugaagggggguggacagggaugguagauggaugguacgguuaucaccaucaaaaugaacaggggucaggauaugcagccgaccugaagagcacacagaaugccauugacgagauuacuaacaaaguaaauucuguuauugaaaagaugaauacacaguucacagcaguagguaaagaguucaaccaccuggaaaaaagaauagagaauuuaaauaaaaagguugaugaugguuuccuggacauuuggacuuacaaugccgaacuguugguucuauuggaaaaugaaagaacuuuggacuaccacgauucaaaugugaagaacuuauaugaaaagguaagaagccaguuaaaaaacaaugccaaggaaauuggaaacggcugcuuugaauuuuaccacaaaugcgauaacacgugcauggaaagugucaaaaaugggacuuaugacuacccaaaauacucagaggaagcaaaauuaaacagagaagaaauagaugggguaaagcuggaaucaacaaggauuuaccagauuuuggcgaucuauucaacugucgccaguucauugguacugguagucucccugggggcaaucaguuucuggaugugcuccaaugggucucuacaguguagaauauguauuuaa

SEQ ID NO: 36985 - RNA, 1701 nt, Artificial Sequence
  derived and/or modified CDS sequence (wt) from hemagglutinin__InfluenzaA__ADG59687
augaaggcaauacuaguaguucugcuauauacauuugcaaccgcaaaugcagacacauuauguauagguuaucaugcgaacaauucaacagacacuguagacacaguacuagaaaagaauguaacaguaacacacucuguuaaccuucuagaagacaagcauaacgggaaacuaugcaaacuaagagggguagccccauugcauuuggguaaauguaacauugcuggcuggauccugggaaauccagagugugaaucacucuccacagcaagcucaugguccuacauuguggaaacaucuaguucagacaauggaacguguuacccaggagauuucaucgauuaugaggagcuaagagagcaauugagcucagugucaucauuugaaagguuugagauauuccccaagacaaguucauggcccaaucaugacucgaacaaagguguaacggcagcauguccucaugcuggagcaaaaagcuucuacaaaaauuuaauauggcuaguuaaaaaaggaaauucauacccaaagcucagcaaauccuacauuaaugauaaagggaaagaaguccucgugcuauggggcauucaccauccaucuacuagugcugaccaacaaagucucuaucagaaugcagaugcauauguuuuuguggggacaucaagauacagcaagaaguucaagccggaaauagcaauaagacccaaagugaggggucaagaagggagaaugaacuauuacuggacacuaguagaaccgggagacaaaauaacauucgaagcaacuggaaaucuagugguaccgagauaugcauucgcaauggaaagaaaugcuggaucugguauuaucauuucagauacaccaguccacgauugcaauacaacuugucagacacccaagggugcuauaaacaccagccucccauuucagaauauacauccgaucacaauuggaaaauguccaaaauauguaaaaagcacaaaauugagacuggccacaggauugaggaauaucccgucuauucaaucuagaggccuauuuggggccauugccgguuucauugaagggggguggacagggaugguagauggaugguacgguuaucaccaucaaaaugagcaggggucaggauaugcagccgaccugaagagcacacagaaugccauugaugagauuacuaacaaaguaaauucuguuauugaaaagaugaauacacaguucacagcaguagguaaagaguucaaccaccuggaaaaaagaauagagaauuuaaauaaaaagguugaugaugguuuccuggacauuuggacuuacaaugccgaacuguugguucuauuggaaaaugaaagaacuuuggacuaccacgauucaaaugugaagaacuuauaugaaaagguaagaagccaguuaaaaaacaaugccaaggaaauuggaaacggcugcuuugaauuuuaccacaaaugcgauaacacgugcauggaaagugucaaaaacgggacuuaugacuacccaaaauacucagaggaagcaaaauuaaacagagaagaaauagaugggguaaagcuggaaucaacaaggauuuaccagauuuuggcgaucuauucaacugucgccaguucauugguacugguagucucccugggggcaaucaguuucuggaugugcuccaaugggucucuacaguguagaauauguauuuaa

SEQ ID NO: 36986 - RNA, 1701 nt, Artificial Sequence
  derived and/or modified CDS sequence (wt) from hemagglutinin__InfluenzaA__ADG59688
augaaggcaauacuaguaguucugcuauauacaauugcaaccgcaaaugcagacacauuguguauagguuaucaugcgaacaauucaacagacacuauagacacaguacuagaaaagaauguaacaguaacacacucuguuaaccuucuagaagacaagcauaacgggaaacuaugcaaacuaagagggguagcccccuugcauuuggguaaauguaacauugcuggcuggauccugggaaauccagagugugaaucacucuccacagcaagcucaugguccuacauuguggaaacaucuaguucagacaauggaacguguuacccaggagauuucaucgauuaugaggagcuaagagagcaauugagcucagugucaucauuugaaagguuugagauauuccccaagacaaguucauggcccaaucaugacucgaacaaagguguaacggcagcauguccucaugcuggagcaaaaagcuucuacaaaaauuuaauauggcuaguuaaaaaaggaaauucauacccaaagcucagcaaauccuacauuaaugauaaagggaaagaaguccuagugcuauggggcauucaccauccaucuacuagugcugaccaacaaagucucuaucagaaugcagaugcauauguuuuuguggggacaucaagauacagcaagaaguucaagccggaaauagcaauaagacccaaagugaggggucaagaagggagaaugaacuauuacuggacacuaguagagccgggagacaaaauaacauucgaagcaacuggaaaucuagugguaccgagauaugcauucgcaauggaaagaaaugcuggaucugguauuaucauuucagauacaccaguccacgauugcaauacaacuugucagacacccaagggugcuauaaacaccagccucccauuucagaauauacauccgaucacaauuggaaaauguccaaaauauguaaaaagcacaaaauugagacuggccacaggauugaggaauaucccgucuauucaaucuagaggccuauuuggggccauugccgguuucauugaagggggguggacagggaugguagauggaugguacgguuaucaccaucaaaaugagcaggggucaggauaugcagccgaccugaagagcacacagaaugccauugacgagauuacuaacaaaguaaauucuguuauugaaaagaugaauacacaguucacagcaguagguaaagaguucaaccaccuggaaaaaagaauagagaauuuaaauaaaaagguugaugaugguuuccuggacauuuggacuuacaaugccgaacuguugguucuauuggaaaaugaaagaacuuuggacuaccacgauucaaaugugaagaacuuauaugaaaagguaagaagccaguuaaaaaacaaugccaaggaaauuggaaacggcugcuuugaauuuuaccacaaaugcgauaacacgugcauggaaagugucaaaaaugggacuuaugacuacccaaaauacucagaggaagcaaaauuaaacagagaagaaauagaugggguaaagcuggaaucaacaaggauuuaccagauuuuggcgaucuauucaacugucgccaguucauugguacugguagucucccugggggcaaucaguuucuggaugugcuccaaugggucucuacaguguagaauauguauuuaa

SEQ ID NO: 36987 - RNA, 1701 nt, Artificial Sequence
  derived and/or modified CDS sequence (wt) from hemagglutinin__InfluenzaA__ADG59689
augaaggcaauacuaguaguucugcuauauacauuugcaaccgcaaaugcagacacauuauguauagguuaucaugcgaacaauucaacagacacuguagacacaguacuagaaaagaauguaacaguaacacacucuguuaaccuucuagaagacaagcauaacgggaaacuaugcaaacuaagagggguagccccauugcauuuggguaaauguaacauugcuggcuggauccugggaaauccagagugcgaaucacucuccacagcaagcucaugguccuacauuguggaaacaucuaguucagacaauggaacguguuacccaggagauuucaucgauuaugaggagcuaagagagcaauugagcucagugucaucauuugaaagguuugagauauuccccaagacaaguucauggcccaaucaugacucgaacaaagguguaacggcagcauguccucaugcuggagcaaaaagcuucuacaaaaauuuaauauggcuaguuaaaaaagggaauucauacccaaagcucagcaaauccuacauuaaugauaaagggaaagaaguccucgugcuauggggcauucaccauccaucuacuagugcugaccaacaaagucucuaucagaaugcagaugcauauguuuuuguggggacaucaagauacagcaagaaguucaagccggaaauagcaauaagacccaaagugagggaucaagaagggagaaugaacuauuacuggacacuaguagagccgggagacaaaauaacauucgaagcaacuggaaaucuagugguaccgagauaugcauucgcaauggaaagaaaugcuggaucugguauuaucauuucagauacaccaguccacgauugcaauacaacuugucagacacccaagggugcuauaaacaccagccucccauuucagaauauacauccgaucacaauuggaaaauguccaaaauauguaaaaagcacaaaauugagacuggccacaggguugaggaaugucccgucuauucaaucuagaggccuauuuggggccauugccgguuucauugaagggggguggacagggaugguagauggaugguacgguuaucaccaucaaaaugagcaggggucaggauaugcagccgaccugaagagcacacagaaugccauugacgagauuacuaacaaaguaaauucuguuauugaaaagaugaauacacaguucacagcaguagguaaagaguucaaccaccuggaaaaaagaauagagaauuuaaauaaaaaaguugaugaugguuuccuggacauuuggacuuacaaugccgaacuguugguucuauuggaaaaugaaagaacuuuggacuaccacgauucaaaugugaagaacuuauaugaaaagguaagaagccaguuaaaaaacaaugccaaggaaauuggaaacggcugcuuugaauuuuaccacaaaugcgauaacacgugcauggaaagugucaaaaaugggacuuaugacuacccaaaauacucagaggaagcaaaauuaaacagagaagaaauagaugggguaaagcuggaaucaacaaggauuuaccagauuuuggcgaucuauucaacugucgccaguucauugguacugguagucucccugggggcaaucaguuucuggaugugcuccaaugggucucuacaguguagaauauguauuuaa

SEQ ID NO: 36988 - RNA, 1701 nt, Artificial Sequence
  derived and/or modified CDS sequence (wt) from hemagglutinin__InfluenzaA__ADG59691
augaaggcaauacuaguaguucugcuauauacauuugcaaccgcaaaugcagacacauuauguauagguuaucaugcgaacaauucaacagacacuguagacacaguacuagaaaagaauguaacaguaacacacucuguuaaccuucuagaagacaagcauaacgggaaacuaugcaaacuaagagggguagccccauugcauuuggguaaauguaacauugcuggcuggauccugggaaauccagagugugaaucacucuccacagcaagcucaugguccuacauuguggaaacaucuaguucagacaauggaacguguuacccaggagauuucaucgauuaugaggagcuaagagagcaauugagcucagugucaucauuugaaagguuugagauauuccccaagacaaguucauggcccaaucaugacucgaacaaagguguaacggcagcauguccucaugcuggagcaaaaagcuucuacaaaaauuuaauauggcuaguuaaaaaaggaaauucauacccaaagcucagcaaauccuacauuaaugauaaagggaaagaaguccucgugcuauggggcauucaccauccaucuacuagugcugaccaacaaagucucuaucagaaugcagaugcauauguuuuuguggggacaucaagauacagcaagaaguucaagccggaaauagcaauaagacccaaagugagggaucaagaagggagaaugaacuauuacuggacacuaguagagccgggagacaaaauaacauucgaagcaacuggaaaucuagugguaccgagauaugcauucgcaauggaaagaaaugcuggaucugguauuaucauuucagauacaccaguccacgauugcaauacaacuugucagacacccaagggugcuauaaacaccagccucccauuucagaauauacauccgaucacaauuggaaaauguccaaaauauguaaaaagcacaaaauugagacuggccacaggauugaggaaugucccgucuauucaaucuagaggccuauuuggggccauugccgguuucauugaagggggguggacagggaugguagauggaugguacgguuaucaccaucaaaaugagcaggggucaggauaugcagccgaccugaagagcacacaaaaugccauugacgagauuacuaacaaaguaaauucuguuauugaaaagaugaauacacaguucacagcaguagguaaagaguucaaccaccuggaaaaaagaauagagaauuuaaauaaaaagguugaugaugguuuccuggacauuuggacuuacaaugccgaacuguugguucuauuggaaaaugaaagaacuuuggacuaccacgauucaaaugugaagaacuuauaugaaaagguaagaagccaguuaaaaaacaaugccaaggaaauuggaaacggcugcuuugaauuuuaccacaaaugcgauaacacgugcauggaaagugucaaaaaugggacuuaugacuacccaaaauacucagaggaagcaaaauuaaacagagaagaaauagaugggguaaagcuggaaucaacaaggauuuaccagauuuuggcgaucuauucaacugucgccaguucauugguacugguagucucccugggggcaaucaguuucuggaugugcuccaaugggucucuacaguguagaauauguauuuaa

SEQ ID NO: 36989 - RNA, 1701 nt, Artificial Sequence
  derived and/or modified CDS sequence (wt) from hemagglutinin__InfluenzaA__ADG59693
augaaggcaauacuaguaguucugcuauauacauuugcaaccgcaaaugcagacacauuauguauagguuaucaugcgaacaauucaacagacacuguagacacaguacuagaaaagaauguaacaguaacacacucuguuaaccuucuagaagacaagcauaacgggaaacuaugcaaacuaagagggguagccccauugcauuuggguaaauguaacauugcuggcuggauccugggaaauccagagugugagucacucuccacagcaagcucaugguccuacauuguggaaacaucuaguucagacaauggaacguguuacccaggagauuucaucgauuaugaggagcuaagagagcaauugaguucagugucaucauuugaaagguuugagauauuccccaagacaaguucauggcccaaucaugacucgaacaaagguguaacggcagcauguccucaugcuggagcaaaaagcuucuacaaaaauuuaauauggcuaguuaaaaaaggaaauucauacccaaagcucagcaaauccuacauuaaugauaaagggaaagaaguccuagugcuauggggcauucaccauccaucuacuagugcugaccaacaaagucucuaucagaaugcagaugcauauguuuuuguggggacaucaagauacagcaagaaguucaagccggaaauagcaauaagacccaaagugaggaaucaagaagggagaaugaacuauuacuggacacuaguagagccgggagacaaaauaacauucgaagcaacuggaaaucuagugguaccgagauaugcauucgcaauggaaagaaaugcuggaucugguauuaucauuucagauacaccaguccacgauugcaauacaacuugucagacacccaagggugcuauaaacaccagccucccauuucagaauauacauccgaucacaauuggaaaauguccaaaauauguaaaaagcacaaaauugagacuggccacaggauugaggaauaucccgucuauucaaucuagaggccuauuuggggccauugccgguuucauugaagggggguggacagggaugguagauggaugguacgguuaucaucaucaaaaugagcaggggucaggauaugcagccgaccugaagagcacacagaaugccauugacgagauuacuaacaaaguaaauucuguuauugaaaagaugaauacacaguucacagcaguagguaaagaguucaaccaccuggaaaaaagaauagagaauuuaaauaaaaagguugaugaugguuuccuggacauuuggacuuacaaugccgaacuguugguucuauuggaaaaugaaagaacuuuggacuaccacgauucaaaugugaagaacuuauaugaaaagguaagaagccaguuaaaaaacaaugccaaggaaauuggaaacggcugcuuugaauuuuaccacaaaugcgauaacacgugcauggaaagugucaaaaaugggacuuaugacuacccaaaauacucagaggaagcaaaauuaaacagagaagaaauagaugggguaaagcuggaaucaacaaggauuuaccagauuuuggcgaucuauucaacugucgccaguucauugguacugguagucucccugggggcaaucaguuucuggaugugcuccaaugggucucuacaguguagaauauguauuuaa

SEQ ID NO: 36990 - RNA, 1701 nt, Artificial Sequence
  derived and/or modified CDS sequence (wt) from hemagglutinin__InfluenzaA__ADG59696
augaaggcaauacuaguaguucugcuauauacauuugcaaccgcaaaugcagacacauuauguauagguuaucaugcgaacaauucaacagacacuguagacacaguacuagaaaagaauguaacaguaacacacucuguuaaccuucuagaagacaagcauaacgggaaacuaugcaaacuaagagggguagccccauugcauuuggguaaauguaacauugcuggcuggauccugggaaauccagagugugaaucacucuccacagcaagcucaugguccuacauuguggaaacaucuaguucagacaauggaacguguuacccaggagauuucaucgauuaugaggagcuaagagagcaauugagcucagugucaucauuugaaagguuugagauauuccccaagacaaguucauggcccaaucaugacucgaacaaagguguaacggcagcauguccucaugcuggagcaaaaagcuucuacaaaaauuuaauauggcuaguuaaaaaaggaaauucauacccaaagcucagcaaauccuacauuaaugauaaagggaaagaaguccucgugcuauggggcauucaccauccaucuacuagugcugaccaacaaagucucuaucagaaugcagaugcauauguuuuuguggggacaucaagauacagcaagaaguucaagccggaaauagcaauaagacccaaagugagggaacaagaagggagaaugaacuauuacuggacacuaguagagccgggagacaaaauaacauucgaagcaacuggaaaucuagugguaccgagauaugcauucgcaauggaaagagaugcuggaucugguauuaucauuucagauacaccaguccacgauugcaauacaacuugucagacacccaagggugcuauaaacaccagccucccauuucagaauauacauccgaucacaauuggaaaauguccaaaauauguaaaaagcacaaaauugagacuggccacaggauugaggaaugucccgucuauucaaucuagaggccuauuuggggccauugccgguuucauugaagggggguggacagggaugguagauggaugguacgguuaucaccaucaaaaugagcaggggucaggauaugcagccgaccugaagagcacacagaaugccauugacgagauuacuaacaaaguaaauucuguuauugaaaagaugaauacacaguucacagcaguagguaaagaguucaaccaccuggaaaaaagaauagagaauuuaaauaaaaaaguugaugaugguuuccuggacauuuggacuuacaaugccgaacuguugguucuauuggaaaaugaaagaacuuuggacuaccacgauucaaaugugaagaacuuauaugaaaagguaagaagccaguuaaaaaacaaugccaaggaaauuggaaacggcugcuuugaauuuuaccacaaaugcgauaacacgugcauggaaagugucaaaaaugggacuuaugacuacccaaaauacucagaggaagcaaaauuaaacagagaagaaauagaugggguaaagcuggaaucaacaaggauuuaccagauuuuggcgaucuauucaacugucgccaguucauugguacugguagucucccugggggcaaucaguuucuggaugugcuccaaugggucucuacaguguagaauauguauuuaa

SEQ ID NO: 36991 - RNA, 1701 nt, Artificial Sequence
  derived and/or modified CDS sequence (wt) from hemagglutinin__InfluenzaA__ADG59697
augaaggcaauacuaguaguucugcuauauacauuugcaaccgcaaaugcagacacauuauguauagguuaucaugcgaacaauucaacagacacuguagacacaguacuagaaaagaauguaacaguaacacacucuguuaaccuucuagaagacaagcauaacgggaaacuaugcaaacuaagagggguagccccauugcauuuggguaaauguaacauugcuggcuggauccugggaaauccagagugugaaucacucuccacagcaagcucaugguccuacauuguggaaacaucuaguucagacaauggaacguguuacccaggagauuucaucgauuaugaggagcuaagagagcaauugagcucagugucaucauuugaaagguuugagauauuccccaagacaaguucauggcccaaucaugacucgaacaaagguguaacggcagcauguccucaugcuggagcaaaaaacuucuacaaaaauuuaauauggcuaguuaaaaaaggaaauucauacccaaagcucagcaaauccuacauuaaugauaaagggaaagaaguccucgugcuauggggcauucaccauccaucuacuagugcugaccaacaaagucucuaucagaaugcagaugcauauguuuuuguggggacaucaagauacagcaagaaguucaagccggaaauagcaauaagacccaaagugaggggucaagaagggagaaugaacuauuacuggacacuaguagagccgggagacaaaauaacauucgaagcaacuggaaaucuagugguaccgagauaugcauucgcaauggaaagaaaugcuggaucugguauuaucauuucagauacaccaguccacgauugcaauacaacuugucagacacccaagggugcuauaaacaccagccucccauuucagaauauacauccgaucacaauuggaaaauguccaaaauauguaaaaagcacaaaauugagacuggccacaggauugaggaaugucccgucuauucaaucuagaggccuauuuggggccauugccgguuucauugaagggggguggacagggaugguagauggaugguacgguuaucaccaucaaaaugagcaggggucaggauaugcagccgaccugaagagcacacaaaaugccauugacgagauuacuaacaaaguaaauucuguuauugaaaagaugaauacacaguucacagcaguagguaaagaguucaaccaccuggaaaaaagaauagagaauuuaaauaaaaagguugaugaugguuuccuggacauuuggacuuacaaugccgaacuguugguucuauuggaaaaugaaagaacuuuggacuaccacgauucaaaugugaagaacuuauaugaaaagguaagaagccaguuaaaaaacaaugccaaggaaauuggaaacggcugcuuugaauuuuaccacaaaugcgauaacacgugcauggaaagugucaaaaaugggacuuaugacuacccaaaauacucagaggaagcaaaauuaaacagagaagaaauagaugggguaaagcuggaaucaacaaggauuuaccagauuuuggcgaucuauucaacugucgccaguucauugguacugguagucucccugggggcaaucaguuucuggaugugcuccaaugggucucuacaguguagaauauguauuuaa

SEQ ID NO: 36992 - RNA, 1701 nt, Artificial Sequence
  derived and/or modified CDS sequence (wt) from hemagglutinin__InfluenzaA__ADG59700
augaaggcaauacuaguaguucugcuauauacauuugcaaccgcaaaugcagacacauuauguauagguuaucaugcgaacaauucaacagacacuguagacacaguacuagaaaagaauguaacaguaacacacucuguuaaccuucuagaagacaagcauaacgggaaacuaugcaaacuaagagggguagccccauugcauuuggguaaauguaacauugcuggcuggauccugggaaauccagagugugaaucacucuccacagcaagcucaugguccuacauuguggaaacaucuaguucagacaauggaacguguuacccaggagauuucaucgauuaugaggagcuaagagagcaauugagcucagugucaucauuugaaagguuugagauauuccccaagacaaguucauggcccaaucaugacucgaacaaagguguaacggcagcauguccucaugcuggagcaaaaagcuucuacaaaaauuuaauauggcuaguuaaaaaaggaaauucauacccaaagcucagcaaauccuacauuaaugauaaagggaaagaaguccuagugcuauggggcauucaccauccaucuacuagugcugaccaacaaagucucuaucagaaugcagaugcauauguuuuuguggggacaucaagauacagcaagaaguucaagccggaaauagcaauaagacccaaagugagggaucaagaagggagaaugaacuauuacuggacacuaguagagccgggagacaaaauaacauucgaagcaacuggaaaucuagugguaccgagauaugcauucgcaauggaaagaaaugcuggaucugguauuaucauuucagauacaccaguccacgauugcaauacaacuugucagacacucaagggugcuauaaacaccagccucccauuucagaauauacauccgaucacaauuggaaaauguccaaaauauguaaaaagcacaaaauugagacuggccacaggauugaggaauaucccgucuauucaaucuagaggccuauuuggggccauugccgguuucauugaagggggguggacagggaugguagauggaugguacgguuaucaccaucaaaaugagcaggggucaggauaugcagccgaccugaagagcacacagaaugccauugacgagauuacuaacaaaguaaauucuguuauugaaaagaugaauacacaguucacagcaguagguaaagaguucaaccaccuggaaaaaagaauagagaauuuaaauaaaaagguugaugaugguuuccuggacauuuggacuuacaaugccgaacuguugguucuauuggaaaaugaaagaacuuuggacuaccacgauucaaaugugaagaacuuauaugaaaagguaagaagccaguuaaaaaacaaugccaaggaaauuggaaacggcugcuuugaauuuuaccacaaaugcgauaacacgugcauggaaagugucaaaaaugggacuuaugacuacccaaaauacucagaggaagcaaaauuaaacagagaagaaauagaugggguaaagcuggaaucaacaaggauuuaccagauuuuggcgaucuauucaacugucgccaguucauugguacugguagucucccugggggcaaucaguuucuggaugugcuccaaugggucucuacaguguagaauauguauuuaa

SEQ ID NO: 36993 - RNA, 1701 nt, Artificial Sequence
  derived and/or modified CDS sequence (wt) from hemagglutinin__InfluenzaA__ADG59701
augaaggcaauacuaguaguucugcuauauacauuugcagccgcaaaugcagacacauuauguauagguuaucaugcgaacaauucaacagacacuguagacacaguacuagaaaagaauguaacaguaacacacucuguuaaccuucuagaagacaagcauaacgggaaacuaugcaaacuaagagggguagccccauugcauuuggguaaauguaacauugcuggcuggauccugggaaauccagagugugaaucacucuccacagcaagcucaugguccuacauuguggaaacaucuaguucagacaauggaacguguuacccaggagauuucaucgauuaugaggagcuaagagagcaauugagcucagugucaucauuugaaagguuugagauauuccccaagacaaguucauggcccaaucaugacucgaacaaagguguaacggcagcauguccucaugcuggagcaaaaagcuucuacaaaaauuuaauauggcuaguuaaaaaaggaaauucauacccaaagcucagcaaauccuacauuaaugauaaagggaaagaaguccucgugcuauggggcauucaccauccaucuacuagugcugaccaacaaagucucuaucagaaugcagaugcauauguuuuuguggggacaucaagauacagcaagaaguucaagccggaaauagcaauaagacccaaagugagggaucaagaagggagaaugaacuauuacuggacacuaguagagccgggagacaaaauaacauucgaagcaacuggaaaucuagugguaccgagauaugcauuugcaauggaaagaaaugcuggaucugguauuaucauuucagauacaccaguccacgauugcaauacaacuugucagacacccaagggugcuauaaacaccagccucccauuucagaauauacauccgaucacaauuggaaaauguccaaaauauguaaaaagcacaaaauugagacuggccacaggauugaggaaugucccgucuauucaaucuagaggccuauuuggggccauugccgguuucauugaagggggguggacagggaugguagauggaugguacgguuaucaccaucaaaaugagcaggggucaggauaugcagccgaccugaagagcacacagaaugccauugacaagauuacuaacaaaguaaauucuguuauugaaaagaugaauacacaguucacagcaguagguaaagaguucaaccaccuggaaaaaagaauagagaauuuaaauaaaaaaguugaugaugguuuccuggacauuuggacuuacaaugccgaacuguugguucuauuggaaaaugaaagaacuuuggacuaccacgauucaaaugugaagaacuuauaugaaaagguaagaagccaguuaaaaaacaaugccaaggaaauuggaaacggcugcuuugaauuuuaccacaaaugcgacaacacgugcauggaaagugucaaaaaugggacuuaugacuacccaaaauacucagaggaagcaaaauuaaacagagaagaaauagaugggguaaagcuggaaucaacaaggauuuaccagauuuuggcgaucuauucaacugucgccaguucauugguacugguagucucccugggggcaaucaguuucuggaugugcuccaaugggucucuacaguguagaauauguauuuaa

SEQ ID NO: 36994 - RNA, 1701 nt, Artificial Sequence
  derived and/or modified CDS sequence (wt) from hemagglutinin__InfluenzaA__ADG59702
augaaggcaauacuaguaguucugcuauauacauuugcaaccgcaaaugcagacacauuauguauagguuaucaugcgaacaauucaacagacacuguagacacaguacuagaaaagaauguaacaguaacacacucuguuaaccuucuagaagacaagcauaacgggaaacuaugcaaacuaagagggguagccccauugcauuuggguaaauguaacauugcuggcuggauccugggaaauccagagugugaaucacucuccacagcaagcucaugguccuacauuguggaaacaucuaguucagacaauggaacguguuacccaggagauuucaucgauuaugaggagcuaagagagcaauugagcucagugucaucauuugaaagguuugagauauuccccaagacaaguucauggcccaaucaugacucgaacaaaggaguaacggcagcauguccucaugcuggagcaaaaagcuucuacaaaaauuuaauauggcuaguuaaaaaaggaaauucauacccaaagcucagcaaauccuacauuaaugauaaagggaaagaaguccucgugcuauggggcauucaccauccaucuacuagugcugaccaacaaagucucuaucagaaugcagaugcauauguuuuuguggggacaucaagauacagcaagaaguucaagccggaaauagcaauaagacccaaagugagggaucaagaagggagaaugaacuauuacuggacacuaguagaaccgggggacaaaauaacauucgaagcaacuggaaaucuagugguaccgagauaugcauucgcaauggaaagaaaugcuggaucugguauuaucauuucagauacaccaguccacgauugcaauacaacuugucagacacccaagggugcuauaaacaccagccucccauuucagaauauacauccgaucacaauuggaaaauguccaaaauauguaaaaagcacaaaauugagacuggccacaggauugaggaauaucccgucuauucaaucuagaggccuauuuggggccauugccgguuucauugaagggggguggacagggaugguagauggaugguacgguuaucaccaucaaaaugagcaggggucaggauaugcagccgaccugaagagcacacagaaugccauugacgagauuacuaacaaaguaaauucuguuauugaaaagaugaauacacaguucacagcaguagguaaagaguucaaccaccuggaaaaaagaauagagaauuuaaauaaaaagguugaugaugguuuccuggacauuuggacuuacaaugccgaacuguugguucuauuggaaaaugaaagaaauuuggacuaccacgauucaaaugugaagaacuuauaugaaaagguaagaagccaguuaaaaaacaaugccaaggaaauuggaaacggcugcuuugaauuuuaccacaaaugcgauaacacgugcauggaaagugucaaaaacgggacuuaugacuacccaaaauacucagaggaagcaaaauuaaacagagaagaaauagaugggguaaagcuggaaucaacaaggauuuaccagauuuuggcgaucuauucaacugucgccaguucauugguacugguagucucccugggggcaaucaguuucuggaugugcucuaaugggucucuacaguguagaauauguauuuaa

SEQ ID NO: 36995 - RNA, 1701 nt, Artificial Sequence
  derived and/or modified CDS sequence (wt) from hemagglutinin__InfluenzaA__ADG59703
augaaggcaauacuaguaguucugcuauauacauuugcaaccgcaaaugcagacacauuauguauagguuaucaugcgaacaauucaacagacacuguagacacaguacuagaaaagaauguaacaguaacacacucuguuaaccuucuagaagacaagcauaacgggaaacuaugcaaacuaagagggguagccccauugcauuuggguaaauguaacauugcuggcuggauccugggaaauccagagugugaaucacucuccacagcaagcucaugguccuacauuguggaaacaucuaguucagacaauggaacguguuacccaggagauuucaucgauuaugaggagcuaagagagcaauugagcucagugucaucauuugaaagguuugagauauuccccaagacaaguucauggcccaaucaugacccgaacaaagguguaacggcagcauguccucaugcuggagcaaaaagcuucuacaaaaauuuaauauggcuaguuaaaaaaggaaauucauacccaaagcucagcaaauccuacauuaaugauaaagggaaagaaguccucgugcuauggggcauucaccauccaucuacuagugcugaccaacaaagucucuaucaaaaugcagaugcauauguuuuuguggggacaucaagauacagcaagaaguucaagccggaaauagcaauaagacccaaagugagggaucaagaagggagaaugaacuauuacuggacacuaguagagccgggagacaaaauaacauucgaagcaacuggaaaucuagugguaccgagauaugcauucgcaauggaaagaaaugcuggaucugguauugucauuucagauacaccaguccacgauugcaauacaacuugucagacacccaagggugcuauaaacaccagccucccauuucagaauauacauccgaucacaauuggaaaauguccaaaauauguaaaaagcacaaaauugagacuggccacaggauugaggaaugucccgucuauucaaucuagaggccuauuuggggccauugccgguuucauugaagggggguggacagggaugguagauggaugguacgguuaucaccaucaaaaugaacaggggucaggauaugcagccgaccugaagagcacacagaaugccauugacgagauuacuaacaaaguaaauucuguuauugaaaagaugaauacacaguucacagcaguagguaaagaguucaaccaccuggaaaaaagaauagagaauuuaaauaaaaaaguugaugaugguuuccuggacauuuggacuuacaaugccgaacuguugguucuauuggaaaaugaaagaacuuuggacuaccacgauucaaaugugaagaacuuauaugaaaagguaagaagccaguuaaaaaacaaugccaaggaaauuggaaacggcugcuuugaauuuuaccacaaaugcgauaacacgugcauggaaagugucaaaaaugggacuuaugacuacccaaaauacucagaggaagcaaaauuaaacagagaagaaauagaugggguaaagcuggaaucaacaaggauuuaccagauuuuggcgaucuauucaacugucgccaguucauugguacugguagucucccugggggcaaucaguuucuggaugugcuccaaugggucucuacaguguagaauauguauuuaa

SEQ ID NO: 36996 - RNA, 1701 nt, Artificial Sequence; identical to SEQ ID NO: 34696
  derived and/or modified CDS sequence (wt) from hemagglutinin__InfluenzaA__ADG76646

SEQ ID NO: 36997 - RNA, 1701 nt, Artificial Sequence
  derived and/or modified CDS sequence (wt) from hemagglutinin__InfluenzaA__ADG76652
augaaggcaauacuaguaguucugcuauauacauuugcaaccgcaaaugcagacacauuauguauagguuaucaugcgaacaauucaacagacacuguagacacaguacuagaaaagaauguaacaguaacacacucuguuaaccuucuagaagacaagcauaacgggaaacuaugcaaacuaagagggguagccccauugcauuuggguaaauguaacauugcuggcuggauccugggaaauccagagugugaaucauucuccacaucaagcucaugguccuacauuguggaaacaccuaguucagacaauggaacguguuacccaggagauuucaucgauuaugaggagcuaagagagcaauugagcucagugucaucauuugaaagguuugagauauuccccaagacaaguucauggcccaaucaugacucgaacaaagguguaacggcagcauguccucaugcuggagcaaaaagcuucuacaaaaauuuaauauggcuaguuaaaaaaggaaauucauacccaaagcucagcaaauccuacauuaaugauaaagggaaagaaguccucgugcuauggggcauucaccauccaucuacuagugcugaccaacaaagucucuaucagaaugcagauacauauguuuuuguggggucaucaagauacagcaagaaguucaagccggaaauagcaauaagacccaaagugagggaucaagaagggagaaugaacuauuacuggacacuaguagagccgggagacaaaauaacauucgaagcaacuggaaaucuagugguaccgagauaugcauucgcaauggaaagaaaugcuggaucugguauuaucauuucagauacaccaguccacgauugcaauacaacuugucaaacacccaagggugcuauaaacaccagccucccauuucagaauauacauccgaucacaauuggaaaauguccaaaauauguaaaaagcacaaaauugagacuggccacaggauugaggaauaucccgucuauucaaucuagaggccuauuuggggccauugccgguuucauugaagggggguggacagggaugguagauggaugguacgguuaucaccaucaaaaugagcaggggucaggauaugcagccgaccugaagagcacacagaaugccauugacgagauuacuaacaaaguaaauucuguuauugaaaagaugaauacacaguucacagcaguagguaaagaguucaaccaccuggaaaaaagaauagagaauuuaaauaaaaaaguugaugaugguuuccuggacauuuggacuuacaaugccgaacuguugguucuauuggaaaaugaaagaacuuuggacuaccacgauucaaaugugaagaacuuauaugaaaagguaagaagccagcuaaaaaacaaugccaaggaaauuggaaacggcugcuuugaauuuuaccacaaaugcgauaacacgugcauggaaagugucaaaaaugggacuuaugacuacccaaaauacucagaggaagcaaaauuaaacagagaagaaauagaugggguaaagcuggaaucaacaaggauuuaccagauuuuggcgaucuauucaacugucgccaguucauugguacugguagucucccugggggcaaucaguuucuggaugugcucuaaugggucucuacaguguagaauauguauuuaa

SEQ ID NO: 36998 - RNA, 1701 nt, Artificial Sequence
  derived and/or modified CDS sequence (wt) from hemagglutinin__InfluenzaA__ADH01808
auggaggcaauacuaguaguucugcuauauacauuugcaaccgcaaaugcagacacauuauguauagguuaucaugcgaacaauucaacagacacuguagacacaguacuagaaaagaauguaacaguaacacacucuguuaaccuucuagaagacaagcauaaugggaaacuaugcaaacuaagagggguagccccauugcauuuggguaaauguaacauugcuggcuggauccugggaaauccagagugugaaucacucuccacagcaagcucaugguccuacauuguggaaacaucuaguucagacaauggaacguguuacccaggagauuucaucgauuaugaggagcuaagagagcaauugagcucagugucaucauuugaaagguuugagauauuccccaagacaaguucauggcccaaucaugacucgaacaaagguguaacggcagcauguccucaugcuggagcaaaaagcuucuacaaaaauuuaauauggcuaguuaaaaaaggaaauucauacccaaagcucagcaaauccuacauuaaugauaaagggaaagaaguccucgugcuauggggcauucaccauccaucuacuagugcugaccaacaaagucucuaucagaaugcagaugcauauguuuuuguggggucaucaagauacagcaagaaguucaagccggaaauagcaauaagacccaaagugagggaucaggaagggagaaugaacuauuacuggacacuaguagagccgggagacaaaauaacauucgaagcaacuggaaaucuagugguaccgagauaugcauucgcaauggaaagaaaugcuggaucugguauuaucauuucagauacaccaguccacgauugcaauacaacuugucagacacccaagggugcuauaaacaccagccucccauuucauaauauacauccgaucacaauuggaaaauguccaaaauauguaaaaagcacaaaauugagacuggccacaggauugaggaaugucccgucuauucaaucuagaggccuauuuggggccauugccgguuucauugaagggggguggacagggaugguagauggaugguacgguuaucaccaucaaaaugagcaggggucaggauaugcagccgaccugaagagcacacagaaugccauugacgagauuacuaacaagguaaauucuguuauugaaaagaugaauacacaguucacagcaguagguaaagaguucaaccaccuggaaaaaagaauagagaauuuaaauaaaaaaguugaugaugguuuccuggacauuuggacuuacaaugccgaacuguugguucuauuggaaaaugaaagaacuuuggacuaccacgauucaaaugugaagaacuuauaugaaaagguaagaagccaguuaaaaaacaaugccaaggaaauuggaaacggcugcuuugaauuuuaccacaaaugcgauaacacgugcauggaaagugucaaaaaugggacuuaugacuacccaaaauacucagaggaagcaaaauuaaacagagaagaaauagaugggguaaagcuggaaucaacaaggauuuaccagauuuuggcgaucuauucaacugucgccaguucauugguacugguagucucccugggggcaaucaguuucuggaugugcucuaaugggucucuacaguguagaauauguauuuaa

SEQ ID NO: 36999 - RNA, 1701 nt, Artificial Sequence
  derived and/or modified CDS sequence (wt) from hemagglutinin__InfluenzaA__ADH01818
augaaggcaauacuaguaguucugcuauauacauuugcaaccgcaaaugcagacacauuauguauagguuaucaugcgaacaauucaacagacacuguagacacaguacuagaaaagaauguaacaguaacacacucuguuaaccuucuagaagacaagcauaacgggaaacuaugcaaacuaagagggguagccccauugcauuuggguaaauguaacauugcuggcuggauccugggaaauccagagugugaaucacucuccacagcaagcucaugguccuacauuguggaaacaucuaguucagacaauggaacguguuacccaggagauuucaucgauuaugaggagcuaagagagcaauugagcucagugucaucauuugaaagguuugagauauuccccaagacaaguucauggcccaaucaugacucgaacaaagguguaacggcagcauguccucaugcuggagcaaaaagcuucuacaaaaauuuaauauggcuaguuaaaaaaggaaauucauacccaaagcucagcaaauccuacauuaaugauaaagggaaagaaguccucgugcuauggggcauucaccauccaucuacuagugcugaccaacaaagucucuaucagaaugcagaugcauauguuuuuguggggacaucaagauacagcaagaaguucaagccggaaauagcaauaagacccaaagugagggaucaagaagggagaaugaacuauuacuggacacuaguagagccgggagacaaaauaacauucgaagcaacuggaaaucuagugguaccgagauaugcauucgcaauggaaagaaaugcuggaucugguauuaucauuucagauacaccaguccacgauugcaauacaacuugucagacacccaagggugcuauaaacaccagccucccauuucagaauauacauccgaucacaauuggaaaauguccaaaauauguaaaaagcacaaaauugagacuggccacaggauugaggaaugucccgucuauucaaucuagaggccuauuuggggccauugccgguuucauugaagggggguggacagggaugguagauggaugguacgguuaucaccaucaaaaugagcaggggucaggauaugcagccgaccugaagagcacacagaaugccauugacgagauuacuaacaaaguaaauucuguuauugaaaagaugaauacacaguucacagcaguagguaaagaguucaaccaccuggaaaaaagaauagagaauuuaaauaaaaaaguugaugaugguuuccuggacauuuggacuuacaaugccgaacuguugguucuauuggaaaaugaaagaacuuuggacuaccacgauucaaaugugaagaacuuauaugaaaagguaagaagccaguuaaaaaacaaugccaaggaaauuggaaacggcugcuuugaauuuuaccacaaaugcgauaacacgugcauggaaagugucaaaaaugggacuuaugacuacccaaaauacucagaggaagcaaaauuaaacagagaagaaauagaugggguaaagcuggaaucaacaaggauuuaccagauuuuggcgaucuauucaacugucgccaguucauugguacugauagucucccugggggcaaucaguuucuggaugugcucuaaugggucucuacaguguagaauauguauuuaa

SEQ ID NO: 37000 - RNA, 1701 nt, Artificial Sequence; identical to SEQ ID NO: 34965
  derived and/or modified CDS sequence (wt) from hemagglutinin__InfluenzaA__ADH01828

SEQ ID NO: 37001 - RNA, 1701 nt, Artificial Sequence
  derived and/or modified CDS sequence (wt) from hemagglutinin__InfluenzaA__ADH01838
augaaggcaauacuaguaguucugcuauauacauuugcaaccgcaaaugcagacacauuauguauagguuaucaugcgaacaauucaacagacacuguagacacaguacuagaaaagaauguaacaguaacacacucuguuaaccuucuagaagacaagcauaacgggaaacuaugcaaacuaagagggguagccccauugcauuuggguaaauguaacauugcuggcuggauccugggaaauccagagugugaaucacucuccacagcaagcucaugguccuacauuguggaaacaucuaguucagacaauggaacguguuacccaggagauuucaucgauuaugaggagcuaagagagcaauugagcucagugucaucauuugaaagguuugagauauuccccaagacaaguucauggcccaaucaugacucgaacaaagguguaacggcagcauguccucaugcuggagcaaaaagcuucuacaaaaauuuaauauggcuaguuaaaaaaggaaauucauacccaaagcucaguaaauccuacauuaaugauaaagggaaagaaguccucgugcuauggggcauucaccauccaucuacuagugcugaccaacaaagucucuaucagaaugcagaugcauauguuuuuguggggacaucaagauacagcaagaaguucaagccggaaauagcaauaagacccaaagugagggaucaagaagggagaaugaacuauuacuggacacuaguagagccgggagacaaaauaacauucgaagcaacuggaaaucuagugguaccgagauaugcauucgcaauggaaagaaaugcuggaucugguauuaucauuucagauacaccaguccacgauugcaauacaacuugucagacacccaagggugcuauaaacaccagccucccauuucagaauauacauccgaucacaauuggaaaauguccaaaauauguaaaaagcacaaaauugagacuggccacaggauugaggaaugucccgucuauucaaucuagaggccuauuuggggccauugccgguuucauugaagggggguggacagggaugguagauggaugguacgguuaucaccaucaaaaugagcaggggucaggauaugcagccgaccugaagagcacacagaaugccauugacgagauuacuaacaaaguaaauucuguuauugaaaagaugaauacacaguucacagcaguagguaaagaguucaaccaccuggaaaaaagaauagagaauuuaaauaaaaaaguugaugaugguuuccuggacauuuggacuuacaaugccgaacuguugguucuauuggaaaaugaaagaacuuuggacuaccacgauucaaaugugaagaacuuauaugaaaagguaagaagccaguuaaaaaacaaugccaaggaaauuggaaacggcugcuuugaauuuuaccacaaaugcgauaacacgugcauggaaagugucaaaaaugggacuuaugacuacccaaaauacucagaggaagcaaaauuaaacagagaagaaauagaugggguaaagcuggaaucaacaaggauuuaccagauuuuggcgaucuauucaacugucgccaguucauugguacugguagucucccugggggcaaucaguuucuggaugugcucuaaugggucucuacaguguagaauauguauuuaa

SEQ ID NO: 37002 - RNA, 1701 nt, Artificial Sequence; identical to SEQ ID NO: 34965
  derived and/or modified CDS sequence (wt) from hemagglutinin__InfluenzaA__ADH01848

SEQ ID NO: 37003 - RNA, 1701 nt, Artificial Sequence; identical to SEQ ID NO: 34965
  derived and/or modified CDS sequence (wt) from hemagglutinin__InfluenzaA__ADH01858

SEQ ID NO: 37004 - RNA, 1701 nt, Artificial Sequence
  derived and/or modified CDS sequence (wt) from hemagglutinin__InfluenzaA__ADH01868
augaaggcaauacuaguaguucugcuauauacauuugcaaccgcaaaugcagacacauuauguauagguuaucaugcgaacaauucaacagacacuguagacacaguacuagaaaagaauguaacaguaacacacucuguuaaccuucuagaagacaagcauaacgggaaacuaugcaaacuaagagggguagccccauugcauuuggguaaauguaacauugcuggcuggauccugggaaauccagagugugaaucacucuccacagcaagcucaugguccuacauuguggaaacaucuaguucagacaauggaacguguuacccaggagauuucauugauuaugaggagcuaagagagcaauugagcucagugucaucauuugaaagguuugagauauuccccaagacaaguucauggcccaaucaugacucgaacaaagguguaacggcagcauguccucaugcuggagcaaaaagcuucuacaaaaauuuaauauggcuaguuaaaaaaggaaauucauacccaaagcucagcaaauccuacauuaaugauaaagggaaagaaguccucgugcuauggggcauucaccauccaucuacuagugcugaccaacaaagucucuaucagaaugcagaugcauauguuuuuguggggacaucaagauacagcaagaaguucaagccggaaauagcaauaagacccaaagugagggaucaagaagggagaaugaacuauuacuggacacuaguagagccgggagacaaaauaacauucgaagcaacuggaaaucuagugguaccgagauaugcauucgcaauggaaagaaaugcuggaucugguauuaucauuucagauacaccaguccacgauugcaauacaacuugucagacacccaagggugcuauaaacaccagccucccauuucagaauauacauccgaucacaauuggaaaauguccaaaauauguaaaaagcacaaaauugagacuggccacaggauugaggaaugucccgucuauucaaucuagaggccuauuuggggccauugccgguuucauugaagggggguggacagggaugguagauggaugguacgguuaucaccaucaaaaugagcaggggucaggauaugcagccgaccugaagagcacacagaaugccauugacgagauuacuaacaaaguaaauucuguuauugaaaagaugaauacacaguucacagcaguagguaaagaguucaaccaccuggaaaaaagaauagagaauuuaaauaaaaaaguugaugaugguuuccuggacauuuggacuuacaaugccgaacuguugguucuauuggaaaaugaaagaacuuuggacuaccacgauucaaaugugaagaacuuauaugaaaagguaagaagccaguuaaaaaacaaugccaaggaaauuggaaacggcugcuuugaauuuuaccacaaaugcgauaacacgugcauggaaagugucaaaaaugggacuuaugacuacccaaaauacucagaggaagcaaaauuaaacagagaagaaauagaugggguaaagcuggaaucaacaaggauuuaccagauuuuggcgaucuauucaacugucgccaguucauugguacugguagucucccugggggcaaucaguuucuggaugugcucuaaugggucucuacaguguagaauauguauuuaa

SEQ ID NO: 37005 - RNA, 1701 nt, Artificial Sequence; identical to SEQ ID NO: 34681
  derived and/or modified CDS sequence (wt) from hemagglutinin__InfluenzaA__ADH01878

SEQ ID NO: 37006 - RNA, 1701 nt, Artificial Sequence
  derived and/or modified CDS sequence (wt) from hemagglutinin__InfluenzaA__ADH01888
auggaggcaauacuaguaguucugcuauauacauuugcaaccgcaaaugcagacacauuauguauagguuaucaugcgaacaauucaacagacacuguagacacaguacuagaaaagaauguaacaguaacacacucuguuaaccuucuagaagacaagcauaacgggaaacuaugcaaacuaagagggguagccccauugcauuuggguaaauguaacauugcuggcuggauccugggaaauccagagugugaaucacucuccacagcaagcucaugguccuacauuguggaaacaucuaguucagacaauggaacguguuacccaggagauuucaucgauuaugaggagcuaagagagcaauugagcucagugucaucauuugaaagguuugagauauuccccaagacaaguucauggcccaaucaugacucgaacaaagguguaacggcagcauguccucaugcuggagcaaaaagcuucuacaaaaauuuaauauggcuaguuaaaaaaggaaauucauacccaaagcucagcaaauccuacauuaaugauaaagggaaagaaguccucgugcuauggggcauucaccauccaucuacuagugcugaccaacaaagucucuaucagaaugcagaugcauauguuuuuguggggucaucaagauacagcaagaaguucaagccggaaauugcaauaagacccaaagugagggaucaagaagggagaaugaacuauuacuggacacuaguagagccgggagacaaaauaacauucgaagcaacuggaaaucuagugguaccgagauaugcauucgcaauggaaagaaaugcuggaucugguauuaucauuucagauacaccaguccacgauugcaauacaacuugucagacacccaagggugcuauaaacaccagccucccauuucauaauauacauccgaucacaauuggaaaauguccaaaauauguaaaaagcacaaaauugagacuggccacaggauugaggaaugucccgucuauucaaucuagaggccuauuuggggccauugccgguuucauugaagggggguggacagggaugguagauggaugguacgguuaucaccaucaaaaugagcaggggucaggauaugcagccgaccugaagagcacacagaaugccauugacgagauuacuaacaaaguaaauucuguuauugaaaagaugaauacacaguucacagcaguagguaaagaguucaaccaccuggaaaaaagaauagagaauuuaaauaaaaaaguugaugaugguuuccuggacauuuggacuuacaaugccgaacuguugguucuauuggaaaaugaaagaacuuuggacuaccacgauucaaaugugaagaacuuauaugaaaagguaagaagccaguuaaaaaacaaugccaaggaaauuggaaacggcugcuuugaauuuuaccacaaaugcgauaacacgugcauggaaagugucaaaaaugggacuuaugacuacccaaaauacucagaggaagcaaaauuaaacagagaagaaauagaugggguaaagcuggaaucaacaaggauuuaccagauuuuggcgaucuauucaacugucgccaguucauugguacugguagucucccugggggcaaucaguuucuggaugugcucuaaugggucucuacaguguagaauauguauuuaa

SEQ ID NO: 37007 - RNA, 1701 nt, Artificial Sequence; identical to SEQ ID NO: 34681
  derived and/or modified CDS sequence (wt) from hemagglutinin__InfluenzaA__ADH01898

SEQ ID NO: 37008 - RNA, 1701 nt, Artificial Sequence; identical to SEQ ID NO: 34772
  derived and/or modified CDS sequence (wt) from hemagglutinin__InfluenzaA__ADH01908

SEQ ID NO: 37009 - RNA, 1701 nt, Artificial Sequence
  derived and/or modified CDS sequence (wt) from hemagglutinin__InfluenzaA__ADH01918
augaaggcaauacuaguaguucugcuauauacauuugcaaccgcaaaugcagacacauuauguauagguuaucaugcgaacaauucaacagacacuguagacacaguacuagaaaagaauguaacaguaacacacucuguuaaccuucuagaagacaagcauaacgggaaacuaugcaaacuaagagggguagccccauugcauuuggguaaauguaacauugcuggcuggauccugggaaauccagagugugaaucacucuccacagaaagcucaugguccuacauuguggaaacaucuaguucagacaauggaacguguuacccaggagauuucaucgauuaugaggagcuaagagagcaauugagcucagugucaucauuugaaagguuugagauauuccccaagacaaguucauggcccaaucaugacucgaacaaagguguaacggcagcauguccucaugcuggagcaaaaagcuucuacaaaaauuuaauauggcuaguuaaaaaaggaaauucauacccaaagcucagcaaauccuacauuaaugauaaagagaaagaaguccucgugcuauggggcauucaccauccaucuacuagugcugaccaacaaagucucuaucagaaugcagaugcauauguuuuuguggggacaucaagauacagcaagaaguucaagccggaaauagcaauaagacccaaagugagggaucaagaagggagaaugaacuauuacuggacacuaguagagccgggagacaaaauaacauucgaagcaacuggaaaucuagugguaccgagauaugcauucgcaauggaaagaaaugcuggaucugguauuaucauuucagauacaccaguccacgauugcaauacaacuugucagacacccaagggugcuauaaacaccagccucccauuucagaauauacauccgaucacaauuggaaaauguccaaaauauguaaaaagcacaaaauugagacuggccacaggauugaggaaugucccgucuauucaaucuagaggccuauuuggggccauugccgguuucauugaagggggguggacagggaugguagauggaugguacgguuaucaccaucaaaaugagcaggggucaggauaugcagccgaccugaagagcacacagaaugccauugacaagauuacuaacaaaguaaauucuguuauugaaaagaugaauacacaguucacagcaguagguaaagaguucaaccaccuggaaaaaagaauagagaauuuaaauaaaaaaguugaugaugguuuccuggacauuuggacuuacaaugccgaacuguugguucuauuggaaaaugaaagaacuuuggacuaccacgauucaaaugugaagaacuuauaugaaaagguaagaagccaguuaaaaaacaaugccaaggaaauuggaaacggcugcuuugaauuuuaccacaaaugcgauaacacgugcauggaaagugucaaaaaugggacuuaugacuacccaaaauacucagaggaagcaaaauuaaacagagaagaaauagaugggguaaagcuggaaucaacaaggauuuaccagauuuuggcgaucuauucaacugucgccaguucauugguacugguagucucccugggggcaaucaguuucuggaugugcucuaaugggucucuacaguguagaauauguauuuaa

SEQ ID NO: 37010 - RNA, 1701 nt, Artificial Sequence
  derived and/or modified CDS sequence (wt) from hemagglutinin__InfluenzaA__ADH01928
augaaggcaauacuaguaguucugcuauauacauuugcaaccgcaaaugcagacacauuauguauagguuaucaugcgaacaauucaacagacacuguagacacaguacuagaaaagaauguaacaguaacacacucuguuaaccuucuagaagacaagcauaacgggaaacuaugcaaacuaagagggguagccccauugcauuuggguaaauguaacauugcuggcuggauccugggaaauccagagugugaaucacucuccacagcaagcucaugguccuacauuguggaaacaucuaguucagacaauggaacguguuacccaggagauuucaucgauuaugaggagcuaagagagcaauugagcucagcgucaucauuugaaagguuugagauauuccccaagacaaguucauggcccaaucaugacucgaacaaagguguaacggcagcauguccucaugcuggagcaaaaagcuucuacaaaaauuuaauauggcuaguuaaaaaaggaaauucauacccaaagcucagcaaauccuacauuaaugauaaagggaaagaaguccuagugcuauggggcauucaccauccaucuacuagugcugaccaacaaagucucuaucagaaugcagaugcauauguuuuuguggggacaucaagauacagcaagaaguucaagccggaaauagcaauaagacccaaagugagggaucaagaagggagaaugaacuauuacuggacacuaguagagccgggagacaaaauaacauucgaagcaacuggaaaucuagugguaccgagauaugcauucgcaauggaaagaaaugcuggaucugguauuaucauuucagauacaccaguccacgauugcaauacaacuugucagacacccaagggugcuauaaacaccagccucccauuucagaauauacauccgaucacaauuggaaaauguccaaaauauguaaaaagcacaaaauugagacuggccacaggauugaggaauaucccgucuauucaaucuagaggccuauuuggggccauugccgguuucauugaagggggguggacagggaugguagauggaugguacgguuaucaccaucaaaaugagcaggggucaggauaugcagccgaccugaagagcacacagaaugccauugacgagauuacuaacaaaguaaauucuguuauugaaaagaugaauacacaguucacagcaguagguaaagaguucaaccaccuggaaaaaagaauagagaauuuaaauaaaaagguugaugaugguuuccuggacauuuggacuuacaaugccgaacuguugguucuauuggaaaaugaaagaacuuuggacuaccacgauucaaaugugaagaacuuauaugaaaagguaagaagccaguuaaaaaacaaugccaaggaaauuggaaacggcugcuuugaauuuuaccacaaaugcgauaacacgugcauggaaagugucaaaaaugggacuuaugacuacccaaaauacucagaggaagcaaaauuaaacagagaagaaauagaugggguaaagcuggaaucaacaaggauuuaccagauuuuggcgaucuauucaacugucgccaguucauugguacugguagucucccugggggcaaucaguuucuggaugugcucuaaugggucucuacaguguagaauauguauuuaa

SEQ ID NO: 37011 - RNA, 1701 nt, Artificial Sequence
  derived and/or modified CDS sequence (wt) from hemagglutinin__InfluenzaA__ADH01938
augaaggcaauacuaguaguucugcuauauacauuugcaaccgcaaaugcagacacauuauguauagguuaucaugcgaacaauucaacagacacuguagacacaguacuagaaaagaauguaacaguaacacacucuguuaaccuucuagaagacaagcauaacgggaaacuaugcaaacuaagagggguagccccauugcauuuggguaaauguaacauugcuggcuggauccugggaaauccagagugugaaucacucuccacagcaagcucaugguccuacauuguggaaacaucuaguucagacaauggaacguguuacccaggagauuucaucgauuaugaggagcuaagagagcaauugagcucagugucaucauuugaaagguuugagauauuccccaagacaaguucauggcccaaucaugacucgaacaaagguguaacggcagcauguccucaugcuggagcaaaaagcuucuacaaaaauuuaauauggcuaguuaaaaaaggaaauucauacccaaagcucagcaaauccuacauuaaugauaaagggaaagaaguccucgugcuauggggcauucaccauccaucuacuagugcugaccaacaaagucucuaucagaaugcagaugcauauguuuuuguggggacaucaagauacagcaagaaguucaagccggaaauagcaauaagacccaaagugagggaucaagaagggagaaugaacuauuacuggacacuaguagagccgggagacaaaauaacauucgaagcaacuggaaaucuagugguaccgagauaugcauucgcaauggaaagaaaugcuggaucugguauuaucauuucagauacaccaguucacgauugcaauacaacuugucagacacccaagggugcuauaaacaccagccucccauuucagaauauacauccgaucacaauuggaaaauguccaaaauauguaaaaagcacaaaauugagacuggccacaggauugaggaaugucccgucuauucaaucuagaggccuauuuggggccauugccgguuucauugaagggggguggacagggaugguagauggaugguacgguuaucaccaucaaaaugagcaggggucaggauaugcagccgaccugaagagcacacagaaugccauugacgagauuacuaauaaaguaaauucuguuauugaaaagaugaauacacaguucacagcaguagguaaagaguucaaccaccuggaaaaaagaauagagaauuuaaauaaaaaaguugaugaugguuuccuggacauuuggacuuacaaugccgaacuguugguucuauuggaaaaugaaagaacuuuggacuaccacgauucaaaugugaagaacuuauauaaaaagguaagaagccaguuaaaaaacaaugccaaggaaauuggaaacggcugcuuugaauuuuaccacaagugcgauaacacgugcauggaaagugucaaaaaugggacuuaugacuacccaaaauacucagaggaagcaaaauuaaacagagaagaaauagaugggguaaagcuggaaucaacaaggauuuaccagauuuuggcgaucuauucaacugucgccaguucauugguacugguagucucccugggggcaaucaguuucuggaugugcucuaaugggucucuacaguguagaauauguauuuaa

SEQ ID NO: 37012 - RNA, 1701 nt, Artificial Sequence
  derived and/or modified CDS sequence (wt) from hemagglutinin__InfluenzaA__ADH01948
augaaggcaauacuaguaguucugcuauauacauuugcaaccgcaaaugcagacacauuauguauagguuaucaugcgaacaauucaacagacacuguagacacaguacuagaaaagaauguaacaguaacacacucuguuaaccuucuagaagacaagcauaacgggaaacuaugcaaacuaagagggguagccccauugcauuuggguaaauguaacauugcuggcuggauccugggaaauccagagugugaaucacucuccacagcaagcucaugguccuacauuguggaaacaucuaguucagacaauggaacguguuacccaggagauuucaucgauuaugaggagcuaagagagcaauugagcucagugucaucauuugaaagguuugagauauuccccaagacaaguucauggcccaaucaugacucgaacaaagguguaacggcagcauguccucaugcuggagcaaaaagcuucuacaaaaauuuaauauggcuaguuaaaaaaggaaauucauacccaaagcucagcaaauccuacauuaaugauaaagggaaagaaguccucgugcuauggggcauucaccauccaucuacuagugcugaccaacaaagucucuaucagaaugcagaugcauauguuuuuguggggacaucaagauacagcaagaaguucaagccggaaauagcaauaagacccaaagugagggaucaagaagggagaaugaacuauuacuggacacuaguagagccgggagacaaaauaacauucgaagcaacuggaaaucuagugguaccgagauaugcauucgcaauggaaagaaaugcuggaucugguauuaucauuucagauacaccaguccacgauugcaauacaacuugucagacacccaagggugcuauaaacaccagccucccauuucagaauauacauccgaucacaauuggaaaauguccaaaauauguaaaaagcacaaaauugagacuggccacaggauugaggaaugucccgucuauucaaucuagaggccuauuuggggccauugccgguuucauugaagggggguggacagggaugguagauggaugguacgguuaucaccaucaaaaugagcaggggucaggauaugcagccgaccugaagagcacacagaaugccauugacaagauuacuaacaaaguaaauucuguuauugaaaagaugaauacacaguucacagcaguagguaaagaguucaaccaccuggaaaaaagaauagagaauuuaaauaaaaaaguugaugaugguuuccuggacauuuggacuuacaaugcagaacuguugguucuauuggaaaaugaaagaacuuuggacuaccacgauucaaaugugaagaacuuauaugaaaagguaagaagccaguuaaaaaacaaugccaaggaaauuggaaacggcugcuuugaauuuuaccacaaaugcgauaacacgugcauggaaagugucaaaaaugggacuuaugacuacccaaaauacucagaggaagcaaaauuaaacagagaagaaauagaugggguaaagcuggaaucaacaaggauuuaccagauuuuggcgaucuauucaacugucgccaguucauugguacugguagucucccugggggcaaucaguuucuggaugugcucuaaugggucucuacaguguagaauauguauuuaa

SEQ ID NO: 37013 - RNA, 1701 nt, Artificial Sequence
  derived and/or modified CDS sequence (wt) from hemagglutinin__InfluenzaA__ADH01958
augaaggcaauacuaguaguucugcuauauacauuugcaaccgcaaaugcagacacauuauguauagguuaucaugcgaacaauucaacagacacuguagacacaguacuagaaaagaauguaacaguaacacacucuguuaaccuucuagaagacaagcauaacgggaaacuaugcaaacuaagagggguagccccauugcauuuggguaaauguaacauugcuggcuggauccugggaaauccagagugugaaucacucuccacagcaagcucaugguccuacauuguggaaacaucuaguucagacaauggaacguguuacccaggagauuucaucgauuaugaggagcuaagagagcaauugagcucagugucaucauuugaaagguuugagauauuccccaagacaaguucauggcccaaucaugacucgaacaaagguguaacggcagcauguccucaugcuggagcaaaaagcuucuacaaaaauuuaauauggcuaguuaaaaaaggaaauucauacccaaagcucagcaaauccuacauuaaugauaaagggaaagaaguccucgugcuauggggcauucaccauccaucuacuagugcugaccaacaaagucucuaucagaaugcagaugcauauguuuuuguggggacaucaagauacagcaagaaguucaagccggaaauagcaauaagacccaaagugagggaucaagaagggagaaugaacuauuacuggacacuaguagagccgggagacaaaauaacauucgaagcaacuggaaaucuagugguaccgagauaugcauucgcaauggaaagaaaugcuggaucugguauuaucauuucagauacaccaguccacgauugcaauacaacuugucagacacccaagggugcuauaaacaccagccucccauuucagaauauacauccgaucacaauuggaaauuguccaaaauauguaaaaagcacaaaauugagacuggccacaggauugaggaaugucccgucuauucaaucuagaggccuauuuggggccauugccgguuucauugaagggggguggacagggaugguagauggaugguacgguuaucaccaucaaaaugagcaggggucaggauaugcagccgaccugaagagcacacagaaugccauugacaagauuacuaacaaaguaaauucuguuauugaaaagaugaauacacaguucacagcaguagguaaagaguucaaccaccuggaaaaaagaauagagaauuuaaauaaaaaaguugaugaugguuuccuggacauuuggacuuacaaugccgaacuguugguucuauuggaaaaugaaagaacuuuggacuaccacgauucaaaugugaagaacuuauaugaaaagguaagaagccaguuaaaaaacaaugccaaggaaauuggaaacggcugcuuugaauuuuaccauaaaugcgauaacacgugcauggaaagugucaaaaaugggacuuaugacuacccaaaauacucagaggaagcaaaauuaaacagagaagaaauagaugggguaaagcuggaaucaacaaggauuuaccagauuuuggcgaucuauucaacugucgccaguucauugguacugauagucucccugggggcaaucaguuucuggaugugcucuaaugggucucuacaguguagaauauguauuuaa

SEQ ID NO: 37014 - RNA, 1701 nt, Artificial Sequence
  derived and/or modified CDS sequence (wt) from hemagglutinin__InfluenzaA__ADH01968
augaaggcaauacuaguaguucugcuauauacauuugcaaccgcaaaugcagacacauuauguauagguuaucaugcgaacaauucaacagacacuguagacacagugcuagaaaagaauguaacaguaacacacucuguuaaccuucuagaagacaagcauaacgggaaacuaugcaaacuaagagggguagccccauugcauuuggguaaauguaacauugcuggcuggauccugggaaauccagagugugaaucacucuccacagcaagcucaugguccuacauuguggaaacaucuaguucagacaauggaacguguuacccaggagauuucaucgauuaugaggagcuaagagagcaauugagcucagugucaucauuugaaagguuugagauauuccccaagacaaguucauggcccaaucaugacucgaacaaagguguaacggcagcauguccucaugcuggagcaaaaagcuucuacaaaaauuuaauauggcuaguuaaaaaaggaaauucauacccaaagcucagcaaauccuacauuaaugauaaagggaaagaaguccucgugcuauggggcauucaccauccaucuacuagugcugaccaacaaagucucuaucagaaugcagaugcauauguuuuuguggggacaucaagauacagcaagaaguucaagccggaaauagcaauaagacccaaagugagggaacaagaagggagaaugaacuauuacuggacacuaguagagccgggagacaaaauaacauucgaagcaacuggaaaucuagugguaccgagauaugcauucgcaauggaaagaaaugcuggaucugguauuaucauuucagauacaccaguccacgauugcaauacaacuugucagacacccaagggugcuauaaacaccagccucccauuucagaauauacauccgaucacaauuggaaaauguccaaaauauguaaaaagcacaaaauugagacuggccacaggauugaggaaugucccgucuauucaaucuagaggccuauuuggggccauugccgguuucauugaagggggguggacagggaugguagauggaugguacgguuaucaccaucaaaaugagcaggggucaggauaugcagccgaccugaagagcacacagaaugccauugacaagauuacuaacaaaguaaauucuguuauugaaaagaugaauacacaguucacagcaguagguaaagaguucaaccaccuggaaaaaagaauagagaauuuaaauaaaaaaguugaugaugguuuccuggacauuuggacuuacaaugccgaacuguugguucuauuggaaaaugaaagaacuuuggacuaccacgauucaaaugugaagaacuuauaugaaaagguaagaaaccaguuaaaaaacaaugccaaggaaauuggaaacggcugcuuugaauuuuaccacaaaugcgauaacacgugcauggaaagugucaaaaaugggacuuaugacuacccaaaauacucagaggaagcaaaauuaaacagagaagaaauagauggaguaaagcuggaaucaacaaggauuuaccagauuuuggcgaucuauucaacugucgccaguucauugguacugguagucucccugggggcaaucaguuucuggaugugcucuaaugggucucuacaguguagaauauguauuuaa

SEQ ID NO: 37015 - RNA, 1701 nt, Artificial Sequence
  derived and/or modified CDS sequence (wt) from hemagglutinin__InfluenzaA__ADH01978
augaaggcaauacuaguaguucugcuauauacauuugcaaccgcaaaugcagacacauuauguauagguuaucaugcgaacaauucaacagacacuguagacacaguacuagaaaagaauguaacaguaacacacucuguuaaccuucuagaagacaagcauaacgggaaauuaugcaaacuaagagggguagccccauugcauuuggguaaauguaacauugcuggcuggaucuugggaaauccagagugugaaucacucuccacagcaagcucaugguccuacauuguggaaacaucuaguucagacaauggaacguguuacccaggagauuucaucgauuaugaggagcuaagagagcaauugagcucagugucaucauuugaaagguuugagauauuccccaagacaaguucauggcccaaucaugacucgaacaaggguguaacggcagcauguccucaugcuggagcaaaaagcuucuacaaaaauuuaauauggcuaguuaaaaaaggaaauucauacccaaagcucagcaaauccuacauuaaugauaaagggaaagaaguccucgugcuauggggcauucaccauccaucuacuagugcugaccaacaaagucucuaucagaaugcagaugcauauguuuuuguagggacaucaagauacagcaagaaguucaagccggaaauagcaauaagacccaaagugagggaucaagaagggagaaugaacuauuacuggacacuaguggagccgggagacaaaauaacauucgaagcaacuggaaaucuagugguaccgagauaugcauucgcaauggaaagaaaugcuggaucugguauuaucauuucagauacaccaguccacgauugcaauacaacuugucagacacccaagggugcuauaaacaccagccucccauuucagaauauacauccgaucacaauuggaaaauguccaaaauauguaaaaagcacaaaauugagacuggccacaggauugaggaaugucccgucuauucaaucuagaggccuauuuggggccauugccgguuucauugaagggggguggacagggaugguagauggaugguacgguuaucaccaucaaaaugagcaggggucaggauaugcagccgaccugaagagcacacagaaugccauugacaagauuacuaacaaaguaaauucuguuauugaaaagaugaauacacaguucacagcaguagguaaagaguucaaccaccuggaaaaaagaauagagaauuuaaauaaaaaaguugaugaugguuuccuggacauuuggacuuacaaugccgaacuguugguucuauuggaaaaugaaagaacuuuggacuaccacgauucaaaugugaagaacuuauaugaaaagguaagaagccaguuaaaaaacaaugccaaggaaauuggaaacggcugcuuugaauuuuaccacaaaugcgauaacacgugcauggaaagugucaaaaaugggacuuaugacuacccaaaauacucagaggaagcaaaauuaaacagagaagaaauagaugggguaaagcuggaaucaacaaggauuuaccagauuuuggcgaucuauucaacugucgccaguucauugguacugguagucucccugggggcaaucaguuucuggaugugcucuaaugggucucuacaguguagaauauguauuuaa

SEQ ID NO: 37016 - RNA, 1701 nt, Artificial Sequence
  derived and/or modified CDS sequence (wt) from hemagglutinin__InfluenzaA__ADH01988
augaaggcaauacuaguaguucugcuauauacauuugcaaccgcaaaugcagacacauuauguauagguuaucaugcgaacaauucaacagacacuguagacacaguacuagaaaagaauguaacaguaacacacucuguuaaccuucuagaagacaagcauaacgggaaacuaugcaaacuaagagggguagccccauugcauuuggguaaauguaacauugcuggcuggauccugggaaauccagagugugaaucacucuccacagcaagcucaugguccuacauuguggaaacaucuaguucagacaauggaacguguuacccaggagauuucaucgauuaugaggagcuaagagagcaauugagcucagugucaucauuugaaagguuugagauauuccccaagacaaguucauggcccaaucaugacucgaacaaagguguaacggcagcauguccucaugcuggagcaaaaagcuucuacaaaaauuuaauauggcuaguuaaaaaaggaaauucauacccaaagcucagcaaauccuacauuaaugauaaagggaaagaaguccucgugcuauggggcauccaccauccaucuacuagugcugaccaacaaagucucuaucagaaugcagaugcauauguuuuuguggggacaucaagauacagcaagaaguucaagccggaaauagcaauaagacccaaagugagggaucaagaagggagaaugaacuauuacuggacacuaguagagccgggagacaaaauaacauucgaagcaacuggaaaucuagugguaccgagauaugcauucgcaauggaaagaaaugcuggaucugguauuaucauuucagauacaccaguccacgauugcaauacaacuugucagacacccaagggugcuauaaacaccagccucccauuucagaauauacauccgaucacaauuggaaaauguccaaaauauguaaaaagcacgaaauugagacuggccacaggauugaggaaugucccgucuauucaaucuagaggccuauuuggggccauugccgguuucauugaagggggguggacagggaugguagauggaugguacgguuaucaccaucaaaaugagcaggggucaggauaugcagccgaccugaagagcacacagaaugccauugacaagauuacuaacaaaguaaauucuguuauugaaaagaugaauacacaguucacagcaguagguaaagaguucaaccaccuggaaaaaagaauagagaauuuaaauaaaaaaguugaugaugguuuccuggacauuuggacuuacaaugccgaacuguugguucuauuggaaaaugaaagaacuuuggacuaccacgauucaaaugugaagaacuuauaugaaaagguaagaagccaguuaaaaaacaaugccaaggaaauuggaaacggcugcuuugaauuuuaccacaaaugcgauaacacgugcauggaaagugucaaaaaugggacuuaugacuacccaaaauacucagaggaagcaaaauuaaacagagaagaaauagaugggguaaagcuggaaucaacaaggauuuaccagauuuuggcgaucuauucaacugucgccaguucauugguacugguagucucccugggggcaaucaguuucuggaugugcucuaaugggucucuacaguguagaauauguauuuaa

SEQ ID NO: 37017 - RNA, 1701 nt, Artificial Sequence
  derived and/or modified CDS sequence (wt) from hemagglutinin__InfluenzaA__ADH01998
augaaggcaauacuaguaguucugcuauauacauuugcaaccgcaaaugcagacacauuauguauagguuaucaugcgaacaauucaacagacacuguagacacaguacuagaaaagaauguaacaguaacacacucuguuaaccuucuagaagacaagcauaacgggaaacuaugcaaacuaagagggauagccccauugcauuuggguaaauguaacauugcuggcuggauccugggaaauccagagugugaaucacucuccacagcaagcucaugguccuacauuguggaaacaucuaguucagacaauggaacguguuacccaggagauuucaucgauuaugaggagcuaagagagcaauugagcucagugucgucauuugaaagguuugagauauuccccaagacaaguucauggcccaaucaugacucgaacaaagguguaacggcagcauguccucaugcuggagcaaaaagcuucuacaaaaauuuaauauggcuaguuaaaaaaggaaauucauacccaaagcucagcaaauccuacauuaaugauaaagggaaagaaguccucgugcuauggggcauucaccauccaucuacuagugcugaccaacaaagucucuaucagaaugcagaugcauauguuuuuguggggacaucaagauacagcaagaaguucaagccggaaauagcaauaagacccaaagugagggaucaagaagggagaaugaacuauuacuggacacuaguagagccgggagacaaaauaacauucgaagcaacuggaaaucuagugguaccgagauaugcauucgcaauggaaagaaaugcuggaucugguauuaucauuucagauacaccaguccacgauugcaauacaacuugucagacacccaagggugcuauaaacaccagccucccauuucagaauauacauccgaucacaauugggaaauguccaaaauauguaaaaagcacaaaauugagacuggccacaggauugaggaaugucccgucuauucaaucuagaggccuauuuggggccauugccgguuucauugaagggggguggacagggaugguagauggaugguacgguuaucaccaucaaaaugagcaggggucaggauaugcagccgaccugaagagcacacagaaugccauugacgagauuacuaacaaaguaaauucuguuauugaaaagaugaauacacaguucacagcaguagguaaagaguucaaccaccuggaaaaaagaauagagaauuuaaauaaaaaaguugaugaugguuuccuggacauuuggacuuacaaugccgaacuguugguucuauuggaaaaugaaagaacuuuggacuaccacgauucaaaugugaagaacuuauaugaaaagguaagaagccaguuaaaaaacaaugccaaggaaauuggaaacggcugcuuugaauuuuaccacaaaugcgauaacacgugcauggaaagugucaaaaaugggacuuaugacuacccaaaauacucagaggaagcaaaauuaaacagagaagaaauagaugggguaaagcuggaaucaacaaggauuuaccagauuuuggcgaucuauucaacugucgccaguucauugguacugguagucucccugggggcaaucaguuucuggaugugcucuaaugggucucuacaguguagaauauguauuuaa

SEQ ID NO: 37018 - RNA, 1701 nt, Artificial Sequence
  derived and/or modified CDS sequence (wt) from hemagglutinin__InfluenzaA__ADH02008
augaaggcaauacuaguaguucugcuauauacauuugcaaccgcaaaugcagacacauuauguauagguuaucaugcgaacaauucaacagacacuguagacacaguacuagaaaagaauguaacaguaacacacucuguuaaccuucuagaaggcaagcauaacgggaaacuaugcaaacuaagagggguagccccauugcauuuggguaaauguaacauugcuggcuggauccugggaaauccagagugugaaucacucuccacagcaagcucaugguccuacauuguggaaacaucuaguucagacaauggaacguguuacccaggagauuucaucgauuaugaggagcuaagagagcaauugagcucagugucaucauuugaaagguuugagauauuccccaagacaaguucauggcccaaucaugacucgaacaaagguguaacggcagcauguccucaugcuggagcaaaaagcuucuacaaaaauuuaauauggcuaauuaaaaaaggaaauucauacccaaagcucagcaaauccuacauuaaugauaaagagaaagaaguccucgugcuauggggcauucaccauccaucuacuagugcugaccaacaaagucucuaucagaaugcagaugcauauguuuuuguggggacaucaagauacagcaagaaguucaagccggaaauagcaauaagacccaaagugagggaucaagaagggagaaugaacuauuacuggacacuaguagagccgggagacaaaauaacauucgaagcaacuggaaaucuagugguaccgagauaugcauucgcaauggaaagaaaugcuggaucugguauuaucauuucagauacaccaguccacgauugcaauacaacuugucagacacccaagggugcuauaaacaccagccucccauuucagaauauacauccgaucacaauuggaaaauguccaaaauauguaaaaagcacaaaauugagacuggccacaggauugaggaauaucccgucuauucaaucuagaggccuauuuggggccauugccgguuucauugaagggggguggacagggaugguagauggaugguacgguuaucaccaucaaaaugagcaggggucaggauaugcagccgaccugaagagcacacagaaugccauugacgagauuacuaacaaaguaaauucuguuauugaaaagaugaauacacaguucacagcaguagguaaagaguucaaccaccuggaaaaaagaauagagaauuuaaauaaaaagguugaugaugguuuccuggacauuuggacuuacaaugccgaacuguugguucuauuggaaaaugaaagaacuuuggacuaccacgauucaaaugugaagaacuuauaugaaaagguaagaagccaguuaaaaaacaaugccaaggaaauuggaaacggcugcuuugaauuuuaccacaaaugcgauaacacgugcauggaaagugucaaaaaugggacuuaugacuacccaaaauacucagaggaagcaaaauuaaacagagaagaaauagaugggguaaagcuggaaucaacaaggauuuaccagauuuuggcgaucuauucaacugucgccaguucauugguacugguagucucccugggggcaaucaguuucuggaugugcucuaaugggucucuacaguguagaauauguauuuaa

SEQ ID NO: 37019 - RNA, 1701 nt, Artificial Sequence; identical to SEQ ID NO: 35845
  derived and/or modified CDS sequence (wt) from hemagglutinin__InfluenzaA__ADI24508

SEQ ID NO: 37020 - RNA, 1701 nt, Artificial Sequence
  derived and/or modified CDS sequence (wt) from hemagglutinin__InfluenzaA__ADI24515
augaaggcaauacuaguaguucugcuauauacauuugcaaccgcaaaugcagacacauuauguguagguuaucaugcgaacaauucaacagacacuguagacacaguacuagaaaagaauguaacaguaacacacucuguuaaccuucuagaagacaagcauaacgggaaacuaugcaaacuaagagggguagccccauugcauuuggguaaauguaacauugcuggcuggauccugggaaauccagagugugaaucacuccccacagcaagcucaugguccuacauuguggaaacaucuaguucagacaauggaacguguuacccaggagauuucaucgauuaugaggagcuaagagagcaauugagcucagugucaucauuugaaagguuugagauauuccccaagacaaguucauggcccaaucaugacucgaacaaagguguaacggcagcauguccucaugcuggagcaaaaagcuucuacaaaaauuuaauauggcuaguuaaaaaaggaaauucauacccaaagcucagcaaauccuacauuaaugauaaagggaaagaaguccucgugcuauggggcauucaccauccaucuacuagugcugaccaacaaagucucuaucagaaugcagaugcauauguuuuuguggggacaucaagauacagcaagaaguucaagccggaaauagcaauaagacccaaagugagggaucaagaagggagaaugaacuauuacuggacacuaguagagccgggagacaaaauaacauucgaagcaacuggaaaucuagugguaccgagauaugcauucgcaauggaaagaaaugcuggaucugguauuaucauuucagauacaccaguccacgauugcaauacaacuugucagacacccaagggugcuauaaacaccagccucccauuucagaauauacauccgaucacaauuggaaaauguccaaaauauguaaaaagcacaaaauugagacuggccacaggauugaggaaugucccgucuauucaaucuagaggccuauuuggggccauugccgguuucauugaagggggguggacagggaugguagauggaugguacgguuaucaccaucaaaaugagcaggggucaggauaugcagccgaccugaagagcacacagaaugccauugacaagaguacuaacaaaguaaauucuguuauugaaaagaugaauacacaguucacagcaguagguaaagaguucaaccaccuggaaaaaagaauagagaauuuaaauaaaaaaguugaugaugguuuccuggacauuuggacuuacaaugccgaacuguugguucuauuggaaaaugaaagaacuuuggacuaccacgauucaaaugugaagaacuuauaugaaaagguaagaagccaguuaaaaaacaaugccaaggaaauuggaaacggcugcuuugaauuuuaccacaaaugcgauaacacgugcauggaaagugucaaaaaugggacuuaugacuacccaaaauacucagaggaagcaaaauuaaacagagaagaaauagaugggguaaagcuggaaucaacaaggauuuaccagauuuuggcgaucuauucaacugucgccaguucauugguacugguagucucccugggggcaaucaguuucuggaugugcucuaaugggucucuacaguguagaauauguauuuaa

SEQ ID NO: 37021 - RNA, 1701 nt, Artificial Sequence; identical to SEQ ID NO: 35845
  derived and/or modified CDS sequence (wt) from hemagglutinin__InfluenzaA__ADI24517

SEQ ID NO: 37022 - RNA, 1701 nt, Artificial Sequence
  derived and/or modified CDS sequence (wt) from hemagglutinin__InfluenzaA__ADI24519
augaaggcaauacuaguaguucugcuauauacauuugcaaccgcaaaugcagacacauuauguauagguuaucaugcgaacaauucaacagacacuguggacacaguacuagaaaagaauguaacaguaacacacucuguuaaccuucuagaagacaagcauaacgggaaacuaugcaaacuaagagggguagccccauugcauuuggguaaauguaacauugcuggcuggauccugggaaauccagagugugaaucacucuccacagcaagcucaugguccuacauuguggaaacaucuaguucagacaauggaacguguuacccaggagauuucaucgauuaugaggagcuaagagagcaauugagcucagugucaucauuugaaagguuugagauauuccccaagacaaguucauggcccaaucaugacucgaacaaagguguaacggcagcauguccucaugcuggagcaaaaagcuucuacaaaaauuuaauauggcuaguuaaaaaaggaaauucauacccaaagcucagcaaauccuacauuaaugauaaagggaaagaaguccucgugcuauggggcauucaccauccaucuacuagugcugaccaacaaagucucuaucagaaugcagaugcauauguuuuuguggggacaucaagauacagcaagaaguucaagccggaaauagcaauaagacccaaagugagggaucaagaagggagaaugaacuauuacuggacacuaguagagccgggagacaaaauaacauucgaagcaacuggaaaucuagugguaccgagauaugcauucgcaauggaaagaaaugcuggaucugguauuaucauuucagauacaccaguccacgauugcaauacaacuugucagacacccaagggugcuauaaacaccagccucccauuucagaauauacauccgaucacaauuggaaaauguccaaaauauguaaaaagcacaaaauugagacuggccacaggauugaggaaugucccgucuauucaaucuagaggccuauuuggggccauugccgguuucauugaagggggguggacagggaugguagauggaugguacgguuaucaccaucaaaaugagcaggggucaggauaugcagccgaccugaagagcacacagaaugccauugacaagauuacuaacaaaguaaauucuguuauugaaaagaugaauacacaguucacagcaguagguaaagaguucaaccaccuggaaaaaagaauagagaauuuaaauaaaaaaguugaugaugguuuccuggacauuuggacuuacaaugccgaacuguugguucuauuggaaaaugaaagaacuuuggacuaccacgauucaaaugugaagaacuuauaugaaaagguaagaagccaguuaaaaaacaaugccaaggaaauuggaaacggcugcuuugaauuuuaccacaaaugcgauaacacgugcauggaaagugucaaaaaugggacuuaugacuacccaaaauacucagaggaagcaaaauuaaacagagaagaaauagaugggguaaagcuggaaucaacaaggauuuaccagauuuuggcgaucuauucaacugucgccaguucauugguacugguagucucccugggggcaaucaguuucuggaugugcucuaaugggucucuacaguguagaauauguauuuaa

SEQ ID NO: 37023 - RNA, 1701 nt, Artificial Sequence
  derived and/or modified CDS sequence (wt) from hemagglutinin__InfluenzaA__ADI24521
augaaggcaauacuaguaguucugcuauauacauuugcaaccgcaaaugcagacacauuauguauagguuaucaugcgaacaauucaacagacacuguagacacgguacuagaaaagaauguaacaguaacacacucuguuaaccuucuagaagacaagcauaacgggaaacuaugcaaacuaagagggguagccccauugcauuuggguaaauguaacauugcuggcuggauccugggaaauccagagugugaaucacucuccacagcaagcucaugguccuacauuguggaaacaucuaguucagacaauggaacguguuacccaggagauuucaucgauuaugaggagcuaagagagcaauugagcucagugucaucauuugaaagguuugagauauuccccaagacaaguucauggcccaaucaugacucgaacaaagguguaacggcagcauguccucaugcuggagcaaaaagcuucuacaaaaauuuaauauggcuaguuaaaaaaggaaauucauacccaaagcucagcaaauccuacauuaaugauaaagggaaagaaguccucgugcuauggggcauucaccauccaucuacuagugcugaccaacaaagucucuaucagaaugcagaugcauauguuuuuguggggacaucaagauacagcaagaaguucaagccggaaauagcaauaagacccaaagugagggaucaagaagggagaaugaauuauuacuggacacuaguagagccgggagacaaaauaacauucgaagcaacuggaaaucuagugguaccgagauaugcauucgcaauggaaagaaaugcuggaucugguauuaucauuucagauacaccaguccacgauugcaauacaacuugucagacacccaagggugcuauaaacaccagccucccauuucagaauauacauccgaucacaauuggaaaauguccaaaauauguaaaaagcacaaaauugagacuggccacaggauugaggaaugucccgucuauucaaucuagaggccuauuuggggccauugccgguuucauugaagggggauggacagggaugguagauggaugguacgguuaucaccaucaaaaugagcaggggucaggauaugcagccgaccugaagagcacacagaaugccauugacaagauuacuaacaaaguaaauucuguuauugaaaagaugaauacacaguucacagcaguagguaaagaguucaaccaccuggaaaaaagaauagagaauuuaaauaaaaaaguugaugaugguuuccuggacauuuggacuuacaaugccgaacuguugguucuauuggaaaaugaaagaacuuuggacuaccacgauucaaaugugaagaacuuauaugaaaagguaagaagccaguuaaaaaacaaugccaaggaaauuggaaacggcugcuuugaauuuuaccacaaaugcgauaacacgugcauggaaagugucaaaaaugggacuuaugacuacccaaaauacucagaggaagcaaaauuaaacagagaagaaauagaugggguaaagcuggaaucaacaaggauuuaccagauuuuggcgaucuauucaacugucgccaguucauugguacugguagucucccugggggcaaucaguuucuggaugugcucuaaugggucucuacaguguagaauauguauuuaa

SEQ ID NO: 37024 - RNA, 1701 nt, Artificial Sequence
  derived and/or modified CDS sequence (wt) from hemagglutinin__InfluenzaA__ADI24523
augaaggcaauacuaguaguucugcuauauacauuugcaaccgcaaaugcagacacauuauguauagguuaucaugcgaacaauucaacagacacuguagacacaguacuagaaaagaauguaacaguaacacacucuguuaaccuucuagaagacaagcauaacgggaaacuaugcaaacuaagagggguagccccauugcauuuggguaaauguaacauugcuggcuggauccugggaaauccagagugugaaucacucuccacagcaagcucaugguccuacauuguggaaacaucuaguucagacaauggaacguguuacccaggagauuucaucaauuaugaggagcuaagagagcaauugagcucagugucaucauuugaaagguuugagauauuccccaagacaaguucauggcccaaucaugacucgaacaaagguguaacggcagcauguccucaugcuggagcaaaaagcuucuacaaaaauuuaauauggcuaguuaaaaaaggaaauucauacccaaagcucagcaaauccuacauuaaugauaaagggaaagaaguccucgugcuauggggcauucaccauccaucuacuagugcugaccaacaaagucucuaucagaaugcagaugcauauguuuuuguggggacaucaagauacagcaagaaguucaagccggaaauagcaauaagacccaaagugagggaucaagaagggagaaugaacuauuacuggacacuaguagagccgggagacaaaauaacauucgaagcaacuggaaaucuagugguaccgagauaugcauucgcaauggaaagaaaugcuggaucugguauuaucauuucagauacaccaguccacgauugcaauacaacuugucagacacccaagggugcuauaaacaccagccucccauuucagaauauacauccgaucacaauuggaaaauguccaaaauauguaaaaagcacaaaauugagacuggccacaggauugaggaaugucccgucuauucaaucuagaggccuauuuggggccauugccgguuucauugaagggggguggacagggaugguagauggaugguacgguuaucaccaucaaaaugagcaggggucaggauaugcagccgaccugaagagcacacagaaugccauugacaagauuacuaacaaaguaaauucuguuauugaaaagaugaauacacaguucacagcaguagguaaagaguucaaccaccuggaaaaaagaauagagaauuuaaauaaaaaaguugaugaugguuuccuggacauuuggacuuacaaugccgaacuguugguucuauuggaaaaugaaagaacuuuggacuaccacgauucaaaugugaagaacuuauaugaaaagguaagaagccaguuaaaaaacaaugccaaggaaauuggaaacggcugcuuugaauuuuaccacaaaugcgauaacacgugcauggaaagugucaaaaaugggacuuaugacuacccaaaauacucagaggaagcaaaauuaaacagagaagaaauagaugggguaaagcuggaaucaacaaggauuuaccagauuuuggcgaucuauucaacugucgccaguucauugguacugguagucucccugggggcaaucaguuucuggaugugcucuaaugggucucuacaguguagaauauguauuuaa

SEQ ID NO: 37025 - RNA, 1701 nt, Artificial Sequence
  derived and/or modified CDS sequence (wt) from hemagglutinin__InfluenzaA__ADI24525
augaaggcaauacuaguaguucugcuauauacauuugcaaccgcaaaugcagacacauuauguauagguuaucaugcgaacaauucaacagacacuguagacacaguacuagaaaagaauguaacaguaacacacucuguuaaccuucuagaagacaagcauaacgggaaacuaugcgaacuaagagggguagccccauugcauuuggguaaauguaacauugcuggcuggauccugggaaauccagagugugaaucacucuccacagcaagaucaugguccuacauuguggaaacaucuaguucagacaauggaacguguuacccaggagauuucaucgauuaugaggagcuaagagagcaauugagcucagugucaucauuugaaagguuugagauauuccccaagacaaguucauggcccaaucaugacucgaacaaagguguaacggcagcauguccucaugcuggagcaaaaagcuucuacaaaaauuuaauauggcuaguuaaaaaaggaaauucauacccaaagcucagcaaauccuacauuaaugauaaagggaaagaaguccucgugcuauggggcauucaccauccaucuacuagugcugaccaacaaagucucuaucagaaugcagaugcauauguuuuuguggggacaucaagauacagcaagaaguucaagccggaaauagcaauaagacccaaagugagggaucaagaagggagaaugaacuauuacuggacacuaguagagccgggagacaaaauaacauucgaagcaacuggaaaucuagugguaccgagauaugcauucgcaauggaaagaaaugcuggaucugguauuaucauuucagauacaccaguccacgauugcaauacaacuugucagacacccaagggugcuauaaacaccagccucccauuucagaauauacauccgaucacaauuggaaaauguccaaaauauguaaaaagcacaaaauugagacuggccacaggauugaggaaugucccgucuauucaaucuagaggccuauuuggggccauugccgguuucauugaagggggguggacagggaugguagauggaugguacgguuaucaccaucaaaaugagcaggggucaggauaugcagccgaccugaagagcacacagaaugccauugacaagauuacuaacaaaguaaauucuguuauugaaaagaugaauacacaguucacagcaguagguaaagaguucaaccaccuggaaaaaagaauagagaauuuaaauaaaaaaguugaugaugguuuccuggacauuuggacuuacaaugccgaacuguugguucuauuggaaaaugaaagaacuuuggacuaccacgauucaaaugugaagaacuuauaugaaaagguaaaaagccaguuaaaaaacaaugccaaggaaauuggaaacggcugcuuugaauuuuaccacaaaugcgauaacacgugcauggaaagugucaaaaaugggacuuaugacuacccaaaauacucagaggaagcaaaauuaaacagagaagaaauagaugggguaaagcuggaaucaacaaggauuuaccagauuuuggcgaucuauucaacugucgccaguucauugguacugguagucucccugggggcaaucaguuucuggaugugcucuaaugggucucuacaguguagaauauguauuuaa

SEQ ID NO: 37026 - RNA, 1701 nt, Artificial Sequence
  derived and/or modified CDS sequence (wt) from hemagglutinin__InfluenzaA__ADI24527
augaaggcaauacuaguaguucugcuauauacauuugcaaccgcaaaugcagacacauuauguauagguuaucaugcgaacaauucaacagacacuguagacacaguacuagaaaagaauguaacaguaacacacucuguuaaccuucuagaagacaagcauaacgggaaacuaugcaaacuaagagggguagccccauugcauuuggguaaauguaacauugcuggcuggauccugggaaauccagagugugaaucacucuccacagcaagcucaugguccuacauuguggaaacaucuaguucagacaauggaacguguuacccaggagauuucaucgauuaugaggagcuaagagagcaauugagcucagugucaucauuugaaagguuugagauauuccccaagacaaguucauggcccaaucaugacucgaacaaagguguaacggcagcauguccucaugcuggagcaaaaagcuucuacaaaaauuuaauauggcuaguuaaaaaaggaaauucauacccaaagcucagcaaauccuacauuaaugauaaagggaaagaaguccucgugcuauggggcauucaccauccaucuacuagugcugaccaacaaagucucuaucagaaugcagaugcauauguuuuuguggggacaucaagauacagcaagaaguucaagccggaaauagcaauaagacccaaagugagggaucaagaagggagaaugaacuauuacuggacacuaguagagccgggagacaaaauaacauucgaagcaacuggaaaucuagugguaccgagauaugcauucgcaauggaaagaaaugcuggaucugguauuaucauuucagauacaccaguccacgauugcaauacaacuugucagacacccaagggugcuauaaacaccagccucccauuucagaauauacauccgaucacaauuggaaaauguccaaaauauguaaaaagcacaaaauugagacuggccacaggauugaggaaugucccgucuauucaaucuagaggccuauuuggggccauugccgguuucauugaagggggguggacagggaugguagauggaugguacgguuaucaccaucaaaaugagcaggggucaggauaugcagccgaccugaagagcacacagaaugccauugacaagauuacuaacaaaguaaauucuguuauugaaaagaugaauacacaguucacagcaguagguaaagaguucaaccaccuggaaaaaagaauagagaauuuaaauaaaaaaguugaugaugguuuccuggacauuuggacuuacaaugccgaacuguugguucuauuggaaaaugaaagaacuuuggacuaccacgauucaaaugugaagaacuuauaugaaaagguaagaagccaguuaaaaaacaaugccaaggaaauuggaaacggcugcuuugaauuuuaccauaaaugcgauaacacgugcauggaaagugucaaaaaugguacuuaugacuacccaaaauacucagaggaagcaaaauuaaacagagaagaaauagaugggguaaagcuggaaucaacaaggauuuaccagauuuuggcgaucuauucaacugucgccaguucauugguacugguagucucccugggggcaaucaguuucuggaugugcucuaaugggucucuacaguguagaauauguauuuaa

SEQ ID NO: 37027 - RNA, 1701 nt, Artificial Sequence; identical to SEQ ID NO: 37024
  derived and/or modified CDS sequence (wt) from hemagglutinin__InfluenzaA__ADI24529

SEQ ID NO: 37028 - RNA, 1701 nt, Artificial Sequence
  derived and/or modified CDS sequence (wt) from hemagglutinin__InfluenzaA__ADI24531
augaaggcaauacuaguaguucugcuauauacauuugcaaccgcaaaugcagacacauuauguauagguuaucaugcgaacaauucaacagacacuguagacacaguacuagaaaagaauguaacaguaacacacucuguuaaccuucuagaagacaagcauaacgggaaacuaugcaaacuaagagggguagccccauugcauuuggguaaauguaacauugcuggcuggauccugggaaauccagagugugaaucacucuccacagcaagcucaugguccuacauuguggaaacaucuaguucagacaauggaacguguuacccaggagauuucaucaauuaugaggagcuaagagagcaauugagcucagugucaucauuugaaagguuugagauauuccccaagacaaguucauggcccaaucaugacucgaacaaagguguaacggcagcauguccucaugcuggagcaaaaagcuucuacaaaaauuuaauauggcuaguuaaaaaaggaaauucauacccaaagcucagcaaauccuacauuaaugauaaagggaaagaaguccucgugcuauggggcauucaccauccaucuacuagugcugaccaacaaagucucuaucagaaugcagaugcauauguuuuuguggggacaucaagauacagcaagaaguucaagccggaaauagcaauaagacccaaagugagggaucaagaagggagaaugaacuauuacuggacacuaguagagccgggagacaaaauaacauucgaagcaacuggaaaucuagugguaccgagauaugcauucgcaauggaaagaaaugcuggaucugguauuaucauuucagauacaccaguccacgauugcaauacaacuugucagacacccaagggugcuauaaacaccagccucccauuucagaauauacauccgaucacaauuggaaaauguccaaaauauguaaaaagcacaaaauugagacuggccacaggauugaggaaugucccgucuauucaaucuagaggccuacuuggggccauugccgguuucauugaagggggguggacagggaugguagauggaugguacgguuaucaccaucaaaaugagcaggggucaggauaugcagccgaccugaagagcacacagaaugccauugacaagauuacuaacaaaguaaauucuguuauugaaaagaugaauacacaguucacagcaguagguaaagaguucaaccaccuggaaaaaagaauagagaauuuaaauaaaaaaguugaugaugguuuccuggacauuuggacuuacaaugccgaacuguugguucuauuggaaaaugaaagaacuuuggacuaccacgauucaaaugugaagaacuuauaugaaaagguaagaagccaguuaaaaaacaaugccaaggaaauuggaaacggcugcuuugaauuuuaccacaaaugcgauaacacgugcauggaaagugucaaaaaugggacuuaugacuacccaaaauacucagaggaagcaaaauuaaacagagaagaaauagaugggguaaagcuggaaucaacaaggauuuaccagauuuuggcgaucuauucaacugucgccaguucauugguacugguagucucccugggggcaaucaguuucuggaugugcucuaaugggucucuacaguguaaaauauguauuuaa

SEQ ID NO: 37029 - RNA, 1701 nt, Artificial Sequence
  derived and/or modified CDS sequence (wt) from hemagglutinin__InfluenzaA__ADI24536
augaaggcaauacuaguaguucugcuauauacauuugcaaccgcaaaugcagacacauuauguauagguuaucaugcgaacaauucaacagacacuguagacacaguacuagaaaagaauguaacaguaacacacucuguuaaccuucuagaagacaagcauaacgggaaacuaugcaaacuaagagggguagccccauugcauuuggguaaauguaacauugcuggcuggauccugggaaauccagagugugaaucacucuccacagcaagcucaugguccuacauuguggaaacaucuaguucagacaauggaacguguuacccaggagauuucaucgauuaugaggagcuaagagagcaauugagcucagugucaucauuugaaagguuugagauauuccccaagacaaguucauggcccaaucaugacucgaacaaagguguaacggcagcauguccucaugcuggagcaaaaagcuucuacaaaaauuuaauauggcuaguuaaaaaaggaaauucauacccaaagcucagcaaauccuacauuaaugauaaagggaaagaaguccucgugcuauggggcauucaccauccaucuacuagugcugaccaacaaagucucuaucagaaugcagaugcauauguuuuuguggggacaucaagauacagcaagaaguucaagccggaaauagcaauaagacccaaagugagggaucaagaagggagaaugaacuauuacuggacacuaguagagccgggagacaaaauaacauucgaagcaacuggaaaucuagugguaccgagauaugcauucgcaauggaaagagaugcuggaucugguauuaucauuucagauacaccaguccacgauugcaauacaacuugucagacacccaagggugcuauaaacaccagccucccauuucagaauauacauccgaucacaauuggaaaauguccaaaauauguaaaaagcacaaaauugagacuggccacaggauugaggaaugucccgucuauucaaucuagaggccuauuuggggccauugccgguuucauugaagggggguggacagggaugguagauggaugguacgguuaucaccaucaaaaugagcaggggucaggauaugcagccgaccugaagagcacacagaaugccauugacaagauuacuaacaaaguaaauucuguuauugaaaagaugaauacacaguucacagcaguagguaaagaguucaaccaccuggaaaaaagaauagagaauuuaaauaaaaaaauugaugaugguuuccuggacauuuggacuuacaaugccgaacuguugguucuauuggaaaaugaaagaacuuuggacuaccacgauucaaaugugaagaacuuauaugaaaagguaagaagccaguuaaaaaacaaugccaaggaaauuggaaacggcugcuuugaauuuuaccacaaaugcgauaacacgugcauggaaagugucaaaaaugggacuuaugacuacccaaaauacucagaggaagcaaaauuaaacagagaagaaauagaugggguaaagcuggaaucaacaaggauuuaccagauuuuggcgaucuauucaacugucgccaguucauugguacugguagucucccugggggcaaucaguuucuggaugugcucuaaugggucucuacaguguagaauauguauuuaa

SEQ ID NO: 37030 - RNA, 1701 nt, Artificial Sequence
  derived and/or modified CDS sequence (wt) from hemagglutinin__InfluenzaA__ADI24546
augaaggcaauacuaguaguucugcuauauacauuugcaaccgcaaaugcagacacauuauguauagguuaucaugcgaacaauucaacagacacuguagacacaguacuagaaaagaauguaacaguaacacacucuguuaaccuucuagaagacaagcauaacgggaaacuaugcaaacuaagagggguagccccauugcauuuggguaaauguaacauugcuggcuggauccugggaaauccagagugugaaucacucuccacagcaagcucaugguccuacauuguggaaacaucuaguucagacaauggaacguguuacccaggagauuucaucgauuaugaggagcuaagagagcaauugagcucagugucaucauuugaaagguuugagauauuccccaagacaaguucauggcccaaucaugacucgaacaaagguguaacggcagcauguccucaugcuggagcaaaaagcuucuacaaaaauuuaauauggcuaguuaaaaaaggaaauucauacccaaagcucagcaaauccuacauuaaugauaaagggaaagaaguccucgugcuauggggcauucaccauccaucuacuagugcugaccaacaaagucucuaucagaaugcagaugcauauguuuuugugggaacaucaagauacagcaagaaguucaagccggaaauagcaauaagacccaaagugagggaucaagaagggagaaugaacuauuacuggacacuaguagagccgggagacaaaauaacauucgaagcaacuggaaaucuagugguaccgagauaugcauucgcaauggaaagaaaugcuggaucugguauuaucauuucagauacaccaguccacgauugcaauacaacuugucagacacccaagggugcuauaaacaccagccucccauuucagaauauacauccgaucacaauuggaaaauguccaaaauauguaaaaagcacaaaauugagacuggccacaggauugaggaaugucccgucuauucaaucuagaggccuauuuggggccauugccgguuucauugaagggggguggacagggaugguagauggaugguacgguuaucaccaucaaaaugagcaggggucaggauaugcagccgaccugaagagcacacagaaugccauugacaagauuacuaacaaaguaaauucuguuauugaaaagaugaauacacaguucacagcaguagguaaagaguucaaccaccuggaaaaaagaauagagaauuuaaauaaaaaaguugaugaugguuuccuggacauuuggacuuacaaugccgaacuguugguucuauuggaaaaugaaagaacuuuggacuaccacgauucaaaugugaagaacuuauaugaaaagguaagaagccaguuaaaaaacaaugccaaggaaauuggaaacggcugcuuugaauuuuaccacaaaugcgauaacacgugcauggaaagugucaaaaaugggacuuaugacuacccaaaauacucagaggaagcaaaauuaaacagagaagaaauagaugggguaaagcuggaaucaacaaggauuuaccagauuuuggcgaucuauucaacugucgccaguucauugguacugguagucucccugggggcaaucaguuucuggaugugcucuaaugggucucuacaguguagaauauguauuuaa

SEQ ID NO: 37031 - RNA, 1701 nt, Artificial Sequence; identical to SEQ ID NO: 35845
  derived and/or modified CDS sequence (wt) from hemagglutinin__InfluenzaA__ADI24553

SEQ ID NO: 37032 - RNA, 1701 nt, Artificial Sequence; identical to SEQ ID NO: 35845
  derived and/or modified CDS sequence (wt) from hemagglutinin__InfluenzaA__ADI24555

SEQ ID NO: 37033 - RNA, 1701 nt, Artificial Sequence
  derived and/or modified CDS sequence (wt) from hemagglutinin__InfluenzaA__ADI24557
augaaggcaauacuaguaguucugcuauauacauuugcaaccgcaaaugcagacacauuauguauagguuaucaugcgaacaauucaacagacacuguagacacaguacuagaaaagaauguaacaguaacacacucuguuaaccuucuagaagacaagcauaacgggaaacuaugcaaacuaagagggguagccccauugcauuuggguaaauguaacauugcuggcuggauccugggaaauccagagugugaaucacucuccacagcaagcucaugguccuacauuguggaaacaucuaguucagacaauggaacguguuacccaggagauuucaucgauuaugaggagcuaagagagcaauugagcucagugucaucauuugaaagguuugagauauuccccaagacaaguucauggcccaaucaugacucgaacaaagguguaacggcagcauguccucaugcuggagcaaaaagcuucuacaaaaauuuaauauggcuaguuaaaaaaggaaauucauacccaaagcucagcaaauccuacauuaaugauaaagggaaagaaauccucgugcuauggggcauucaccauccaucuacuagugcugaccaacaaagucucuaucagaaugcagaugcauauguuuuuguggggacaucaagauacagcaagaaguucaagccggaaauagcaauaagacccaaagugagggaucaagaagggagaaugaacuauuacuggacacuaguagagccgggagacaaaauaacauucgaagcaacuggaaaucuagugguaccgagauaugcauucgcaauggaaagaaaugcuggaucugguauuaucauuucagauacaccaguccacgauugcaauacaacuugucagacacccaagggugcuauaaacaccagccucccauuucagaauauacauccgaucacaauuggaaaauguccaaaauauguaaaaagcacaaaauugagacuggccacaggauugaggaaugucccgucuauucaaucuagaggccuauuuggggccauugccgguuucauugaagggggguggacagggaugguagauggaugguacgguuaucaccaucaaaaugagcaggggucaggauaugcagccgaccugaagagcacacagaaugccauugacaagauuacuaacaaaguaaauucuguuauugaaaagaugaauacacaguucacagcaguagguaaagaguucaaccaccuggaaaaaagaauagagaauuuaaauaaaaaaguugaugaugguuuccuggacauuuggacuuacaaugccgaacuauugguucuauuggaaaaugaaagaacuuuggacuaccacgauucaaaugugaagaacuuauaugaaaagguaagaagccaguuaaaaaacaaugccaaggaaauuggaaacggcugcuuugaauuuuaccacaaaugcgauaacacgugcauggaaagugucaaaaaugggacuuaugacuacccaaaauacucagaggaagcaaaauuaaacagagaagaaauagaugggguaaagcuggaaucaacaaggauuuaccagauuuuggcgaucuauucaacugucgccaguucauugguacugguagucucccugggggcaaucaguuucuggaugugcucuaaugggucucuacaguguagaauauguauuuaa

SEQ ID NO: 37034 - RNA, 1701 nt, Artificial Sequence
  derived and/or modified CDS sequence (wt) from hemagglutinin__InfluenzaA__ADI24559
augaaggcaauacuaguaguucugcuauauacauuugcaaccgcaaaugcagacacauuauguauagguuaucaugcgaacaauucaacagacacuguagacacaguacuagaaaagaauguaacaguaacacacucuguuaaccuucuagaagacaagcauaacgggaaacuaugcaaacuaagagggguagccccauugcauuuggguaaauguaacauugcuggcuggauccugggaaauccagagugugaaucacucuccacagcaagcucaugguccuacauuguggaaacaucuaguucagacaauggaacguguuacccaggagauuucaucgauuaugaggagcuaagagagcaauugagcucagugucaucauuugaaagguuugagauauuccccaagacaaguucauggcccaaucaugacucgaacaaagguguaacggcagcauguccucaugcuggagcaaaaagcuucuacaaaaauuuaauauggcuaguuaaaaaaggaaauucauacccaaagcucagcaaauccuacauuaaugauaaagggaaagaaguccucgugcuauggggcauucaccauccaucuacuagugcugaccaacaaagucucuaucagaaugcagaugcauauguuuuuguggggacaucaagauacagcaagaaguucaagccggaaauagcaauaagacccaaagugagggaucaagaagggagaaugaacuauuacuggacacuaguagagccgggagacaaaauaacauucgaagcaacuggaaaucuagugguaccgagauaugcauucgcaauggaaagaaaugcuggaucugguauuaucauuucagauacaccaguccacgauugcaauacaacuugucagacacccaagggugcuauaaacaccagccucccauuucagaauauacauccgaucacaauuggaaaauguccaaaauauguaaaaagcacaaaauugagacuggccacaggauugaggaaugucccgucuauucaaucuagaggccuauuuggggccauugccgguuucauugaagggggguggacagggaugguagauggaugguacgguuaucaccaucaaaaugagcaggggucaggauaugcagccgaccugaagagcacacagaaugccauugacaagauuacuaacaaaguaaauucuguuauugaaaagaugaauacacaguucacagcaguagguaaagaguucaaccaccuggaaaaaagaauagagaauuuaaauaaaaaaguugaugaugguuuccuggacauuuggacuuacaaugccgaacuauugguucuauuggaaaaugaaagaacuuuggacuaccacgauucaaaugugaagaacuuauaugaaaagguaagaagccaguuaaaaaacaaugccaaggaaauuggaaacggcugcuuugaauuuuaccacaaaugcgauaacacgugcauggaaagugucaaaaaugggacuuaugacuacccaaaauacucagaggaagcaaaauuaaacagagaagaaauagaugggguaaagcuggaaucaacaaggauuuaccagauuuuggcgaucuauucaacugucgccaguucauugguacugguagucucccugggggcaaucaguuucuggaugugcucuaaugggucucuacaguguagaauauguauuuaa

SEQ ID NO: 37035 - RNA, 1701 nt, Artificial Sequence
  derived and/or modified CDS sequence (wt) from hemagglutinin__InfluenzaA__ADI24561
augaaggcaauacuaguaauucugcuauauacauuugcaacugcaaaugcagacacauuauguauagguuaucaugcgaacaauucaacagacacuguagacacaguacuagaaaagaauguaacaguaacacacucuguuaaccuucuagaagacaagcaugacgggaaacuaugcaaacuaagagggguagccccauugcauuuggguaaauguaacauugcuggcuggauccugggaaauccagagugugaaucacucuccacagcaagcucaugguccuacauuguggaaacaucuaguucagacaauggaacguguuacccaggagauuucaucgauuaugaggagcuaagagagcaauugagcucagugucaucauuugaaagguuugagauauuccccaagacaaguucauggcccaaucaugacucgaacaaagguguaacggcagcauguccucaugcuggagcaaaaagcuucuacaaaaauuuaauauggcuaguuaaaaaaggaaauucauacccaaagcucagcaaauccuacauuaaugauaaagggaaagaaguccucgugcuauggggcauucaccauccaucuacuagugcugaccaacaaagucucuaucagaaugcagaugcauauguuuuuguggggacaucaagauacagcaagaaguucaagccggaaauagcaauaagacccaaagugagggaucaagaagggagaaugaacuauuacuggacacuaguagagccgggagacaaaauaacauucgaagcaacuggaaaucuagugguaccgagauaugcauucgcaauggaaagaaaugcuggaucugguauuaucauuucagauacaccaguccacgauugcaauacaacuugucagacacccaagggugcuauaaacaccagccucccauuucagaauauacauccgaucacaauuggaaaauguccaaaauauguaaaaagcacaaaauugagacuggccacaggauugaggaaugucccgucuauucaaucuagaggccuauuuggggccauugccgguuucauugaagggggguggacagggaugguagauggaugguacgguuaucaccaucaaaaugagcaggggucaggauaugcagccgaccugaagagcacacagaaugccauugacaagauuacuaacaaaguaaauucuguuauugaaaagaugaauacacaguucacagcaguagguaaagaguucaaccaccuggaaaaaagaauagagaauuuaaauaaaaaaguugaugaugguuuccuggacauuuggacuuacaaugccgaacuguugguucuauuggaaaaugaaagaacuuuggacuaccacgauucaaaugugaagaacuuauaugaaaagguaagaagccaguuaaaaaacaaugccaaggaaauuggaaacggcugcuuugaauuuuaccacaaaugcgauaacacgugcauggaaagugucaaaaaugggacuuaugacuacccaaaauacucagaggaagcaaaauuaaacagagaagaaauagaugggguaaagcuggaaucaacaaggauuuaccagauuuuggcgaucuauucaacugucgccaguucauugguacugguagucucccugggggcaaucaguuucuggaugugcucuaaugggucucuacaguguagaauauguauuuaa

SEQ ID NO: 37036 - RNA, 1701 nt, Artificial Sequence; identical to SEQ ID NO: 35845
  derived and/or modified CDS sequence (wt) from hemagglutinin__InfluenzaA__ADI24563

SEQ ID NO: 37037 - RNA, 1701 nt, Artificial Sequence
  derived and/or modified CDS sequence (wt) from hemagglutinin__InfluenzaA__ADI24565
augaaggcaauacuaguaguucugcuauauacauuugcaaccgcaaaugcagacacauuauguauagguuaucaugcgaacaauucaacagacacuguagacacaguacuagaaaagaauguaacaguaacacacucuguuaaccuucuagaagacaagcaugacgggaaacuaugcaaacuaagagggguagccccauugcauuuggguaaauguaacauugcuggcuggauccugggaaauccagagugugaaucacucuccacagcaagcucaugguccuacauuguggaaacaucuaguucagacaauggaacguguuacccaggagauuucaucgauuaugaggagcuaagagagcaauugagcucagugucaucauuugaaagguuugagauauuccccaagacaaguucauggcccaaucaugacucgaacaaagguguaacggcagcauguccucaugccggagcaaaaagcuucuacaaaaauuuaauauggcuaguuaaaaaaggaaauucauacccaaagcucagcaaauccuacauuaaugauaaggggaaaaaaguccucgugcuauggggcauucaccauccaucuacuagugcugaccaacaaagucucuaucagaaugcagaugcauauguuuuuguggggacaucaagauacagcaagaaguucaagccggaaauagcaauaagacccaaagugagggaucaagaagggagaaugaacuauuacuggacacuaguagagccgggagacaaaauaacauucgaagcaacuggaaaucuagugguaccgagauaugcauucgcaauggaaagaaaugcuggaucugguauuaucauuucagauacaccaguccacgauugcaauacaacuugucagacacccaagggugcuauaaacaccagccucccauuucagaauauacauccgaucacaauuggaaaauguccaaaauauguaaaaagcacaaaauugagacuggccacaggauugaggaaugucccgucuauucaaucuagaggccuauuuggggccauugccgguuucauugaagggggguggacagggaugguagauggaugguacgguuaucaccaucaaaaugagcaggggucaggauaugcagccgaccugaagagcacacagaaugccauugacaagauuacuaacaaaguaaauucuguuauugaaaagaugaauacacaguucacagcaguagguaaagaguucaaccaccuggaaaaaagaauagagaauuuaaauaaaaaaguugaugaugguuuccuggacauuuggacuuacaaugccgaacuguugguucuauuggaaaaugaaagaacuuuggacuaccacgauucaaaugugaagaacuuauaugaaaagguaagaagccaguuaaaaaacaaugccaaggaaauuggaaacggcugcuuugaauuuuaccacaaaugcgauaacacgugcauggaaagugucaaaaaugggacuuaugacuacccaaaauacucagaggaagcaaaauuaaacagagaagaaauagauggggugaagcuggaaucaacaaggauuuaccagauuuuggcgaucuauucaacugucgccaguucauugguacugguagucucccugggggcaaucaguuucuggaugugcucuaaugggucucuacaguguagaauauguauuuaa

SEQ ID NO: 37038 - RNA, 1701 nt, Artificial Sequence
  derived and/or modified CDS sequence (wt) from hemagglutinin__InfluenzaA__ADI24567
augaaggcaauacuaguaguucugcuauauacauuugcaaccgcaaaugcagacacauuauguauagguuaucaugcgaacaauucaacagacacuguagacacaguacuagaaaagaauguaacaguaacacacucuguuaaccuucuagaagacaagcauaacgggaaacuaugcaaacuaagagggguagccccauugcauuuggguaaauguaacauugcuggcuggauccugggaaauccagagugugaaucacucuccacagcaagcucaugguccuacauuguggaaacaucuaguucagacaauggaacguguuacccaggagauuucaucgauuaugaggagcuaagagagcaauugagcucagugucaucauuugaaagguuugagauauuccccaagacaaguucauggcccaaucaugacucgaauaaagguguaacggcagcauguccucaugcuggagcaaaaagcuucuacaaaaauuuaauauggcuaguuaaaaaaggaaauucauacccaaagcucagcaaauccuacauuaaugauaaagggaaagaaguccucgugcuauggggcauucaccauccaucuacuagugcugaccaacaaagucucuaucagaaugcagaugcauauguuuuuguggggacaucaagauacagcaagaaguucaagccggaaauagcaauaagacccaaagugagggaucaagaagggagaaugaacuauuacuggacacuaguagagccgggagacaaaauaacauucgaagcaacuggaaaucuagugguaccgagauaugcauucgcaauggaaagaaaugcuggaucugguauuaucauuucagauacaccaguccacgauugcaauacaacuugucagacacccaagggugcuauaaacaccagccucccauuucagaauauacauccgaucacaauuggaaaauguccaaaauauguaaaaagcacaaaauugagacuggccacaggauugaggaaugucccgucuauucaaucuagaggccuauuuggggccauugccgguuucauugaagggggguggacagggaugguagauggaugguacgguuaucaccaucaaaaugagcaggggucaggauaugcagccgaccugaagagcacacagaaugccauugacaagauuacuaacaaaguaaauucuguuauugaaaagaugaauacacaguucacagcaguagguaaagaguucaaccaccuggaaaaaagaauagagaauuuaaauaaaaaaguugaugaugguuuccuggacauuuggacuuacaaugccgaacuguugguucuauuggaaaaugaaagaacuuuggacuaccacgauucaaaugugaagaacuuauaugaaaagguaagaagccaguuaaaaaacaaugccaaggaaauuggaaacggcugcuuugaauuuuaccacaaaugcgauaacacgugcauggaaagugucaaaaaugggacuuaugacuacccaaaauacucagaggaagcaaaauuaaacagagaagaaauagaugggguaaagcuggaaucaacaaggauuuaccagauuuuggcgaucuauucaacugucgccaguucauugguacugguagucucccugggggcaaucaguuucuggaugugcucuaaugggucucuacaguguagaauauguauuuaa

SEQ ID NO: 37039 - RNA, 1701 nt, Artificial Sequence
  derived and/or modified CDS sequence (wt) from hemagglutinin__InfluenzaA__ADI24569
augaaggcaauacuaguaguucugcuauauacauuugcaaccgcaaaugcagacacauuauguauagguuaucaugcgaacaauucaacagacacuguagacacaguacuagaaaagaauguaacaguaacacacucuguuaaccuucuagaagacaagcauaacgggaaacuaugcaaacuaagagggguagccccauugcauuuggguaaauguaacauugcuggcuggauccugggaaauccagagugugaaucacucuccacagcaagcucaugguccuacauuguggaaacaucuaguucagacaauggaacguguuacccaggagauuucaucgauuaugaggagcuaagagagcaauugagcucagugucaucauuugaaagguuugagauauuccccaagacaaguucauggcccaaucaugacucgaacaaagguguaacggcagcauguccucaugcuggagcaaaaagcuucuacaaaaauuuaauauggcuaguuaaaaaaggaaauucauacccaaagcucagcaaauccuacauuaaugauaaagggaaagaaguccucgugcuauggggcauucaccauccaucuacuagugcugaccaacaaagucucuaucagaaugcagaugcauauguuuuuguggggacaucaagauacagcaagaaguucaagccggaaauagcaauaagacccaaagugagggaucaagaagggagaaugaacuauuacuggacacuaguagagccgggagacaaaauaacauucgaagcaacuggaaaucuagugguaccgagauaugcauucgcaauagaaagaaaugcuggaucugguauuaucauuucagauacaccaguccacgauugcaauacaacuugucagacacccaagggugcuauaaacaccagccucccauuucagaauauacauccgaucacaauuggaaaauguccaaaauauguaaaaagcacaaaauugagacuggccacaggauugaggaaugucccgucuauucaaucuagaggccuauuuggagccauugccgguuucauugaagggggguggacagggaugguagauggaugguacgguuaucaccaucaaaaugagcaggggucaggauaugcagccgaccugaagagcacacagaaugccauugacaagauuacuaacaaaguaaauucuguuauugaaaagaugaauacacaguucacagcaguagguaaagaguucaaccaccuggaaaaaagaauagagaauuuaaauaaaaaaguugaugaugguuuccuggacauuuggacuuacaaugccgaacuguugguucuauuggaaaaugaaagaacuuuggacuaccacgauucaaaugugaagaacuuauaugaaaagguaagaagccaguuaaaaaacaaugccaaggaaauuggaaacggcugcuuugaauuuuaccacaaaugcgauaacacgugcauggaaagugucaaaaaugggacuuaugacuacccaaaauacucagaggaagcaaaauuaaacagagaagaaauagaugggguaaagcuggaaucaacaaggauuuaccagauuuuggcgaucuauucaacugucgccaguucauugguacugguagucucccugggggcaaucaguuucuggaugugcucuaaugggucucuacaguguagaauauguauuuaa

SEQ ID NO: 37040 - RNA, 1701 nt, Artificial Sequence
  derived and/or modified CDS sequence (wt) from hemagglutinin__InfluenzaA__ADI24571
augaaggcaauacuaguaguucugcuauauacauuugcaaccgcaaaugcagacacauuauguauagguuaucaugcgaacaauucaacagacacuguggacacaguacuagaaaagaauguaacaguaacacacucuguuaaccuucuagaagacaagcauaacgggaaacuaugcaaacuaagagggguagccccauugcauuuggguaaauguaacauugcuggcuggauccugggaaauccagagugugaaucacucuccacagcaagcucaugguccuacauuguggaaacaucuaguucagacaauggaacguguuacccaggagauuucaucgauuaugaggagcuaagagagcaauugagcucagugucaucauuugaaagguuugagauauuccccaagacaaguucauggcccaaucaugacucgaacaaagguguaacggcagcauguccucaugcuggagcaaaaagcuucuacaaaaauuuaauauggcuaguuaaaaaaggaaauucauacccaaagcucagcaaauccuacauuaaugauaaagggaaagaaguccucgugcuauggggcauucaccauccaucuacuagugcugaccaacaaagucucuaucagaaugcagaugcauauguuuuuguggggacaucaagauacagcaagaaguucaagccggaaauagcaauaagacccaaagugagggaucaagaagggagaaugaacuauuacuggacacuaguagagccgggagacaaaauaacauucgaagcaacuggaaaucuagugguaccgagauaugcauucgcaauggaaagaaaugcuggaucugguauuaucauuucagauacaccaguccacgauugcaauacaacuugucagacacccaagggugcuauaaacaccagccucccauuucagaauauacauccgaucacaauuggaaaauguccaaaauauguaaaaagcacaaaauugagacuggccacaggauugaggaaugucccgucuauucaaucuagaggccuauuuggggccauugccgguuucauugaagggggguggacagggaugguagauggaugguacgguuaucaccaucaaaaugagcaggggucaggauaugcagccgaccugaagagcacacagaaugccauugacaagauuacuaacaaaguaaauucuguuauugaaaagaugaauacacaguucacagcaguagguaaagaguucaaccaccuggaaaaaagaauagagaauuuaaauaaaaaaguugaugaugguuuccuggacauuuggacuuacaaugccgaacuguugguucuauuggaaaaugaaagaacuuuggacuaccacgauucaaaugugaagaacuuauaugaaaagguaagaagccagcuaaaaaacaaugccaaggaaauuggaaacggcugcuuugaauuuuaccacaaaugcgauaacacgugcauggaaagugucaaaaaugggacuuaugacuacccaaaauacucagaggaagcaaaauuaaacagagaagaaauagaugggguaaagcuggaaucaacaaggauuuaccagauuuuggcgaucuauucaacugucgccaguucauugguacugguagucucccugggggcaaucaguuucuggaugugcucuaaugggucucuacaguguagaauauguauuuaa

SEQ ID NO: 37041 - RNA, 1701 nt, Artificial Sequence
  derived and/or modified CDS sequence (wt) from hemagglutinin__InfluenzaA__ADI24573
augaaggcaauacuaguaguucugcuauauacauuugcaaccgcaaaugcagacacauuauguauagguuaucaugcgaacaauucaacagacacuguagacacaguacuagaaaagaauguaacaguaacacacucuguuaaccuucuagaagacaagcauaacgggaaacuaugcaaacuaagagggguagccccauugcauuuggguaaauguaacauugcuggcuggauccugggaaauccagagugugaaucacucuccacagcaagcucaugguccuacauuguggaaacaucuaguucagacaauggaacguguuacccaggagauuucaucaauuaugaggagcuaagagagcaauugagcucagugucaucauuugaaagguuugagauauuccccaagacaaguucauggcccaaucaugacucgaacaaagguguaacggcagcauguccucaugcuggagcaaaaagcuucuacaaaaauuuaauauggcuaguuaaaaaaggaaauucauacccaaagcucagcaaauccuacauuaaugauaaagggaaagaaguccucgugcuauggggcauucaccauccaucuacuagugcugaccaacaaagucucuaucagaaugcagaugcauauguuuuuguggggacaucaagauacagcaagaaguucaagccggaaauagcaauaagacccaaagugagggaucaagaagggagaaugaacuauuacuggacacuaguagagccgggagacaaaauaacauucgaagcaacuggaaaucuagugguaccgagauaugcauucgcaauggaaagaaaugcuggaucugguauuaucauuucagacacaccaguccacgauugcaauacaacuugucagacacccaagggugcuauaaacaccagccucccauuucagaauauacauccgaucacaauuggaaaauguccaaaauauguaaaaagcacaaaauugagacuggccacaggauugaggaaugucccgucuauucaaucuagaggccuauuuggggccauugccgguuucauugaagggggguggacagggaugguagauggaugguacgguuaucaccaucaaaaugagcaggggucaggauaugcagccgaccugaagagcacacagaaugccauugacaagauuacuaacaaaguaaauucuguuauugaaaagaugaauacacaguucacagcaguagguaaagaguucaaccaccuggaaaaaagaauagagaauuuaaauaaaaaaguugaugaugguuuccuggacauuuggacuuacaaugccgaacuguugguucuauuggaaaaugaaagaacuuuggacuaccacgauucaaaugugaagaacuuauaugaaaagguaagaagccaguuaaaaaacaaugccaaggaaauuggaaacggcugcuuugaauuuuaccacaaaugcgauaacacgugcauggaaagugucaaaaaugggacuuaugacuacccaaaauacucagaggaagcaaaauuaaacagagaagaaauagaugggguaaagcuggaaucaacaaggauuuaccagauuuuggcgaucuauucaacugucgccaguucauugguacugguagucucccugggggcaaucaguuucuggaugugcucuaaugggucucuacaguguagaauauguauuuaa

SEQ ID NO: 37042 - RNA, 1701 nt, Artificial Sequence
  derived and/or modified CDS sequence (wt) from hemagglutinin__InfluenzaA__ADI24575
augaaggcaauacuaguaguucugcuauauacauuugcaaccgcaaaugcagacacauuauguauagguuaucaugcgaacaauucaacagacacuguagacacaguacuagaaaagaauguaacaguaacacacucuguuaaccuucuagaagacaagcauaacgggaaacuaugcaaacuaagagggguagccccauugcauuuggguaaauguaacauugcuggcuggauccugggaaauccagagugugaaucacucuccacagcaagcucaugguccuacauuguggaaacaucuaguucagacaauggaacguguuacccaggagauuucaucaauuaugaggagcuaagagagcaauugagcucagugucaucauuugaaagguuugagauauuccccaagacaaguucauggcccaaucaugacucgaacaaagguguaacggcagcauguccucaugcuggagcaaaaagcuucuacaaaaauuuaauauggcuaguuaaaaaaggaaauucauacccaaagcucagcaaauccuacauuaaugauaaagggaaagaaguccucgugcuauggggcauucaccauccaucuacuagugcugaccaacaaagucucuaucagaaugcagaugcauauguuuuuguggggacaucaagauacagcaagaaguucaagccggaaauagcaauaagacccaaagugagggaucaagaagggagaaugaacuauuacuggacacuaguagagccgggagacaaaauaacauucgaagcaacuggaaaucuagugguaccgagauaugcauucgcaauggaaagaaaugcuggaucugguauuaucauuucagauacaccaguccacgauugcaauacaacuugucagacacccaagggugcuauaaacaccagccucccauuucagaauauacauccgaucacaauuggaaaauguccaaaauauguaaaaagcacaaaauugagacuggccacaggauugaggaaugucccgucuauucaaucuagaggccuauuuggggccauugccgguuucauugaagggggguggacagggaugguagauggaugguacgguuaucaccaucaaaaugagcaggggucaggauaugcagccgaccugaagagcacacagaaugccauugacaagauuacuaacaaaguaaauucuguuauugaaaagaugaauacacaguucacagcaguagguaaagaguucaaccaccuggaaaaaagaauagagaauuuaaauaaaaaaguugaugaugguuuccuggacauuuggacuuacaaugccgaacuguugguucuauuggaaaaugaaagaacuuuggacuaccacgauucaaauguggagaacuuauaugaaaagguaagaagccaguuaaaaaacaaugccaaggaaauuggaaacggcugcuuugaauuuuaccacaaaugcgauaacacgugcauggaaagugucaaaaaugggacuuaugacuacccaaaauacucagaggaagcaaaauuaaacagagaagaaauagaugggguaaagcuggaaucaacaaggauuuaccagauuuuggcgaucuauucaacugucgccaguucauugguacugguagucucccugggggcaaucaguuucuggaugugcucuaaugggucucuacaguguagaauauguauuuaa

SEQ ID NO: 37043 - RNA, 1701 nt, Artificial Sequence
  derived and/or modified CDS sequence (wt) from hemagglutinin__InfluenzaA__ADI24577
augaaggcaauacuaguaguucugcuauauacauuugcaaccgcaaaugcagacacauuauguauagguuaucaugcgaacaauucaacagacacuguagacacaguacuagaaaagaauguaacaguaacacacucuguuaaccuucuagaagacaagcauaacggaaaacuaugcaaacuaagagggguagccccauugcauuuggguaaauguaacauugcuggcuggauccugggaaauccagagugugaaucacucuccacagcaagcucaugguccuacauuguggaaacaucuaguucagacaauggaacguguuacccaggagauuucaucgauuaugaggagcuaagagagcaauugagcucagugucaucauuugaaagguuugagauauuccccaagacaaguucauggcccaaucaugacucgaacaaagguguaacggcagcauguccucaugcuggagcaaaaagcuucuacaaaaauuuaauauggcuaguuaaaaaaggaaauucauacccaaagcucagcaaauccuacauuaaugauaaagggaaagaaguccucgugcuauggggcauucaccauccaucuacuagugcugaccaacaaagucucuaucagaaugcagaugcauauguuuuuguggggacaucaagauacagcaagaaguucaagccggaaauagcaauaagacccaaagugagggaucaagaagggagaaugaacuauuacuggacacuaguagagccgggagacaaaauaacauucgaagcaacuggaaaucuagugguaccgagauaugcauucgcaauggaaagaaaugcuggaucugguauuaucauuucagauacaccaguccacgauugcaauacaacuugucagacacccaagggugcuauaaacaccagccucccauuucagaauauacauccgaucacaauuggaaaauguccaaaauauguaaaaaguacaaaauugagacuggccacaggauugaggaaugucccgucuauucaaucuagaggccuauuuggggccauugccgguuucauugaagggggguggacagggaugguagauggaugguacgguuaucaccaucaaaaugagcaggggucaggauaugcagccgaccugaagagcacacagaaugccauugacaagauuacuaacaaaguaaauucuguuauugaaaagaugaauacacaguucacagcaguagguaaagaguucaaccaccuggaaaaaagaauagagaauuuaaauaaaaaaguugaugaugguuuccuggacauuuggacuuacaaugccgaacuguugguucuauuggaaaaugaaagaacuuuggacuaccacgauucaaaugugaagaacuuauaugaaaagguaagaagccaguuaaaaaacaaugccaaggaaauuggaaacggcugcuuugaauuuuaccacaaaugcgauaacacgugcauggaaagugucaaaaaugggacuuaugacuacccaaaauacucagaggaagcaaaauuaaacagagaagaaauagaugggguaaagcuggaaucaacaaggauuuaccagauuuuggcgaucuauucaacugucgccaguucauugguacugguagucucccugggggcaaucaguuucuggaugugcucuaaugggucucuacaguguagaauauguauuuaa

SEQ ID NO: 37044 - RNA, 1701 nt, Artificial Sequence
  derived and/or modified CDS sequence (wt) from hemagglutinin__InfluenzaA__ADI24581
augaaggcaauacuaguaguucugcuauauacauuugcaaccgcaaaugcagacacauuauguauagguuaucaugcgaacaauucaacagacacuguagacacaguacuagaaaagaauguaacaguaacacacucuguuaaccuucuagaagacaagcauaacgggaaacuaugcaaacuaagagggguagccccauugcauuuggguaaauguaacauugcuggcuggguccugggaaauccagagugugaaucacucuccacagcaagcucaugguccuacauuguggaaacaucuaguucagacaauggaacguguuacccaggagauuucaucgauuaugaagagcuaagagagcaauugagcucagugucaucauuugaaagguuugagauauucccuaagacaaguucauggcccaaucaugacucgaacaaagguguaacggcagcauguccucaugcuggagcaaaaagcuucuacaaaaauuuaauauggcuaguuaaaaaaggaaauucauacccaaagcucagcaaauccuacauuaaugauaaagggaaagaaguccucgugcuauggggcauucaccauccaucuacuagugcugaccaacaaagucucuaucagaaugcagaugcauauguuuuugugggaacaucaagauacagcaagaaguucaagccggaaauagcaauaagacccaaagugagggaucaagaagggagaaugaacuauuacuggacacuaguagagccgggagacaaaauaacauucgaagcaacuggaaaucuagugguaccgagauaugcauucgcaauggaaagaaaugcuggaucugguauuaucauuucagauacaccaguccacgauugcaauacaacuugucagacacccaagggugcuauaaacaccagccucccauuucagaauauacauccgaucacaauuggaaaauguccaaaauauguaaaaagcacaaaauugagacuggccacaggauugaggaaugucccgucuauucaaucuagaggccuauuuggggccauugccgguuucauugaagggggguggacagggaugguagauggaugguacgguuaucaccaucaaaaugagcaggggucaggauaugcagccgaccugaagagcacacagaaugccauugacaagauuacuaacaaaguaaauucuguuauagaaaagaugaauacacaguucacagcaguagguaaagaguucaaccaccuggaaaaaagaauagagaauuuaaauaaaaaaguugaugaugguuuccuggacauuuggacuuacaaugccgaacuguugguucuauuggaaaaugaaagaacuuuggacuaccacgauucaaaugugaagaacuuauaugaaaagguaagaagccaguuaaaaaacaaugccaaggaaauuggaaacggcugcuuugaauuuuaccacaaaugcgauaacacgugcauggaaagugucaaaaaugggacuuaugacuacccaaaauacucagaagaagcaaaauuaaacagagaagaaauagaugggguaaagcuggaaucaacaaggauuuaccagauuuuggcgaucuauucaacugucgccaguucauugguacugguagucucccugggggcaaucaguuucuggaugugcucuaaugggucucuacaguguagaauauguauuuaa

SEQ ID NO: 37045 - RNA, 1701 nt, Artificial Sequence
  derived and/or modified CDS sequence (wt) from hemagglutinin__InfluenzaA__ADI24583
augaaggcaauacuaguaguucugcuauauacauuugcaaccgcaaacgcagacacauuauguauagguuaucaugcgaacaauucaacagacacuguagacacaauacuagaaaagaauguaacaguaacacacucuguuaaccuucuagaagacaagcauaacgggaaacuaugcaaacuaagagggguagccccauugcauuuggguaaauguaacauugcuggcuggauccugggaaauccagagugugaaucacucuccacagcaagcucaugguccuacauuguggaaacaucuaguucagacaauggaacguguuacccaggagauuucaucgauuaugaggagcuaagagagcaauugagcucagugucaucauuugaaagguuugagauauuccccaagacaaguucauggcccaaucaugacucgaacaaagguguaacggcagcauguccucaugcuggagcaaaaagcuucuacaaaaauuuaauauggcuaguuaaaaaaggaaauucauacccaaagcucagcaaguccuacauuaaugauaaagggaaagaaguccucgugcuauggggcauucaccauccaucuacuagugcugaccaacaaagucucuaucagaaugcagaugcauauguuuuuguggggacaucaagauacagcaagaaguucaagccggaaauagcaauaagacccaaagugagggaucaagaagggagaaugaacuauuacuggacacuaguagagccgggagacaaaauaacauuugaagcaacuggaaaucuagugguaccgagauaugcauucgcaauggaaagaaaugcuggaucugguauuaucauuucagauacaccaguccacgauugcaauacaacuugucagacacccaagggugcuauaaacaccagccucccauuucagaauauacauccaaucacaauuggaaaauguccaaaauauguaaaaagcacaaaauugagacuggccacaggauugaggaaugucccgucuauucaaucuagaggccuauuuggggccauugccgguuucauugaagggggguggacagggaugguagauggaugguacgguuaucaccaucaaaaugagcaggggucaggauaugcagccgaccugaagagcacacagaaugccauugacaagauuacuaacaaaguaaauucuguuauugaaaagaugaauacacaguucacagcaguagguaaagaguucaaccaccuggaaaaaagaauagagaauuuaaauaaaaaaguugaugaugguuuccuggacauuuggacuuacaaugccgaacuguugguucuauuggaaaaugaaagaacuuuggacuaccacgauucaaaugugaagaacuuauaugaaaagguaagaagccaguuaaaaaacaaugccaaggaaauuggaaacggcugcuuugaauuuuaccacaaaugcgauaacacgugcauggaaagugucaaaaaugggacuuaugacuacccaaaauacucagaggaagcaaaauuaaacagagaagaaauagaugggguaaagcuggaaucaacaaggauuuaccagauuuuggcgaucuauucaacugucgccaguucauugguacugguagucucccugggggcaaucaguuucuggaugugcucuaaugggucucuacaguguagaauauguauuuaa

SEQ ID NO: 37046 - RNA, 1701 nt, Artificial Sequence
  derived and/or modified CDS sequence (wt) from hemagglutinin__InfluenzaA__ADI24590
augaaggcaauacuaguaguucuguuauacacauuugcaaccgcaaaugcagacacauuauguauagguuaucaugcgaacaauucaacagacacuguagacacaguacuagaaaagaauguaacaguaacacacucugcuaaccuucuagaagacaagcauaacgggaaacuaugcaaacuaagagggguagccccauugcauuuggguaaauguaacauugcuggcuggauccugggaaauccagagugugaaucacucuccacagcaagcucaugguccuacauuguggaaacaucuaguucagacaauggaacguguuacccaggagauuucaucgauuaugaggagcuaagagagcaauugagcucagugucaucauuugaaagguuugagauauuccccaagacaaguucauggcccaaucaugacucgaacaaagguguaacggcagcauguccucaugcuggagcaaaaagcuucuacaaaaauuuaauauggcuaguuaaaaaaggaaauucauacccaaagcucagcaaaucauacauuaaugauaaagggaaagaaguccucgugcuauggggcauucaccauccaucuacuagugcugaccaacaaagucucuaucagaaugcagaugcauauguuuuuguggggacaucaagauacagcaagaaguucaagccggaaauagcaauaagacccaaagugagggaucaagaagggagaaugaacuauuacuggacacuaguagagccgggagacaaaauaacauucgaagcaacuggaaaucuagugguaccgagauaugcauucgcaauggaaagaaaugcuggaucugguauuaucauuucagauacaccaguccacgauugcaauacaacuugucagacacccaagggugcuauaaacaccagccucccauuucagaauauacauccgaucacaauuggaaaauguccaaaauauguaaaaagcacaaaauugagacuggccacaggauugaggaaugucccgucuauucaaucuagaggccuauuuggggccauugccgguuucauugaagggggguggacagggaugguagauggaugguacgguuaucaccaucaaaaugagcaggggucaggauaugcagccgaccugaagagcacacagaaugccauugacaagauuacuaacaaaguaaauucuguuauugaaaagaugaauacacaguucacagcaguagguaaagaguucaaccaccuggaaaaaagaauagagaauuuaaauaaaaaaguugaugaugguuuccuggacauuuggacuuacaaugccgaacuguugguucuauuggaaaaugaaagaacuuuggacuaccacgauucaaaugugaagaacuuauaugaaaagguaagaagccaguuaaaaaacaaugccaaggaaauuggaaacggcugcuuugaauuuuaccacaaaugcgauaacacgugcauggaaagugucaaaaaugggacuuaugacuacccaaaauacucagaggaagcaaaauuaaacagagaagaaauagaugggguaaagcuggaaucaacaaggauuuaccagauuuuggcgaucuauucaacugucgccaguucauugguacugguagucucccugggggcaaucaguuucuggaugugcucuaaugggucucuacaguguagaauauguauuuaa

SEQ ID NO: 37047 - RNA, 1701 nt, Artificial Sequence
  derived and/or modified CDS sequence (wt) from hemagglutinin__InfluenzaA__ADI24597
augaaggcaauacuaguaguucugcuauacacauuugcaaccgcaaaugcagacacauuauguauagguuaucaugcgaacaauucaacagacacuguagacacaguacuagaaaagaauguaacaguaacacacucugcuaaccuucuagaagacaagcauaacgggaaacuaugcaaacuaagagggguagccccauugcauuuggguaauuguaacauugcuggcuggauccugggaaauccagagugugaaucacucuccacagcaagcucaugguccuacauuguggaaacaucuaguucagacaauggaacguguuacccaggagauuucaucgauuaugaggagcuaagagagcaauugagcucagugucaucauuugaaagguuugagauauuccccaagacaaguucauggcccaaucaugacucgaacaaagguguaacggcagcauguccucaugcuggagcaaaaagcuucuacaaaaauuuaauauggcuaguuaaaaaaggaaauucauacccaaagcucagcaaaucauacauuaaugauaaagggaaagaaguccucgugcuauggggcauucaccauccaucuacuagugcugaccaacaaagucucuaucagaaugcagaugcauauguuuuuguggggacaucaagauacagcaagaaguucaagccggaaauagcaauaagacccaaagugagggaucaagaagggagaaugaacuauuacuggacacuaguagagccgggagacaaaauaacauucgaagcaacuggaaaucuagugguaccgagauaugcauucgcaauggaaagaaaugcuggaucugguauuaucauuucagauacaccaguccacgauugcaauacaacuugucagacacccaagggugcuauaaacaccagccucccauuucagaauauacauccgaucacaauuggaaaauguccaaaauauguaaaaagcacaaaauugagacuggccacaggauugaggaaugucccgucuauucaaucuagaggccuauuuggggccauugccgguuucauugaagggggguggacagggaugguagauggaugguacgguuaucaccaucaaaaugagcaggggucaggauaugcagccgaccugaagagcacacagaaugccauugacaagauuacuaacaaaguaaauucuguuauugaaaagaugaauacacaguucacagcaguagguaaagaguucaaccaccuggaaaaaagaauagagaauuuaaauaaaaaaguugaugaugguuuccuggacauuuggacuuacaaugccgaacuguugguucuauuggaaaaugaaagaacuuuggacuaccacgauucaaaugugaagaacuuauaugaaaagguaagaagccaguuaaaaaacaaugccaaggaaauuggaaacggcugcuuugaauuuuaccacaaaugcgauaacacgugcauggaaagugucaaaaaugggacuuaugacuacccaaaauacucagaggaagcaaaauuaaacagagaagaaauagaugggguaaagcuggaaucaacaaggauuuaccagauuuuggcgaucuauucaacugucgccaguucauugguacugguagucucccugggggcaaucaguuucuggaugugcucuaaugggucucuacaguguagaauauguauuuaa

SEQ ID NO: 37048 - RNA, 1701 nt, Artificial Sequence
  derived and/or modified CDS sequence (wt) from hemagglutinin__InfluenzaA__ADI24612
augaaggcaauacuaguaguucugcuauacacauuugcaaccgcaaaugcagacacauuauguauagguuaucaugcgaacaauucaacagacacuguagacacaguacuagaaaagaauguaacaguaacacacucugcuaaccuucuagaagacaagcauaacgggaaacuaugcaaacuaagagggguagccccauugcauuuggguaaauguaacauugcuggcuggauccugggaaauccagagugugaaucacucuccacagcaagcucaugguccuacauuguggaaacaucuaguucagacaauggaacguguuacccaggagauuucaucgauuaugaggagcuaagagagcaauugagcucagugucaucauuugaaagguuugagauauuccccaagacaaguucauggcccaaucaugacucgaacaaagguguaacggcagcauguccucaugcuggagcaaaaagcuucuacaaaaauuuaauauggcuaguuaaaaaaggaaauucauacccaaagcucagcaaaucauacauuaaugauaaagggaaagaaguccucgugcuauggggcauucaccauccaucuacuagugcugaccaacaaagucucuaucagaaugcagaugcauauguuuuuguggggacaucaagauacagcaagaaguucaagccggaaauagcaauaagacccaaagugagggaucaagaagggagaaugaacuauuacuggacacuaguagagccgggagacaaaauaacauucgaagcaacuggaaaucuagugguaccgagauaugcauucgcaauggaaagaaaugcuggaucugguauuaucauuucagauacaccaguccacgauugcaauacaacuugucagacacccaagggugcuauaaacaccagccucccauuucagaauauacauccgaucacaauuggaaaauguccaaaauauguaaaaagcacaaaauugagacuggccacaggauugaggaaugucccgucuauucaaucuagaggccuauuuggggccauugccgguuucauugaagggggguggacagggaugguagauggaugguacgguuaucaccaucaaaaugagcaggggucaggauaugcagccgaccugaagagcacacagaaugccauugacaagauuacuaacaaaguaaauucuguuauugaaaagaugaauacacaguucacagcaguagguaaagaguucaaucaccuggaaaaaagaauagagaauuuaaauaaaaaaguugaugaugguuuccuggacauuuggacuuacaaugccgaacuguugguucuauuggaaaaugaaagaacuuuggacuaccacgauucaaaugugaagaacuuauaugaaaagguaagaagccaguuaaaaaacaaugccaaggaaauuggaaacggcugcuuugaauuuuaccacaaaugcgauaacacgugcauggaaagugucaaaaaugggacuuaugacuacccaaaauacucagaggaagcaaaauuaaacagagaagaaauagaugggguaaagcuggaaucaacaaggauuuaccagauuuuggcgaucuauucaacugucgccaguucauugguacugguagucucccugggggcaaucaguuucuggaugugcucuaaugggucucuacaguguagaauauguauuuaa

SEQ ID NO: 37049 - RNA, 1701 nt, Artificial Sequence
  derived and/or modified CDS sequence (wt) from hemagglutinin__InfluenzaA__ADI24619
augaaggcaauacuaguaguucugcuauacacauuugcaaccgcaaaugcagacacauuauguauagguuaucaugcgaacaauucaacagacacuguagacacaguacuagaaaagaauguaacaguaacacacucugcuaaccuucuagaagacaagcauaacgggaaacuaugcaaacuaagaggaguagccccauugcauuuggguaaauguaacauugcuggcuggauccugggaaauccagagugugaaucacucuccacagcaagcucaugguccuacauuguggaaacaucuaguucagacaauggaacguguuacccaggagauuucaucgauuaugaggagcuaagagagcaauugagcucagugucaucauuugaaagguuugagauauuccccaagacaaguucauggcccaaucaugacucgaacaaagguguaacggcagcauguccucaugcuggagcaaaaagcuucuacaaaaauuuaauauggcuaguuaaaaaaggaaauucauacccaaagcucagcaaaucauacauuaaugauaaaggaaaagaaguccucgugcuauggggcauucaccauccaucuacuaguguugaccaacaaagucucuaucagaaugcagaugcauauguuuuuguggggacaucaagauacagcaagaaguucaagccggaaauagcaauaagacccaaagugagggaucaagaagggagaaugaacuauuacuggacacuaguagagccgggagacaaaauaacauucgaagcaacuggaaaucuagugguaccgagauaugcauucgcaauggaaagaaaugcuggaucugguauuaucauuucagauacaccaguccacgauugcaauacaacuugucagacacccaagggugcuauaaacaccagccucccauuucagaauauacauccgaucacaauuggaaaauguccaaaauauguaaaaagcacaaaauugagacuggccacaggauugaggaaugucccgucuauucaaucuagaggccuauuuggggccauugccgguuucauugaagggggguggacagggaugguagauggaugguacgguuaucaccaucaaaaugagcaggggucaggauaugcagccgaccugaagagcacacagaaugccauugacaagauuacuaacaaaguaaauucuguuauugaaaagaugaauacacaguucacagcaguagguaaagaguucaaccaccuggaaaaaagaauagagaauuuaaauaaaaaaguugaugaugguuuccuggacauuuggacuuacaaugccgaacuguugguucuauuggaaaaugaaagaacuuuggacuaccacgauucaaaugugaagaacuuauaugaaaagguaagaagccaguuaaaaaacaaugccaaggaaauuggaaacggcugcuuugaauuuuaccacaaaugcgauaacacgugcauggaaagugucaaaaaugggacuuaugacuacccaaaauacucagaggaagcaaaauuaaacagagaagaaauagaugggguaaagcuggaaucaacaaggauuuaccagauuuuggcgaucuauucaacugucgccaguucauugguacugguagucucccugggggcaaucaguuucuggaugugcucuaaugggucucuacaguguagaauauguauuuaa

SEQ ID NO: 37050 - RNA, 1701 nt, Artificial Sequence
  derived and/or modified CDS sequence (wt) from hemagglutinin__InfluenzaA__ADI24621
augaaggcaauacuaguaguucugcuauauacauuugcaaccgcaaaugcagacacauuauguauagguuaucaugcgaacaacucaacagacacuguagacacaguacuagaaaagaauguaacaguaacacacucuguuaaccuucuagaagacaagcauaaugggaaacuaugcaaacuaagagggguagccccauugcauuuggguaaauguaacauugcuggcuggauccugggaaauccagagugugaaucacucuccacagcaagcucaugguccuacauuguggaaacaucuaguucagacaauggaacguguuacccaggagauuucaucgauuaugaggagcuaagagagcaauugagcucagugucaucauuugaaagguuugagauauuccccaagacaaguucauggcccaaucaugacucgaacaaagguguaacggcagcauguccucaugcuggagcaaaaagcuucuacaaaaauuuaauauggcuaguuaaaaaaggaaauucauacccaaagcucagcaaauccuacauuaaugauaaagggaaagaaguccucgugcuauggggcauucaccauccaucuacuagugcugaccaacaaagucucuaucagaaugcagaugcauauguuuuuguggggacaucaagauacagcaagaaguucaagccggaaauagcaauaagacccaaagugagggaucaagaagggagaaugaacuauuacuggacacuaguagagccgggagacaaaauaacauucgaagcaacuggaaaucuagugguaccgagauaugcauucgcaauggaaagaaaugcuggaucugguauuaucauuucagauacaccaguccacgauugcaauacaacuugucagacacccaaggguacuauaaacaccagccucccauuucagaauauacauccgaucacaauuggaaaauguccaaaauauguaaaaagcacaaaauugagacuggccacaggauugaggaaugucccgucuauucaaucuagaggccuauuuggggccauugccgguuucauugaagggggguggacagggaugguagauggaugguacgguuaucaccaucaaaaugagcaggggucaggauaugcagccgaccugaagagcacacagaaugccauugacaagauuacuaacaaaguaaauucuguuauugaaaagaugaauacacaguucacagcaguagguaaagaguucaaccaccuggaaaaaagaauagagaauuuaaauaaaaaaguugaugaugguuuccuggacauuuggacuuacaaugccgaacuguugguucuauuggaaaaugaaagaacuuuggacuaccacgauucaaaugugaagaacuuauaugaaaagguaagaagccaguuaaaaaacaaugccaaggaaauuggaaacggcugcuuugaauuuuaccacaaaugcgauaacacgugcauggaaagugucaaaaaugggacuuaugacuacccaaaauacucagaggaagcaaaauugaacagagaagaaauagaugggguaaagcuggaaucaacaaggauuuaccagauuuuggcgaucuauucaacugucgccaguucauugguacugauagucucccugggggcaaucaguuucuggaugugcucuaaugggucucuacaguguagaauauguauuuaa

SEQ ID NO: 37051 - RNA, 1701 nt, Artificial Sequence
  derived and/or modified CDS sequence (wt) from hemagglutinin__InfluenzaA__ADI48184
augaaggcaauacuaguaguucuguuauauacauuugcaaccgcaaaugcagacacauuaugcauagguuaucaugcgaacaauucaacagacacuguagacacaguacuagaaaagaauguaacaguaacacacucuguuaaccuucuagaagacaagcauaacgggaaacuaugcaaacuaagagggguagccccauugcauuuggguaaauguaacauugcuggcuggauccugggaaauccagagugugaaucacucuccacagcaagcucaugguccuacauuguggaaacaucuaguucagacaauggaacguguuacccaggagauuucaucgauuaugaggagcuaagagagcaauugagcucagugucaucauuugaaagguuugagauauuccccaagacaaguucauggcccaaucaugacucgaacaaagguguaacggcagcauguccucaugcuggagcaaaaagcuucuacaaaaauuuaauauggcuaguuaaaaaaggaaauucauacccaaagcucagcaaauccuacauuaaugauaaagggaaagaaguccucgugcuauggggcauucaccauccaucuacuagugcugaccaacaaagucucuaucagaaugcagaugcauauguuuuuguggggacaucaagauacagcaagaaguucaagccggaaauagcaauaagacccaaagugagggaucaagaagggagaaugaacuauuacuggacacuaguagagccgggagacaaaauaacauucgaagcaacuggaaaucuagugguaccgagauaugcauuugcaaugggaagaaaugcuggaucugguauuaucauuucagauacaccaguccacgauugcaauacaacuugucagacacccaagggugcuauaaacaccagccucccauuucagaauauacauccgaucacaauuggaaaauguccaaaauauguaaaaagcacaaaauugagacuggccacaggauugaggaaugucccgucuauucaaucuagaggccuauuuggggccauugccgguuucauugaagggggguggacagggaugguagauggaugguacgguuaucaccaucaaaaugagcaggggucaggauaugcagccgaccugaagagcacacagaaugccauugacaagauuacuaacaaaguaaauucuguuauugaaaagaugaauacacaguucacagcaguagguaaagaguucaaccaccuggaaaagagaauagagaauuuaaauaaaaagguugaugaugguuuccuggacauuuggacuuacaaugccgaacuguugguucuauuggaaaaugaaagaacuuuggacuaccacgauucaaaugugaagaacuuauaugaaaggguaagaagccaguuaaaaaacaaugccaaggaaauuggaaacggcugcuuugaauuuuaccacaaaugcgauaacacgugcauggaaagugucaaaaaugggacuuaugacuacccaaaauacucagaggaagcaaaauuaaacagagaagaaauagaugggguaaagcuggaaucaacaaggauuuaccagauuuuggcgaucuauucaacugucgccaguucauugguacugguagucucccugggggcaaucaguuucuggauguguucuaaugggucucuacaguguagaauauguauuuaa

SEQ ID NO: 37052 - RNA, 1701 nt, Artificial Sequence
  derived and/or modified CDS sequence (wt) from hemagglutinin__InfluenzaA__ADI48186
augaaggcaauacuaguaguucuguuauauacauuugcaaccgcaaaugcagacacauuauguauagguuaucaugcgaacaauucaacagacacuguagacacaguacuagaaaagaauguaacaguaacacacucuguuaaccuucuagaagacaagcauaacgggaaacuaugcaaacuaagagggguagccccauugcauuuggguaaauguaacauugcuggcuggauccugggaaauccagagugugaaucacucuccacagcaagcucaugguccuacauuguggaaacaucuaguucagacaauggaacguguuacccaggagauuucaucgauuaugaggagcuaagagagcaauugagcucagugucaucauuugaaagguuugagauauuccccaagacaaguucauggcccaaucaugacucgaacaaagguguaacggcagcauguccucaugcuggagcaaaaagcuucuacaaaaauuuaauauggcuaguuaaaaaaggaaauucauacccaaagcucagcaaauccuacauuaaugauaaagggaaagaaguccucgugcuauggggcauucaccauccaucuacuagugcugaccaacaaagccucuaucagaaugcagaugcauauguuuuuguggggacaucaagauacagcaagaaguucaagccggaaauagcaauaagacccaaagugagggaucaagaagggagaaugaacuauuacuggacacuaguagagccgggagacaaaauaacauucgaagcaacuggaaaucuagugguaccgagauaugcauucgcaauggaaagaaaugcuggaucugguauuaucauuucagauacaccaguccacgauugcaauacaacuugucagacacccaagggugcuauaaacaccagccucccauuucagaauauacauccgaucacaauuggaaaauguccaaaauauguaaaaagcacaaaauugagacuggccacaggauugaggaaugucccgucuauucaaucuagaggccuauuuggggccauugccgguuucauugaagggggguggacagggaugguagauggaugguacgguuaucaccaucaaaaugagcaggggucaggauaugcagccgaccugaagagcacacagaaugccauugacaagauuacuaacaaaguaaauucuguuauugaaaagaugaauacacaguucacagcaguagguaaagaguucaaccaccuggaaaaaagaauagagaauuuaaauaaaaaaguugaugaugguuuccuggacauuuggacuuacaaugccgaacuguugguucuauuggaaaaugaaagaacuuuggacuaccacgauucaaaugugaagaacuuauaugaaaagguaagaagccaguuaaaaaacaaugccaaggaaauuggaaacggcugcuuugaauuuuaccacaaaugcgauaacacgugcauggaaagugucaaaaaugggacuuaugacuacccaaaauacucagaggaagcaaaauugaacagagaagaaauagaugggguaaagcuggaaucaacaaggauuuaccagauuuuggcgaucuauucaacugucgccaguucauugguacugguagucucccugggggcaaucaguuucuggauguguucuaaugggucucuacaguguagaauauguauuuaa

SEQ ID NO: 37053 - RNA, 1701 nt, Artificial Sequence
  derived and/or modified CDS sequence (wt) from hemagglutinin__InfluenzaA__ADI48188
augaaggcaauacuaguaguucuguuauauacauuugcaaccgcaaaugcagacacauuauguauagguuaucaugcgaacaauucaacagacacuguagacacaguacuagaaaagaauguaacaguaacacacucuguuaaccuucuagaagacaagcauaacgggaaacuaugcaaacuaagagggguagccccauugcauuuggguaaauguaacauugcuggcuggauccugggaaauccagagugugaaucacucuccacagcaagcucaugguccuacauuguggaaacaucuaguucagacaauggaacguguuacccaggagauuucaucgauuaugaggagcuaagagagcaauugagcucagugucaucauuugaaagguuugagauauuccccaagacaaguucauggcccaaucaugacucgaacaaagguguaacggcagcauguccucaugcuggagcaaaaagcuucuacaaaaauuuaauauggcuaguuaaaaaaggaaauucauacccaaagcucagcaaauccuacauuaaugauaaagggaaagaaguccucgugcuauggggcauucaccauccaucuacuagugcugaccaacaaagccucuaucagaaugcagaugcauauguuuuuguggggacaucaagauacagcaagaaguucaagccggaaauagcaauaagacccaaagugagggaucaagaagggagaaugaacuauuacuggacacuaguagagccgggagacaaaauaacauucgaagcaacuggaaaucuagugguaccgagauaugcauucgcaauggaaagaaaugcuggaucugauauuaucauuucagauacaccaguccacgauugcaauacaacuugucagacacccaagggugcuauaaacaccagccucccauuucagaauauacauccgaucacaauuggaaaauguccaaaauauguaaaaagcacaaaauugagacuggccacaggauugaggaaugucccgucuauucaaucuagaggccuauuuggggccauugccgguuucauugaagggggguggacagggaugguagauggaugguacgguuaucaccaucaaaaugagcaggggucaggauaugcagccgaccugaagagcacacagaaugccauugacaagauuacuaacaaaguaaauucuguuauugaaaagaugaauacacaguucacagcaguagguaaagaguucaaccaccuggaaaagagaauagagaauuuaaauaaaaaaguugaugaugguuuccuggacauuuggacuuacaaugccgaacuguugguucuauuggaaaaugaaagaacuuuggacuaccacgauucaaaugugaagaacuuauaugaaaagguaagaagccaguuaaaaaacaaugccaaggaaauuggaaacggcugcuuugaauuuuaccacaaaugcgauaacacgugcauggaaagugucaaaaaugggacuuaugacuacccaaaauacucagaggaagcaaaauugaacagagaagaaauagaugggguaaagcuggaaucaacaaggauuuaccagauuuuggcgaucuauucaacugucgccaguucauugguacugguagucucccugggggcaaucaguuucuggauguguucuaaugggucucuacaguguagaauauguauuuaa

SEQ ID NO: 37054 - RNA, 1701 nt, Artificial Sequence
  derived and/or modified CDS sequence (wt) from hemagglutinin__InfluenzaA__ADI48190
augaaggcaauacuaguaguucuguuauauacauuugcaaccgcaaaugcagacacauuauguauagguuaucaugcgaacaauucaacagauacuguagacacaguacuagaaaagaauguaacaguaacacacucuguuaaccuucuagaagacaagcauaacgggaaacugugcaaacuaagagggguagccccauugcauuuggguaaauguaacauugcuggcuggauccugggaaauccagagugugaaucacucuccacagcaagcucaugguccuacauuguggaaacaucuaguucagacaauggaacguguuacccaggagauuucaucgauuaugaggagcuaagagagcaauugagcucagugucaucauuugaaagguuugagauauuccccaagacaaguucauggcccaaucaugacucgaacaaagguguaacggcagcauguccucaugcuggagcaaaaagcuucuacaaaaauuuaauauggcuaguuaaaaaaggaaauucauacccaaagcucagcaaauccuacauuaaugauaaagggaaagaaguccucgugcuauggggcauucaccauccaucuacuagugcugaccaacaaagucucuaucagaaugcagaugcauauguuuuuguggggacaucaagauacagcaagaaguucaagccggaaauagcaauaagacccaaagugagggaucaagaagggagaaugaacuauuacuggacacuaguagagccgggagacaaaauaacauucgaagcaacuggaaaucuagugguaccgagauaugcauucgcaauggaaagaaaugcuggaucugguauuaucauuucagauacaccaguccacgauugcaauacaacuugucagacacccaagggugcuauaaacaccagccucccauuucagaauauacauccgaucacaauuggaaaauguccaaaauauguaaaaagcacaaaauugagacuggccacaggauugaggaaugucccgucuauucaaucuagaggccuauuuggggccauugccgguuucauugaagggggguggacagggaugguagauggaugguacgguuaucaccaucaaaaugagcaggggucaggauaugcagccgaccugaagagcacacagaaugccauugacaagauuacuaacaaaguaaauucuguuauugaaaagaugaauacacaguucacagcaguagguaaagaguucaaccaccuggaaaagagaauagagaauuuaaauaaaaaaguugaugaugguuuccuggacauuuggacuuacaaugccgaauuguugguucuauuggaaaaugaaagaacuuuggacuaccacgauucaaaugugaagaacuuauaugaaaagguaagaagccaguuaaaaaacaaugccaaggaaauuggaaacggcugcuuugaauuuuaccacaaaugcgauaacacgugcauggaaagugucaaaaaugggacuuaugacuacccaaaauacucagaggaagcaaaauuaaacagagaagaaauagaugggguaaagcuggaaucaacaaagauuuaccagauuuuggcgaucuauucaacugucgccaguucauugguacugguagucucccugggggcaaucaguuucuggauguguucuaaugggucucuacaguguagaauauguauuuaa

SEQ ID NO: 37055 - RNA, 1701 nt, Artificial Sequence
  derived and/or modified CDS sequence (wt) from hemagglutinin__InfluenzaA__ADI48192
augaaggcaauacuaguaguucugcuauauacauuugcaaccgcaaaugcagacacauuauguauagguuaucaugcgaacaauucaacagacacuguagacacaguacuagaaaagaauguaacaguaacacacucuguuaaccuucuagaagacaagcauaacgggaaacuaugcaaacuaagagggguagccccauugcauuuggguaaauguaacauugcuggcuggauccugggaaauccagagugugaaucacucuccacagcaagcucaugguccuacauuguggaaacaucuaguucagacaauggaacguguuacccaggagauuucaucgauuaugaggagcuaagagagcaauugagcucagugucaucauuugaaagguuugagauauuccccaagacaaguucauggcccaaucaugacucgaacaaagguguaacggcagcauguccucaugcuggagcaaaaagcuucuacaaaaauuuaauauggcuaguuaaaaaaggaaauucauacccaaagcucagcaaauccuacauuaaugauaaagggaaagaaguccucgugcuauggggcauucaccauccaucuacuagugcugaccaacaaagucucuaucagaaugcagaugcauauguuuuuguggggacaucaagauacagcaagaaguucaagccggaaauagcaauaagacccaaagugagggaucaagaagggagaaugaacuauuacuggacacuaguagagccgggagacaaaauaacauucgaagcaacuggaaaucuagugguaccgagauaugcauucgcaauggaaagaaaugcuggaucugguauuaucauuucagauacaccaguccacgauugcaauacaacuugucagacacccaagggugcuauaaacaccagccucccauuucagaauauacauccgaucacaauuggaaaauguccaaaauauguaaaaagcacaaaauugagacuggccacaggauugaggaaugucccgucuauucaaucuagaggccuauuuggggccauugccgguuucauugaagggggguggacagggaugguagauggaugguacgguuaucaccaucaaaaugagcaggggucaggauaugcagccgaccugaagagcacacagaaugccauugacaagauuacuaacaaaguaaauucuguuauugaaaagaugaauacacaguucacagcaguagguaaagaguucaaccaccuggaaaaaagaauagagaauuuaaauaaaaaaguugaugaugguuuccuggacauuuggacuuacaaugccgaacuguugguucuauuggaaaaugaaagaacuuuggacuaccacgauucaaaugugaagaacuuauaugaaaagguaagaagccaguuaaaaaacaaugccaaggaaauuggaaacggcugcuuugaauuuuaccacaaaugcgauaacacgugcauggaaagugucaaaaaugggacuuaugacuacccaaaauacucagaggaagcaaaauuaaacagagaagaaauagaugggguaaagcuggaaucaacaaggauuuaccagauuuugacgaucuauucaacugucgccaguucauugguacugguagucucccugggggcaaucaguuucuggauguguucuaaugggucucuacaguguagaauauguauuuaa

SEQ ID NO: 37056 - RNA, 1701 nt, Artificial Sequence
  derived and/or modified CDS sequence (wt) from hemagglutinin__InfluenzaA__ADI48194
augaaggcaauacuaguaguucugcuauauacauuugcaaccgcaaaugcagacacauuauguauagguuaucaugcgaacaauucaacagacacuguagacacaguacuagaaaagaauguaacaguaacacacucuguuaaccuucuagaagacaagcauaacgggaaacuaugcaaacuaagagggguagccccauugcauuuggguaaauguaacauugcuggcuggauccugggaaauccagagugugaaucacucuccacagcaagcucaugguccuacauuguggaaacaucuaguucagacaauggaacguguuacccaggagauuucaucgauuaugaggagcuaagagagcaauugagcuuagugucaucauuugaaagguuugagauauuccccaagacaaauucauggcccaaucaugacucgaacaaagguguaacggcagcauguccucaugcuggagcaaaaagcuucuacaaaaauuuaauauggcuaguuaaaaaaggaaauucauacccaaagcucagcaaauccuacauuaaugauaaagggaaagaaguccucgugcuauggggcauucaccauccaucuacuagugcugaccaacaaagucucuaucagaaugcagaugcauauguuuuuguggggacaucaagauacagcaagaaguucaagccggaaauagcaauaagacccaaagugagggaucaagaagggagaaugaacuauuacuggacacuaguagagccgggagacaaaauaacauucgaagcaacuggaaaucuagugguaccgagauaugcauucgcaauggaaagaaaugcuggaucugguauuaucauuucagauacaccaguccacgauugcaauacaacuugucagacacccaagggugcuauaaacaccagccucccauuucagaauauacauccgaucacaauuggaaaauguccaaaauauguaaaaagcacaaaauugagacuggccacaggauugaggaaugucccgucuauucaaucuagaggccuauuuggggccauugccgguuucauugaagggggguggacagggaugguagauggaugguacgguuaucaccaucaaaaugagcaggggucaggauaugcagccgaccugaagagcacacagaaugccauugacaagauuacuaacaaaguaaauucuguuauugaaaagaugaauacacaguucacagcaguagguaaagaguucaaccaccuggaaaaaagaauagagaauuuaaauaaaaaaguugaugaugguuuccuggacauuuggacuuacaaugccgaacuguugguucuauuggaaaaugaaagaacuuuggacuaccacgauucaaaugugaagaacuuauaugaaaagguaagaagccaguuaaaaaacaaugccaaggaaauuggaaacggcugcuuugaauuuuaccacaaaugcgauaacacgugcauggagagugucaaaaaugggacuuaugacuacccaaaauacucagaggaagcaaaauuaaacagagaagaaauagaugggguaaagcuggaaucaacaaggauuuaccagauuuuggcgauuuauucaacugucgccaguucauugguacugguagucucccugggggcaaucaguuucuggauguguucuaaugggucucuacaguguagaauauguauuuaa

SEQ ID NO: 37057 - RNA, 1701 nt, Artificial Sequence
  derived and/or modified CDS sequence (wt) from hemagglutinin__InfluenzaA__ADI48196
augaaggcaauacuaguaguucugcuauacacauuugcaaccgcaaaugcagacacauuauguauagguuaucaugcgaacaauucaacagacacuguagacacaguacuagaaaagaauguaacaguaacacacucuguuaaccuucuagaagacaagcauaacgggaaacuaugcaaacuaagagggguagccccauugcauuuggguaaauguaacauugcuggcuggauccugggaaauccagagugugaaucacucuccacagcaagcucaugguccuacauuguggaaacaucuaguucagacaauggaacguguuacccaggagauuucaucgauuaugaggagcuaagagagcaauugagcucagugucaucauuugaaagguuugagauauuccccaagacaaguucauggcccaaucaugacucgaacaaagguguaacggcagcauguccucaugcuggagcaaaaagcuucuacaaaaauuuaauauggcuaguuaaaaaaggaaauucauacccaaagcucagcaaauccuacauuaaugauaaagggaaagaaguccucgugcuauggggcauucaccauccaucuacuagugcugaccaacaaagucucuaucagaaugcagaugcauauguuuuuguggggacaucaagauacagcaagaaguucaagccggaaauagcaauaagacccaaagugagggaucaagaagggagaaugaacuauuacuggacacuaguagagccgggagacaaaauaacauucgaagcaacuggaaaucuagugguaccgagauaugcauucgcaauggaaagaaaugcuggaucugguauuaucauuucagauacaccaguccacgauugcaauacaacuugucagacacccaagggugcuauaaacaccagccucccauuucagaauauacauccgaucacaauuggaaaauguccaaaauauguaaaaagcacaaaauugagacuggccacaggauugaggaaugucccgucuauucaaucuagaggccuauuuggggccauugccgguuucauugaagggggguggacagggaugguagauggaugguacgguuaucaccaucaaaaugagcaggggucaggauaugcagccgaccugaagagcacacagaaugccauugacaagauuacuaacaaaguaaauucuguuauugaaaagaugaauacacaguucacagcaguagguaaagaguucaaccaccuggaaaaaagaauagagaauuuaaauaaaaaaguugaugaugguuuccuggacauuuggacuuacaaugccgaacuguugguucuauuggaaaaugaaagaacuuuggacuaccacgauucaaaugugaagaacuuauaugaaaagguaagaagccaguuaaaaaacaaugccaaggaaauuggaaacggcugcuuugaauuuuaccacaaaugcgauaacacgugcauggaaagugucaaaaaugggacuuaugacuacccaaaauacucagaggaagcaaaauuaaacagagaagaaauagaugggguaaaguuggacucaacaaggauuuaccagauuuuggcgaucuauucaacugucgccaguucauugguacugguagucucccugggggcaaucaguuucuggaugugcucuaaugggucucuacaguguagaauauguauuuaa

SEQ ID NO: 37058 - RNA, 1701 nt, Artificial Sequence
  derived and/or modified CDS sequence (wt) from hemagglutinin__InfluenzaA__ADI48198
augaaggcaauacuaguaguucugcuauauacauuugcaaccgcaaaugcagacacauuauguauagguuaucaugcgaacaauucaacagacacuguagacacaguacuagaaaagaauguaacaguaacacacucuguuaaccuucuagaagacaagcauaacgggaaacuaugcaaacuaagagggguagccccauugcauuuggguaaauguaacauugcuggcuggaucuugggaaauccagagugugaaucacucuccacagcaagcucaugguccuacauuguggaaacaucuaguucagacaauggaacguguuacccaggagauuucaucgauuaugaggagcuaagagagcaauugagcucagugucaucauuugaaagguuugagauauuccccaagacaaguucauggcccaaucaugacucgaacaaagguguaacggcagcauguccucaugcuggagcaaaaagcuucuacaaaaauuuaauauggcuaguuaaaaaaggaaauucauacccaaagcucagcaaauccuacauuaaugauaaagggaaagaaguccucgugcuauggggcauucaccauccaucuacuagugcugaccaacaaagucucuaucagaaugcagaugcauauguuuuuguggggacaucaagauacagcaagaaguucaagccggaaauagcaauaagacccaaagugagggaucaagaagggagaaugaacuauuacuggacacuaguagagccgggagacaaaauaacauucgaagcaacuggaaaucuagugguaccgagauaugcauucgcaauggaaagaaaugcuggaucugguauuaucauuucagauacaccaguccacgauugcaauacaacuugucagacacccaagggugcuauaaacaccagccucccauuucagaauauacauccgaucacaauuggaaaauguccaaaauauguaaaaagcacaaaauugagacuggccacaggauugaggaaugucccgucuauucaaucuagaggccuauuuggggccauugccgguuucauugaagggggguggacagggaugguagauggaugguacgguuaucaccaucaaaaugagcaggggucaggauaugcagccgaccugaagagcacacagaaugccauugacaagauuacuaacaaaguaaauucuguuauugaaaagaugaauacacaguucacagcaguagguaaagaguucaaccaccuggaaaaaagaauagagaauuuaaauaaaaaaguugaugaugguuuccuggacauuuggacuuacaaugccgaacuguugguucuuuuggaaaaugaaagaacuuuggacuaccacgauucaaaugugaagaacuuauaugaaaagguaagaagccaguuaaaaaacaaugccaaggaaauuggaaacggcugcuuugaauuuuaccacaaaugcgauaacacgugcauggaaagugucaaaaaugggacuuaugacuacccaaaauacucagaggaagcaaaauuaaacagagaagaaauagaugggguaaagcuggaaucaacaaggauuuaccagauuuuggcgaucuauucaacugucgccaguucauugguacugguagucucccugggggcaaucaguuucuggaugugcucuaaugggucucuacaguguagaauauguauuuaa

SEQ ID NO: 37059 - RNA, 1701 nt, Artificial Sequence; identical to SEQ ID NO: 37058
  derived and/or modified CDS sequence (wt) from hemagglutinin__InfluenzaA__ADI48200

SEQ ID NO: 37060 - RNA, 1701 nt, Artificial Sequence
  derived and/or modified CDS sequence (wt) from hemagglutinin__InfluenzaA__ADI48202
augaaggcaauacuaguaguucugcuauauacauuugcaaccgcaaaugcagacacauuauguauagguuaucaugcgaacaauucaacagacacuguagacacaguacuagaaaagaauguaacaguaacacacucuguuaaccuucuagaagacaagcauaacgggaaacuaugcaaacuaagagggguagccccauugcauuuggguaaauguaacauugcuggcuggaucuugggaaauccagagugugaaucacucuccacagcaagcucaugguccuacauuguggaaacaucuaguucagacaauggaacguguuacccaggagauuucaucgauuaugaggagcuaagagagcaguugagcucagugucaucauuugaaagguuugagauauuccccaagauaaguucauggcccaaucaugacucgaacaaagguguaacggcagcauguccucaugcuggagcaaaaagcuucuacaaaaauuuaauauggcuaguuaaaaaaggaaauucauacccaaagcucagcaaauccuacauuaaugauaaagggaaagaaguccucgugcuauggggcauucaccauccaucuacuagugcugaccaacaaagucucuaucagaaugcagaugcauauguuuuuguggggacaucaagauacagcaagaaguucaagccggaaauagcaauaagacccaaagugagggaucaagaagggagaaugaacuauuacuggacacuaguagagccgggagacaaaauaacauucgaagcaacuggaaaucuagugguaccgagauaugcauucgcaauggaaagaaaugcuggaucugguauuaucauuucagauacaccaguccacgauugcaauacaacuugucagacacccaagggugcuauaaacaccagccucccauuucagaauauacauccgaucacaauuggaaaauguccaaaauauguaaaaagcacaaaauugagacuggccacaggauugaggaaugucccgucuauucaaucuagaggccuauuuggggccauugccgguuucauugaagggggguggacagggaugguagauggaugguacgguuaucaccaucaaaaugagcaggggucaggauaugcagccgaccugaagagcacacagaaugccauugacaagauuacuaacaaaguaaauucuguuauugaaaagaugaauacacaguucacagcaguagguaaagaguucaaccaccuggaaaaaagaauagagaauuuaaauaaaaaaguugaugaugguuuccuggacauuuggacuuacaaugccgaacuguugguucuuuuggaaaaugaaagaacuuuggacuaccacgauucaaaugugaagaacuuauaugaaaagguaagaagccaguuaaaaaacaaugccaaggaaauuggaaacggcugcuuugaauuuuaccacaaaugcgauaacacgugcauggaaagugucaaaaaugggacuuaugacuacccaaaauacucagaggaagcaaaauuaaacagagaagaaauagaugggguaaagcuggaaucaacaaggauuuaccagauuuuggcgaucuauucaacugucgccaguucauugguacugguagucucccugggggcaaucaguuucuggaugugcucuaaugggucucuacaguguagaauauguauuuaa

SEQ ID NO: 37061 - RNA, 1701 nt, Artificial Sequence
  derived and/or modified CDS sequence (wt) from hemagglutinin__InfluenzaA__ADI48204
augaaggcaauacuaguaguucugcuauauacauuugcaaccgcaaaugcagacacauuauguauagguuaucaugcgaacaauucaacagacacuguagacacaguacuagaaaagaauguaacaguaacacacucuguuaaccuucuagaagacaagcauaacgggaaacuaugcaaacuaagagggguagccccauugcauuuggguaaauguaacauugcuggcuggaucuugggaaauccagagugugaaucacucuccacagcaagcucaugguccuacauuguggaaacaucuaguucagacaauggaacguguuacccaggagauuucaucgauuaugaggagcuaagagagcaauugagcucagugucaucauuugaaagguuugagauauuccccaagacaaguucauggcccaaucaugacucgaacaaagguguaacggcagcauguccucaugcuggagcaaaaagcuucuacaaaaauuuaauauggcuaguuaaaaaaggaaauucauacccaaagcucagcaaauccuacauuaaugauaaagggaaagaaguccucgugcuauggggcauucaccauccaucuacuagugcugaccaacaaagucucuaucagaauguagaugcauauguuuuuguggggacaucaagauacagcaagaaguucaagccggaaauagcaauaagacccaaagugagggaucaagaagggagaaugaacuauuacuggacacuaguagagccgggagacaaaauaacauucgaagcaacuggaaaucuagugguaccgagauaugcauucgcaauggaaagaaaugcuggaucugguauuaucauuucagauacaccaguccacgauugcaauacaacuugucagacacccaagggugcuauaaacaccagccucccauuucagaauauacauccgaucacaauuggaaaauguccaaaauauguaaaaagcacaaaauugagacuggccacaggauugaggaaugucccgucuauucaaucuagaggccuauuuggggccauugccgguuucauugaagggggguggacagggaugguagauggaugguacgguuaucaccaucaaaaugagcaggggucaggauaugcagccgaccugaagagcacacagaaugccauugacaagauuacuaaaaaaguaaauucuguuauugaaaagaugaauacacaguucacagcaguagguaaagaguucaaccaccuggaaaaaagaauagagaauuuaaauaaaaaaguugaugaugguuuccuggacauuuggacuuacaaugccgaacuguugguucuuuuggaaaaugaaagaacuuuggacuaccacgauucaaaugugaagaacuuauaugaaaagguaagaagccaguuaaaaaacaaugccaaggaaauuggaaacggcugcuuugaauuuuaccacaaaugcgauaacacgugcauggaaagugucaaaaaugggacuuaugacuacccaaaauacucagaggaagcaaaauuaaacagagaagaaauagaugggguaaagcuggaaucaacaaggauuuaccagauuuuggcgaucuauucaacugucgccaguucauugguacugguagucucccugggggcaaucaguuucuggaugugcucuaaugggucucuacaguguagaauauguauuuaa

SEQ ID NO: 37062 - RNA, 1701 nt, Artificial Sequence
  derived and/or modified CDS sequence (wt) from hemagglutinin__InfluenzaA__ADI48208
augaaggcaauacuaguaguucugcuauauacauuugcaaccgcaaaugcagacacauuauguauagguuaucaugcgaacaauucaacagacacuguagacacaguacuagaaaagaauguaacaguaacacacucuguuaaccuucuagaagacaagcauaacgggaaacuaugcaaacuaagagggguagccccauugcauuuggguaaauguaacauugcuggcuggauccugggaaauccagagugugaaucacucuccacagcaagcucaugguccuacauuguggaaacaucuaguucagacaauggaacguguuacccaggagauuucaucgauuaugaggagcuaagagagcaauugagcucagugucaucauuugaaagguuugagauauuccccaagacaaguucauggcccaaucaugacucgaacaaagguguaacggcagcauguccucaugcuggagcaaaaagcuucuacaaaaauuuaauauggcuaguuaaaaaaggaaauucauacccaaagcucagcaaauccuacauuaaugauaaagggaaagaaguccucgugcuauggggcauucaccauccaucuacuagugcugaccaacaaagucucuaucagaaugcagaugcauauguuuuuguggggacaucaagauacagcaagaaguucaagccggaaauagcaauaagacccaaagugagggaucaagaagggagaaugaacuauuacuggacacuaguagagccgggagacaaaauaacauucgaagcaacuggaaaucuagugguaccgagauaugcauucgcaauggaaagaaaugcuggaucugguauuaucauuucagauacaccaguccacgauugcaauacaacuugucagacacccaagggugcuauaaacaccagccucccauuucagaauauacauccgaucacaauuggaaaauguccaaaauauguaaaaagcacaaaauugagacuggccacaggauugaggaaugucccgucuauucaaucuagaggccuauuuggggccauugccgguuucauugaagggggguggacagggaugguagauggaugguacgguuaucaccaucaaaaugagcaggggucaggauaugcagccgaccugaagagcacacagaaugccauugacaagauuacuaacaaaguaaauucuguuauugaaaagaugaauacacaguucacagcaguagguaaagaguucaaccaccuggaaaaaagaauagagaauuuaaauaaaaaaguugaugaugguuuccuggacauuuggacuuacaaugccgaacuguugguucuauuggaaaaugaaagaacuuuggacuaccacgauucaaaugugaagaacuuauaugaaaagguaagaagccaguuaaaaaacaaugccaaggaaauuggaaacggcugcuuugaauuuuaccacaaaugcgauaacacgugcauggaaagugucaaaaaugggacuuaugacuacccaaaauacucagaggaagcaaaauuaaacagagaagaaauagauggggugaagcuggaaucaacaaggauuuaccagauuuuggcgaucuauucaacugucgccaguucauugguacugguagucucccugggggcaaucaguuucuggaugugcucuaaugggucucuacaguguagaauauguauuuaa

SEQ ID NO: 37063 - RNA, 1701 nt, Artificial Sequence
  derived and/or modified CDS sequence (wt) from hemagglutinin__InfluenzaA__ADI48210
augaaggcaauacuaguaguucugcuauauacauuugcaaccgcaaaugcagacacauuauguauagguuaucaugcgaacaauucaacagacacuguagacacaguacuagaaaagaauguaacaguaacacacucuguuaaccuucuagaagacaagcauaacgggaaacuaugcaaacuaagagggguagccccauugcauuuggguaaauguaacauugcuggcuggauccugggaaauccagagugugaaucacucuccacagcaagcucaugguccuacauuguggaaacaucuaguucagacaauggaacguguuacccaggagauuucaucgauuaugaggagcuaagagagcaauugagcucagugucaucauuugaaagguuugagauauuccccaagacaaguucauggcccaaucaugacucgaacaaagguguaacggcagcauguccucaugcuggagcaaaaagcuucuacaaaaauuuaauauggcuaguuaaaaaaggaaauucauacccaaagcucagcaaauccuacauuaaugauaaagggaaagaaguccucgugcuauggggcauucaccauccaucuacuagugcugaccaacaaagucucuaucagaaugcagaugcauauguuuuuguggggacaucaagauacagcaagaaguucaagccggaaauagcaauaagacccaaagugagggaucaagaagggagaaugaacuauuacuggacacuaguagagccgggagacaaaauaacauucgaagcaacuggaaaucuagugguaccgagauaugcauucgcaauggaaagaaaugcuggaucugguauuaucauuucagauacaccaguccacgauugcaauacaacuugucagacacccaagggugcuauaaacaccagccucccauuucagaauauacauccgaucacaauuggaaaauguccaaaauauguaaaaagcacaaaauugagacuggccacaggauugaggaaugucccgucuauucaaucuagaggccuauuuggggccauugccgguuucauugaagggggguggacagggaugguagauggaugguacgguuaucaccaucaaaaugaacaggggucaggauaugcagccgaccugaagagcacacagaaugccauugacaagauuacuaacaaaguaaauucuguuauugaaaagaugaauacacaguucacagcaguagguaaagaguucaaccaccuggaaaaaagaauagagaauuuaaauaaaaaaguugaugaugguuuccuggacauuuggacuuacaaugccgaacuguugguucuauuggaaaaugaaagaacuuuggacuaccacgauucaaaugugaagaacuuauaugaaaagguaagaagccagcuaaaaaacaaugccaaggaaauuggaaacggcugcuuugaauuuuaccacaaaugcgauaacacgugcauggaaagugucaaaaaugggacuuaugacuacccaaaauacucagaggaagcaaaauuaaacagagaagaaauagaugggguaaagcuggaaucaacaaggauuuaccagauuuuggcgaucuauucaacugucgccaguucauugguacugguagucucccugggggcaaucaguuucuggaugugcucuaaugggucucuacaguguagaauauguauuuaa

SEQ ID NO: 37064 - RNA, 1701 nt, Artificial Sequence
  derived and/or modified CDS sequence (wt) from hemagglutinin__InfluenzaA__ADI48212
augaaggcaauacuaguaguucugcuauauacauuugcaaccgcaaaugcagacacauuauguauagguuaucaugcgaacaauucaacagacacuguagacacaguacuagaaaagaauguaacaguaacacacucuguuaaccuucuagaagacaagcauaacgggaaacuaugcaaacuaagagggguagccccauugcauuuggguaaauguaacauugcuggcuggauccugggaaauccagagugugaaucacucuccacagcaagcucaugguccuacauuguggaaacaucuaguucagacaauggaacguguuacccaggagauuucaucgauuaugaggagcuaagagagcaauugagcucagugucaucauuugaaagguuugagauauuccccaagacaaguucauggcccaaucaugacucgaacaaagguguaacggcagcauguccucaugcuggagcaaaaagcuucuacaaaaauuuaauauggcuaguuaaaaaaggaaauucauacccaaagcucagcaaauccuacauuaaugauaaagggaaagaaguccucgugcuauggggcauucaccauccaucuacuagugcugaccaacaaagucucuaucagaaugcagaugcauauguuuuuguggggacaucaagauacagcaagaaguucaagccggaaauagcaauaagacccaaagugagggaucaagaagggagaaugaacuauuacuggacacuaguagagccgggagacaaaauaacauucgaagcaacuggaaaucuagugguaccgagauaugcauucgcaauggaaagaaaugcuggaucugguauuaucauuucagauacaccaguccacgauugcaauacaacuugucagacacccaagggugcuauaaacaccagccucccauuucagaauauacauccgaucacaauuggaaaauguccaaaauauguaaaaagcacaaaauugagacuggccacaggauugaggaaugucccgucuauucaaucuagaggccuauuuggggccauugccgguuucauugaagggggguggacagggaugguagauggaugguacgguuaucaccaucaaaaugaacaggggucaggauaugcagccgaccugaagagcacacagaaugccauugacaagauuacuaacaaaguaaauucuguuauugaaaagaugaauacacaguucacagcaguagguaaagaguucaaccaccuggaaaaaagaauagagaauuuaaauaaaaaaguugaugaugguuuccuggacguuuggacuuacaaugccgaacuguugguucuauuggaaaaugaaagaacuuuggacuaccacgauucaaaugugaagaacuuauaugaaaagguaagaagccaguuaaaaaacaaugccaaggaaauuggaaacggcugcuuugaauuuuaccacaaaugcgauaacacgugcauggaaagugucaaaaaugggacuuaugacuacccaaaauacucagaggaagcaaaauuaaacagagaagaaauagaugggguaaagcuggaaucaacaaggauuuaccagauuuuggcgaucuauucaacugucgccaguucauugguacugguagucucccugggggcaaucaguuucuggaugugcucuaaugggucucuacaguguagaauauguauuuaa

SEQ ID NO: 37065 - RNA, 1701 nt, Artificial Sequence
  derived and/or modified CDS sequence (wt) from hemagglutinin__InfluenzaA__ADI48214
augaaggcaauacuaguaguucugcuauauacauuugcaaucgcaaaugcagacacauuauguauagguuaucaugcgaacaauucaacagacacuguagacacaguacuagaaaagaauguaacaguaacacacucuguuaaccuucuagaagacaagcauaacgggaaacuaugcaaacuaagagggguagccccauugcauuuggguaaauguaacauugcuggcuggauccugggaaauccagagugugaaucacucuccacagcaagcucaugguccuacauuguggaaacaucuaguucagacaauggaacguguuacccaggagauuucaucgauuaugaggagcuaagagagcaauugagcucagugucaucauuugaaagguuugagauauuccccaagacaaguucauggcccaaucaugacucgaacaaagguguaacggcagcauguccucaugcuggagcaaaaagcuucuacaaaaauuuaauauggcuaguuaaaaaaggaaauucauacccaaagcucagcaaauccuacauuaaugauaaagggaaagaaguccucgugcuauggggcauucaccauccaucuacuagugcugaccaacaaagucucuaucagaaugcagaugcauauguuuuuguggggacaucaagauacagcaagaaguucaagccagaaauagcaauaagacccaaagugagggaucaagaagggagaaugaacuauuacuggacacuaguagagccgggagacaaaauaacauucgaagcaacuggaaaucuagugguaccgagauaugcauucgcaauggaaagaaaugcuggaucugguauuaucauuucagauacaccaguccacgauugcaauacaacuugucagacacccaagggugcuauaaacaccagccucccauuucagaauauacauccgaucacaauuggaaaauguccaaaauauguaaaaagcacaaaauugagacuggccacaggauugaggaaugucccgucuauucaaucuagaggccuauuuggggccauugccgguuucauugaagggggguggacagggaugguagauggaugguacgguuaucaccaucaaaaugagcaggggucaggauaugcagccgaccugaagagcacacagaaugccauugacaagauuacuaacaaaguaaauucuguuauugaaaagaugaauacacaguucacagcaguagguaaagaguucaaccaccuggaaaaaagaauagagaauuuaaauaaaaaaguugaugaugguuuccuggacauuuggacuuacaaugccgaacuguugguucuauuggaaaaugaaagaacuuuggacuaccacgauucaaaugugaagaacuuauaugaaaagguaagaagccaguuaaaaaacaaugccaaggaaauuggaaacggcugcuuugaauuuuaccacaaaugcgauaacacgugcauggaaagugucaaaaaugggacuuaugacuacccaaaauacucagaggaagcaaaauuaaacagagaagaaauagaugggguaaagcuggaaucaacaaggauuuaccagauuuuggcgaucuauucaacugucgccaguucauugguacuggcagucucccugggggcaaucaguuucuggaugugcucuaaugggucucuacaguguagaauauguauuuaa

SEQ ID NO: 37066 - RNA, 1701 nt, Artificial Sequence; identical to SEQ ID NO: 37064
  derived and/or modified CDS sequence (wt) from hemagglutinin__InfluenzaA__ADI48216

SEQ ID NO: 37067 - RNA, 1701 nt, Artificial Sequence
  derived and/or modified CDS sequence (wt) from hemagglutinin__InfluenzaA__ADI48218
augaaggcaauacuaguaguucugcuauauacauuugcaaccgcaaaugcagacacauuauguauagguuaucaugcgaacaauucaacagacacuguagacacaguacuagaaaagaauguaacaguaacacacucuguuaaccuucuagaagacaagcauaacgggaaacuaugcaaacuaagagggguagccccauugcauuuggguaaauguaacauugcuggcuggauccugggaaauccagagugugaaucacucuccacagcaagcucaugguccuacauuguggaaacaucuaguucagacaauggaacguguuacccaggagauuucaucgauuaugaggagcuaagagagcaauugagcucagugucaucauuugaaagguuugagauauuccccaagacaaguucauggcccaaucaugacucgaacaaagguguaacggcagcauguccucaugcuggagcaaaaagcuucuacaaaaauuuaauauggcuaguuaaaaaaggaaauucauacccaaagcucagcaaauccuacauuaaugauaaagggaaagaaguccucgugcuauggggcauucaccauccaucuacuagugcugaccaacaaagucucuaucagaaugcagaugcauauguuuuuguggggacaucaagauacagcaagaaguucaagccggaaauagcaauaagacccaaagugagggaucaagaagggagaaugaacuauuacuggacacuaguagagccgggagacaaaauaacauucgaagcaacuggaaaucuagugguaccgagauaugcauucgcaauggaaagaaaugcuggaucugguauuaucauuucagauacaccaguccacgauugcaauacaacuugucagacacccaagggugcuauaaacaccagccucccauuucagaauauacauccgaucacaauuggaaaauguccaaaauauguaaaaagcacaaaauugagacuggccacaggauugaggaaugucccgucuauucaaucuagaggccuauuuggggccauugccgguuucauugaagggggguggacagggaugguagauggaugguacgguuaucaccaucaaaaugagcaggggucaggauaugcagccgaccugaagagcacacagaaugccauugacaagauuacuaacaaaguaaauucuguuauugaaaagaugaauacacaguucacagcaguagguaaagaguucaaccaccuggaaaaaagaauagagaauuuaaauaaaaaaguugaugaugguuuccuggacauuuggacuuacaaugccgaacuguugguucuauuggaaaaugaaagaacuuuggacuaccaagauucaaaugugaagaacuuauaugaaaagguaagaagccaguuaaaaaacaaugccaaggaaauuggaaacggcugcuuugaauuuuaccacaaaugcgauaacacgugcauggaaagugucaaaaaugggacuuaugacuacccaaaauacucagaggaagcaaaauuaaacagagaagaaauagaugggguaaagcuggaaucaacaaggauuuaccagauuuuggcgaucuauucaacugucgccaguucauugguacugguagucucccugggggcaaucaguuucuggaugugcucuaaugggucucuacaguguagaauauguauuuaa

SEQ ID NO: 37068 - RNA, 1701 nt, Artificial Sequence
  derived and/or modified CDS sequence (wt) from hemagglutinin__InfluenzaA__ADI48220
augaaggcaauacuaguaguucugcuauauacauuugcaaccgcaaaugcagacacauuauguauagguuaucaugcgaacaauucaacagacacuguagacacaguacuagaaaagaauguaacaguaacacacucuguuaaccuucuagaagacaagcauaacgggaaacuaugcaaacuaagagggguagccccauugcauuuggguaaguguaacauugcuggcuggauccugggaaauccagagugugaaucacucuccacagcaagcucaugguccuacauuguggaaacaucuaguucagacaauggaacguguuacccaggagauuucaucgauuaugaggagcuaagagagcaauugagcucagugucaucauuugaaagguuugagauauuccccaagacaaguucauggcccaaucaugacucgaacaaagguguaacggcagcauguccucaugcuggagcaaaaagcuucuacaaaaauuuaauauggcuaguuaaaaaaggaaauucauacccaaagcucagcaaauccuacauuaaugauaaagggaaagaaguccucgugcuauggggcauucaccauccaucuacuagugcugaccaacaaagucucuaucagaaugcagaugcauauguuuuuguggggacaucaagauacagcaagaaguucaagccggaaauagcaauaagacccaaagugagggaucaagaagggagaaugaacuauuacuggacacuaguagagccgggagacaaaauaacauucgaaacaacuggaaaucuagugguaccgagauaugcauucgcaauggaaagaaaugcuggaucugguauuaucauuucagauacaccaguccacgauugcaauacaacuugucagacacccaagggugcuauaaacaccagccucccauuucagaauauacauccgaucacaauuggaaaauguccaaaauauguaaaaagcacaaaauugagacuggccacaggauugaggaaugucccgucuauucaaucuagaggccuauuuggggccauugccgguuucauugaagggggguggacagggaugguagauggaugguacgguuaucaccaucaaaaugagcaggggucaggauaugcagccgaccugaagagcacacagaaugccauugacaagauuacuaacaaaguaaauucuguuauugaaaagaugaauacacaguucacagcaguagguaaagaguucaaccaccuggaaaaaagaauagagaauuuaaauaaaaaaguugaugaugguuuccuggacauuuggacuuacaaugccgaacuguugguucuauuggaaaaugaaagaacuuugggcuaccacgauucaaaugugaagaacuuauaugaaaagguaagaagccaguuaaaaaacaaugccaaggaaauuggaaacggcugcuuugaauuuuaccacaaaugcgauaacacgugcauggaaagugucaaaaaugggacuuaugacuacccaaaauacucagaggaagcaaaauuaaacagagaagaaauagaugggguaaagcuggaaucaacaaggauuuaccagauuuuggcgaucuauucaacugucgccaguucauugguacugguagucucccugggggcaaucaguuucuggaugugcucuaaugggucucuacaguguagaauauguauuuaa

SEQ ID NO: 37069 - RNA, 1701 nt, Artificial Sequence
  derived and/or modified CDS sequence (wt) from hemagglutinin__InfluenzaA__ADI48622
augaaggcaauacuaguauuucugcuauauacauuugcaaccgcaaaugcagacacauuauguauagguuaucaugcgaacaauucaacggacacuguagacacaguacuagaaaagaauguaacaguaacacacucuguuaaccuucuagaagacaagcauaacgggaaacuaugcaaacuaagagggguagccccauugcauuuagguaaauguaacauugcuggcuggauccugggaaauccagagugugaaucacucuccacagcaagcucaugguccuacauuguggaaacaucuaguucagacaauggaacguguuacccaggagauuucaucgauuaugaggagcuaagagagcaauugagcucagugucaucauuugaaagguuugagauauuccccaagacaaguucauggcccaaucaugacucgaacaaagguguaacggcagcauguccucaugcuggagcaaaaagcuucuacaaaaauuuaauauggcuaguuaaaaaaggaaauucauacccaaagcucagcaaauccuacauuaaugauaaagggaaagaaguccucguacuauggggcauucaccauccaucuacuagugcugaccaacaaagucucuaucagaaugcagaugcauauguuuuuguggggacaucaagauacagcaagaaguucaagccggaaauagcaauaagacccaaagugagggaucaagaagggagaaugaacuauuacuggacacuaguagagccgggagacaaaauaacauucgaagcaacuggaaaucuagugguaccgagauaugcauucgcaauggaaagaaaugcuggaucugguauuaucauuucagauacaccaguccacgauugcaauacaacuugucagacacccaagggugcuauaaacaccagccucccauuucagaauauacauccgaucacaauuggaaaauguccaaaauauguaaaaagcacaaaauugagacuggccacaggauugaggaaugucccgucuauucaaucuagaggccuauuuggggccauugccgguuucauugaagggggguggacagggaugguagauggaugguacgguuaucaccaucaaaaugagcaggggucaggauaugcagccgaccugaagagcacacagaaugccauugacgagauuacuaacaaaguaaauucuguuauugaaaagaugaauacacaguucacagcaguagguaaagaguucaaccaccuggaaaaaagaauagagaauuuaaauaaaaaaguugaugaugguuuccuggacauuuggacuuacaaugccgaacuguugguucuauuggaaaaugaaagaacuuuggacuaccacgauucaaaugugaagaacuuauaugaaaagguaagaagccaguuaaaaaacaaugccaaggaaauuggaaacggcugcuuugaauuuuaccacaaaugcgauaacacgugcauggaaagugucaaaaaugggacuuaugacuacccaaaauacucagaggaagcaaaauuaaacagagaagaaauagaugggguaaagcuggaaucaacaaggauuuaccagauuuuggcgaucuauucaacugucgccaguucauugguacugguagucucccugggggcaaucaguuucuggaugugcucuaaugggucucuacaguguagaauauguauuuaa

SEQ ID NO: 37070 - RNA, 1701 nt, Artificial Sequence
  derived and/or modified CDS sequence (wt) from hemagglutinin__InfluenzaA__ADI48632
auggaggcaauacuaguaguucugcuauauacauuugcaaccgcaaaugcagacacauuauguauagguuaucaugcgaacaauucaacagacacuguagacacaguacuagaaaagaauguaacaguaacacacucuguuaaccuucuagaagacaagcauaacgggaaacuaugcaaacuaagagggguagccccauugcauuuggguaaauguaacauugcuggcuggauccugggaaauccagagugugaaucacucuccacagcaagcucaugguccuacauuguggaaacaucuaguucagacaauggaacguguuacccaggagauuucaucgauuaugaggagcuaagagagcaauugagcucagugucaucauuugaaagguuugagauauuccccaagacaaguucauggcccaaucaugacucgaacaaagguguaacggcagcauguccucaugcuggagcaaaaagcuucuacaaaaauuuaauauggcuaguuaaaaaaggaaauucauacccaaagcucagcaaauccuacauuaaugauaaagggaaagaaguccucgugcuauggggcguucaccauccaucuacuagugcugaccaacaaagucucuaucagaaugcagaugcauauguuuuuguggggucaucaagauacagcaagaaguucaagccggaaauagcaauaagacccaaagugagggaucaagaagggagaaugaacuauuacuggacacuaguagagccgggagacaaaauaacauucgaagcaacuggaaaucuagugguaccgagauaugcauucgcaauggaaagaaaugcuggaucugguauuaucauuucagauacaccaguccacgauugcaauacaacuugucagacacccaagggugcuauaaacaccagccucccauuucauaauauacauccgaucacaauuggaaaauguccaaaauauguaaaaagcacaaaauugagacuggccacaggauugaggaaugucccgucuauucaaucuagaggccuauuuggggccauugccgguuucauugaagggggguggacagggaugguagauggaugguacgguuaucaccaucaaaaugaacaggggucaggauaugcagccgaccugaagagcacacagaaugccauugacgagauuacuaacaaaguaaauucuguuauugaaaagaugaauacacaguucacagcaguagguaaagaguucaaccaccuggaaaaaagaauagagaauuuaaauaaaaaaguugaugaugguuuccuggacauuuggacuuacaaugccgaacuguugguucuauuggaaaaugaaagaacuuuggacuaccacgauucaaaugugaagaacuuauaugaaaagguaagaagccaguuaaaaaacaaugccaaggaaauuggaaacggcugcuuugaauuuuaccacaaaugcgauaacacgugcauggaaagugucaaaaaugggacuuaugacuacccaaaauacucagaggaagcaaaauuaaacagagaagaaauagaugggguaaagcuggaaucaacaaggauuuaccagauuuuggcgaucuauucaacugucgccaguucauugguacugguagucucccugggggcaaucaguuucuggaugugcucuaaugggucucuacaguguagaauauguauuuaa

SEQ ID NO: 37071 - RNA, 1701 nt, Artificial Sequence; identical to SEQ ID NO: 34965
  derived and/or modified CDS sequence (wt) from hemagglutinin__InfluenzaA__ADI48642

SEQ ID NO: 37072 - RNA, 1701 nt, Artificial Sequence; identical to SEQ ID NO: 34965
  derived and/or modified CDS sequence (wt) from hemagglutinin__InfluenzaA__ADI48652

SEQ ID NO: 37073 - RNA, 1701 nt, Artificial Sequence
  derived and/or modified CDS sequence (wt) from hemagglutinin__InfluenzaA__ADI48672
auggaggcaauacuaguaguucugcuauauacauuugcaaccgcaaaugcagacacauuauguauagguuaucaugcgaacaauucaacagacacuguagacacaguacuagaaaagaauguaacaguaacacacucuguuaaccuucuagaagacaagcauaacgggaaacuaugcaaacuaagagggguagccccauugcauuuggguaaauguaacauugcuggcuggauccugggaaauccagagugugaaucacucuccacagcaagcucaugguccuacauuguggaaacaucuaguucagacaauggaacguguuacccaggagauuucaucgauuaugaggagcuaagagagcaauugagcucagugucaucauuugaaagguuugagauauuccccaagacaaguucauggcccaaucaugacucgaacaaagguguaacggcagcauguccucaugcuggagcaaaaagcuucuacaacaauuuaauauggcuaguuaaaaaaggaaauucauacccaaagcucagcaaauccuacauuaaugauaaagggaaagaaguccucgugcuauggggcauucaccauccaucuacuagugcugaccaacaaagucucuaucagaaugcagaugcauauguuuuuguggggucaucaagauacagcaagaaguucaagccggaaauagcaauaagacccaaagugagggaucaagaagggagaaugaacuauuacuggacacuaguagagccgggagacaaaauaacauucgaagcaacuggaaaucuagugguaccgagauaugcauucgcaauggaaagaaaugcuggaucugguauuaucauuucagauacaccaguccacgauugcaauacaacuugucagacacccaagggugcuauaaacaccagccucccauuucauaauauacauccgaucacaauuggaaaauguccaaaauauguaaaaagcacaaaauugagacuggccacaggauugaggaaugucccgucuauucaaucuagaggccuauuuggggccauugccgguuucauugaagggggguggacagggaugguagauggaugguacgguuaucaccaucaaaaugagcaggggucaggauaugcagccgaccugaagagcacacagaaugccauugacgagauuacuaacaaaguaaauucuguuauugaaaagaugaauacacaguucacagcaguagguaaagaguucaaccaccuggaaaaaagaauagagaauuuaaauaaaaaaguugaugaugguuuccuggacauuuggacuuacaaugccgaacuguugguucuauuggaaaaugaaagaacuuuggacuaccacgauucaaaugugaagaacuuauaugaaaagguaagaagccaguuaaaaaacaaugccaaggaaauuggaaacggcugcuuugaauuuuaccacaaaugcgauaacacgugcauggaaagugucaaaaaugggacuuaugacuacccaaaauacucagaggaagcaaaauuaaacagagaagaaauagaugggguaaagcuggaaucaacaaggauuuaccagauuuuggcgaucuauucaacugucgccaguucauugguacugguagucucccugggggcaaucaguuucuggaugugcucuaaugggucucuacaguguagaauauguauuuaa

SEQ ID NO: 37074 - RNA, 1701 nt, Artificial Sequence; identical to SEQ ID NO: 34681
  derived and/or modified CDS sequence (wt) from hemagglutinin__InfluenzaA__ADI48682

SEQ ID NO: 37075 - RNA, 1701 nt, Artificial Sequence; identical to SEQ ID NO: 34965
  derived and/or modified CDS sequence (wt) from hemagglutinin__InfluenzaA__ADI48692

SEQ ID NO: 37076 - RNA, 1701 nt, Artificial Sequence; identical to SEQ ID NO: 34898
  derived and/or modified CDS sequence (wt) from hemagglutinin__InfluenzaA__ADI48702

SEQ ID NO: 37077 - RNA, 1701 nt, Artificial Sequence
  derived and/or modified CDS sequence (wt) from hemagglutinin__InfluenzaA__ADI48712
auggaggcaauacuaguaguucugcuauauacauuugcaaccgcaaaugcagacacauuauguauagguuaucaugcgaacaauucaacagacacuguagacacaguacuagaaaagaauguaacaguaacacacucuguuaaccuucuagaagacaagcauaacgggaaacuaugcaaacuaagagggguagccccauugcauuuggguaaauguaacauugcuggcuggauccugggaaauccagagugugaaucacucuccacagcaagcucaugguccuacauuguggaaacaucuaguucagacaauggaacguguuacccaggagauuucaucgauuaugaggagcuaagagagcaauugagcucagugucaucauuugaaagguuugagauauuccccaagacaaguucauggcccaaucaugacucgaacaaagguguaacggcagcauguccucaugcuggagcaaaaagcuucuacaaaaauuuaauauggcuaguuaaaaaaggaaauucauacccaaagcucagcaaauccuacauuaaugauaaagggaaagaaguccucgugcuauggggcauucaccauccaucuacuagugcugaccaacaaagucucuaucagaaugcagaugcauauguuuuugugggaucaucaagauacagcaagaaguucaagccggaaauagcaauaagacccaaagugagggaucaagaagggagaaugaacuauuacuggacacuaguagagccgggagacaaaauaacauucgaagcaacuggaaaucuagugguaccgagauaugcauucgcaauggaaagaaaugcuggaucugguauuaucauuucagauacaccaguccacgauugcaauacaacuugucagacacccaagggugcuauaaacaccagccucccauuucauaauauacauccgaucacaauuggaaaauguccaaaauauguaaaaagcacaaaauugagacuggccacaggauugaggaaugucccgucuauucaaucuagaggccuauuuggggccauugccgguuucauugaagggggguggacagggaugguagauggaugguacgguuaucaccaucaaaaugagcaggggucaggauaugcagccgaccugaagagcacacagaaugccauugacgagauuacuaacaaaguaaauucuguuauugaaaagaugaauacacaguucacagcaguagguaaagaguucaaccaccuggaaaaaagaauagagaauuuaaauaaaaaaguugaugaugguuuccuggacauuuggacuuacaaugccgaacuguugguucuauuggaaaaugaaagaacuuuggacuaccacgauucaaaugugaagaacuuauaugaaaagguaagaagccaguuaaaaaacaaugccaaggaaauuggaaacggcugcuuugaauuuuaccacaaaugcgauaacacgugcauggaaagugucaaaaaugggacuuaugacuacccaaaauacucagaggaagcaaaauuaaacagagaagaaauagaugggguaaagcuagaaucaacaaggauuuaccagauuuuggcgaucuauucaacugucgccaguucauugguacugguagucucccugggggcaaucaguuucuggaugugcucuaaugggucucuacaguguagaauauguauuuaa

SEQ ID NO: 37078 - RNA, 1701 nt, Artificial Sequence; identical to SEQ ID NO: 37077
  derived and/or modified CDS sequence (wt) from hemagglutinin__InfluenzaA__ADI48722

SEQ ID NO: 37079 - RNA, 1701 nt, Artificial Sequence; identical to SEQ ID NO: 34681
  derived and/or modified CDS sequence (wt) from hemagglutinin__InfluenzaA__ADI48732

SEQ ID NO: 37080 - RNA, 1701 nt, Artificial Sequence
  derived and/or modified CDS sequence (wt) from hemagglutinin__InfluenzaA__ADI48742
augaaggcaauacuaguaguucugcuauauacauuugcaaccgcaaaugcagacacauuauguauagguuaucaugcgaacaauucaacagacacuguagacacaguacuagaaaagaauguaacaguaacacacucuguuaaccuucuagaagacaagcauaacgggaaacuaugcaaacuaagagggguagccccauugcauuuggguaaauguaacauugcuggcuggauccugggaaauccagagugugaaucacucuccacagcaagcucaugguccuacauuguggaaacaucuaguucagacaauggaacguguuacccaggagauuucaucgauuaugaggagcuaagagagcaauugagcucagugucaucauuugaaagguuugagauauuccccaagacaaguucauggcccaaucaugauucgaacaaagguguaacggcagcauguccucaugcuggagcaaaaagcuucuacaaaaauuuaauauggcuaguuaaaaaaggaaauucauacccaaagcucagcaaauccuacauuaaugauaaagggaaagaaguccucgugcuauggggcauucaccauccaucuacuagugcugaccaacaaagucucuaucagaaugcagaugcauauguuuuuguggggacaucaagauacagcaagaaguucaagccggaaauagcaauaagacccaaagugagggaucaagaagggagaaugaacuauuacuggacacuaguagagccgggagacaaaauaacauucgaagcaacuggaaaucuagugguaccgagauaugcauucgcaauggaaagaaaugcuggaucugguauuaucauuucagauacaccaguccacgauugcaauacaacuugucagacacccaagggugcuauaaacaccagccucccauuucagaauauacauccgaucacaauuggaaaauguccaaaauauguaaaaagcacaaaauugagacuggccacaggauugaggaaugucccgucuauucaaucuagaggccuauuuggggccauugccgguuucauugaagggggguggacagggaugguagauggaugguacgguuaucaccaucaaaaugagcaggggucaggauaugcagccgaccugaagagcacacagaaugccauugacgagauuacuaacaaaguaaauucuguuauugaaaagaugaauacacaguucacagcaguagguaaagaguucaaccaccuggaaaaaagaauagagaauuuaaauaaaaaaguugaugaugguuuccuggacauuuggacuuacaaugccgaacuguugguucuauuggaaaaugaaagaacuuuggacuaccacgauucaaaugugaagaacuuauaugaaaagguaagaagccaguuaaaaaacaaugccaaggaaauuggaaacggcugcuuugaauuuuaccacaaaugcgauaacacgugcauggaaagugucaaaaaugggacuuaugacuacccaaaauacucagaggaagcaaaauuaaacagagaagaaauagaugggguaaagcuggaaucaacaaggauuuaccagauuuuggcgaucuauucaacugucgccaguucauugguacugguagucucccugggggcaaucaguuucuggaugugcucuaaugggucucuacaguguagaauauguauuuaa

SEQ ID NO: 37081 - RNA, 1701 nt, Artificial Sequence
  derived and/or modified CDS sequence (wt) from hemagglutinin__InfluenzaA__ADI48752
auggaggcaauacuaguauuucugcuauauacauuugcaaccgcaaaugcagacacauuauguauagguuaucaugcgaacaauucaacagacacuguagacacaguacuagaaaagaauguaacaguaacacacucuguuaaccuucuagaagacaagcauaacgggaaacuaugcaaacuaagagggguagccccauugcauuuggguaaauguaacauugcuggcuggauccugggaaauccagagugugaaucacucuccacagcaagcucaugguccuacauuguggaaacaucuaguucagacaauggaacguguuacccaggagauuucaucgauuaugaggagcuaagagagcaauugagcucagugucaucauuugaaagguuugagauauuccccaagacaaguucauggcccaaucaugacucgaacaaagguauaacggcagcauguccucaugcuggagcaaaaagcuucuacaaaaauuuaauauggcuaguuaaaaaaggaaauucauacccaaagcucagcaaauccuacauuaaugauaaagggaaagaaguccucgugcuauggggcauucaccauccaucuacuagugcugaccaacaaagucucuaucagaaugcagaugcauauguuuuuguggggucaucaagauacagcaagaaguucaagccggaaauagcaauaagacccaaagugagggaucaagaagggagaaugaacuauuacuggacacuaguagagccgggagacaaaauaacauucgaagcaacuggaaaucuagugguaccgagauaugcauucgcaauggaaagaaaugcuggaucugguauuaucauuucagauacaccaguccacgauugcaauacaacuugucagacacccaagggugcuauaaacaccagccucccauuucauaauauacauccgaucacaauuggaaaauguccaaaauauguaaaaagcacaaaauugagacuggccacaggauugaggaaugucccgucuauucaaucuagaggccuauuuggggccauugccgguuucauugaagggggguggacagggaugguagauggaugguacgguuaucaccaucaaaaugagcaggggucaggauaugcagccgaccugaagagcacacagaaugccauugacgagauuacuaacaaaguaaauucuguuauugaaaagaugaauacacaguucacagcaguagguaaagaguucaaccaccuggaaaaaagaauagagaauuuaaauaaaaaaguugaugaugguuuccuggacauuuggacuuacaaugccgaacuguugguucuauuggaaaaugaaagaacuuuggacuaccacgauucaaaugugaagaacuuauaugaaaagguaagaagccaguuaaaaaacaaugccaaggaaauuggaaacggcugcuuugaauuuuaccacaaaugcgauaacacgugcauggaaagugucaaaaaugggacuuaugacuacccaaaauacucagaggaagcaaaauuaaacagagaagaaauagaugggguaaagcuggaaucaacaaggauuuaccagauuuuggcgaucuauucaacugucgccaguucauugguacugguagucucccugggggcaaucaguuucuggaugugcucuaaugggucucuacaguguagaauauguauuuaa

SEQ ID NO: 37082 - RNA, 1701 nt, Artificial Sequence; identical to SEQ ID NO: 34965
  derived and/or modified CDS sequence (wt) from hemagglutinin__InfluenzaA__ADI48762

SEQ ID NO: 37083 - RNA, 1701 nt, Artificial Sequence
  derived and/or modified CDS sequence (wt) from hemagglutinin__InfluenzaA__ADI48772
auggaggcaauacuaguaguucugcuauauacauuugcaaccgcaaaugcagacacauuauguauagguuaucaagcgaacaauucaacagacacuguagacacaguacuagaaaagaauguaacaguaacacacucuguuaaccuucuagaagacaagcauaacgggaaacuaugcaaacuaagagggguagccccauugcauuuggguaaauguaacauugcuggcuggauccugggaaauccagagugugaaucacucuccacagcaagcucaugguccuacauuguggaaacaucuaguucagacaauggaacguguuacccaggagauuucaucgauuaugaggagcuaagagagcaauugagcucagugucaucauuugaaagguuugagauauuccccaagacaaguucauggcccaaucaugacucgaacaaagguguaacggcagcauguccucaugcuggagcaaaaagcuucuacaaaaauuuaauauggcuaguuaaaaaaggaaauucauacccaaagcucagcaaauccuacauuaaugauaaagggaaagaaguccucgugcuauggggcauucaccauccaucuacuagugcugaccaacaaagucucuaucagaaugcagaugcauauguuuuuguggggucaucaagauacagcaagaaguucaagccggaaauagcaauaagacccaaagugagggaucaagaagggagaaugaacuauuacuggacacuaguagagccgggagacaaaauaacauucgaagcaacuggaaaucuagugguaccgagauaugcauucgcaauggaaagaaaugcuggaucugguauuaucauuucagauacaccaguccacgauugcaauacaacuugucagacacccaagggugcuauaaacaccagccucccauuucauaauauacauccgaucacaauuggaaaauguccaaaauauguaaaaagcacaaaauugagacuggccacaggauugaggaaugucccgucuauucaaucuagaggucuauuuggggccauugccgguuucauugaagggggguggacagggaugguagauggaugguacgguuaucaccaucaaaaugagcaggggucaggauaugcagccgaccugaagagcacacagaaugccauugacgagauuacuaacaaaguaaauucuguuauugaaaagaugaauacacaguucacagcaguagguaaagaguucaaccaccuggaaaaaagaauagagaauuuaaauaaaaaaguugaugaugguuuccuggacauuuggacuuacaaugccgaacuguugguucuauuggaaaaugaaagaacuuuggacuaccacgauucaaaugugaagaacuuauaugaaaagguaagaagccaguuaaaaaacaaugccaaggaaauuggaaacggcugcuuugaauuuuaccacaaaugcgauaacacgugcauggaaagugucaaaaaugggacuuaugacuacccaaaauacucagaggaagcaaaauuaaacagagaagaaauagaugggguaaagcuggaaucaacaaggauuuaccagauuuuggcgaucuauucaacugucgccaguucauugguacugguagucucccugggggcaaucaguuucuggaugugcucuaaugggucucuacaguguagaauauguauuuaa

SEQ ID NO: 37084 - RNA, 1701 nt, Artificial Sequence
  derived and/or modified CDS sequence (wt) from hemagglutinin__InfluenzaA__ADI48782
augaaggcaauacuaguaguucugcuauauacauuugcaaccgcaaaugcagacacauuauguauagguuaucaugcgaacaauucaacagacacuguagacacaguacuagaaaagaauguaacaguaacacacucuguuaaccuucuagaagacaagcauaacgggaaacuaugcaaacuaagagggguagccccauugcauuuggguaaauguaacauugcuggcuggauccugggaaauccagagugugaaucacucuccacagcaagcucaugguccuacauuguggaaacaucuaguucagacaauggaacguguuacccaggagauuucaucgauuaugaggagcuaagagagcaauugagcucagugucaucauuugaaagguuugagauauuccccaagacaaguucauggcccaaucaugacucgaacaaagguguaacggcagcauguccucaugcuggagcaaaaagcuucuacaaaaauuuaauauggcuaguuaaaaaaggaaauucauacccaaagcucagcaaauccuacauuaaugauaaagggaaagaaguccucgugcuauggggcauucaccauccaucuacuagugcugaccaacaaagccucuaucagaaugcagaugcauauguuuuuguggggacaucaagauacagcaagaaguucaagccggaaauagcaauaagacccaaagugagggaucaagaagggagaaugaacuauuacuggacacuaguagagccgggagacaaaauaacauucgaagcaacuggaaaucuagugguaccgagauaugcauucgcaauggaaagaaaugcuggaucugguauuaucauuucagauacaccaguccacgauugcaauacaacuugucagacacccaagggugcuauaaacaccagccucccauuucagaauauacauccgaucacaauuggaaaauguccaaaauauguaaaaagcacaaaauugagacuggccacaggauugaggaaugucccgucuauucaaucuagaggccuauuuggggccauugccgguuucauugaagggggguggacagggaugguagauggaugguacgguuaucaccaucaaaaugagcaggggucaggauaugcagccgaccugaagagcacacagaaugccauugacgagauuacuaacaaaguaaauucuguuauugaaaagaugaauacacaguucacagcaguagguaaagaguucaaccaccuggaaaaaagaauagagaauuuaaauaaaaaaguugaugaugguuuccuggacauuuggacuuacaaugccgaacuguugguucuauuggaaaaugaaagaacuuuggacuaccacgauucaaaugugaagaacuuauaugaaaagguaagaagccaguuaaaaaacaaugccaaggaaauuggaaacggcugcuuugaauuuuaccacaaaugcgauaacacgugcauggaaagugucaaaaaugggacuuaugacuacccaaaauacucagaggaaucaaaauuaaacagagaagaaauagaugggguaaagcuggaaucaacaaggauuuaccagauuuuggcgaucuauucaacugucgccaguucauugguacugguagucucccugggggcaaucaguuucuggaugugcucuaaugggucucuacaguguagaauauguauuuaa

SEQ ID NO: 37085 - RNA, 1701 nt, Artificial Sequence
  derived and/or modified CDS sequence (wt) from hemagglutinin__InfluenzaA__ADI48792
auggaggcaauacuaguaguucugcuauauacauuugcaaccgcaaaugcagacacauuauguauagguuaucaugcgaacaauucaacagacacuguagacacaguacuagaaaagaauguaacaguaacacacucuguuaaccuucuagaagacaagcauaacgggaaacuaugcaaacuaagagggguagccccauugcauuuggguaaauguaacauugcuggcuggauccugggaaauccagagugugaaucacucuccacagcaagcucaugguccuacauuguggaaacaucuaguucagacaauggaacguguuacccaggagauuucaucgauuaugaggagcuaagagagcaauugagcucagugucaucauuugaaagguuugagauauuccccaagacaaguucauggcccaaucaugacucgaacaaagguguaacggcagcauguccucaugcuggagcaaaaagcuucuacaaaaauuuaauauggcuaguuaaaaaaggaaauucauacccaaagcucagcaaauccuacauuaaugauaaagggaaagaaguccucgugcuauggggcauucaccauccaucuacuagugcugaccaacaaagucucuaucagaaugcagaugcauauauuuuuguggggucaucaagauacagcaagaaguucaagccggaaauagcaauaagacccaaagugagggaucaggaagggagaaugaacuauuacuggacacuaguagagccgggagacaaaauaacauucgaagcaacuggaaaucuagugguaccgagauaugcauucgcaauggaaagaaaugcuggaucugguauuaucauuucagauacaccaguccacgauugcaauacaacuugucagacacccaagggugcuauaaacaccagccucccauuucauaauauacauccgaucacaauuggaaaauguccaaaauauguaaaaagcacaaaauugagacuggccacaggauugaggaaugucccgucuauucaaucuagaggccuauuuggggccauugccgguuucauugaagggggguggacagggaugguagauggaugguacgguuaucaccaucaaaaugagcaggggucaggauaugcagccgaccugaagagcacacagaaugccauugacgagauuacuaacaaaguaaauucuguuauugaaaagaugaauacacaguucacagcaguagguaaagaguucaaccaccuggaaaaaagaauagagaauuuaaauaaaaaaguugaugaugguuuccuggacauuuggacuuacaaugccgaacuguugguucuauuggaaaaugaaagaacuuuggacuaccacgauucaaaugugaagaacuuauaugaaaagguaagaagccaguuaaaaaacaaugccaaggaaauuggaaacggcugcuuugaauuuuaccacaaaugcgauaacacgugcauggaaagugucaaaaaugggacuuaugacuacccaaaauacucagaggaagcaaaauuaaacagagaagaaauagaugggguaaagcuggaaucaacaaggauuuaccagauuuuggcgaucuauucaacugucgccaguucauugguacugguagucucccugggggcaaucaguuucuggaugugcucuaaugggucucuacaguguagaauauguauuuaa

SEQ ID NO: 37086 - RNA, 1701 nt, Artificial Sequence
  derived and/or modified CDS sequence (wt) from hemagglutinin__InfluenzaA__ADI49029
auggaggcaauacuaguaguucugcuauauacauuugcaaccgcaaaugcagacacauuauguauagguuaucaugcgaacaauucaacagacacuguagacacaguacuagaaaagaauguaacaguaacacacucuguuaaccuucuagaagacaagcauaacgggaaacuaugcaaacuaagagggguagccccauugcauuuggguaaauguaacauugcuggcuggauccugggaaauccagagugugaaucacucuccacagcaagcucaugguccuacauuguggaaacaucuauuucagacaauggaacguguuacccaggagauuucaucgauuaugaggagcuaagagagcaauugagcucagugucaucauuugaaagguuugagauauuccccaagacaaguucauggcccaaucaugacucgaacaaagguguaacggcagcauguccucaugcuggagcaaaaagcuucuacaaaaauuuaauauggcuaguuaaaaaaggaaauucauacccaaagcucagcaaauccuacauuaaugauaaagggaaagaaguccucgugcuauggggcauucaccauccaucuacuagugcugaccaacaaagucucuaucagaaugcagaugcauauguuuuuguggggucaucaagauacagcaagaaguucaagccggaaauagcaauaagacccaaagugagggaucaagaagggagaaugaacuauuacuggacacuaguagagccgggagacaaaauaacauucgaagcaacuggaaaucuagugguaccgagauaugcauucgcaauggaaagaaaugcuggaucugguauuaucauuucagauacaccaguccacgauugcaauacaacuugucagacacccaagggugcuauaaacaccagccucccauuucauaauauacauccgaucacaauuggaaaauguccaaaauauguaaaaagcacaaaauugagacuggccacaggauugaagaaugucccgucuauucaaucuagaggccuauuuggggccauugccgguuucauugaagggggguggacagggaugguagauggaugguacgguuaucaccaucaaaaugagcaggggucaggauaugcagccgaccugaagagcacacagaaugccauugacgagauuacuaacaaaguaaauucuguuauugaaaagaugaauacacaguucacagcaguagguaaagaguucaaccaccuggaaaaaagaauagagaauuuaaauaaaaaaguugaugaugguuuccuggacauuuggacuuacaaugccgaacuguugguucuauuggaaaaugaaagaacuuuggacuaccacgauucaaaugugaagaacuuauaugaaaagguaagaagccaguuaaaaaacaaugccaaggaaauuggaaacggcugcuuugaauuuuaccacaaaugcgauaacacgugcauggaaagugucaaaaaugggacuuaugacuacccaaaauacucagaggaagcaaaauuaaacagagaagaaauagaugggguaaagcuggaaucaacaaggauuuaccagauuuuggcgaucuauucaacugucgccaguucauugguacugguagucucccugggggcaaucaguuucuggaugugcucuaaugggucucuacaguguagaauauguauuuaa

SEQ ID NO: 37087 - RNA, 1701 nt, Artificial Sequence; identical to SEQ ID NO: 34965
  derived and/or modified CDS sequence (wt) from hemagglutinin__InfluenzaA__ADI49240

SEQ ID NO: 37088 - RNA, 1701 nt, Artificial Sequence; identical to SEQ ID NO: 34965
  derived and/or modified CDS sequence (wt) from hemagglutinin__InfluenzaA__ADI49260

SEQ ID NO: 37089 - RNA, 1701 nt, Artificial Sequence
  derived and/or modified CDS sequence (wt) from hemagglutinin__InfluenzaA__ADI49270
augaaggcaauacuaguaguucugcuauauacauuugcaaccgcaaaugcagacacauuauguauagguuaucaugcgaacaauucaacagacacuguagacacaguacuagaaaagaauguaacaguaacacacucuguuaaccuucuagaagacaagcauaacgggaaacuauguaaacuaagagggguagccccauugcauuuggguaaauguaacauugcuggcuggauccugggaaauccagagugugaaucacucuccacagcaagcucaugguccuacauuguggaaacaucuaguucagacaauggaacguguuacccaggagauuucaucgauuaugaggagcuaagagagcaauugagcucagugucaucauuugaaagguuugagauauuccccaagacaaguucauggcccaaucaugacucgaacaaagguguaacggcagcauguccucaugcuggagcaaaaagcuucuacaaaaauuuaauauggcuaguuaaaaaaggaaauucauacccaaagcucagcaaauccuacauuaaugauaaagggaaagaaguccucgugcuauggggcauucaccauccaucuacuagugcugaccaacaaagucucuaucagaaugcagaugcauauguuuuuguggggacaucaagauacagcaagaaguucaagccggaaauagcaauaagacccaaagugagggaucaagaagggagaaugaacuauuacuggacacuaguagagccgggagacaaaauaacauucgaagcaacuggaaaucuagugguaccgagauaugcauucgcaauggaaagaaaugcuggaucugguauuaucauuucagauacaccaguccacgauugcaauacaacuugucagacacccaagggugcuauaaacaccagccucccauuucagaauauacauccgaucacaauuggaaaauguccaaaauauguaaaaagcacaaaauugagacuggccacaggauugaggaaugucccgucuauucaaucuagaggccuauuuggggccauugccgguuucauugaagggggguggacagggaugguagauggaugguacgguuaucaccaucaaaaugagcaggggucaggauaugcagccgaccugaagagcacacagaaugccauugacgagauuacuaacaaaguaaauucuguuauugaaaagaugaauacacaguucacagcaguagguaaagaguucaaccaccuggaaaaaagaauagagaauuuaaauaaaaagguugaugaugguuuccuggacauuuggacuuacaaugccgaacuguugguucuauuggaaaaugaaagaacuuuggacuaccacgauucaaaugugaagaacuuauaugaaaagguaagaagccaguuaaaaaacaaugccagggaaauuggaaacggcugcuuugaauuuuaccacaaaugcgauaacacgugcauggaaagugucaaaaaugggacuuaugacuacccaaaauacucagaggaagcaaaauuaaacagagaagaaauagaugggguaaagcuggaaucaacaaggauuuaccagauuuuggcgaucuauucaacugucgccaguucauugguacugguagucucccugggggcaaucaguuucuggaugugcucuaaugggucucuacaguguagaauauguauuuaa

SEQ ID NO: 37090 - RNA, 1701 nt, Artificial Sequence; identical to SEQ ID NO: 34965
  derived and/or modified CDS sequence (wt) from hemagglutinin__InfluenzaA__ADI49280

SEQ ID NO: 37091 - RNA, 1701 nt, Artificial Sequence; identical to SEQ ID NO: 34965
  derived and/or modified CDS sequence (wt) from hemagglutinin__InfluenzaA__ADI49312

SEQ ID NO: 37092 - RNA, 1701 nt, Artificial Sequence
  derived and/or modified CDS sequence (wt) from hemagglutinin__InfluenzaA__ADI49322
auggaggcaauacuaguaguucugcuauauacauuugcaaccgcaaaugcagacacauuauguauagguuaucaugcgaacaauucaacagacacuguagacacaguacuagaaaagaauguaacaguaacacacucuguuaaccuucuagaagacaagcauaaugggaaacuaugcaaacuaagagggguagccccauugcauuuggguaaauguaacauugcuggcuggauccugggaaauccagagugugaaucacucuccacagcaagcucaugguccuacauuguggaaacaucuaguucagacaauggaacguguuacccaggagauuucaucgauuaugaggagcuaagagagcaauugagcucagugucaucauuugaaagguuugagauauuccccaagacaaguucauggcccaaucaugacucgaacaaagguguaacggcagcauguccucaugcuggagcaaaaagcuucuacaaaaauuuaauauggcuaguuaaaaaaggaaauucauacccaaagcucagcaaauccuacauuaaugauaaagggaaagaaguccucgugcuauggggcauucaccauccaucuacuagugcugaccaacaaagucucuaucagaaugcagaugcauauguuuuuguggggucaucaagauacagcaagaaguucaagccggaaauagcaauaagacccaaagugagggaucaggaagggagaaugaacuauuacuggacacuaguagagccgggagacaaaauaacauucgaagcaacuggaaauuuagugguaccgagauaugcauucgcaauggaaagaaaugcuggaucugguauuaucauuucagauacaccaguccacgauugcaauacaacuugucagacacccaagggugcuauaaacaccagccucccauuucauaauauacauccgaucacaauuggaaaauguccaaaauauguaaaaagcacaaaauugagacuggccacaggauugaggaaugucccgucuauucaaucuagaggccuauuuggggccauugccgguuucauugaagggggguggacagggaugguagauggaugguacgguuaucaccaucaaaaugagcaggggucaggauaugcagccgaccugaagagcacacagaaugccauugacgagauuacuaacaagguaaauucuguuauugaaaagaugaauacacaguucacagcaguagguaaagaguucaaccaccuggaaaaaagaauagagaauuuaaauaaaaaaguugaugaugguuuccuggacauuuggacuuacaaugccgaacuguugguucuauuggaaaaugaaagaacuuuggacuaccacgauucaaaugugaagaacuuauaugaaaagguaagaagccaguuaaaaaacaaugccaaggaaauuggaaacggcugcuuugaauuuuaccacaaaugcgauaacacgugcauggaaagugucaaaaaugggacuuaugacuacccaaaauacucagaggaagcaaaauuaaacagagaagaaauagaugggguaaagcuggaaucaacaaggauuuaccagauuuuggcgaucuauucaacugucgccaguucauugguacugguagucucccugggggcaaucaguuucuggaugugcucuaaugggucucuacaguguagaauauguauuuaa

SEQ ID NO: 37093 - RNA, 1701 nt, Artificial Sequence; identical to SEQ ID NO: 34965
  derived and/or modified CDS sequence (wt) from hemagglutinin__InfluenzaA__ADI49332

SEQ ID NO: 37094 - RNA, 1701 nt, Artificial Sequence; identical to SEQ ID NO: 35250
  derived and/or modified CDS sequence (wt) from hemagglutinin__InfluenzaA__ADI49342

SEQ ID NO: 37095 - RNA, 1701 nt, Artificial Sequence
  derived and/or modified CDS sequence (wt) from hemagglutinin__InfluenzaA__ADI49352
auggaggcaauacuaguaguucugcuauauacauuugcaaccgcaaaugcagacacauuauguauagguuaucaugcgaacaauucaacagacacuguagacacaguacuagaaaagaauguaacaguaacacacucuguuaaccuucuagaagacaagcauaacgggaaacuaugcaaacuaagagggguagccccauugcauuuggguaaauguaacauugcuggcuggauccugggaaauccagagugugaaucacucuccacagcaagcucaugguccuacauuguggaaacaucuaguucagacaauggaacguguuacccaggagauuucaucgauuaugaggagcuaagagagcaauugagcucagugucaucauuugaaagguuugagauauuccccaagacaaguucauggcccaaucaugacucgaacaaagguguaacggcagcauguccucaugcuggagcaaaaagcuucuacaaaaauuuaauauggcuaguuaaaaaaggaaauucauacccaaagcucagcaaauccuacauuaaugauaaagggaaagaaguccucgugcuauggggcauucaccauccaucuacuagugcugaccaacaaagucucuaucagaaugcagaugcauauguuuuuguggggucaucaagauacagcaagaaguucaagccggaaauagcaauaagacccaaagugagggaucaagaagggagaaugaacuauuacuggacacuaguagagccgggagacaaaauaacauucgaagcaacuggaaaucuagugguaccgagauaugcauucgcaauggaaagaaaugcuggaucugguauuaucauuucagauacaccaguccacgauugcaauacaacuugucagacacccaagggugcuauaaacaccagccucccauuucauaauauacauccgaucacaauuggaaaauguccaaaauauguaaaaagcacaaaauugagacuggccacaggauugaggaaugucccgucuauucaaucuagaggccuauuuggggccauugccgguuucauugaagggggguggacagggaugguagauggaugguacgguuaucaccaucaaaaugagcaggggucaggauaugcagccgaccugaagagcacacagaaugccauugacgagauuacuaacaaagugaauucuguuauugaaaagaugaauacacaguucacagcaguagguaaagaguucaaccaccuggaaaaaagaauagagaauuuaaauaaaaaaguugaugaugguuuccuggacauuuggacuuacaaugccgaacuguugguucuauuggaaaaugaaagaacuuuggacuaccacgauucaaaugugaagaacuuauaugaaaagguaagaagccaguuaaaaaacaaugccaaggaaauuggaaacggcugcuuugaauuuuaccacaaaugcgauaacacgugcauggaaagugucaaaaaugggacuuaugacuacccaaaauacucagaggaagcaaaauuaaacagagaagaaauagaugggguaaagcuggaaucaacaaggauuuaccagauuuuggcgaucuauucaacugucgccaguucauugguacugguagucucccugggggcaaucaguuucuggaugugcucuaaugggucucuacaguguagaauauguauuuaa

SEQ ID NO: 37096 - RNA, 1701 nt, Artificial Sequence
  derived and/or modified CDS sequence (wt) from hemagglutinin__InfluenzaA__ADI49362
augaaggcaauacuaguaguucugcuauauacauuugcaaccgcaaaugcagacacauuauguauagguuaucaugcgaacaauucaacagacacuguagacacaguacuagaaaagaauguaacaguaacacacucuguuaaccuucuagaagacaagcauaacgggaaacuaugcaaacuaagagggguagccccauugcauuuggguaaauguaacauugcuggcuggauccugggaaauccagagugugaaucacucuccacagcaagcucaugguccuacauuguggaaacaucuaguucagacaauggaacguguuacccaggagauuucaucgauuaugaggagcuaagagagcaauugagcucagugucaucauuugaaagguuugagauauuccccaagacaaguucauggcccaaucaugacucgaacaaagguguaacggcagcauguccucaugcuggagcaaaaagcuucuacaaaaauuuaauauggcuaguuaaaaaaggaaauucauacccaaagcucagcaaauccuacauuaaugauaaagggaaagaaguccucgugcuauggggcauucaccauccaucuacuagugcugaccaacaaagucucuaucagaaugcagaugcauauguuuuuguggggacaucaagauacagcaagaaguucaagccagaaauagcaauaagacccaaagugagggaucaagaagggagaaugaacuauuacuggacacuaguagagccgggagacaaaauaacauucgaagcaacuggaaauuuagugguaccgagauaugcauucgcaauggaaagaaaugcuggaucugguauuaucauuucagauacaccaguccacgauugcaauacaacuugucagacacccaagggugcuauaaacaccagccucccauuucagaauauacauccgaucacaauuggaaaauguccaaaauauguaaaaagcacaaaauugagacuggccacaggauugaggaaugucccgucuauucaaucuagaggccuauuuggggccauugccgguuucauugaagggggguggacagggaugguagauggaugguacgguuaucaccaucaaaaugagcaggggucaggauaugcagccgaccugaagagcacacagaaugccauugacgagauuacuaacaaaguaaauucuguuauugaaaagaugaauacacaguucacagcaguagguaaagaguucaaccaccuggaaaaaagaauagagaauuuaaauaaaaaaguugaugaugguuuccuggacauuuggacuuacaaugccgaacuguugguucuauuggaaaaugaaagaacuuuggacuaccacgauucaaaugugaagaacuuauaugaaaagguaagaagccaguuaaaaaacaaugccaaggaaauuggaaacggcugcuuugaauuuuaccacaaaugcgauaacacgugcauggaaagugucaaaaaugggacuuaugacuacccaaaauacucagaggaagcaaaauuaaacagagaagaaauagaugggguaaagcuggaaucaacaaggauuuaccagauuuuggcgaucuauucaacugucgccaguucauugguacugguagucucccugggggcaaucaguuucuggaugugcucuaaugggucucuacaguguagaauauguauuuaa

SEQ ID NO: 37097 - RNA, 1701 nt, Artificial Sequence
  derived and/or modified CDS sequence (wt) from hemagglutinin__InfluenzaA__ADI49382
augaaggcaauacuaguaguucugcuauauacauuugcaaccgcaaaugcagacacauuauguauagguuaucaugcgaacaauucaacagacacuguagacacaguacuagaaaagaauguaacaguaacacacucuguuaaccuucuagaagacaagcauaacgggaaacuaugcaaacuaagagggguagccccauugcauuuggguaaauguaacauugcuggcuggauccugggaaauccagagugugaaucacucuccacagcaagcucaugguccuacauuguggaaacaucuaguucagacaauggaacguguuacccaggagauuucaucaauuaugaggagcuaagagagcaauugagcucagugucaucauuugaaagguuugagauauuccccaagacaaguucauggcccaaucaugacucgaacaaagguguaacggcagcauguccucaugcuggagcaaaaagcuucuacaaaaauuuaauauggcuaguuaaaaaaggaaauucauacccaaagcucagcaaauccuacauuaaugacaaagggaaagaaguccucgugcuauggggcauucaccauccaucuacuagugcugaccaacaaagucucuaucagaaugcagaugcauauguuuuuguggggacaucaagauacagcaagaaguucaagccggaaauagcaauaagacccaaagugagggaucaagaagggagaaugaacuauuacuggacacuaguagagccgggagacaaaauaacauucgaagcaacuggaaaucuagugguaccgagauaugcauucgcaauggaaagaaaugcuggaucugguauuaucaucucagauacaccaguccacgauugcaauacaacuugucagacacccaagggugcuauaaacaccagccucccauuucagaauauacauccgaucacaauaggaaaauguccaaaauauguaaaaagcacaaaauugagacuggccacaggauugaggaaugucccgucuauucaaucuagaggccuauuuggggccauugccgguuucauugaagggggguggacagggaugguagauggaugguacgguuaucaccaucaaaaugagcaggggucaggauaugcagccgaccugaagagcacacagaaugccauugacaagauuacuaacaaaguaaauucuguuauugaaaagaugaauacacaguucacagcaguagguaaagaguucaaccaccuggaaaaaagaauagagaauuuaaauaaaaaaguugaugaugguuuccuggacauuuggacuuacaaugccgaacuguugguucuauuggaaaaugaaagaacuuuggacuaccacgauucaaaugugaagaacuuauaugaaaagguaagaagccaguuaaaaaacaaugccaaggaaauuggaaacggcugcuuugaauuuuaccacaaaugcgauaacacgugcauggaaagugucaaaaaugggacuuaugacuacccaaaauacucagaggaagcaaaauugaacagagaagaaauagaugggguaaagcuggaaucaacaaggauuuaccagauuuuggcgaucuauucaacugucgccaguucauugguacugguagucucccugggggcaaucaguuucuggaugugcucuaaugggucucuacaguguagaauauguauuuaa

SEQ ID NO: 37098 - RNA, 1701 nt, Artificial Sequence
  derived and/or modified CDS sequence (wt) from hemagglutinin__InfluenzaA__ADI49392
augaaggcaauacuaguaguucugcuauauacauuugcaaccgcaaaugcagacacauuauguauagguuaucaugcgaacaauucaacagacacuguagacacaguacuagaaaagaauguaacaguaacacacucuguuaaccuucuagaagacaagcauaacgggaaacuaugcaaacuaagagggguagccccauugcauuuggguaaauguaacauugcuggcuggauccugggaaauccagagugugaaucacucuccacagcaagcucaugguccuacauuguggaaacaucuaguucagacaauggaacguguuacccaggagauuucaucgauuaugaggagcuaagggagcaauugagcucagugucaucauuugaaagguuugagauauuccccaagacaaguucauggcccaaucaugacucgaacaaagguguaacggcagcauguccucaugcuggagcaaaaagcuucuacaaaaauuuaauauggcuaguuaaaaaaggaaauucauacccaaagcucagcaaauccuacauuaaugauaaagggaaagaaguccucgugcuauggggcauucaccauccaucuacuagugcugaccaacaaagucucuaucagaaugcagaugcauauguuuuuguggggacaucaagauacagcaagaaguucaagccggaaauagcaauaagacccaaagugagggaacaagaagggagaaugaacuauuacuggacacuaguagagccgggagacaaaauaacauucgaagcaacuggaaaucuagugguaccgagauaugcauucgcaauggaaagaaaugcuggaucugguauuaucauuucagauacaccaguccacgauugcaauacaacuugucagacacccaaaggugcuauaaacaccagccucccauuucagaauauacauccgaucacaauuggaaaauguccaaaauauguaaaaagcacaaaauugagacuggccacaggauugaggaaugucccgucuauucaaucuagaggccuauuuggggccauugccgguuucauugaagggggguggacagggaugguagauggaugguacgguuaucaccaucaaaaugagcaggggucaggauaugcagccgaccugaagagcacacagaaugccauugacgagauuacuaacaaaguaaauucuguuauugaaaagaugaauacacaguucacagcaguagguaaagaguucaaccaccuggaaaaaagaauagagaauuuaaauaaaaaaguugaugaugguuuccuggacauuuggacuuacaaugccgaacuguugguucuauuggaaaaugaaagaacuuuggacuaccacgauucaaaugugaagaacuuauaugaaaagguaagaagccaguuaaaaaacaaugccaaggaaauuggaaacggcugcuuugaauuuuaccacaaaugcgauaacacgugcauggaaagugucaaaaaugggacuuaugacuacccaaaauacucagaggaagcaaaauuaaacagagaagaaauagaugggguaaagcuggaaucaacaaggauuuaccagauuuuggcgaucuauucaacugucgccaguucauugguacugguagucucccugggggcaaucaguuucuggaugugcucuaaugggucucuacaguguagaauauguauuuaa

SEQ ID NO: 37099 - RNA, 1701 nt, Artificial Sequence; identical to SEQ ID NO: 34705
  derived and/or modified CDS sequence (wt) from hemagglutinin__InfluenzaA__ADI49717

SEQ ID NO: 37100 - RNA, 1701 nt, Artificial Sequence
  derived and/or modified CDS sequence (wt) from hemagglutinin__InfluenzaA__ADI49727
augaaggcaauacuaguaguucugcuauauacauuugcaaccgcaaaugcagacacauuauguauagguuaucaugcgaacaauucaacagacacuguagacacaguacuagaaaagaauguaacaguaacacacucuguuaaccuucuagaagacaagcauaacgggaaacuaugcaaacuaagagggguagccccauugcauuuggguaaauguaacauugcuggcuggauccugggaaauccagagugugaaucacucuccacagcaagcucaugguccuacauuguggaaacaucuaguucagacaauggaacguguuacccaggagauuucaucgauuaugaggagcuaagagagcaauugagcucagugucaucauuugaaagguuugagauauuccccaagacaaguucauggcccaaucaugacucgaacaaagguguaacggcagcauguccucaugcuggagcaaaaagcuucuacaaaaauuuaauauggcuaguuaaaaaaggaaauucauacccaaagcucagcaaauccuacauuaaugauaaagggaaagaaguccucgugcuauggggcauucaccauccaucuacuagugcugaccaacaaagucucuaucagaaugcagaugcauauguuuuuguggggucaucaagauacagcaagaaguucaagccggaaauagcaauaagacccaaagugagggaucaagaagggagaaugaacuauuacuggacacuaguagagccgggagacaaaauaacauucgaagcaacuggaaaucuagugguaccgagauaugcauucgcaauggaaagaaaugcuggaucugguauuaucauuucagauacaccaguccacgauugcaauacaacuugucagacacccaagggugcuauaaacaccagccucccauuucagaauauacauccgaucacaauuggaaaauguccaaaauauguaaaaagcacaaaauugagacuggccacaggauugaggaaugucccgucuauucaaucuagaggccuauuuggggccauugccgguuucauugaagggggguggacagggaugguagauggaugguacgguuaucaccaucaaaaugagcaggggucaggauaugcagccgaccugaagagcacacagaaugccauugacgagauuacuaacaaaguaaauucuauuauugaaaagaugaauacacaguucacagcaguagguaaagaguucaaccaccuggaaaaaagaauagagaauuuaaauaaaaaaguugaugaugguuuccuggacauuuggacuuacaaugccgaacuguugguucuauuggaaaaugaaagaacuuuggacuaccacgauucaaaugugaagaacuuauaugaaaagguaagaagccaguuaaaaaacaaugccaaggaaauuggaaacggcugcuuugaauuuuaccacaaaugcgauaacacgugcauggaaagugucaaaaaugggacuuaugacuacccaaaauacucagaggaagcaaaauuaaacagagaagaaauagaugggguaaagcuggaaucaacaaggauuuaccagauuuuggcgaucuauucaacugucgccaguucauugguacugguagucucccugggggcaaucaguuucuggaugugcucuaaugggucucuacaguguagaauauguauuuaa

SEQ ID NO: 37101 - RNA, 1701 nt, Artificial Sequence; identical to SEQ ID NO: 34705
  derived and/or modified CDS sequence (wt) from hemagglutinin__InfluenzaA__ADI49737

SEQ ID NO: 37102 - RNA, 1701 nt, Artificial Sequence; identical to SEQ ID NO: 34705
  derived and/or modified CDS sequence (wt) from hemagglutinin__InfluenzaA__ADI49747

SEQ ID NO: 37103 - RNA, 1701 nt, Artificial Sequence
  derived and/or modified CDS sequence (wt) from hemagglutinin__InfluenzaA__ADI49757
augaaggcaauacuaguaguucugcuauauacauuugcaaccgcaaaugcagacacauuauguauagguuaucaugcgaacaauucaacagacacuguagacacaguacuagaaaagaauguaacaguaacacacucuguuaaccuucuagaagacaagcauaacgggaaacuaugcaaacuaagagggguagccccauugcauuuggguaaauguaacauugcuggcuggauccugggaaauccagagugugaaucacucuccacagcaagcucaugguccuacauuguggaaacaucuaguucagacaauggaacguguuacccaggagauuucaucgauuaugaggagcuaagagagcaauugagcucagugucaucauuugaaagguuugagauauuccccaagacaaguucauggcccaaucaugacucgaacaaagguguaacggcagcauguccucaugcuggagcaaaaagcuucuacaaaaauuuaauauggcuaguuaaaaaaggaaauucauacccaaagcucaguaaauccuacauuaaugauaaagggaaagaaguccucgugcuauggggcauucaccauccaucuacuagugcugaccaacaaagucucuaucagaaugcagaugcauauguuuuuguggggucaucaagauacagcaagaaguucaagccggaaauagcaauaagacccaaagugagggaucaagaagggagaaugaacuauuacuggacacuaguagagccgggagacaaaauaacauucgaagcaacuggaaaucuagugguaccgagauaugcauucgcaauggaaagaaaugcuggaucugguauuaucauuucagauacaccaguccacgauugcaauacaacuugucagacacccaagggugcuauaaacaccagccucccauuucagaauauacauccgaucacaauuggaaaauguccaaaauauguaaaaagcacaaaauugagacuggccacaggauugaggaaugucccgucuauucaaucuagaggccuauuuggggccauugccgguuucauugaagggggguggacagggaugguagauggaugguacgguuaucaccaucaaaaugagcaggggucaggauaugcagccgaccugaagagcacacagaaugccauugacgagauuacuaacaaaguaaauucuguuauugaaaagaugaauacacaguucacagcaguagguaaagaguucaaccaccuggaaaaaagaauagagaauuuaaauaaaaaaguugaugaugguuuccuggacauuuggacuuacaaugccgaacuguugguucuauuggaaaaugaaagaacuuuggacuaccacgauucaaaugugaagaacuuauaugaaaagguaagaagccaguuaaaaaacaaugccaaggaaauuggaaacggcugcuuugaauuuuaccacaaaugcgauaacacgugcauggaaagugucaaaaaugggacuuaugacuacccaaaauacucagaggaagcaaaauuaaacagagaagaaauagaugggguaaagcuggaaucaacaaggauuuaccagauuuuggcgaucuauucaacugucgccaguucauugguacugguagucucccugggggcaaucaguuucuggaugugcucuaaugggucucuacaguguagaauauguauuuaa

SEQ ID NO: 37104 - RNA, 1701 nt, Artificial Sequence
  derived and/or modified CDS sequence (wt) from hemagglutinin__InfluenzaA__ADI49767
augaaggcaauacuaguaguucugcuauauacauuugcaaccgcaaaugcagacacauuauguauagguuaucaugcgaacaauucaacagacacuguagacacaguacuagaaaagaauguaacaguaacacacucuguuaaccuucuagaagacaagcauaacgggaaacuaugcaaacuaagagggguagccccauugcauuuggguaaauguaacauugcuggcuggauccugggaaauccagagugugaaucacucuccacagcaagcucaugguccuacauuguggaaacaucuaguucagacaauggaacguguuacccaggagauuucaucgauuaugaggagcuaagagagcaauugagcucagugucaucauuugaaagguuugagauauuccccaagacaaguucauggcccaaucaugacucgaacaaagguguaacggcagcauguccucaugcuggagcaaaaagcuucuacaaaaauuuaauauggcuaguuaaaaaaggaaauucauacccaaagcucagcaaauccuacauuaaugauaaagggaaagaaguccucgugcuauggggcauucaccauccaucuacuagugcugaccaacaaagucucuaucagaaugcagaugcauauguuuuuguggggucaucaagauacagcaagaaguucaagccggaaauagcaauaagacccaaagugagggaucaagaagggagaaugaacuauuacuggacacuaguagagccgggagauaaaauaacauucgaagcaacuggaaaucuagugguaccgagauaugcauucgcaauggaaagaaaugcuggaucugguauuaucauuucagauacaccaguccacgauugcaauacaacuugucagacacccaagggugcuauaaacaccagccucccauuucagaauauacauccgaucacaauuggaaaauguccaaaauauguaaaaagcacaaaauugagacuggccacaggauugaggaauguuccgucuauucaaucuagaggccuauuuggggccauugccgguuucauugaagggggguggacagggaugguagauggaugguacgguuaucaccaucaaaaugagcaggggucaggauaugcagccgaccugaagagcacacagaaugccauugacgagauuacuaacaaaguaaauucuguuauugaaaagaugaauacacaguucacagcaguagguaaagaguucaaccaccuggaaaaaagaauagagaauuuaaauaaaaaaguugaugaugguuuccuggacauuuggacuuacaaugccgaacuguugguucuauuggaaaaugaaagaacuuuggacuaccacgauucaaaugugaagaacuuauaugaaaagguaagaagccaguuaaaaaacaaugccaaggaaauuggaaacggcugcuuugaauuuuaccacaaaugcgauaacacgugcauggaaagugucaaaaaugggacuuaugacuacccaaaauacucagaggaagcaaaauuaaacagagaagaaauagaugggguaaagcuggaaucaacaaggauuuaccagauuuuggcgaucuauucaacugucgccaguucauugguacugguagucucccugggggcaaucaguuucuggaugugcucuaaugggucucuacaguguagaauauguauuuaa

SEQ ID NO: 37105 - RNA, 1701 nt, Artificial Sequence
  derived and/or modified CDS sequence (wt) from hemagglutinin__InfluenzaA__ADI49777
augaaggcaauacuaguaguucugcuauauacauuugcaaccgcaaaugcagacacauuauguauagguuaucaugcgaacaauucaacagacacuguagacacaguacuagaaaagaauguaacaguaacacacucuguuaacauucuagaagacaagcauaacgggaaacuaugcaaacuaagagggguagccccauugcauuuggguaaauguaacauugcuggcuggauccugggaaauccagagugugaaucacucuccacagcaagcucaugguccuacauuguggaaacaucuaguucagacaauggaacguguuacccaggagauuucaucgauuaugaggagcuaagagagcaauugagcucagugucaucauuugaaagguuugagauauuccccaagacaaguucauggcccaaucaugacucgaacaaagguguaacggcagcauguccucaugcuggagcaaaaagcuucuacaaaaauuuaauauggcuaguuaaaaaaggaaauucauacccaaagcucagcaaauccuacauuaaugauaaagggaaagaaguccucgugcuauggggcauucaccauccaucuacuaguacugaccaacaaagucucuaucagaaugcagaugcauauguuuuuguggggucaucaagauacagcaagaaguucaagccggaaauagcaauaagacccaaagugagggaucaagaagggagaaugaacuauuacuggacacuaguagagccgggagacaaaauaacauucgaagcaacuggaaaucuagugguaccgagauaugcauucgcaauggaaagaaaugcuggaucugguauuaucauuucagauacaccaguccacgauugcaauacaacuugucagacacccaagggugcuauaaacaccagccucccauuucagaauauacauccgaucacgauuggaaaauguccaaaauauguaaaaagcacaaaauugagacuggccacaggauugaggaaugucccgucuauucaaucuagaggccuauuuggggccauugccgguuucauugaagggggguggacagggaugguagauggaugguacgguuaucaccaucaaaaugagcaggggucaggauaugcagccgaccugaagagcacacagaaugccauugacgagauuacuaacaaaguaaauucuguuauugaaaagaugaauacacaguucacagcaguagguaaagaguucaaccaccuggaaaaaagaauagagaauuuaaauaaaaaaguugaugaugguuuccuggacauuuggacuuacaaugccgaacuguugguucuauuggaaaaugaaagaacuuuggacuaccacgauucaaaugugaagaacuuauaugaaaagguaagaagccagcuaaaaaacaaugccaaggaaauuggaaacggcugcuuugaauuuuaccacaaaugcgauaacacgugcauggaaagugucaaaaaugggacuuaugacuacccaaaauacucagaggaagcaaaauuaaacagagaagaaauagaugggguaaagcuggaaucaacaaggauuuaccagauuuuggcgaucuauucaacugucgccaguucauugguacugguagucucccugggggcaaucaguuucuggaugugcucuaaugggucucuacaguguagaauauguauuuaa

SEQ ID NO: 37106 - RNA, 1701 nt, Artificial Sequence
  derived and/or modified CDS sequence (wt) from hemagglutinin__InfluenzaA__ADI49787
augaaggcaauacuaguaguucugcuauauacauuugcaaccgcaaaugcagacacauuauguauagguuaucaugcgaacaauucaacagacacuguagacacaguacuagaaaagaauguaacaguaacacacucuguuaaccuucuagaagacaagcauaacgggaaacuaugcaaacuaagagggguagccccauugcauuuggguaaauguaacauugcuggcuggauccugggaaauccagagugugaaucaaucuccacagcaagcucaugguccuacauuguggaaacaucuaguucagacaauggaacguguuacccaggagauuucaucgauuaugaggagcuaagagagcaauugagcucagugucaucauuugaaagguuugagauauuccccaagacaaguucauggcccaaucaugacucgaacaaagguguaacggcagcauguccucaugcuggagcaaaaagcuucuacaaaaauuuaauauggcuaguuaaaaaaggaaauucauacccaaagcucagcaaauccuacauuaaugauaaagggaaagaaguccucgugcuauggggcauucaccauccaucuacuagugcugaccaacaaagucucuaucagaaugcagaugcauauguuuuuguggggucaucaagauacagcaagaaguucaagccggaaauagcaauaagacccaaagugagggaucaagaagggagaaugaacuauuacuggacacuaguagagccgggagacaaaauaacauucgaagcaacuggaaaucuagugguaccgagauaugcauucgcaauggaaagaaaugcuggaucugguauuaucauuucagauacaccaguccacgauugcaauacaacuugucagacacccaagggugcuauaaacaccagccucccauuucagaauauacauccgaucacaauuggaaaauguccaaaauauguaaaaagcacaaaauugagacuggccacaggauugaggaaugucccgucuauucaaucgagaggccuauuuggggccauugccgguuucauugaagggggguggacagggaugguagauggaugguacgguuaucaccaucaaaaugagcaggggucaggauaugcagccgaccugaagagcacacagaaugccauugacgagauuacuaacaaaguaaauucuguuauugaaaagaugaauacacaguucacagcaguagguaaagaguucaaccaccuggaaaaaagaauagagaauuuaaauaaaaaaguugaugaugguuuccuggacauuuggacuuacaaugccgaacuguugguucuauuggaaaaugaaagaacuuuggacuaccacgauucaaaugugaagaacuuauaugaaaagguaagaagccagcuaaaaaacaaugccaaggaaauuggaaacggcugcuuugaauuuuaccacaaaugcgauaacacgugcauggaaagugucaaaaaugggacuuaugacuacccaaaauacucagaggaagcaaaauuaaacagagaagaaauagaugggguaaagcuggaaucaacaaggauuuaccagauuuuggcgaucuauucaacugucgccaguucauugguacugguagucucccugggggcaaucaguuucuggaugugcucuaaugggucucuacaguguagaauauguauuuaa

SEQ ID NO: 37107 - RNA, 1701 nt, Artificial Sequence
  derived and/or modified CDS sequence (wt) from hemagglutinin__InfluenzaA__ADI49822
augaaggcaauacuaguaguucugcuauauacauuugcaaccgcaaaugcagacacauuauguauagguuaucaugcgaacaauucaacagacacuguagacacaguacuagaaaagaauguaacaguaacacacucuguuaaccuucuagaagacaagcauaacgggaaacuaugcaaacuaagagggguagccccauugcauuuggguaaauguaacauugcuggcuggauccugggaaauccagagugugaaucacucuccacagcaagcucaugguccuacauuguggaaacaucuaguucagacaauggaacguguuacccaggagauuucaucgauuaugaggagcuaagagagcaauugagcucagugucaucauuugaaagguuugagauauuccccaagacaaguucauggcccaaucaugacucgaacaaagguguaacggcagcauguccucaugcuggagcaaaaagcuucuacaaaaauuuaauauggcuaguuaaaaaaggaaauucauacccaaagcucagcaaauccuacauuaaugauaaagggaaagaaguccucgugcuauggggcauucaccauccaucuacuagugcugaccaacaaagucucuaucagaaugcagaugcauauguuuuuguggggacaucaagauacagcaagaaguucaagccggaaauagcaauaagacccaaagugagggaucaagaagggagaaugaacuauuacuggacacuaguagagccgggagacaaaauaacauucgaagcaacuggaaaucuagugguaccgagauaugcauucgcaauggaaagagaugcuggaucugguauuaucauuucagauacaccaguccacgauugcaauacaacuugucagacacccaagggugcuauaaacaccagccucccauuucagaauauacauccgaucacaauuggaaaauguccaaaauauguaaaaagcacaaaauugagacuggccacaggauugaggaaugucccgucuauucaaucuagaggccuauuuggggccauugccgguuucauugaagggggguggacagggaugguagauggaugguacgguuaucaccaucaaaaugagcaggggucaggauaugcagccgaccugaagagcacacagaaugccauugacgagauuacuaacaaaguaaauucuguuauugaaaagaugaauacacaguucacagcaguagguaaagaguucaaccaccuggaaaaaagaauagagaauuuaaauaaaaaaguugaugaugguuuccuggacauuuggacuuacaaugccgaacuguugguucuauuggaaaaugaaagaacuuuggacuaccacgauucaaaugugaagaacuuauaugaaaagguaagaagccaguuaaaaaacaaugccaaggaaauuggaaacggcugcuuugaauuuuaccacaaaugcgauaacacgugcauggaaagugucaaaaaugggacuuaugacuacccaaaauacucagaggaagcaaaauuaaacagagaagaaauagaugggguaaagcuggaaucaacaaggauuuaccagauuuuggcgaucuauucaacugucgccaguucauugguacugguagucucccugggggcaaucaguuucuggaugugcucuaaugggucucuacaguguagaauauguauuuaa

SEQ ID NO: 37108 - RNA, 1701 nt, Artificial Sequence
  derived and/or modified CDS sequence (wt) from hemagglutinin__InfluenzaA__ADI50027
augaaggcaauacuaguaguucugcuauauacauuugcaaccgcaaaugcagacacauuauguauagguuaucaugcgaacaauucaacagacacuguagacacaguacuagaaaagaauguaacaguaacacacucuguuaaccuucuagaagacaagcauaacgggaaacuaugcaaacuaagagggguagccccauugcauuuggguaaauguaacauugcuggcuggauccugggaaauccagagugugaaucacucuccacagcaagcucaugguccuacauuguggaaacaucuaguucagacaauggaacguguuacccaggagauuucaucgauuaugaggagcuaagagagcaauugagcucagugucaucauuugaaagguuugagauauuccccaagacaaguucauggcccaaucaugacucgaacaaagguguaacggcagcauguccucaugcuggagcaaaaagcuucuacaaaaauuuaauauggcuaguuaaaaaaggaaauucauacccaaagcucagcaaauccuacauuaaugauaaagggaaagaaguccucgugcuauggggcauucaccauccaucuacuagugcugaccaacaaagucucuaucagaaugcagaugcauauguuuuuguggggucaucaagauacagcaagaaguucaagccggaaauagcaauaagacccaaagugagggaucaagaagggagaaugaaauauuacuggacacuaguagagccgggagacaaaauaacauucgaagcaacuggaaaucuggugguaccgagauaugcauucgcaauggaaagaaaugcuggaucugguauuaucauuucagauacaccaguccacgauugcaauacaacuugucagacacccaagggugcuauaaacaccagccucccauuucagaauauacauccgaucacaauuggaaaauguccaaaauauguaaaaagcacaaaauugagacuggccacaggauugaggaaugucccgucuauucaaucuagaggccuauuuggggccauugccgguuucauugaagggggguggacagggaugguagauggaugguacggucaucaccaucaaaaugagcaggggucaggauaugcagccgaccugaagagcacacagaaugccauugacgagauuacuaacaaaguaaauucuguuauugaaaagaugaauacacaguucacagcaguagguaaagaguucaaccaccuggaaaaaagaauagagaauuuaaauaaaaaaguugaugaugguuuccuggacauuuggacuuacaaugccgaacuguugguucuauuggaaaaugaaagaacuuuggacuaccacgauucaaaugugaagaacuuauaugaaaagguaagaagccagcuaaaaaacaaugccaaggaaauuggaaacggcugcuuugaauuuuaccacaaaugcgauaacacgugcauggaaagugucaaaaaugggacuuaugacuacccaaaauacucagaggaagcaaaauuaaacagagaagaaauagaugggauaaagcuggaaucaacaaggauuuaccagauuuuggcgaucuauucaacugucgccaguucauugguacugguagucucccugggggcaaucaguuucuggaugugcucuaaugggucucuacaguguagaauauguauuuaa

SEQ ID NO: 37109 - RNA, 1701 nt, Artificial Sequence
  derived and/or modified CDS sequence (wt) from hemagglutinin__InfluenzaA__ADI52834
augaaggcaauacuaguaguucugcuauauacauuugcaaccgcaaaugcagacacauuauguauagguuaucaugcgaacaauucaacagacacuguagacacaguacuagaaaagaauguaacaguaacacacucuguuaacauucuagaagacaagcauaacgggaaacuaugcaaacuaagagggguagccccauugcaucuggguaaauguaacauugcuggcuggauccugggaaauccagagugugaaucacucuccacagcaagcucaugguccuacauuguggaaacaucuaguucagacaauggaacguguuacccaggagauuucaucgauuaugaggagcuaagagagcaauugagcucagugucaucauuugaaagguuugagauauuccccaagacaaguucauggcccaaucaugacucgaacaaagguguaacggcagcauguccucaugcuggagcaaaaagcuucuacaaaaauuuaauuuggcuaguuaaaaaaggaaauucauacccaaagcucagcaaauccuacauuaaugauaaagggaaagaaguccucgugcuauggggcauucaccauccaccuacuagugcugaccaacaaagucucuaucagaaugcagaugcauauguuuuugugggaucaucaagauacagcaagaaguucaagccggaaauagcaauuagacccaaagugagggaucaagaagggagaaugaacuauuacuggacacuaguagagccgggagacaaaauaacauucgaagcaacuggaaaucuagugguaccgagauaugcauucgcaauggaaagaaaugcuggaucugguauuaucauuucagauacaccaguccaugauugcaauacaacuugucagacacccaagggugcuauaaacaccagccucccauuucagaauauacauccgaucacaauuggaaaauguccaaaauauguaaaaagcacaaaauugagacuggccacaggauugaggaaugucccgucuauucaaucuagaggccuauuuggggccauugccgguuucauugaagggggguggacagggaugguagauggaugguacgguuaucaccaucaaaaugagcaggggucaggauaugcagccgaccugaagagcacacagaaugccauugacgagauuacuaacaaaguaaauucuguuauugaaaagaugaauacacaguucacagcaguagguaaagaguucaaccaccuggaaaaaagaauagagaauuuaaauaaaaaaguugaugaugguuuccuggacauuuggacuuacaaugccgaacuguugguucuauuggaaaaugaaagaacuuuggacuaccacgauucaaaugugaagaacuuauaugaaaagguaagaagccagcuaaaaaacaaugccaaggaaguuggaaacggcugcuuugaauuuuaccacaaaugcgauaacacgugcauggaaagugucaaaaaugggaccuaugacuacccaaaauacucagaggaagcaaaauuaaacagagaagaaauagaugggguaaagcuggaaucaacaaggauuuaccagauuuuggcgaucuauucaacugccgccaguucauugguacugguagucucccugggggcaaucaguuucuggaugugcucuaaugggucucuacaguguagaauauguauuuaa

SEQ ID NO: 37110 - RNA, 1701 nt, Artificial Sequence
  derived and/or modified CDS sequence (wt) from hemagglutinin__InfluenzaA__ADI52835
auggaggcaauacuaguaguucugcuauauacauuugcaaccgcaaaugcagacacauuauguauagguuaucaugcgaacaauucaacagacacuguagacacaguacuagaaaagaauguaacaguaacacacucuguuaaccuucuagaagacaagcauaacgggaaacuaugcaaacuaagagggguagccccauugcauuuggguaaauguaacauugcuggcuggauccugggaaauccagagugugaaucacucuccacagcaagcucaugguccuacauuguggaaacaucuaguucagacaauggaacguguuacccaggagauuucaucgauuaugaggagcuaagagagcaauugagcucagugucaucauuugaaagguuugagauauuccccaagacaaguucauggcccaaucaugacucgaacaaagguguaacggcagcauguccucaugcuggagcaaaaagcuucuacaaaaauuuaauauggcuaguuaaaaaaggaaauucauacccaaagcucagcaaauccuacauuaaugauaaagggaaagaaguccucgugcuauggggcauucaccauccaccuacuagugcugaccaacaaagucucuaucagaaugcagaugcauauguuuuuguggggucaucaaaauacagcaagaaguucaagccggaaauagcaauaagacccaaagugagggaucaagaagggagaaugaacuauuacuggacacuaguagagccgggagacaaaauaacauucgaagcaacuggaaaucuagugguaccgagauaugcauucgcaauggaaagaaaugcuggaucugguauuaucauuucagauacaccaguccacgauugcaauacaacuugucagacacccaagggugcuauaaacaccagccucccauuucauaauauacauccgaucacaauuggaaaauguccaaaauauguaaaaagcacaaaauugagacuggccacaggauugaggaaugucccgucuauucaaucuagaggccuauuuggggccauugccgguuucauugaagggggguggacagggaugguagauggaugguacgguuaucaccaucaaaaugagcaggggucaggauaugcagccgaccugaagagcacacagaaugccauugacgagauuacuaacaaaguaaauucuguuauugaaaagaugaauacacaguucacagcaguagguaaagaguucaaccaccuggaaaaaagaauagagaauuuaaauaaaaaaguugaugaugguuuccuggacauuuggacuuacaaugccgaacuguugguucuauuggaaaaugaaagaacuuuggacuaccacgauucaaaugugaagaacuuauaugaaaagguaagaagccaguuaaaaaacaaugccaaggaaauuggaaacggcugcuuugaauuuuaccacaaaugcgauaacacgugcauggaaagugucaaaaaugggacuuaugacuacccaaaauacucagaggaagcaaaauuaaacagagaagaaauagaugggguaaagcuggaaucaacaaagauuuaccagauuuuggcgaucuauucaacugucgccaguucauugguacugguagucucccugggggcaaucaguuucuggaugugcucuaaugggucucuacaguguagaauauguauuuaa

SEQ ID NO: 37111 - RNA, 1701 nt, Artificial Sequence
  derived and/or modified CDS sequence (wt) from hemagglutinin__InfluenzaA__ADI52836
auggaggcaauacuaguaguucugcuauauacauuugcaaccgcaaaugcagacacauuauguauagguuaucaugcgaacaauucaacagacacuguagacacaguacuagaaaagaauguaacaguaacacacucuguuaaccuucuagaagacaagcauaacgggaaacuaugcaaacuaagagggguagccccauugcauuuggguaaauguaacauugcuggcuggauccugggaaauccagagugugaaucacucuccacagcaagcucaugguccuacauuguggaaacaucuaguucagacaauggaacguguuacccaggagauuucaucgauuaugaggagcuaagagagcaauugagcucagugucaucauuugaaagguuugagauauuccccaagacaaguucauggcccaaucaugacucgaacaaagguguaacggcagcauguccucaugcuggagcaaaaagcuucuacaaaaauuuaauauggcuaguuaaaaaagaaaauucauacccaaagcucagcaaauccuacauuaaugauaaagggaaagaaguccucgugcuauggggcauucaccauccaucuacuagugcugaccaacaacgucucuaucagaaugcagaugcauauguuuuuguggggucaucaaaauacagcaagaaguucaagccggaaauagcaauaagacccaaagugagggaucaagaagggagaaugaacuauuacuggacacuaguagagccgggagacaaaauaacauucgaagcaacuggaaaucuagugguaccgagauaugcauucgcaauggaaagaaaugcuggaucugguauuaucauuucagauacaccaguccacgauugcaauacaacuugucagacacccaagggugcuauaaacaccagccucccauuucauaauauacauccgaucacaauuggaaaauguccaaaauauguaaaaagcacaaaauugagacuggccacaggauugaggaaugucccgucuauucaaucuagaggccuauuuggggccauugccgguuucauugaagggggguggacagggaugguagauggaugguacgguuaucaccaucaaaaugagcaggggucaggauaugcagccgaccugaagagcacacagaaugccauugacgagauuacuaacaaaguaaauucuguuauugaaaagaugaauacacaguucacagcaguagguaaagaguucaaccaccuggaaaaaagaauagagaauuuaaauaaaaaaguugaugaugguuuccuggacauuuggacuuacaaugccgaacuguugguucuauuggaaaaugaaagaacuuuggacuaccacgauucaaaugugaagaacuuauaugaaaagguaagaagccaguuaaaaaacaaugccaaggaaauuggaaacggcugcuuugaauuuuaccacaaaugcgauaacacgugcauggaaagugucaaaaaugggacuuaugacuacccaaaauacucagaggaagcaaaauuaaacagagaagaaauagaugggguaaagcuggaaucaacaaagauuuaccagauuuuggcgaucuauucaacugucgccaguucauugguacugguagucucccugggggcaaucaguuucuggaugugcucuaaugggucucuacaguguagaauauguauuuaa

SEQ ID NO: 37112 - RNA, 1701 nt, Artificial Sequence
  derived and/or modified CDS sequence (wt) from hemagglutinin__InfluenzaA__ADI52837
auggaggcaauacuaguaguucugcuauauacauuugcaaccgcaaaugcagacacauuauguauagguuaucaugcgaacaauucaacagacacuguagacacaguacuagaaaagaauguaacaguaacacacucuguuaaccuucuagaagucaagcauaacgggaaacuaugcaaacuaagagggguagccccauugcauuuggguaaauguaacauugcuggcuggauccugggaaauccagagugugaaucacucuccacagcaagcucaugguccuacauuguggaaacaucuaguucagacaauggaacguguuacccaggagauuucaucgauuaugaggagcuaagagagcaauugagcucagugucaucauuugaaagguuugagauauuccccaagacaaguucauggcccaaucaugacucgaacaaagguguaacggcagcauguccucaugcuggagcaaaaagcuucuacaaaaauuuaauauggcuaguuaaaaaaggaaauucauacccaaagcucagcaaauccuacauuaaugauaaagggaaagaaguccucgugcuauggggcauucaccauccaucuacuagugcugaccaacaaagucucuaucagaaugcagaugcauauguuuuuguggggucaucaaaauacagcaagaaguucaagccggaaauagcaauaagacccaaagugagggaucaagaagggagaaugaacuauuacuggacacuaguagagccgggagacaaaauaacauucgaagcaaauggaaaucuagugguaccgagauaugcauucgcaauggaaagaaaugcuggaucugguauuaucauuucagauacaccaguccacgauugcaauacaacuugucagacacccaagggugcuauaaacaccagccucccauuucauaauauacauccgaucacaauuggaaaauguccaaaauauguaaaaagcacaaaauugagacuggccacaggauugaggaaugucccgucuauucaaucuagaggccuauuuggggccauugccgguuucauugaagggggguggacagggaugguagauggaugguacgguuaucaccaucaaaaugagcaggggucaggauaugcagccgaccugaagagcacacagaaugccauugacgagauuacuaacaaaguaaauucuguuauugaaaagaugaauacacaguucacagcaguagguaaagaguucaaccaccuggaaaaaagaauagagaauuuaaauaaaaaaguugaugaugguuuccuggacauuuggacuuacaaugccgaacuguugguucuauuggaaaaugaaagaacuuuggacuaccacgauucaaaugugaagaacuuauaugaaaagguaagaagccaguuaaaaaacaaugccaaggaaauuggaaacggcugcuuugaauuuuaccacaaaugcgauaacacgugcauggaaagugucaaaaaugggacuuaugacuacccaaaauacucagaggaagcaaaauuaaacagagaagaaauagaugggguaaagcuggaaucaacaaagauuuaccagauuuuggcgaucuauucaacugucgccaguucauugguacugguagucucccugggggcaaucaguuucuggaugugcucuaaugggucucuacaguguagaauauguauuuaa

SEQ ID NO: 37113 - RNA, 1701 nt, Artificial Sequence; identical to SEQ ID NO: 35479
  derived and/or modified CDS sequence (wt) from hemagglutinin__InfluenzaA__ADI72915

SEQ ID NO: 37114 - RNA, 1701 nt, Artificial Sequence; identical to SEQ ID NO: 35479
  derived and/or modified CDS sequence (wt) from hemagglutinin__InfluenzaA__ADI72916

SEQ ID NO: 37115 - RNA, 1701 nt, Artificial Sequence; identical to SEQ ID NO: 35479
  derived and/or modified CDS sequence (wt) from hemagglutinin__InfluenzaA__ADI72917

SEQ ID NO: 37116 - RNA, 1701 nt, Artificial Sequence
  derived and/or modified CDS sequence (wt) from hemagglutinin__InfluenzaA__ADI72918
augaaggcaauacuaguaguucugcuauauacauuugcaaccgcaaaugcagacacauuauguauagguuaucaugcgaacaauucaacagacacuguagacacaguacuagaaaagaauguaacaguaacacacucuguuaaccuucuagaagacaagcauaacgggaaacuaugcaaacuaagagggguagccccauugcauuuggguaaauguaacauugcuggcuggauccugggaaauccagagugugaaucacucuccacagcaagcucaugguccuacauuguggaaacaucuaguucagacaauggaacguguuacccaggagauuucaucgauuaugaggagcuaagagagcaauugagcucagugucaucauuugaaagguuugagauauuccccaagacaaguucauggcccaaucaugacccgaacaaagguguaacggcagcauguccucaugcuggagcaaaaagcuucuacaaaaauuuaauauggcuaguuaaaaaaggaaauucauacccaaagcucagcaaauccuacauuaaugauagagggaaagaaguccucgugcuauggggcauucaccauccaucuacuagugcugaccaacaaagucucuaucagaaugcagaugcauauguuuuuguggggacaucaagauacagcaagaaguucaagccggaaauagcaauaagacccaaagugagggaucaagaagggagaaugaacuauuacuggacacuaguagagccgggagacaaaauaacauucgaagcaacuggaaaucuagugguaccgagauaugcauucgcaauggaaagaaaugcuggaucugguauuaucauuucagauacaccaguccacgauugcaauacaacuugucagacacccaagggugcuauaaacaccagccucccauuucagaauauacauccgaucacaauuggaaaauguccaaaauauguaaaaagcacaaaauugagacuggccacaggauugaggaaugucccgucuauucaaucuagaggccuauuuggggccauugccgguuucauugaagggggguggacagggaugguagauggaugguacgguuaucaccaucaaaaugagcaggggucaggauaugcagccgaccugaagagcacacagaaugccauugacgagauuacuaacaaaguaaauucuguuauugaaaagaugaauacacaguucacagcaguagguaaagaguucaaccaccuggaaaaaagaauagagaauuuaaauaaaaaaguugaugaugguuuccuggacauuuggacuuacaaugccgaacuguugguucuauuggaaaaugaaagaacuuuggacuaccacgauucaaaugugaagaaauuauaugaaaagguaagaagccaguuaaaaaacaaugccaaggaaauuggaaacggcugcuuugaauuuuaccacaaaugcgauaacacgugcauggaaagugucaaaaaugggacuuaugacuacccaaaauacucagaggaagcaaaauuaaacagagaagaaauagaugggguaaagcuggaaucaacaaggauuuaccagauuuuggcgaucuauucaacugucgccaguucauugguacugguagucucccugggggcaaucaguuucuggaugugcucuaaugggucucuacaguguagaauauguauuuaa

SEQ ID NO: 37117 - RNA, 1701 nt, Artificial Sequence; identical to SEQ ID NO: 35479
  derived and/or modified CDS sequence (wt) from hemagglutinin__InfluenzaA__ADI72919

SEQ ID NO: 37118 - RNA, 1701 nt, Artificial Sequence; identical to SEQ ID NO: 35479
  derived and/or modified CDS sequence (wt) from hemagglutinin__InfluenzaA__ADI72920

SEQ ID NO: 37119 - RNA, 1701 nt, Artificial Sequence
  derived and/or modified CDS sequence (wt) from hemagglutinin__InfluenzaA__ADI72921
augaaggcaauacuaguaguucugcuauauacauuugcaaccgcaaaugcagacacauuauguauagguuaucaugcgaacaauucaacagacacuguagacacaguacuagaaaagaauguaacaguaacacacucuguuaaccuucuagaagacaagcauaacgggaaacuaugcaaacuaagagggguagccccauugcauuuggguaaauguaacauugcuggcuggauccugggaaauccagagugugaaucacucuccacagcaagcucaugguccuacauuguggaaacaucuaguucagacaauggaacguguuacccaggagauuucaucgauuaugaggagcuaagagagcaauugagcucagugucaucauuugaaagguuugagauauuccccaaaacaaguucauggcccaaucaugacccgaacaaagguguaacggcagcauguccucaugcuggagcaaaaagcuucuacaaaaauuuaauauggcuaguuaaaaaaggaaauucauacccaaagcucagcaaauccuacauuaaugauaaagggaaagaaguccucgugcuauggggcauucaccauccaucuacuagugcugaccaacaaagucucuaucagaaugcagaugcauauguuuuuguggggacaucaagauacagcaagaaguucaagccggaaauagcaauaagacccaaagugagggaucaagaagggagaaugaacuauuacuggacacuaguagagccgggagacaaaauaacauucgaagcaacuggaaaucuagugguaccgagauaugcauucgcaauggaaagaaaugcuggaucugguauuaucauuucagauacaccaguccacgauugcaauacaacuugucagacacccaagggugcuauaaacaccagccucccauuucagaauauacauccgaucacaauuggaaaauguccaaaauauguaaaaagcacaaaauugagacuggccacaggauugaggaaugucccgucuauucaaucuagaggccuauuuggggccauugccgguuucauugaagggggguggacagggaugguagauggaugguacgguuaucaccaucaaaaugagcaggggucaggauaugcagccgaccugaagagcacacagaaugcccuugacgagauuacuaacaaaguaaauucuguuauugaaaagaugaauacacaguucacagcaguagguaaagaguucaaccaccuggaaaaaagaauagagaauuuaaauaaaaaaguugaugaugguuuccuggacauuuggacuuacaaugccgaacuguugguucuauuggaaaaugaaagaacuuuggacuaccacgauucaaaugugaagaacuuauaugaaaagguaagaagccaguuaaaaaacaaugccaaggaaauuggaaacggcugcuuugaauuuuaccacaaaugcgauaacacgugcauggaaagugucaaaaaugggacuuaugacuacccaaaauacucagaggaagcaaaauuaaacagagaagaaauagaugggguaaagcuggaaucaacaaggauuuaccagauuuuggcgaucuauucaacugucgccaguucauugguacugguagucucccugggggcaaucaguuucuggaugugcucuaaugggucucuacaguguagaauauguauuuaa

SEQ ID NO: 37120 - RNA, 1701 nt, Artificial Sequence
  derived and/or modified CDS sequence (wt) from hemagglutinin__InfluenzaA__ADI72922
augaaggcaauacuaguaguucugcuauauacauuugcaaccgcaaaugcagacacauuauguauagguuaucaugcgaacaauucaacagacacuguagacacaguacuagaaaagaauguaacaguaacacacucuguuaaccuucuagaagacaagcauaacgggaaacuaugcaaacuaagagggguagccccauugcauuuggguaaauguaacauugcuggcuggauccugggaaauccagagugugaaucacucuccacagcaagcucaugguccuacauuguggaaacaucuaguucagacaauggaacguguuacccaggagauuucaucgauuaugaggagcuaagagagcaauugagcucagugucaucauuugaaagguuugagauauuccccaagacaaguucauggcccaaucaugacucgaacaaagguguaacggcagcauguccucaugcuggagcaaaaagcuucuacaaaaauuuaauauggcuaguuaaaaaaggaaauucauacccaaagcucagcaaauccuacauuaaugauaaagggaaagagguccucgugcuauggggcauucaccauccaucuacuagugcugaccaacaaagucucuaucagaaugcagaugcauauguuuuuguggggacaucaagauacagcaagaaguucaagccggaaauagcaauaagacccaaagugagggaucaagaagggagaaugaacuauuacuggacacuaguagagccgggagacaaaauaacauucgaagcaacuggaaaucuagugguaccgagauaugcauucgcaauggaaagaaaugcuggaucugguauuaucauuucagauacaccaguccacgauugcaauacaacuugucagacacccaagggugcuauaaacaccagccucccauuucagaauauacauccgaucacaauuggaaaauguccaaaauauguaaaaagcacaaaauugagacuggccacaggauugaggaaugucccgucuauucaaucuagaggccuauuuggggccauugccgguuucauugaagggggauggacagggaugguagauggaugguacgguuaucaccaucaaaaugagcaggggucaggauaugcagccgaccugaagagcacacagaaugccauugacgagauuacuaacaaaguaaauucuguuauugaaaagaugaauacacaguucacagcaguagguaaagaguucaaccaccuggaaaaaagaauagagaauuuaaauaaaaaaguugaugaugguuuccuggacauuuggacuuacaaugccgaacuguugguucuauuggaaaaugaaagaacuuuggacuaccacgauucaaaugugaagaacuuauaugaaaagguaagaagccaguuaaaaaacaaugccaaggaaauuggaaacggcugcuuugaauuuuaccacaaaugcgauaacacgugcauggaaagugucaaaaaugggacuuaugacuacccaaaauacucagaggaagcaaaauuaaacagagaagaaauagaugggguaaagcuggaaucaacaaggauuuaccagauuuuggcgaucuauucaacugucgccaguucauugguacugguagucucccugggggcaaucaguuucuggauguguucuaaugggucucuacaguguagaauauguauuuaa

SEQ ID NO: 37121 - RNA, 1701 nt, Artificial Sequence
  derived and/or modified CDS sequence (wt) from hemagglutinin__InfluenzaA__ADI72923
augaaggcaauacuaguaguucugcuauauacauuugcaaccucaaaugcagacacauuauguauagguuaucaugcgaacaauucaacagacacuguagacacaguacuagaaaagaauguaacaguaacacacucuguuaaccuucuagaagacaagcauaacgggaaacuaugcaaacuaagagggguagccccauugcauuuggguaaauguaacauugcuggcuggauccugggaaauccagagugugaaucacucuccacagcaagcucaugguccuacauuguggaaacaucuaguucagacaauggaacguguuacccaggagauuucaucgauuaugaggagcuaagagagcaauugagcucagugucaucauuugaaagguuugagauauuccccaagacaaguucauggcccaaucaugacccgaacaaagguguaacggcagcauguccucaugcuggagcaaaaagcuucuacaaaaauuuaauauggcuaguuaaaaaaggaaauucauacccaaagcucagcaaauccuacauuaaugauaaagggaaagaaguccucgugcuauggggcauucaccauccaucuacuagugcugaccaacaaagucucuaucagaaugcagaugcauauguuuuuguggggacaucaagauacagcaagaaguucaagccggaaauagcaauaagacccaaagugagggaucaagaagggagaaugaacuauuacuggacacuaguagagccgggagacaaaauaacauucgaagcaacuggaaaucuagugguaccgagauaugcauucgcaauggaaagaaaugcuggaccugguauuaucauuucagauacaccaguccacgauugcaauacaacuugucagacacccaagggugcuauaaacaccagccucccauuucagaauauacauccgaucacaauuggaaaauguccaaaauauguaaaaagcacaaaauugagacuggccacaggauugaggaaugucccgucuauucaaucuagaggccuauuuggggccauugccgguuucauugaagggggguggacagggaugguagauggaugguacgguuaucaccaucaaaaugagcaggggucaggauaugcagccgaccugaagagcacacagaaugccauugacgagauuacuaacaaaguaaauucuguuauugaaaagaugaauacacaguucacagcaguagguaaagaguucaaccaccuggaaaaaagaauagagaauuuaaauaaaaaaguugaugaugguuuccuggacauuuggacuuacaaugccgaacuguugguucuauuggaaaaugaaagaacuuuggacuaccacgauucaaaugugaagaacuuauaugaaaagguaagaagccaguuaaaaaacaaugccaaggaaauuggaaacggcugcuuugaauuuuaccacaaaugcgauaacacgugcauggaaagugucaaaaaugggacuuaugacuacccaaaauacucagaggaagcaaaauuaaacagggaagaaauagaugggguaaagcuggaaucaacaaggauuuaccagauuuuggcgaucuauucaacugucgccaguucauugguacugguagucucccugggggcaaucaguuucuggaugugcucuaaugggucucuacaguguagaauauguauuuaa

SEQ ID NO: 37122 - RNA, 1701 nt, Artificial Sequence
  derived and/or modified CDS sequence (wt) from hemagglutinin__InfluenzaA__ADI72924
augaaggcaauacuaguaguucugcuauauacauuugcaaccgcaaaugcagacacauuauguauagguuaucaugcgaacaauucaacagacacuguagacacaguacuagaaaagaauguaacaguaacacacucuguuaaccuucuagaagacaagcauaacgggaaacuaugcaaacuaagagggguagccccauugcauuuggguaaauguaacauugcuggcuggauccugggaaauccagagugugaaucacucuccacagcaagcucaugguccuacauuguggaaacaucuaguucagacaauggaacguguuacccaggagauuucaucgauuaugaggagcuaagagagcaauugagcucagugucaucauuugaaagguuugagauauuccccaagacaaguucauggcccaaucaugacccgaacaaagguguaacggcagcauguccucaugcuggagcaaaaagcuucuacaaaaauuuaauauggcuaguuaaaaaaggaaauucauacccaaaacucagcaaauccuacauuaaugauaaagggaaagaaguccucgugcuauggggcauucaccauccaucuacuagugcugaccaacaaagucucuaucagaaugcagaugcauauguuuuuguggggacaucaagauacagcaagaaguucaagccggaaauagcaauaagacccaaagugagggaucaagaagggagaaugaacuauuacuggacacuaguagagccgggagacaaaauaacauucgaagcaacuggaaaucuagugguaccgagauaugcauucgcaauggaaagaaaugcuggaucugguauuaucauuucagauacaccaguccacgauugcaauacaacuugucagacacccaagggugcuauaaacaccagccucccauuucagaauauacauccgaucacaauuggaaaauguccaaaauauguaaaaagcacaaaauugagacuggccacaggauugaggaaugucccgucuauucaaucuagaggccuauuuggggccauugccgguuucauugaagggggguggacagggaugguagauggaugguacgguuaucaccaucaaaaugagcaggggucaggauaugcagccgaccugaagagcacacagaaugccauugacgagauuacuaacaaaguaaauucuguuauugaaaagaugaauacacaguucacagcaguagguaaagaguucaaccaccuggaaaaaagaauagagaauuuaaauaaaaaaguugaugaugguuuccuggacauuuggacuuacaaugccgaacuguugguucuauuggaaaaugaaagaacuuuggacuaccacgauucaaaugugaagaacuuauaugaaaagguaagaagccaguuaaaaaacaaugccaaggaaauuggaaacggcugcuuugaauuuuaccacaaaugcgauaacacgugcauggaaagugucaaaaaugggacuuaugacuacccaaaauacucagaggaagcaaaauuaaacagagaagaaauagaugggguaaagcuggaaucaacaaggauuuaccagauuuuggcgaucuauucaacugucgccaguucauugguacugguagucucccugggggcaaucaguuucuggaugugcucuaaugggucucuacaguguagaauauguauuuaa

SEQ ID NO: 37123 - RNA, 1701 nt, Artificial Sequence; identical to SEQ ID NO: 36378
  derived and/or modified CDS sequence (wt) from hemagglutinin__InfluenzaA__ADI72925

SEQ ID NO: 37124 - RNA, 1701 nt, Artificial Sequence
  derived and/or modified CDS sequence (wt) from hemagglutinin__InfluenzaA__ADI72926
augaaggcaauacuaguaguucugcuauauacauuugcaaccgcaaaugcagacacauuauguauagguuaucaugcgaacaauucaacagacacuguagacacaguacuagaaaagaauguaacaguaacacacucuguuaaccuucuagaagacaagcauaacgggaaacuaugcaaacuaagagggguagccccauugcauuuggguaaauguaacauugcuggcuggauccugggaaauccagagugugaaucacucuccacagcaagcucaugguccuacauuguggaaacaucuaguucagacaauggaacguguuacccaggagauuucaucgauuaugaggagcuaagagagcaauugagcucagugucaucauuugaaagguuugagauauuccccaagacaaguucauggcccaaucaugacccgaacaaagguguaacggcagcauguccucaugcuggagcaaaaagcuucuacaaaaauuuaauauggcuaguuaaaaaaggaaauucauacccaaagcucagcaaauccuacauuaaugauaaagggaaagaaguccucgugcuauggggcauucaccauccaucuacuagugcugaccaacaaagucucuaucagaaugcagaugcauauguuuuuguggggacaucaggauacagcaagaaguucaagccggaaauagcaauaagacccaaagugagggaucaagaagggagaaugaacuauuacuggacacuaguagagccgggagacaaaauaacauucgaagcaacuggaaaucuagugguaccgagauaugcauucgcaauggaaagaaaugcuggaucugguauuaucauuucagauacaccaguccacgauugcaauacaacuugucagacacccaagggugcuauaaacaccagccucccauuucagaauauacauccgaucacaauuggaaaauguccaaaauauguaaaaagcacaaaauugagacuggccacaggauugaggaaugucccguccauucaaucuagaggccuauuuggggccauugccgguuucauugaagggggguggacagggaugguagauggaugguacgguuaucaccaucaaaaugagcaggggucaggauaugcagccgaccugaagagcacacagaaugccauugacgagauuacuaacaaaguaaauucuguuauugaaaagaugaauacacaguucacagcaguagguaaagaguucaaccaccuggaaaaaagaauagagaauuuaaauaaaaaaguugaugaugguuuccuggacauuuggacuuacaaugccgaacuguugguucuauuggaaaaugaaagaacuuuggacuaccacgauucaaaugugaagaacuuauaugaaaagguaagaagccaguuaaaaaacaaugccaaggaaauuggaaacggcugcuuugaauuuuaccacaaaugcgauaacacgugcauggaaagugucaaaaaugggacuuaugacuacccaaaauacucagaggaagcaaaauuaaacagagaagaaauagaugggguaaagcuggaaucaacaaggauuuaccagauuuuggcgaucuauucaacugucgccaguucauugguacugguagucucccugggggcaaucaguuucuggaugugcucuaaugggucucuacaguguagaauauguauuuaa

SEQ ID NO: 37125 - RNA, 1701 nt, Artificial Sequence
  derived and/or modified CDS sequence (wt) from hemagglutinin__InfluenzaA__ADI72927
augaaggcaauacuaguaguucugcuauauacauuugcaaccgcaaaugcagacacauuauguauagguuaucaugcgaacaauucaacagacacuguagacacaguacuagaaaagaauguaacaguaacacacucuguuaaccuucuagaagacaagcauaacgggaaacuaugcaaacuaagagggguagccccauugcauuuggguaaauguaacauugcuggcuggauccugggaaauccagagugugaaucacucuccacagcaagcucaugguccuacauuguggaaacaucuaguucagacaauggaacguguuacccaggagauuucaucgauuaugaggagcuaagagagcaauugagcucagugucaucauuugaaagguuugagauauuccccaagacaaguucauggcccaaucaugacccgaacaaagguguaacggcagcauguccucaugcuggagcaaaaagcuucuacaaaaauuuaauauggcuaguuaaaaaaggaaauucauacccaaagcucagcaaauccuacauuaaugauaaagggaaagaaguccucgugcuauggggcauucaccauccaucuacuagugcugaccaacaaagucucuaucagaaugcagaugcauauguuuuuguggggacaucaagauacagcaagaaguucaagccggaaauagcaauaagacccaaagugagggaucaagaagggagaaugaacuauuacuggacacuaguagagccgggagacaaaauaacauucgaagcaacuggaaaucuagugguaccgagauaugcauucgcaauggaaagaaaugcuggaucugguauuaucacuucagauacgccaguccacgauugcaauacaacuugucagacacccaagggugcuauaaacaccagccucccauuucagaauauacauccgaucacaauuggaaaauguccaaaauauguaaaaagcacaaaauugagacuggccacaggauugaggaaugucccgucuauucaaucuagaggccuauuuggggccauugccgguuucauugaagggggguggacagggaugguagauggaugguacgguuaucaccaucaaaaugagcaggggucaggauaugcagccgaccugaagagcacacagaaugccauugacgagauuacuaacaaaguaaauucuguuauugaaaagaugaauacacaguucacagcaguagguaaagaguucaaccaccuggaaaaaagaauagagaauuuaaauaaaaaaguugaugaugguuuccuggacauuuggacuuacaaugccgaacuguugguucuauuggaaaaugaaagaacuuuggacuaccacgauucaaaugugaagaacuuauaugaaaagguaagaagccaguuaaaaaacaaugccaaggaaauuggaaacggcugcuuugaauuuuaccacaaaugcgauaacacgugcauggaaagugucaaaaaugggacuuaugacuacccaaaauacucagaggaagcaaaauuaaacagagaagaaauagaugggguaaagcuggaaucaacaaggauuuaccagauuuuggcgaucuauucaacugucgccaguucauugguacugguagucucccugggggcaaucaguuucuggaugugcucuaaugggucucuacaguguagaauauguauuuaa

SEQ ID NO: 37126 - RNA, 1701 nt, Artificial Sequence
  derived and/or modified CDS sequence (wt) from hemagglutinin__InfluenzaA__ADI72928
augaaggcaauacuaguaguucugcuauauacauuugcaaccgcaaaugcagacacauuauguauagguuaucaugcgaacaauucaacagacacuguagacacaauacuagaaaagaauguaacaguaacacacucuguuaaccuucuagaagacaagcauaacgggaaacuaugcaaacuaagagggguagccccauugcauuuggguaaauguaacauugcuggcuggauccugggaaauccagagugugaaucacucuccacagcaagcucaugguccuacauuguggaaacaucuaguucagacaauggaacguguuacccaggagauuucaucgauuaugaggagcuaagagagcaauugagcucagugucaucauuugaaagguuugagauauuccccaagacaaguucauggcccaaucaugacccgaacaaagguguaacggcagcauguccucaugcuggagcaaaaagcuucuacaaaaauuuaauauggcuaguuaaaaaaggaaauucauacccaaagcucagcaaauccuacauuaaugauaaagggaaagaaguccucgugcuauggggcauucaccauccaucuacuagugcugaccaacaaagucucuaucagaaugcagaugcauauguuuuuguggggacaucaagauacagcaagaaguucaagccggaaauagcaauaagacccaaagugagggaucaagaagggagaaugaacuauuacuggacacuaguagagccgggagacaaaauaacauucgaagcaacuggaaaucuagugguaccgagauaugcauucgcaauggaaagaaaugcuggaucugguauuaucauuucagauacaccaguccacgauugcaauacaacuugucagacacccaagggugcuauaaacaccagccucccauuucagaauauacauccgaucacaauuggaaaauguccaaaauauguaaaaagcacaaaauugagacuggccacaggauugaggaaugucccgucuauucaaucuagaggccuauuuggggccauugccgguuucauugaagggggguggacagggaugguagauggaugguacgguuaucaccaucaaaaugagcaggggucaggauaugcagccgaccugaagagcacacagaaugccauugacgagauuacuaacaaaguaaauucuguuauugaaaagaugaauacacaguucacagcaguagguaaagaguucaaccaccuggaaaaaagaauagagaauuuaaauaaaaaaguugaugaugguuuccuggacauuuggacuuacaaugccgaacuguugguucuauuggaaaaugaaagaacuuuggacuaccacgauucaaaugugaagaacuuauaugaaaagguaagaagccaguuaaaaaacaaugccaaggaaauuggaaacggcugcuuugaauuuuaccacaaaugcgauaacacgugcauggaaagugucaaaaaugggacuuaugacuacccaaaauacucagaggaagcaaaauuaaacagaaaagaaauagaugggguaaagcuggaaucaacaaggauuuaccagauuuuggcgaucuauucaacugucgccaguucauugguacugguagucucccugggggcaaucaguuucuggaugugcucuaaugggucucuacaguguagaauauguauuuaa

SEQ ID NO: 37127 - RNA, 1701 nt, Artificial Sequence
  derived and/or modified CDS sequence (wt) from hemagglutinin__InfluenzaA__ADI72929
augaaggcaauacuaguaguucugcuauauacauuugcaaccgcaaaugcagacacauuauguauagguuaucaugcgaacaauucaacagacacuguagacacaguacuagaaaagaauguaacaguaacacacucuguuaaccuucuagaagacaagcauaacgggaaacuaugcaaacuaagagggguagccccauugcauuuggguaaauguaacauugcuggcuggauccugggaaauccagagugugaaucacucuccacagcaagcucaugguccuacauuguggaaacaucuaguucagacaauggaacguguuacccaggagauuucaucgauuaugaggagcuaagagagcaauugagcucagugucaucauuugaaagguuugagauauuccccaagacaaguucauggcccaaucaugacucgaacaaagguguaacggcagcauguccucacgcuggagcaaaaagcuucuacaaaaauuuaauauggcuaguuaaaaaaggaaauucauacccaaagcucagcaaauccuacauuaaugauaaagggaaagagguccucgugcuauggggcauucaccauccaucuacuagugcugaccaacaaagucucuaucagaaugcagaugcauauguuuuuguggggacaucaagauacagcaagaaauucaagccggaaauagcaauaagacccaaagugagggaucaagaagggagaaugaacuauuacuggacacuaguagagccgggagacaaaauaacauucgaagcaacuggaaaucuagugguaccgagauaugcauucgcaauggaaagaaaugcuggaucugguauuaucauuucagauacaccaguccacgauugcaauacaacuugucagacacccaagggugcuauaaacaccagccucccauuucagaauauacauccgaucacaauuggaaaauguccaaaauauguaaaaagcacaaaauugagacuggccacaggauugaggaaugucccgucuauucaaucuagaggccuauuuggggccauugccgguuucauugaagggggguggacagggaugguagauggaugguacgguuaucaccaucaaaaugagcaggggucaggauaugcagccgaccugaagagcacacagaaugccauugacgagauuacuaacaaaguaaauucuguuauugaaaagaugaauacacaguucacagcaguagguaaagaguucaaccaccuggaaaaaagaauagagaauuuaaauaaaaaaguugaugaugguuuccuggacauuuggacuuacaaugccgaacuguugguucuauuggaaaaugaaagaacuuuggacuaccacgauucaaaugugaagaacuuauaugaaaagguaagaagccaguuaaaaaacaaugccaaggaaauuggaaacggcugcuuugaauuuuaccacaaaugcgauaacacgugcauggaaagugucaaaaaugggacuuaugacuacccaaaauacucagaggaagcaaaauuaaacagagaagaaauagaugggguaaagcuggaaucaacaaggauuuaccagauuuuggcgaucuauucaacugucgccaguucauugguacugguagucucccugggggcaaucaguuucuggauguguucuaaugggucucuacaguguagaauauguauuuaa

SEQ ID NO: 37128 - RNA, 1701 nt, Artificial Sequence
  derived and/or modified CDS sequence (wt) from hemagglutinin__InfluenzaA__ADI72930
augaaggcaauacuaguaguucugcuauauacauuugcaaccgcaaaugcagacacauuauguauagguuaucaugcgaacaauucaacagacacuguagacacaguacuagaaaagaauguaacaguaacacacucuguuaaccuucuagaagacaagcauaacgggaaacuaugcaaacuaagagggguagccccauugcauuuggguaaauguaacauugcuggcuggauccugggaaauccagagugugaaucacucuccacagcaagcucaugguccuacauuguggaaacaucuaguucagacaauggaacguguuacccaggagauuucaucgauuaugaggagcuaagagagcaguugagcucagugucaucauuugaaagguuugagauauuccccaagacaaguucauggcccaaucaugacucgaacaaagguguaacggcagcauguccucaugcuggagcaaaaagcuucuacaaaaauuuaauauggcuaguuaaaaaaggaaauucauacccaaagcucagcaaauccuacauuaaugauaaagggaaagaaguccucgugcuauggggcauucaccauccaucuacuagugcugaccaacaaagucucuaucagaaugcagaugcauauguuuuuguagggacaucaagauacagcaagaaguucaagccggaaauagcaauaagacccaaagugagggaucaagaagggagaaugaacuauuacuggacacuaguagagccgggagacaaaauaacauucgaagcaacuggaaaucuagugguaccgagauaugcauucgcaauggaaagaaaugcuggaucugguauuaucauuucagauacaccaguccacgauugcaauacaacuugucagacacccaagggugcuauaaacaccagccucccauuucagaauauacauccgaucacaauuggaaaauguccaaaauauguaaaaagcacaaaauugagacuggccacaggauugaggaaugucccuucuauucaaucuagaggccuauuuggggccauugccgguuucauugaagggggguggacagggaugguagauggaugguacgguuaucaccaucaaaaugagcaggggucaggauaugcagccgaccugaagagcacacagaaugccauugacgagauuacuaacaaaguaaauucuguuauugaaaagaugaauacacaguucacagcaguagguaaagaguucaaccaccuggaaaaaagaauagagaauuuaaauaaaaaaguugaugaugguuuccuggacauuuggacuuacaaugccgaacuguugguucuauuggaaaaugaaagaacuuuggacuaccacgauucaaaugugaagaacuuauaugaaaagguaagaagccaguuaaaaaacaaugccaaggaaauuggaaacggcugcuuugaauuuuaccacaaaugcgauaacacgugcauggaaagugucaaaaaugggacuuaugacuacccaaaauacucagaggaagcaaaauuaaacagagaagaaauagaugggguaaagcuggaaucaacaaggauuuaccagaucuuggcgaucuauucaacugucgccaguucauugguacugguagucucccugggggcaaucaguuucuggaugugcucuaaugggucucuacaguguagaauauguauuuaa

SEQ ID NO: 37129 - RNA, 1701 nt, Artificial Sequence
  derived and/or modified CDS sequence (wt) from hemagglutinin__InfluenzaA__ADI72931
augaaggcaauacuaguaguucugcuauauacauuugcaaccgcaaaugcagacacauuauguauagguuaucaugcgaacaauucaacagacacuguagacacaguacuagaaaagaauguaacgguaacacacucuguuaaccuucuagaagacaagcauaacgggaaacuaugcaaacuaagagggguagccccauugcauuuggguaaauguaacauugcuggcuggauccugggaaauccagagugugaaucacucuccacagcaagcucaugguccuacauuguggaaacaucuaguucagacaauggaacguguuacccaggagauuucaucgauuaugaggagcuaagagagcaauugagcucagugucaucauuugaaagguuugagauauuccccaagacaaguucauggcccaaucaugacccgaacaaagguguaacggcagcauguccucaugcuggagcaaaaagcuucuacaaaaauuuaauauggcuaguuaaaaaaggaaauucauacccaaagcucagcaaauccuacauuaaugauaaagggaaagaaguccucgugcuauggggcauucaccauccaucuacuagugcugaccaacaaagucucuaucagaaugcagaugcauauguuuuuguggggacaucaagauacagcaagaaguucaagccggaaauagcaauaagacccaaagugagggaucaagaagggagaaugaacuauuacuggacacuaguagagccgggagacaaaauaacauucgaagcaacuggaaaucuagugguaccgagauaugcauucgcaauggaaagaaaugcuggaucugguauuaucauuucagauacaccaguccacgauugcaauacaacuugucagacacccaagggugcuauaaacaccagccucccauuucagaauauacauccgaucacaauuggaaaauguccaaaauauguaaaaagcacaaaauugagacuggccacaggauugaggaaugucccgucuauucaaucuagaggccuauuuggggccauugccgguuucauugaagggggguggacagggaugguagauggaugguacgguuaucaccaucaaaaugagcaggggucaggauaugcagccgaccugaagagcacacagaaugccauugacgagauuacuaacaaaguaaauucuguuauugaaaagaugaauacacaguucacagcaguagguaaagaguucaaccaccuggaaaaaagaauagagaauuuaaauaaaaaaguugaugaugguuuccuggacauuuggacuuacaaugccgaacuguugguucuauuggaaaaugaaagaacuuuggacuaccacgauucaaaugugaagaacuuauaugaaaagguaagaagccaguuaaaaaacaaugccaaggaaauuggaaacggcugcuuugaauuuuaccacaaaugcgauaacacgugcauggaaagugucaaaaaugggacuuaugacuacccaaaauacucagaggaagcaaaauuaaacagagaagaaauagaugggauaaagcuggaaucaacaaggauuuaccagauuuuggcgaucuauucaacugucgccaguucauugguacugguagucucccugggggcaaucaguuucuggaugugcucuaaugggucucuacaguguagaauauguauuuaa

SEQ ID NO: 37130 - RNA, 1701 nt, Artificial Sequence; identical to SEQ ID NO: 36337
  derived and/or modified CDS sequence (wt) from hemagglutinin__InfluenzaA__ADI72932

SEQ ID NO: 37131 - RNA, 1698 nt, Artificial Sequence
  derived and/or modified CDS sequence (wt) from hemagglutinin__InfluenzaA__ADI75818
augaaaguaaaacuacugguccuguuaugcacauuuacagcuacauaugcagacacaauauguauaggcuaccaugcuaacaacucgaccgacacuguugacacaguacuugaaaagaaugugacagugacacacucugucaaccugcuugagaacagucacaauggaaaacuaugucuauuaaaaggaauagccccacuacaauuggguaacugcagcguugccggguggaucuuaggaaacccagaaugcgaauuauugauuuccaaggagucaugguccuacauuguagaaaaaccaaauccugagaauggaacauguuacccagggcauuucgcugacuaugaggaacugagggagcaauugaguucaguaucuucauuugagagguucgaaauauuccccaaagaaagcucauggcccaaccacaccguaaccggagugucagcaucaugcucccauaauggggaaagcaguuuuuacaagaauuuguuauggcugacggagaagaaugguuuguacccgaaccugagcaaguccuaugcaaacaacaaagaaaaagaaguccuuguacuaugggguguucaucacccgccaagcauaagugaccaaaagacccucuaucauacagaaaaugcuuauguuucuguagugucuucacauuauagcagaaaauucaccccagaaauagccaaaagacccaaaguaagagaucaagaaggaagaaucaacuacuacuggacucugcuugaacccggggauacaauaauauuugaggcaaauggaaaucuaauagcgccaagauaugcuuucgcacugaguagaggcuuuggaucaggaaucaucaacucaaaugcaccaauggauaaaugugaugcgaagugccaaacaccucagggagcuauaaacagcagucuuccuuuccagaacguacacccagucacaauaggagaguguccaaaguaugucaggagugcaaaauuaaggaugguuacaggacuaaggaacaucccauccauucaauccagagguuuguuuggagccauugccgguuucauugaagggggguggacuggaaugguagaugguugguaugguuaucaucaucagaaugagcaaggaucuggcuaugcugcagaucaaaaaagcacacaaaaugccauuaaugggauuacaaacaaggugaauucuguaauugagaaaaugaacacucaauucacagcagugggcaaagaauucaacaaauuggaaagaaggauggaaaacuugaacaaaaaaguugaugauggcuuuauagacauuuggacauauaaugcagaacuguugguucuacuggaaaaugaaaggacuuuggauuuccaugacuccaaugugaagaaucuguaugagaaaguaaaaaaccaguuaaagaauaaugcuaaagaaauaggaaauggguguuuugaauucuaucacaaguguaacgaugaaugcauggagaguguaaagaauggaacuuaugacuauccaaaauauuccgaagaaucaaaguuaaacagggagaaaauugauggagugaaauuggaaucaaugggagucuaucagauucuggcgaucuacucaacagucgccaguucucugguucuuuuggucucccugggggcaaucagcuucuggauguguuccaaugggucuuugcaguguagaauaugcaucuaa

SEQ ID NO: 37132 - RNA, 1698 nt, Artificial Sequence
  derived and/or modified CDS sequence (wt) from hemagglutinin__InfluenzaA__ADI75851
augaaaguaaaacuacugguccuguuaugcacauuuacagcuacauaugcagacacaauauguauaggcuaccaugcuaacaacucgaccgacacuguugacacaguacuugaaaagaaugugacagugacacacucugucaaccugcuugagaacagucacaauggaaaacuaugucuauuaaaaggaauagccccacugcaauuggguaacugcagcguugccggguggaucuuaggaaacccagaaugcggauuacugauuuccaaagagucaugguccuacauuguagaaaaaccaaauccugagaauggaacauguuacccagggcauuucgcugacuaugaggaacugagggagcaauugaguucaguaucuucauuugagagguucgaaauauuccccaaagaaagcucauggcccaaccacaccguaaccggagugucagcaucaugcucccauaauggggaaagcaguuuuuacagaaauuugcuauggcugacggggaagaaugguuuguacccaaaccugagcaaguccuaugcaaacaacaaagaaaaagaaguccuuguacuaugggguguucaucacccgccaaacauaguugaccaaaaaacccucuaccguacagaaaaugcuuauguuucuguagugucuucacauuauagcagaaaauucaccccagaaauagccaaaagacccaaaguaagagaucaagaaggaagaaucaacuacuacuggacucugcuugaacccggggauacaauaauauuugaggcaaauggaaaucuaauagcgccaagauaugcuuucgcacugaguagaggcuuuggaucaggaaucaucaacucaaaugcaccaauggguaaaugugaugcgaagugccaaacaccucagggagcuauaaacagcagucuuccuuuccagaacguacacccagucacaauaggagaguguccaaaguaugucaggagugcaaaauuaaggaugguuacaggacuaaggaacaucccauccauucaauccagagguuuguuuggagccauugccgguuucauugaagggggguggacuggaaugguagaugguugguaugguuaucaucaucagaaugagcaaggaucuggcuaugcugcagaucaaaaaagcacacaaaaugccauuaaugggauuacaaacaaggugaauucuguaauugagaaaaugaacacucaauucacagcagugggcaaagaauucaacaaauuggaaagaaggauggaaaacuugaauaaaaaaguugaugauggguuuauagacauuuggacauauaaugcagaacuguugguucuacuggaaaaugaaaggacuuuggauuuccaugacuccaaugugaagaaucuguaugagaaaguaaaaagccaguuaaagaauaaugcuaaagaaauaggaaauggguguuuugaauucuaucacaaguguaacgaugaaugcauggagaguguaaagaaugggacuuaugacuauccaaaauauuccgaagaaucaaaguuaaacagggagaaaauugauggagugaaauuggaaucaaugggagucuaucagauucuggcgaucuacucaacagucgccaguucucugguucuuuuggucucccugggggcaaucagcuucuggauguguuccaaugggucuuugcaguguagaauaugcaucuaa

SEQ ID NO: 37133 - RNA, 1701 nt, Artificial Sequence
  derived and/or modified CDS sequence (wt) from hemagglutinin__InfluenzaA__ADI75884
augaagacuaucauugcuuugagcuacauucuaugucugguuuucgcucaaaaacuuccuggaaaugacaacagcacggcaacgcugugccuugggcaccaugcaguaccaaacggaacgauagugaaaacaauuacgaaugaccaaauugaaguuacuaaugcuacugagcugguucagaguuccucaacaggugaaauaugcgacaguccucaucagauccuugauggagaaaacugcacacuaauagaugcucuauugggagacccucagugugauggcuuccaaaauaagaaaugggaccuuuuuguugaacgcagcaaagccuacagcaacuguuacccuuaugaugugccggauuaugccucccuuaggucacuaguugccucauccggcacacuggaguuuaacaaugaaagcuucaauuggacuggagucacucaaaacggaacaagcucugcuugcauaaggagaucuaauaacaguuucuuuaguagauugaauugguugacccacuuaaaauucaaauacccagcauuaaacgugacuaugccaaacaaugaacaauuugacaaauuguacauuugggggguucaccacccggguacggacaaugaccaaaucuuccuguaugcucaagcaucaggaagaaucacagucucuaccaaaagaagccaacaaacuguaaucccgaauaucggaucuagacccagaguaaggaauaucccuagcagaauaagcaucuauuggacaauaguaaaaccgggagacauacuuuugauuaacagcacagggaaucuaauugcuccuagggguuacuucaaaauacgaagugggaaaagcucaauaaugagaucagaugcacccauuggcaaaugcaauucugaaugcaucacuccaaauggaagcauucccaaugacaaaccauuccaaaauguaaacaggaucacauacggggccugucccagauauguuaagcaaaacacucugaaauuggcaacagggaugcgaaauguaccagagaaacaaacuagaggcauauuuggcgcaaucgcggguuucauagaaaaugguugggagggaaugguggaugguugguacgguuucaggcaucaaaauucugagggaagaggacaagcagcagaucucaaaagcacucaagcagcaaucgaucaaaucaaugggaagcugaauagauugaucgggaaaaccaacgagaaauuccaucagauugaaaaagaauucucagaagucgaagggagaauucaggaccuugagaaauauguugaggacaccaaaauagaucucuggucauacaacgcggagcuucuuguugcccuggagaaccaacauacaauugaucuaacugacucagaaaugaacaaacuguuugaaaaaacaaagaagcaacugagggaaaaugcugaggauaugggcaaugguuguuucaaaauauaccacaaaugugacaaugccugcauaggaucaaucagaaauggaacuuaugaccacgauguauacagagaugaagcauuaaacaaccgguuccagaucaagggaguugagcugaagucaggguacaaagauuggauccuauggauuuccuuugccauaucauguuuuuugcuuuguguugcuuuguugggguucaucaugugggccugccaaaaaggcaacauuaggugcaacauuugcauuuga

SEQ ID NO: 37134 - RNA, 1701 nt, Artificial Sequence
  derived and/or modified CDS sequence (wt) from hemagglutinin__InfluenzaA__ADI75917
augaagacuaucauugcuuugagcuacauucuaugucugguuuucgcucaaaaacuuccuggaaaugacaacagcacggcaacgcugugccuugggcaccaugcaguaccaaacggaacgauagugaaaacaaucacgaaugaccaaauugaaguuacuaaugcuacugagcugguucagaguuccucaacaggugaaauaugcgacaguccucaucagauccuugauggagaaaacugcacacuaauagaugcucuauugggagacccucagugugauggcuuccaaaauaagaaaugggaccuuuuuguugaacgaagcaaagccuacagcaacuguuacccuuaugaugugccggauuaugccucccuuaggucacuaguugccucauccggcacacuggaguuuaacaaugaaagcuucaauuggacuggagucacucaaaacggaacaagcucugcuugcauaaggagaucuaauaacaguuucuuuaguagauugaauugguugacccacuuaaaauucaaauacccagcauugaacgugacuaugccaaacaaugaacaauuugacaaauuguacauuugggggguucaccacccggguacggacaaugaccaaaucuuccuguaugcucaagcaucaggaagaaucacaguaucuaccaaaagaagccaacaaacuguaaucccgaauaucggaucuagacccagaguaaggaauaucccuagcagaauaagcaucuauuggacaauaguaaaaccgggagacauacuuuugauuaacagcacagggaaucuaauugcuccuagggguuacuucaaaauacgaagugggaaaagcucaauaaugagaucagaugcacccauuggcaaaugcaauucugaaugcaucacuccaaauggaagcauucccaaugacaaaccauuccaaaauguaaacaggaucacauacggggccugucccagauauguuaagcaaaacacucugaaauuggcaacaggaaugcgaaauguaccagagaaacaaacuagaggcauauuuggcgcaaucgcggguuucauagaaaaugguugggagggaaugguggaugguugguacgguuucaggcaucaaaauucugagggaagaggacaagcagcagaucucaaaagcacucaagcagcaaucgaucaaaucaaugggaagcugaauagauugaucgggaaaaccaacgagaaauuccaucagauugaaaaagaauucucagaagucgaagggagaauccaggaccuugagaaauauguugaggacacuaaaauagaucucuggucauacaacgcggagcuucuuguugcccuggagaaccaacauacaauugaucuaacugacucagaaaugaacaaacuguuugaaaaaacaaagaagcaacugagggaaaaugcugaggauaugggcaaugguuguuucaaaauauaccacaaaugugacaaugccugcauaggaucaaucagaaauggaacuuaugaccacgauguauacagggaugaagcauugaacaaccgguuccagaucaagggaguugagcugaagucaggguacaaagauuggauccuauggauuuccuuugccauaucauguuuuuugcuuuguguugcuuuguugggguucaucaugugggccugccaaaaaggcaacauuaggugcaacauuugcauuuga

SEQ ID NO: 37135 - RNA, 1698 nt, Artificial Sequence
  derived and/or modified CDS sequence (wt) from hemagglutinin__InfluenzaA__ADI77349
augaaaguaaaacuacugguccuguuaugcacauuuacagcuacauaugcagacacaauauguauaggcuaccaugcuaacaacucgaccgacacuguugacacaguacuugaaaagaaugugacagugacacacucugucaaccugcuugagaacagucacaauggaaaacuaugucuauuaaaaggaauagccccacuacaauuggguaacugcagcguugccggguggaucuuaggaaacccagaaugcgaauuacugauuuccaaggagucaugguccuacauuguagaaaaaccaaauccugagaauggaacauguuacccaggacauuucgcugacuaugaggaacugagggagcaauugaguucaguaucuucauuugagagguucgaaauauuccccaaagaaagcucauggcccaaccacaccguaaccggagugucagcaucaugcucccauaauggggaaaacaguuuuuacagaaauuugcuauggcugacggggaagaaugguuuguacccaaaccugagcaaguccuaugcaaacaacaaagaaaaagaaguccuuauacuaugggguguucaucacccgccaaacauggcugaccaaaagacccucuaucauacagaaaaugcuuauguuucuguagugucuucacauuauagcagaaaauucaccccagaaauagccaaaagacccaaaguaagagaucaagaaggaagaaucaacuacuacuggacucugcuugaacccggggauacaauaauauuugaggcaaauggaaaucuaauagcgccaagauaugcuuucgcacugaguagaggcuuuggaucaggaaucaucaacucaaaugcaccaauggauaaaugugauacgaagugccaaacaccucaaggagcuauaaacagcagucuuccuuuccagaacguacacccagucacaauaggagaguguccaaaguaugucaggagugcaaaauuaaggaugguuacaggacuaaggaacaucccauccauucaauccagagguuuguuuggagccauugccgguuucauugaagggggguggacuggaaugguagaugguugguaugguuaucaucaucagaaugagcaaggaucuggcuaugcugcagaucaaaaaagcacacaaaaugccauuaaugggauuacaaacaaggugaauucuguaauugagaaaaugaacacucaauucacagcagugggcaaagaauucaacaaauuggaaagaaggauggaaaacuugaauaaaaaaguugaugauggguuuauagacauuuggacauauaaugcagaacuguugguucuacuggaaaaugaaaggacuuuggauuuccaugacuccaaugugaagaaucuguaugagaaaguaaaaagccaguuaaagaauaaugcuaaagaaauaggaaauggguguuuugaauucuaucacaaguguaacgaugaaugcauggagaguguaaagaauggaacuuaugacuauccaaaauauuccgaagaaucaaaguuaaacagggagaaaauugauggagugaaauuggaaucaaugggagucuaucagauucuggcgaucuacucaacagucgccaguucucugguucuuuuggucucccugggggcaaucagcuucuggauguguuccaaugggucuuugcaguguagaauaugcaucuaa

SEQ ID NO: 37136 - RNA, 1701 nt, Artificial Sequence; identical to SEQ ID NO: 34681
  derived and/or modified CDS sequence (wt) from hemagglutinin__InfluenzaA__ADI77360

SEQ ID NO: 37137 - RNA, 1701 nt, Artificial Sequence
  derived and/or modified CDS sequence (wt) from hemagglutinin__InfluenzaA__ADI99498
augaagacaauacuaguaguucugcuauauacauuugcaaccgcaaaugcagacacauuauguauagguuaucaugcgaacaauucaacagacacuguagacacaguacuagaaaagaauguaacaguaacacacucuguuaaccuucuagaagacaagcauaacgggaaacuaugcaaacuaagagggguagccccauugcauuuggguaaauguaacauugcuggcuggauccugggaaauccagagugugaaucacucuccacagcaagcucaugguccuacauuguggaaacaucuaguucagacaauggaacguguuacccaggagauuucaucgauuaugaggagcuaagagagcaauugagcucagugucaucauuugaaagguuugagauauuccccaagacaaguucauggcccaaucaugacucgaacaaagguguaacggcagcauguccucaugcuggagcaaaaagcuucuacaaaaauuuaauauggcuaguuaaaaaaggaaauucauacccaaagcucaacaaauccuauauuaaugauaaagggaaagaaguccucgugcuauggggcauucaccauccaucuacuagugcugaccaacaaagucucuaucagaaugcagaugcauauguuuuuguggggacaucaagauacagcaagaaguucaagccggaaauagcaauaagacccaaagugaggggucaagaagggagaaugaacuauuacuggacacuaguaaagccgggagacaaaauaacauucgaagcaacuggaaaucuagugguaccgagauaugcauucgcaauggaaagaaaugcuggaucugguauuaucauuucagauacaccaguccacgauugcaauacaacuugucagacacccaagggugcuauaaacaccagccucccauuucagaauauacauccgaucacaauuggaaaauguccaaaauauguaaaaagcacaaaauugagacuggccacaggauugaggaaugucccgucuauucaaucuagaggccuauuuggggccauugccgguuucauugaagggggguggacagggaugguagauggaugguacgguuaucaccaucaaaaugagcaggggucaggauaugcagccgaccugaagagcacacagaaugccauugacgagauuacuaacaaaguaaauucuguuauugaaaagaugaauacacaguucacagcaguagguaaagaguucaaccaccuggaaaaaagaauagagaauuuaaauaaaaagguugaugaugguuuccuggacauuuggacuuacaaugccgaacuguugguucuauuggaaaaugaaagaacuuuggacuaccacgauucaaaugugaagaacuuauaugaaaagguaagaagccaguuaaaaaacaaugccaaggaaauuggaaacggcugcuuugaauuuuaccacaaaugcgauaacacgugcauggaaagugucaaaaaugggacuuaugacuacccaaaauacucagaggaagcaaaauuaaacagagaagaaauagaugggguaaagcuggaaucaacaaggauuuaccagauuuuggcgaucuauucaacugucgccaguucauugguacugguagucucccugggggcaaucaguuucuggaugugcucuaaugggucucuacaguguagaauauguauuuaa

SEQ ID NO: 37138 - RNA, 1701 nt, Artificial Sequence
  derived and/or modified CDS sequence (wt) from hemagglutinin__InfluenzaA__ADI99560
augaaggcaauacuaguaguucugcuauauacauuugcaaccgcaaaugcagacacauuauguauagguuaucaugcgaacaauucaacagacacuguagacacaguacuagaaaagaauguaacaguaacacacucuguuaaccuucuagaagacaagcauaacgggaaacuaugcaaacuaagagggguagccccauugcauuuggguaaauguaacauugcuggcuggauccugggaaauccagagugugaaucacucuccacagcaagcucaugguccuacauuguggaaacaucuaguucagacaauggaacguguuacccaggagauuucaucaauuaugaggagcuaagagagcaauugagcucagugucaucauuugaaagguuugagauauuccccaagacaaguucauggcccaaucaugacucgaacaaagguguaacggcagcauguccucaugcuggagcaaaaagcuucuacaaaaauuuaauauggcuaguuaaaaaaggaaauucauacccaaagcucagcaaauccuacauuaaugauaaagggaaagaaguccucgugcuauggggcauucaccauccaucuacuagugcugaccaacaaagucucuaucagaaugcagaugcauauguuuuuguggggacaucaagauacagcaagaaguucaagccggaaauagcaauaagacccaaagugagggaucaagaagggagaaugaacuauuacuggacacuaguagagccgggagacaaaauaacauucgaagcaacuggaaaucuagugguaccgagauaugcauucgcaauggaaagaaaugcuggaucugguauuaucaucucagauacaccaguccacgauugcaauacaacuugucagacacccaagggugcuauaaacaccagccucccauuucagaauauacauccgaucacaauuggaaaauguccaaaauauguaaaaagcacaaaauugagacuggccacaggauugaggaaugucccgucuauucaaucuagaggccuauuuggggccauugccgguuucauugaagggggguggacagggaugguagauggaugguacgguuaucaccaucaaaaugagcaggggucaggauaugcagccgaccugaagagcacacagaaugccauugacaagauuacuaacaaaguaaauucuguuauugaaaagaugaauacacaguucacagcaguagguaaagaguucaaccaccuggaaaaaagaauagagaauuuaaauaaaaaaguugaugaugguuuccuggacauuuggacuuacaaugccgaacuguugguucuauuggaaaaugaaagaacuuuggacuaccacgauucaaaugugaagaacuuauaugaaaagguaagaagccaguuaaaaaacaaugccaaggaaauuggaaauggcugcuuugaauuuuaccacaaaugcaauaacacgugcauggaaagugucaaaaaugggacuuaugacuacccaaaauacucagaggaagcaaaauuaaacagagaagaaauagaugggguaaagcuggaaucaacaaggauuuaccagauuuuggcgaucuauucaacugucgccaguucauugguacugguagucucccugggggcaaucaguuucuggaugugcucuaaugggucucuacaguguagaauauguauuuaa

SEQ ID NO: 37139 - RNA, 1701 nt, Artificial Sequence; identical to SEQ ID NO: 37138
  derived and/or modified CDS sequence (wt) from hemagglutinin__InfluenzaA__ADI99570

SEQ ID NO: 37140 - RNA, 1701 nt, Artificial Sequence; identical to SEQ ID NO: 37138
  derived and/or modified CDS sequence (wt) from hemagglutinin__InfluenzaA__ADI99580

SEQ ID NO: 37141 - RNA, 1701 nt, Artificial Sequence
  derived and/or modified CDS sequence (wt) from hemagglutinin__InfluenzaA__ADI99590
augaaggcaauacuaguaguucugcuauauacauuugcaaccgcaaaugcagacacauuauguauagguuaucaugcgaacaauucaacagacacuguagacacaguacuagaaaagaauguaacaguaacacacucuguuaaccuucuagaagacaagcauaacgggaaacuaugcaaacuaagagggguagccccauugcauuuggguaaauguaacauugcuggcuggauccugggaaauccagagugugaaucacucuccacagcaagcucaugguccuacauuguggaaacaucuaguucagacaauggaacguguuacccaggagauuucaucgauuaugaggagcuaagagagcaauugagcucagugucaucauuugaaagguuugagauauuccccaagacaaguucauggcccaaucaugacucgaacaaagguguaacggcagcauguccucaugcuggagcaaaaagcuucuacaaaaauuuaauauggcuaguuaaaaaaggaaauucauacccaaagcucagcaaauccuacaucaaugauaaagggaaagaaguccucgugcuauggggcauucaccauccaucuacuagugcugaccaacaaagucucuaucagaaugcagauucauauguuuuuguggggacaucaagauacagcaagaaguucaagccggaaauagcaauaagacccaaagugagggaucaagaagggagaaugaacuauuacuggacacuaguagagccgggagacaaaauaacauucgaagcaacuggaaaucuagugguaccgagauaugcauucgcaauggaaagaaaugcuggaucugguauuaucauuucagauacaccaguccacgauugcaauacaacuugucagacacccgagggugcuauaaacaccagccucccauuucagaauauacauccgaucacaauuggaaaauguccaaaauauguaaaaagcacaaaauugagacuggccacaggauugaggaaugucccgucuauucaaucuagaggccuauuuggggccauugccgguuucauugaagggggguggacagggaugguagauggaugguacgguuaucaccaucaaaaugagcaggggucaggauaugcagccgaccugaagagcacacagaaugccauugacgagauuacuaacaaaguaaauucuguuauugaaaagaugaauacacaguucacagcaguagguaaagaguucaaccaccuagaaaaaagaauagagaauuuaaauaaaaaaguugaugaugguuuccuggacauuuggacuuacaaugccgaacuguugguucuauuggaaaaugaaagaacuuuggacuaccacgauucaaaugugaagaacuuauaugaaaagguaagaagccaguuaaaaaacaaugccaaggaaauuggaaacggcugcuuugaauuuuaccacaaaugcgauaacacgugcauggaaagugucaaaaaugggacuuaugacuacccaaaauacucagaggaagcaaaauuaaacagagaagaaauagaugggguaaagcuggaaucaacaaggauuuaccagauuuuggcgaucuauucaacugucgccaguucauugguacugguagucucccugggggcaaucaguuucuggaugugcucuaaugggucucuacaguguagaauauguauuuaa

SEQ ID NO: 37142 - RNA, 1701 nt, Artificial Sequence
  derived and/or modified CDS sequence (wt) from hemagglutinin__InfluenzaA__ADI99610
augaaggcaauacuaguaguucugcuauauacauuugcaaccgcaaaugcagacacauuauguauagguuaucaugcgaacaauucaacagacacuguagacacaguacuagaaaagaauguaacaguaacacacucuguuaaccuucuagaagacaagcauaacgggaaacuaugcaaacuaagagggguagccccauugcauuuggguaaauguaacauugcuggcuggauccugggaaauccagagugugaaucacucuccacagcaagcucaugguccuacauuguggaaacaucuaguucagacaauggaacguguuacccaggagauuucaucaauuaugaggaguuaagagagcaauugagcucagugucaucauuugaaagguuugagauauuccccaagacaaguucauggcccaaucaugacucgaacaaagguguaacggcugcauguccucaugcuggagcaaaaagcuucuacaaaaauuuaauauggcuaguuaaaaaaggaaauucauacccaaagcucagcaaauccuacauuaaugauaaagggaaagaaauccucgugcuauggggcauucaccauccaucuacuagugcugaccaacaaagucucuaucagaaugcagaugcauauguuuuuguggggacaucaagauacagcaagaaguucaagccggaaauagcaauaagacccaaagugagggaucaagaagggagaaugaacuauuacuggacacuaguagagccgggagacaaaauaacauucgaagcaacuggaaaucuagugguaccgagauaugcauucgcaauggaaagaaaugcuggaucugguauuaucaucucagauacaccaguccacgauugcaauacaacuugucagacacccaagggugcuauaaacaccagccucccauuucagaauauacauccgaucacaauuggaaaauguccaaaauauguaaaaagcacaaaauugagacuggccacaggauugaggaaugucccgucuauucaaucuagaggccuauuuggggccauugccgguuucauugaagggggguggacaggaaugguagauggaugguacgguuaucaccaucaaaaugagcaggggucaggauaugcagccgaccugaagagcacacagaaugccauugacaagauuacuaacaaaguaaauucuguuauugaaaagaugaauacacaguucacagcaguagguaaagaguucaaccaccuggaaaaaagaauagagaauuuaaauaaaaaaguugaugaugguuuccuggacauuuggacuuacaaugccgaacuguugguucuauuggaaaaugaaagaacuuuggacuaccacgauucaaaugugaagaacuuauaugaaaagguaagaagccaguuaaaaaacaaugccaaggaaauuggaaacggcugcuuugaauuuuaccacaaaugcgauaacacgugcauggaaagugucaaaaaugggacuuaugacuacccaaaauacucagaggaagcaaaauuaaacagagaagaaauagaugggguaaagcuggaaucaacaaggauuuaccagauuuuggcgaucuauucaacugucgccaguucauugguacugguagucucccugggggcaaucaguuucuggaugugcucuaaugggucucuacaguguagaauauguauuuaa

SEQ ID NO: 37143 - RNA, 1701 nt, Artificial Sequence
  derived and/or modified CDS sequence (wt) from hemagglutinin__InfluenzaA__ADI99620
augaaggcgauacuaguaguucugcuauauacauuugcaaccgcaaaugcagacacauuauguauagguuaucaugcgaacaauucaacagacacuguagacacaguacuagaaaagaauguaacaguaacacacucuguuaaccuucuagaagacaagcauaacgggaaacuaugcaaacuaagagggguagccccauugcauuuggguaaauguaacauugcuggcuggauccugggaaauccagagugugaaucacucuccacagcaagcucaugguccuacauuguggaaacaucuaguucagacaauggaacguguuacccaggagauuucaucaauuaugaggagcuaagagagcaauugagcucagugucaucauuugaaagguuugagauauuccccaagacaaguucauggcccaaucaugacucgaacaaagguguaacggcugcauguccucaugcuggagcaaaaagcuucuacaaaaauuuaauauggcuaguuaaaaaaggaaauucauacccaaagcucagcaaauccuacauuaaugauaaagggaaagaaguccucgugcuauggggcauucaccauccaucuacuagugcugaccaacaaagucucuaucagaaugcagaugcauauguuuuuguggggacaucaagauacagcaagaaguucaagccggaaauagcaauaagacccaaagugagggaucaagaagggagaaugaacuauuacuggacacuaguagagccgggagacaaaauaacauucgaagcaacuggaaaucuagugguaccgagauaugcauucgcaauggaaagaaaugcuggaucugguauuaucaucacagauacaccaguccacgauugcaauacaacuugucagacacccaagggugcuauaaacaccagccucccauuucagaauauacauccgaucacaauuggaaaauguccaaaauauguaaaaagcacaaaauugagacuggccacaggauugaggaaugucccgucuauucaaucuagaggccuauuuggggccauugccgguuucauugaagggggguggacagggaugguagauggaugguacgguuaucaccaucaaaaugagcaggggucaggauaugcagccgaccugaagagcacacagaaugccauugacaagauuacuaacaaaguaaauucuguuauugaaaagaugaauacacaguucacagcaguagguaaagaguucaaccaccuggaaaaaagaauagagaauuuaaauaaaaaaguugaugaugguuuccuggacauuuggacuuacaaugccgaacuguugguucuauuggaaaaugaaagaacuuuggacuaccacgauucaaaugugaagaacuuauaugaaaagguaagaagccaguuaaaaaacaaugccaaggaaauuggaaacggcugcuuugaauuuuaccacaaaugcgauaacacgugcauggaaagugucaaaaaugggacuuaugacuacccaaaauacucagaggaagcaaaauuaaacagagaagaaauagaugggguaaagcuggaaucaacaaggauuuaccagauuuuggcgaucuauucaacugucgccaguucauugguacugguagucucccugggggcaaucaguuucuggaugugcucuaaugggucucuacaguguagaauauguauuuaa

SEQ ID NO: 37144 - RNA, 1701 nt, Artificial Sequence
  derived and/or modified CDS sequence (wt) from hemagglutinin__InfluenzaA__ADI99630
augaaggcaauacuaguaguucugcuauauacauuugcaaccgcaaaugcagacacauuauguauagguuaucaugcgaacaauucaacagacacuguagacacaguacuagaaaagaauguaacaguaacacacucuguuaaccuucuagaagacaagaauaacgggaaacuaugcaaacuaagagggguagccccauugcauuuggguaaauguaacauugcuggcuggauccugggaaauccagagugugaaucacucuccacagcaagcucaugguccuacauuguggaaacaucuaguucagacaauggaacguguuacccaggaaauuucaucgauuaugaggagcuaagagagcaauugagcucagugucaucauuugaaagguuugagauauuccccaagacaaguucauggcccaaucaugacucgaacaaagguguaacggcagcauguccucaugcuggagcaaaaagcuucuacaaaaauuuaauauggcuaguuaaaaaaggaaauucauacccaaagcucagcaaauccuacauuaaugauaaagggaaagaaguccucgugcuauggggcauucaccauccaucuacuagugcugaccaacaaagucucuaucagaaugcagaugcauauguuuuuguggggacaucaagauacagcaagaaguucaagccggaaauagcaauaagacccaaagugagggaucaagaagggagaaugaacuauuacuggacacuaguagagccgggagacaaaauaacauucgaagcaacuggaaaucuagugguaccgagauacgcauucgcaauggaaagaaaugcuggaucugguauuaucauuucagauacaccaguccaugauugcaauacaacuugucagacacccaagggugcuauaaacaccagccucccauuucagaauauacauccgaucacaauugggaaauguccaaaauauguaaaaagcacaaaauugagacuggccacaggauugaggaaugucccgucuauucaaucuagaggccuauuuggggccauugccggcuucauugaagggggguggacagggaugguagauggaugguacgguuaucaccaucaaaaugagcaggggucaggauaugcagccgaccugaagagcacacagaaugccauugacaagauuacuaacaaaguaaauucuguuauugaaaagaugaauacacaguucacagcaguagguaaagaguucaaccaccuggaaaaaagaauagagaauuuaaauaaaaaaguugaugaugguuuccuggacauuuggacuuacaaugccgaacuguugguucuauuggaaaaugaaagaacuuuggacuaccacgauucaaaugugaagaacuuauaugaaaagguaagaagccaguuaaaaaacaaugccaaggaaauuggaaacggcugcuuugaauuuuaccacaaaugcgauaacacgugcauggaaagugucaaaaaugggacuuaugacuacccaaaauacucagaggaagcaaaauuaaacagagaagaaauagaugggguaaagcuggaaucaacaaggauuuaccagauuuuggcgaucuauucaacugucgccaguucauugguacugguagucucccugggggcaaucaguuucuggaugugcucuaaugggucucuacaguguagaauauguauuuaa

SEQ ID NO: 37145 - RNA, 1701 nt, Artificial Sequence
  derived and/or modified CDS sequence (wt) from hemagglutinin__InfluenzaA__ADI99640
augaaggcaauacuaguaguucugcuauauacauuugcaaccgcaaaugcagacacauuauguauagguuaucaugcgaacaauucaacagacacuguagacacaguacuagaaaagaauguaacaguaacacauucuguuaaccuucuagaagacaagcauaacgggaaacuaugcaaacuaagagggguagccccauugcauuuggguaaauguaacauugcuggcuggauucugggaaauccagagugugaaucacucuccacagcaagcucaugguccuacauuguggaaacaucuaguucagacaauggaacguguuacccaggagauuucaucgauuaugaggagcuaagagagcaauugagcucagugucaucauuugaaagauuugagauauuccccaagacaaguucauggcccaaucaugacucgaacaaagguguaacggcagcauguccucaugcuggagcaaaaagcuucuacaaaaauuuaauauggcuaguuaaaaaaggaaauucauacccaaagcucagcaaauccuacaucaaugauaaagggaaagaaguccucgugcuauggggcauucaccauccaucuacuaguacugaccaacaaagucucuaucagaaugcagauucauauguuuuuguggggacaucaagauacagcaagaaguucaagccggaaauagcaauaagacccaaagugagggaucaagaagggagaaugaacuauuacuggacacuaguagagccgggagacaaaauaacauucgaagcaacuggaaaucuagugguaccgagauaugcauucgcaauggaaagaaaugcuggaucugguauuaucauuucagauacaccaauccacgauugcaauacaacuugucagacacccgagggugcuauaaacaccagccucccauuucagaauauacauccgaucacaauuggaaaauguccaaaauauguaaaaagcacaaaauugagacuggccacaggauugaggaaugucccgucuauucaaucuagaggccuauuuggggccauugccgguuucauugaagggggguggacagggaugguagauggaugguacgguuaucaccaucaaaaugagcaggggucaggauaugcagccgaccugaagagcacacagaaugccauugacgagauuacuaacaaaguaaauucuguuauugaaaagaugaauacacaguucacagcaguagguaaagaguucaaccaccuggaaaaaagaauagagaauuuaaauaaaaaaguugaugaugguuuccuggacauuuggacuuacaaugccgaacuguugguucuauuggaaaaugaaagaacuuuggacuaccacgauucaaaugugaagaacuuauaugaaaagguaagaagccaguuaaaaaacaaugccaaggaaauuggaaacggcugcuuugaauuuuaccacaaaugcgauaacacgugcauggaaagugucaaaaaugggacuuaugacuacccaaaauacucagaggaagcaaaauuaaacagagaagaaauagaugggguaaagcuggaaucaacaaggauuuaccagauuuuggcgaucuauucaacugucgccaguucauugguacugguagucucccugggggcaaucaguuucuggaugugcucuaaugggucucuacaguguagaauauguauuuaa

SEQ ID NO: 37146 - RNA, 1701 nt, Artificial Sequence; identical to SEQ ID NO: 36239
  derived and/or modified CDS sequence (wt) from hemagglutinin__InfluenzaA__ADI99660

SEQ ID NO: 37147 - RNA, 1701 nt, Artificial Sequence
  derived and/or modified CDS sequence (wt) from hemagglutinin__InfluenzaA__ADI99670
augaaggcaauacuaguaguucugcuauauacauuugcaaccgcaaaugcagacacauuauguauagguuaucaugcgaacaauucaacagacacuguagacacaguacuagaaaagaauguaacaguaacacacucuguuaacauucuagaagacaagcauaacgggaaacuaugcaaacuaagagggguagccccauugcauuuggguaaauguaacauugcuggcuggauccugggaaauccagagugugaaucacucuccacagcaagcucaugguccuacauuguggaaacaucuaguucagacaauggaacguguuacccaggagauuucaucgauuaugaggagcuaagagagcaauugagcucagugucaucauuugaaagguuugagauauuccccaagacaaguucauggcccaaucaugacucgaacaaagguguaacggcagcauguccucaugcuggagcaaaaagcuucuacaaaaauuuaauauggcuaguuaaaaaaggaaacucauacccaaagcucagcaaauccuacauuaaugauaaagggaaagaaguccucgugcuauggggcauucaccauccaucuacuagugcugaccaacaaagucucuaucagaaugcagaugcauauguuuuuguggggacaucaagauacagcaagaaguucaagccggaaauagcaauaagacccaaagugagggaucaagaagggagaaugaacuauuacuggacacuaguagagccgggagacaaaauaacauucgaagcaacuggaaaucuagugguaccgagauaugcauucgcaauggaaagaaaugcuggaucugguauuaucauuucagauacaccaguccacgauugcaauacaacuugucagacacccaagggugcuauaaacaccagccucccauuucagaauauacauccgaucacaauuggaaaauguccaaaauauguaaaaagcacaaaauugagacuggccacaggauugaggaaugucccgucuauucaaucuagaggccuauuuggggccauugccgguuucauugaagggggguggacagggaugguagauggaugguacgguuaucaccaucaaaaugagcaggggucaggauaugcagccgaccugaagagcacacagaaugccauugacgagauuacuaacaaaguaaauucuguuauugaaaagaugaauacacaguucacagcaguagguaaagaguucaaccaccuggaaaaaagaauagagaauuuaaauaaaaagguugaugaugguuuccuggacauuuggacuuacaaugccgaacuguugguucuauuggaaaaugaaagaacuuuggacuaccaugauucaaaugugaagaacuuauaugaaaagguaagaagccaguuaaaaaacaaugccaaggaaauuggaaacggcugcuuugaauuuuaccacaaaugcgauaacacgugcauggaaagugucaaaaaugggacuuauggcuacccaaaauacucagaggaagcaaaauuaaacagagaagaaauagaugggguaaagcuggaaucaacaaggauuuaccagauuuuggcgaucuauucaacugucgccaguucauugguacugguagucucccugggggcaaucaguuucuggaugugcucuaaugggucucuacaguguagaauauguauuuaa

SEQ ID NO: 37148 - RNA, 1701 nt, Artificial Sequence
  derived and/or modified CDS sequence (wt) from hemagglutinin__InfluenzaA__ADI99680
augaaggcaauacuaguaguucugcuauauacauuugcaaccgcaaaugcagacacauuauguauagguuaucaugcgaacaauucaacagacacuguagacacaguacuagaaaagaauguaacaguaacacacucuguuaacauucuagaagacaagcauaacgggaaacuaugcaaacuaagagggguagccccauugcauuuggguaaauguaacauugcuggcuggauccugggaaauccagagugugaaucacucuccacagcaagcucaugguccuacauuguggaaacaucuaguucagacaauggaacguguuacccaggagauuucaucgauuaugaggagcuaagagagcaauugagcucagugucaucguuugaaagguuugagauauuccccaagacaaguucauggcccaaucaugacucgaacaaagguguaacggcagcauguccucaugcuggagcaaaaagcuucuacaaaaauuuaauauggcuaguuaaaaaaggaaacucauacccaaagcucagcaaauccuacauuaaugauaaagggaaagaaguccucgugcuauggggcauucaccacccaucuacuagugcugaccaacaaagucucuaucagaaugcagaugcauauguuuuuguggggacaucaagauacagcaagaaguucaagccggaaauagcaauaagacccaaagugagggaucaagaagggagaaugaacuauuacuggacaauaguagagccgggagacaaaauaacauucgaagcaacuggaaaucuagugguaccgagauaugcauucgcaauggaaagaaaugcuggaucugguauuaucauuucagauacaccaguccacgauugcaauacaacuugucagacacccaagggugcuauaaacaccagccucccauuucagaauauacauccgaucacaauuggaaaauguccaaaauauguaaaaagcacaaaauugagacuggccacaggauugaggaaugucccgucuauucaaucuagaggccuauuuggggccauugccgguuucauugaagggggguggacagggaugguagauggaugguacgguuaucaccaucaaaaugagcaggggucaggauaugcagccgaccugaagagcacacagaaugccauugacgagauuacuaacaaaguaaauucuguuauugaaaagaugaauacacaguucacagcaguagguaaagaguucaaccaccuggaaaaaagaauagagaauuuaaauaaaaagguugaugaugguuuccuggacauuuggacuuacaaugccgaacuguugguucuauuggaaaaugaaagaacuuuggacuaccaugauucaaaugugaagaacuuauaugaaaagguaagaagccaguuaaaaaacaaugccaaggaaauuggaaacggcugcuuugaauuuuaccacaaaugcgauaacacgugcauggaaagugucaaaaaugggacuuaugacuacccaaaauacucagaggaagcaaaauuaaacagagaagaaauagaugggguaaagcuggaaucaacaaggauuuaccagauuuuggcgaucuauucaacugucgccaguucauugguacugguagucucccugggggcaaucaguuucuggaugugcucuaaugggucucuacaguguagaauauguauuuaa

SEQ ID NO: 37149 - RNA, 1701 nt, Artificial Sequence
  derived and/or modified CDS sequence (wt) from hemagglutinin__InfluenzaA__ADI99690
augaaggcaauacuagcaguucugcuauauacauuugcaaucgcaaaugcagacacauuauguauagguuaucaugcgaacaauucaacagacacuguagacacaguacuagaaaagaauguaacaguaacacacucuguuaacauucuagaagacaagcauaacgggaaacuaugcaaacuaagagggguagccccauugcauuuggguaaauguaacauugcuggcuggauccugggaaauccagaaugugaaucacucuccacagcaagcucaugguccuacauuguggaaacaucuaguucagacaauggaacguguuacccaggagauuucaucgauuaugaggagcuaagagagcaauugagcucagugucaucauuugaaagguuugagauauuccccaagacaaguucauggcccaaucaugacucgaacaaagguguaacggcagcauguccucaugcuggagcaaaaagcuucuacaaaaauuuaauaugguuaguuaaaaaaggaaacucauacccaaagcucagcaaauccuacauuaaugauaaagggaaaaaaguccucgugcuauggggcauucaccauccaucuacuagugcugaccaacaaagucucuaucagaaugcagaugcauauguuuuuguggggacaucaagauacagcaagaaguucaagccggaaauagcaauaagacccaaagugagggaucaagaagggagaaugaacuauuacuggacacuaguagagccgggagacaaaauaacauucgaagcaacuggaaaucuagugguaccgagauaugcauucgcaauggaaagaaaugcuggaucugguauuaucauuucagauacaccaguccacgauugcaauacaacuugucagacacccaagggugcuauaaacaccagccucccauuucagaauauacauccgaucacaauuggaaaauguccaaaauauguaaaaagcacaaaauugagacuggccacaggauugaggaaugucccgucuauucaaucuagaggccuauuuggggccauugccgguuucauugaagggggguggacagggaugguagauggaugguacgguuaucaccaucaaaaugagcaggggucaggauaugcagccgaccugaagagcacacagaaugccauugacgagauuacuaacaaaguaaauucuguuauugaaaagaugaauacacaguucacagcaguagguaaagaguucaaccaccuggaaaaaagaauagagaauuuaaauaaaaagguugaugaugguuuccuggacauuuggacuuacaaugccgaacuguugguucuauuggaaaaugaaagaacuuuggacuaccaugauucaaaugugaagaacuuauaugaaaagguaagaagccaguuaaaaaacaaugccaaggaaauuggaaacggcugcuuugaauuuuaccacaaaugcgauaacacgugcauggaaagugucaaaaaugggacuuaugacuacccaaaauacucagaggaagcaaaauuaaacagagaagaaauagaugggguaaagcuggaaucaacaaggauuuaccagauuuuggcgaucuauucaacugucgccaguucauugguacugguagucucccugggggcaaucaguuuuuggaugugcucuaaugggucucuacaguguagaauauguauuuaa

SEQ ID NO: 37150 - RNA, 1701 nt, Artificial Sequence
  derived and/or modified CDS sequence (wt) from hemagglutinin__InfluenzaA__ADI99700
augaaggcaauacuaguaguucugcuauauacauuugcaaccgcaaaugcagacacauuauguauagguuaucaugcgaacaauucaacagacacuguagacacaguacuagaaaagaauguaacaguaacacacucuguuaaccuucuagaagacaagcauaacgggaaacuaugcaaacuaagagggguauccccauugcauuuggguaaauguaacauugcuggcuggauccugggaaauccagagugugaaucacucuccacagcaagcucaugguccuacauuguggaaacaucuaguucagacaauggaacguguuacccaggagauuucaucgauuaugaggagcuaagagagcaauugagcucagugucaucauuugaaagguuugagauauuccccaagacaaguucauggcccaaucaugacucgaacaaagguguaacggcagcauguccucaugcuggagcaaaaagcuucuacaaaaauuuaauauggcuaguuaaaaaaggaaauucauacccaaagcucagcaaauccuacauuaaugauaaagggaaagaaguccucgugcuauggggcguucaccauccaucuacuagugcugaccaacaaagucucuaucagaaugcagaugcauauguuuuuguggggacaucaagauacagcaagaaguucaagccggaaauagcaauaagacccaaagugagggaucaagaagggagaaugaacuauuacuggacauuaguagagccgggagacaaaauaacauucgaagcaacuggaaaucuaguggcaccgagauaugcauucgcaauggaaagaaaugcuggaucugguauuaucauuucagauacaccaguccacgauugcaauacaacuugucagacacccaagggugcuauaaacaccagccucccauuucagaauauacauccgaucacaauuggaaaauguccaaaauauguaaaaagcacaaaauugagacuggccacaggauugaggaaugucccgucuauucaaucuagaggccuauuuggggccauugccgguuucauugaagggggguggacagggaugguagauggaugguacgguuaucaccaucaaaaugagcaggggucaggauaugcagccgaccugaagagcacacagaaugccauugacgagauuacuaacaaaguaaauucuguuauugaaaagaugaacacacaguucacagcaguagguaaagaguucaaccaccuggagaaaagaauagagaauuuaaauaaaaaaguugaugaugguuuccuggacauuuggacuuacaaugccgaacuguugguucuauuggaaaaugaaagaacuuuggacuaccacgauucaaaugugaagaacuuauaugaaaagguaagaagccaguuaaaaaacaaugccaaggaaauuggaaacggcugcuuugaauuuuaccacaaaugcgauaacacgugcauggaaagugucaaaaaugggacuuaugacuacccaaaauacucagaggaagcaaaauuaaacagagaagaaauagaugggguaaagcuggaaucaacaaggauuuaccagauuuuggcgaucuauucaacugucgccaguucauugguacugguagucucccugggggcaaucaguuucuggaugugcucuaaugggucucuacaguguagaauauguauuuaa

SEQ ID NO: 37151 - RNA, 1701 nt, Artificial Sequence
  derived and/or modified CDS sequence (wt) from hemagglutinin__InfluenzaA__ADI99710
augaaggcaauacuaguaguucugcuauauacauuugcaaccgcaaaugcagacacauuauguauagguuaucaugcgaacaauucaacagacacuguagacacaguacuagaaaagaauguaacaguaacacacucuguuaaccuucuagaagacaagcauaacgggaaacuaugcaaacuaagagggguagccccauugcauuuggguaaaugcaacauugcuggcuggauccugggaaauccagagugugaaucacucuccacagcaagcucaugguccuacauuguggaaacaucuaguucagacaauggaacguguuacccaggagauuucaucgauuaugaggagcuaagagagcaauugagcucagugucaucauuugaaagguuugagauauuccccaagacaaguucauggcccaaucaugacucgaacaaagguguaacggcagcauguccucaugcuggagcaaaaagcuucuacaaaaauuuaauauggcuaguuaaaaaaggaaauucauacccaaagcucagcaaauccuacauuaaugauaaagggaaagaaguccucgugcuauggggcauucaccauccaucuacuagugcugaccaacaaagucucuaucagaaugcagaugcauauguuuuuguggggacaucaagauacagcaagaaguucaagccggaaauagcaauaagacccaaagugagggaucaagaagggagaaugaacuauuauuggacacuaguagagccgggagacaaaauaacauucgaagcaacuggaaaucuagugguaccgagauaugcauucgcaauggaaagaaaugcuggaucugguauuaucauuucagauacaccaguccacgauugcaauacaacuugucagacacccaagggugcuauaaacaccagccucccauuucagaauauacauccgaucacaauuggaaaauguccaaaauauguaaaaagcacaaaauugagacuggccacaggauugaggaauaucccgucuauucaaucuagaggccuauuuggggccauugccgguuucauugaagggggguggacagggaugguagauggaugguacgguuaucaccaucaaaaugagcaggggucaggauaugcagccgaccugaagagcacacagaaugccauugacaagauuacuaacaaaguaaauucuguuauugaaaagaugaauacacaguucacagcaguagguaaagaguucaaccaccuggaaaaaagaauagagaauuuaaauaaaaagguugaugaugguuuccuggacauuuggacuuacaaugccgaacuguugguucuauuggaaaaugaaagaacuuuggacuaccacgauucaaaugugaagaacuuauaugaaaagguaagaagccaguuaaaaaacaaugccaaggaaauuggaaacggcugcuuugaauuuuaccacaaaugcgauaacacgugcauggaaagugucaaaaaugggacuuaugacuacccaaaauacucagaggaagcaaaauuaaacagagaagaaauagaugggguaaagcuggaaucaacaaggauuuaccagauuuuggcgaucuauucaacugucgccaguucauugguacugguagucucccugggggcaaucaguuucuggaugugcucuaaugggucucuacaguguagaauauguauuuaa

SEQ ID NO: 37152 - RNA, 1701 nt, Artificial Sequence
  derived and/or modified CDS sequence (wt) from hemagglutinin__InfluenzaA__ADI99720
augaaggcaauacuaguaguucugcuauauacauuugcaaccgcaaaugcagacacauuauguauagguuaucaugcgaacaauucaacagacacuguagacacaguacuagaaaagaauguaacaguaacacacucuguuaaccuucuagaagacaagcauaacgggaaacuaugcaaacuaagagggguagccccauugcauuuggguaaauguaacauugcuggcuggaucuugggaaauccagagugugaaucacucuccacagcaagcucaugguccuacauuguggaaacaucuaguucagacaauggaacguguuacccaggagauuucaucgauuaugaggagcuaagagagcaauugagcucagugucaucauuugaaagguuugagauauuccccaagacaaguucauggcccgaucaugacucgaacaaagguguaacggcagcauguccucaugcuggagcaaaaagcuucuacaaaaauuuaauauggcuaguuaaaaaaggaaauucauacccaaagcucagcaaauccuacauuaaugauaaagggaaagaaguccucgugcuauggggcauucaccauccaucuacuagugcugaccaacaaagucucuaucagaaugcagaugcauauguuuuuguggggacaucaagauacagcaagaaguucaagccggaaauagcaauaagacccaaagugaggggacaagaagggagaaugaacuauuacuggacacuaguagagccgggagacaaaauaacauucgaagcaacuggaaaucuagugguaucgagauaugcauucgcaauggaaagaaaugcuggaucugguauuaucauuucagauacaccaguccacgauugcaauacaacuugucagacacccaaaggugcuauaaacaccagccucccauuucagaauauacauccgaucacaauuggaaaauguccaaaauauguaaaaagcacaaaauugagacuggccacaggauugaggaaugucccgucuauucaaucuagaggccuauuuggggccauugccgguuucauugaagggggguggacagggaugguagauggaugguacgguuaucaccaucaaaaugagcaggggucaggauaugcagccgaccugaagagcacacagaaugccauugacgagauuacuaacaaaguaaauucuguuauugaaaagaugaauacacaguucacagcaguagguaaagaguucaaccaccuggaaaaaagaauagagaauuuaaauaaaaaaguugaugaugguuuccuggacauuuggacuuacaaugccgaacuguugguucuauuggaaaaugaaagaacuuuggacuaccacgauucaaaugugaagaacuuauaugaaaagguaagaagccaguuaaaaaacaaugccaaggaaauuggaaacggcugcuuugaauuuuaccacaaaugcgauaacacgugcauggaaagugucaaaaaugggacuuaugacuacccaaaauacucagaggaagcaaaauuaaacagagaagaaauagaugggguaaagcuggaaucaacaaggauuuaccagauuuuggcgaucuauucaacugucgccaguucauugguacugguagucucccugggggcaaucaguuucuggaugugcucuaaugggucucuacaguguagaauauguauuuaa

SEQ ID NO: 37153 - RNA, 1701 nt, Artificial Sequence
  derived and/or modified CDS sequence (wt) from hemagglutinin__InfluenzaA__ADI99730
augaaggcaauacuaguaguucugcuauauacauuugcaaccgcaaaugcagacacauuauguauagguuaucaugcgaacaauucaacagacacuguagacacaguacuagaaaagaauguaacaguaacacacucuguuaaccuucuagaagacaagcauaacgggaaacuaugcaaacuaagagggguagccccauugcauuuggguaaauguaacauugcuggcuggauccugggaaauccagagugugaaucacucuccacagcaagcucaugguccuacauuguggaaacaucuaguucagacaauggaacguguuacccaggagauuucaucgauuaugaggagcuaagagagcaauugagcucagugucaucauuugaaagguuugagauauuccccaagacaaguucauggcccaaucaugacucgaacaaagguguaacggcagcauguccucaugcuggagcaaaaagcuucuacaaaaauuuaauauggcuaguuaaaaaaggaaauucauacccaaagcucagcaaauccuacauuaaugauaaagggaaagaaguccucguguuauggggcauucaccauccaucuacuagugcugaccaacaaagucucuaucagaaugcagaugcauauguuuuuguggggacaucaagauacagcaagaaguucaagccggaaauagcaauaagacccaaagugagggaucaagaagggagaaugaacuauuacuggacacuaguagagccgggagacaaaauaacauucgaagcaacuggaaaucuagugguaccgagauaugcauucgcaauggaaagaaaugcuggaucugguauuaucauuucagauacaccaguccacgauugcaauacaacuugucagacacccaagggugcuauaaacaccagccucccauuucagaauauacauccgaucacaauuggaaaauguccaaaauauguaaaaagcacaaaauugagacuggccacaggauugaggaaugucccgucuauucaaucuagaggccuauuuggggccauugccgguuucauugaagggggguggacagggaugguagauggaugguacgguuaucaccaucaaaaugagcaggggucaggauaugcagcagaccugaagagcacacagaaugccauugacgagauuacuaacaaaguaaauucuguuauugaaaagaugaauacacaguucacagcaguagguaaagaguucaaccaccuggaaaaaagaauagagaauuuaaauaaaaaaguugaugaugguuuccuggacauuuggacuuacaaugccgaacuguugguucuauuggaaaaugaaagaacuuuggacuaccacgauucaaaugugaagaacuuguaugaaaagguaagaagccaguuaaaaaacaaugccaaggaaauuggaaacggcugcuuugaauuuuaccacaaaugcgauaacacgugcauggaaagugucaaaaaugggacuuaugacuacccaaaauacucagaggaagcaaaauuaaacagagaagaaauagaugggguaaagcuggaaucaacaaggauuuaccagauuuuggcgaucuauucaacugucgccaguucauugguacugguagucucccugggggcaaucaguuucuggaugugcucuaaugggucucuacaguguagaauauguauuuaa

SEQ ID NO: 37154 - RNA, 1701 nt, Artificial Sequence; identical to SEQ ID NO: 34681
  derived and/or modified CDS sequence (wt) from hemagglutinin__InfluenzaA__ADJ00497

SEQ ID NO: 37155 - RNA, 1701 nt, Artificial Sequence; identical to SEQ ID NO: 34681
  derived and/or modified CDS sequence (wt) from hemagglutinin__InfluenzaA__ADJ00498

SEQ ID NO: 37156 - RNA, 1701 nt, Artificial Sequence
  derived and/or modified CDS sequence (wt) from hemagglutinin__InfluenzaA__ADJ00501
augaaggcaauacuaguaguucugcuauauacauuugcaaccgcaaaugcagacacauuauguauagguuaucaugcgaacaauucaacagacacuguagacacaguacuagaaaagaauguaacaguaacacacucuguuaaccuucuagaagacaagcauaacgggaaacuaugcaaacuaagagggguagccccauugcauuuggguaaauguaacauugcuggcuggauccugggaaauccagagugugaaucacucuccacagcaagcucaugguccuacauuguggaaacaucuaguucagacaauggaacguguuacccaggagauuucaucaauuaugaggagcuaagagagcaauugagcucagugucaucauuugaaagguuugagauauuccccaagacaaguucauggcccaaucaugacucgaacaaagguguaacggcagcauguccucaugcuggagcaaaaagcuucuacaaaaauuuaauauggcuaguuaaaaaaggaaauucauacccaaagcucagcaaauccuacauuaaugauaaagggaaagaaguccucgugcuauggggcauucaccauccaucuacuagugcugaccaacaaagucucuaucagaaugcagaugcauauguuuuuguggggacaucaagauacagcaagaaguucaagccggaaauagcaauaagacccaaagugagggaucaagaagggagaaugaacuauuacuggacacuaguagagccgggagacaaaauaacauucgaagcaacuggaaaucuagugguaccgagauaugcauucgcaauggaaagaaaugcuggaucugguauuaucauuucagauacaccaguccacgauugcaauacaacuugucagacacccaagggugcuauaaacaccagccucccauuucagaauauacauccgaucacaauuggaaaauguccaaaauauguaaaaagcacaaaauugagacuggccacaggauugaggaaugucccgucuauucaaucuagaggccuauuuggggccauugccgguuucauugaagggggguggacagggaugguagauggaugguacgguuaucaccaucaaaaugagcaggggucaggauaugcagccgaccugaagagcacacagaaugccauugacgagauuacuaacaaaguaaauucuguuauugaaaagaugaauacacaguucacagcaguagguaaagaguucaaccaccuggaaaaaagaauagagaauuuaaauaaaaaaguugaugaugguuuccuggacauuuggacuuacaaugccgaacuguugguucuauuggaaaaugaaagaacuuuggacuaccacgauucaaaugugaagaacuuauaugaaaagguaagaagccaguuaaaaaacaaugccaaggaaauuggaaacggcugcuuugaauuuuaccacaaaugcgauaacacgugcauggaaagugucaaaaaugggacuuaugacuacccaaaauacucagaggaagcaaaauuaaacagagaagaaauagaugggguaaagcuggaaucaacaaggauuuaccagauuuuggcgaucuauucaacugucgccaguucauugguacugguagucucccugggggcaaucaguuucuggaugugcucuaaugggucucuacaguguagaauauguauuuaa

SEQ ID NO: 37157 - RNA, 1701 nt, Artificial Sequence
  derived and/or modified CDS sequence (wt) from hemagglutinin__InfluenzaA__ADJ18163
augaaggcaauacuaguaguucugcuauauacauuugcaaccgcaaaugcagacacauuauguauagguuaucaugcgaacaauucaacagacacuguagacacaguacuagaaaagaauguaacaguaacacacucuguuaaccuucuagaagacaagcauaacgggaaacuaugcaaacuaagagggguagccccauugcauuuggguaaauguaacauugcuggcuggauccugggaaauccagagugugaaucacucuccacagcaagcucaugguccuacauuguggaaacaucuaguucagacaauggaacguguuacccaggagauuucaucgauuaugaggagcuaagagagcaauugagcucagugucaucauuugaaagguuugagauauuccccaagacaaguucauggcccaaucaugacucgaacaaagguguaacggcagcauguccucaugcuggagcaaaaagcuucuacaaaaauuuaauauggcuaguuaaaaaaggaaauucauacccaaagcucagcaaauccuacauuaaugauaaagggaaagaaguccucgugcuauggggcauucaccauccaucuacuagugcugaccaacaaagucucuaucagaaugcagaugcauauguuuuuguggggacaucaagauacagcaagaaguucaagccggaaauagcaauaagacccaaagugagggaucaagaagggagaaugaacuauuacuggacacuaguagagccgggagacaaaauaacauucgaagcaacuggaaaucuagugguaccgagauaugcauucgcaauggaaagaaaugcuggaucugguauuaucauuucagauacaccaguccacgauugcaauacaacuugucagacaccuaagggugcuauaaacaccagccucccauuucagaauauacauccgaucacaauuggaaaauguccaaaauauguaaaaagcacaaaauugagacuggccacaggauugaggaaugucccgucuauucaaucuagaggacuauuuggggccauugccgguuucauugaagggggguggacagggaugguagauggaugguacgguuaucaccaucaaaaugagcaggggucaggauaugcagccgaccugaagagcacacagaaugccauugacaagauuacuaacaaaguaaauucuguuauugaaaagaugaauacacaguucacagcaguagguaaagaguucaaccaccuggaaaaaagaauagagaauuuaaauaaaaaaguugaugaugguuuccuggacauuuggacuuacaaugccgaacuguugguucuauuggaaaaugaaagaacuuuggacuaccacgauucaaaugugaagaacuuauaugaaaagguaagaagccaguuaaaaaacaaugccaaggaaauuggaaacggcugcuuugaauuuuaccacaaaugcgauaacacgugcauggaaagugucaaaaaugggacuuaugacuacccaaaauacucagaggaagcaaaauuaaacagagaagaaauagaugggguaaagcuggaaucaacaaggauuuaccagauuuuggcgaucuauucaacugucgccaguucauugguacugguagucucccugggggcaaucaguuucuggaugugcucuaaugggucucuacaguguagaauauguauuuaa

SEQ ID NO: 37158 - RNA, 1701 nt, Artificial Sequence
  derived and/or modified CDS sequence (wt) from hemagglutinin__InfluenzaA__ADJ18165
augaaggcaauacuaguaguucugcuauauacauuugcaaccgcaaaugcagacacauuauguauagguuaucaugcgaacaauucaacagacacuguagacacaguacuagaaaagaauguaacaguaacacacucuguuaaccuucuagaagacaagcauaacgggaaacuaugcaaacuaagagggguagccccauugcauuuggguaaauguaacauugcuggcuggauccugggaaauccagagugugaaucacucuccacagcaagcucaugguccuacauuguggaaacaucuaguucagacaauggaacguguuacccaggagauuucaucgauuaugaggagcuaagagagcaauugagcucagugucaucauuugaaagguuugagauauuccccaagacaaguucauggcccaaucaugacucgaacaaagguguaacggcagcauguccucaugcuggagcaaaaagcuucuacaaaaauuuaauauggcuaguuaaaaaaggaaauucauacccaaagcucagcaaauccuacauuaaugauaaagggaaagaaguccucgugcuauggggcauucaccauccaucuacuagugcugaccaacaaagucucuaucagaaugcagaugcauauguuuuuguggggacaucaagauacagcaagaaguucaaaccggaaauagcaauaagacccaaagugagggaucaagaagggagaaugaacuauuacuggacacuaguagagccgggagacaaaauaacauucgaagcaacuggaaaucuagugguaccaagauaugcauucgcaauggaaagaaaugcuggaucugguauuaucauuucagauacaccaguccacgauugcaauacaacuugucagacacccaagggugcuauaaacaccagccucccauuucagaauauacauccgaucacaauuggaaaauguccaaaauauguaaaaagcacaaaauugagacuggccacaggauugaggaaugucccgucuauucaaucuagaggccuauuuggggccauugccgguuucauugaagggggguggacagggaugguagauggaugguacgguuaucaccaucaaaaugagcaggggucaggauaugcagccgaccugaagagcacacagaaugccauugacaagauuacuaacaaaguaaauucuguuauugaaaagaugaauacacaguucacagcaguagguaaagaguucaaccaccuggaaaaaagaauagagaauuuaaauaaaaaaguugaugaugguuuccuggacauuuggacuuacaaugccgaacuguugguucuauuggaaaaugaaagaacuuuggacuaccacgauucaaaugugaagaacuuauaugaaaagguaagaagccaguuaaaaaacaaugccaaggaaauuggaaacggcugcuuugaauuuuaccacaaaugcgauaacacgugcauggaaagugucaaaaaugggacuuaugacuacccaaaauacucagaggaagcaaaauuaaacagagaagaaauagaugggguaaagcuggaaucaacaaggauuuaccagauuuuggcgaucuauucaacugucgccaguucauugguacugguagucucccugggggcaaucaguuucuggaugugcucuaaugggucucuacaguguagaauauguauuuaa

SEQ ID NO: 37159 - RNA, 1701 nt, Artificial Sequence
  derived and/or modified CDS sequence (wt) from hemagglutinin__InfluenzaA__ADJ18167
augaaggcaauacuaguaguucugcuauauacauuugcaaccgcaaaugcagacacauuauguauagguuaucaugcgaacaauucaacagacacuguagacacaguacuagaaaagaauguaacaguaacacacucuguuaaccuucuagaagacaagcauaacgggaaacuaugcaaacuaagagggguagccccauugcauuuagguaaauguaacauugcuggcuggauccugggaaauccagagugugaaucacucuccacagcaagcucaugguccuacauuguggaaacaucuaguucagacaauggaacguguuacccaggagauuucaucgauuaugaggagcuaagagagcaauugagcucagugucaucauuugaaagguuugagauauuccccaagacaaguucauggcccaaucaugacucgaacaaagguguaacggcagcauguccuuaugcuggagcaaaaagcuucuacaaaaauuuaauauggcuaguuaaaaaaggaaauucauacccaaagcucagcaaauccuacauuaaugauaaagggaaagaaguccucgugcuauggggcauucaccauccaucuacuagugcugaccaacaaagucuuuaucagaaugcagaugcauauguuuuuguggggacaucaagauacagcaagaaguucaagccggaaauagcaauaagacccaaagugagggaucgagaagggagaaugaacuauuacuggacacuaguagagccgggagacaaaauaacauucgaagcaacuggaaaucuagugguaccgagauaugcauucgcaauggaaagaaaugcuggaucugguauuaucauuucagauacaccaguccacgauugcaauacaacuugucagacacccaagggugcuauaaacaccagccucccauuucagaauauacauccgaucacaauuggaaaauguccaaaauauguaaaaagcacaaaauugagacuggccacaggauugaggaauaucccgucuauucaaucuagaggccuauuuggggccauugccgguuucauugaagggggguggacagggaugguagauggaugguacgguuaucaccaucaaaaugagcaggggucaggauaugcagccgaccugaagagcacacagaaugccauugacaagauuacuaacaaaguaaauucuguuauugaaaagaugaauacacaguucacagcaguagguaaagaguucaaccaccuggaaaaaagaauagagaauuuaaauaaaaaaguugaugaugguuuccuggacauuuggacuuacaaugccgaacuguugguucuauuggaaaaugaaagaacuuuggacuaccacgauucaaaugugaagaacuuauaugaaaagguaagaagccaguuaaaaaacaaugccaaagaaauuggaaacggcugcuuugaauuuuaccacaaaugcgauaacacgugcauggaaagugucaaaaaugggacuuaugacuacccaaaauacucagaggaagcaaaauuaaacagagaagaaauagaugggguaaagcuggaaucaacaaggauuuaccagauuuuggcgaucuauucaacugucgccaguucauugguacugguagucucccugggggcaaucaguuucuggaugugcucuaaugggucucuacaguguagaauauguauuuaa

SEQ ID NO: 37160 - RNA, 1701 nt, Artificial Sequence
  derived and/or modified CDS sequence (wt) from hemagglutinin__InfluenzaA__ADJ18169
augaaggcaauacuaguaguucugcuauauacauuugcaaccgcaaaugcagacacauuauguauagguuaucaugcgaacaauucaacagacacuguagacacaguacuagaaaagaauguaacaguaacacacucuguuaaccuucuagaagacaagcauaacgggaaacuaugcaaacuaagagggguagccccauugcauuuggguaaauguaacauugcuggcuggauccugggaaauccagagugugaaucacucuccacagcaagcucaugguccuacauuguggaaacaucuaguucagacaauggaacguguuacccaggagauuucaucgauuaugaggagcuaagagagcaauugagcucagugucaucauuugaaagguuugagauauuccccaagacaaguucauggcccaaucaugacucgaacaaagguguaacggcagcauguccucaugcuggagcaaaaagcuucuacaaaaauuuaauauggcuaguuaaaaaaggaaauucauacccaaagcucagcaaauccuacauuaaugauaaagggaaagaaguccucgugcuauggggcauucaccauccaucuacuagugcugaccaacaaagucucuaucagaaugcagaugcauauguuuuuguggggacaucaagauacagcaagaaguucaaaccggaaauagcaauaagacccaaagugagggaucgagaagggagaaugaacuauuacuggacacuaguagagccgggagacaaaauaacauucgaagcaacuggaaaucuagugguaccgagauaugcauucgcaauggaaagaaaugcuggaucugguauuaucauuucagauacaccaguccacgauugcaauacaacuugucagacacccaagggugcuauaaacaccagccucccauuucagaauauacauccgaucacaauuggaaaauguccaaaauauguaaaaagcacaaaauugagacuggccacaggauugaggaaugucccgucuauucaaucuagaggccuauuuggggccauugccgguuucauugaagggggguggacagggaugguagauggaugguacgguuaucaccaucaaaaugagcaggggucaggauaugcagccgaccugaagagcacacagaaugccauugacaagauuacuaacaaaguaaauucuguuauugaaaagaugaauacacaguucacagcaguagguaaagaguucaaccaccuggaaaaaagaauagagaauuuaaauaaaaaaguugaugaugguuuccuggacauuuggacuuacaaugccgaacuguugguucuauuggaaaaugaaagaacuuuggacuaccacgauucaaaugugaagaacuuauaugaaaagguaagaagccaguuaaaaaacaaugccaaggaaauuggaaacggcugcuuugaauuuuaccacaaaugcgauaacacgugcauggaaagugucaaaaaugggacuuaugacuacccaaaauacucagaggaagcaaaauuaaacagagaagaaauagaugggguaaagcuggaaucaacaaggauuuaccagauuuuggcgaucuauucaacugucgccaguucauugguacugguagucucccugggggcaaucaguuucuggaugugcucuaaugggucucuacaguguagaauauguauuuaa

SEQ ID NO: 37161 - RNA, 1701 nt, Artificial Sequence
  derived and/or modified CDS sequence (wt) from hemagglutinin__InfluenzaA__ADJ18171
augaaggcaauacuaguaguucugcuauauacauuugcaaccgcaaaugcagacacauuauguauagguuaucaugcgaacaauucaacagacacuguagacaccguacuagaaaagaauguaacaguaacacacucuguuaaccuucuagaagacaagcauaacgggaaacuaugcaaacuaagagggguagccccauugcauuuggguaaauguaacauugcuggcuggauccugggaaauccagagugugaaucacucuccacagcaagcucauggcccuacauuguggaaacaucuaguucagacaauggaacguguuacccaggagauuucaucgauuaugaggagcuaagagagcaauugagcucagugucaucauuugaaagguuugagauauuccccaagacaaguucauggcccaaucaugacucgaacaaagguguaacggcagcauguccucaugcuggagcaaaaagcuucuaccaaaauuuaauauggcuaguuaaaaaaggaaauucauacccaaagcucagcaaauccuacauucaugauaaagggaaagaaguccucgugcuauggggcauucaccauccaucuacuagugcugaccaacaaagucucuaucagaaugcagaugcauauguuuuuguggggacaucaagauacaguaagaaguucaaaccggaaauagcaauaagacccaaagugagggaucgacaagggagaaugaacuauuacuggacacuaguagagcugggagacaaaauaacauucgaagcaacuggaaaucuagugguaccaagauaugcauucgcaauggaaagaaaugcuggaucugguauuaucauuucagauacaccaguccacaauugcaauacaacuugucagacaaccacgggugcuauaaauaccagccucccauuucagaauauacauccgaucacaauuggaaaauguccaaaauauguaaaaagcacaaaauugagacuggccacaggauugaggaaugucccgucuauucaaucuagaggccuauuuggggccauugccgguuucauugaagggggguggacagggaugguagauggaugguacgguuaucaccaucaaaaugagcagggaucaggauaugcagccgaccugaagagcacacagaaugccauugacaagauuacuaacaaaguaaauucuguuauugaaaagaugaauacacaguucacagcaguagguaaagaguucaaccaccuggaaaaaagaauagagaauuuaaauaaaaaaguugaugaugguuuccuggacauuuggacuuacaaugccgaacuguugguucuauuggaaaaugaaagaacuuuggacuaccacgauucaaaugugaagaacuuauaugaaaagguaagaagccaguuaaaaaacaaugccaaggaaauuggaaacggcugcuuugaauuuuaccacaaaugcgauaacacgugcauggaaagugucaaaaaugggacuuaugacuacccaaaauacucagaggaagcaaaauuaaacagagaagaaauagaugggguaaagcuggaaucaacaaggauuuaccagauuuuggcgaucuauucaacugucgccaguucauugguacugguagucucccugggggcaaucaguuucuggaugugcucuaaugggucucuacaguguagaauauguauuuaa

SEQ ID NO: 37162 - RNA, 1701 nt, Artificial Sequence
  derived and/or modified CDS sequence (wt) from hemagglutinin__InfluenzaA__ADJ18173
augaaggcaauacuaguaguucugcuauauacauuugcaaccgcaaaugcagacacauuauguauagguuaucaugcgaacaauucaacagacacuguagacacaguacuagaaaagaauguaacaguaacacacucuguuaaccuucuagaagacaagcauaacgggaaacuaugcaaacuaagagggguagccccauugcauuuggguaaauguaacauugcuggcuggauccugggaaauccagagugugaaucacucuccacagcaagcucaugguccuacauuguggaaacaucuaguucagacaauggaacguguuacccaggagauuucaucgauuaugaggagcuaagagagcaauugagcucagugucaucauuugaaagguuugagauauuccccaagacaaguucauggcccaaucaugacucgaacaaagguguaacggcagcauguccucaugcuggagcaaaaagcuucuacaaaaauuuaauauggcuaguuaaaaaaggaaauucauacccaaagcucagcaaauccuacauuaaugauaaagggaaagaaguccucgugcuauggggcauucaccauccaucuacuagugcugaccaacaaagucucuaucagaaugcagaugcauauguuuuuguggggacaucaagauacagcaagaaguucaagccggaaauagcaauaagacccaaagugagggaucaagaagggagaaugaacuauuacuggacacuaguagagccgggagacaaaauaacauucgaagcaacuggaaaucuagugguaccgagauaugcauucgcaauggaaagaaaugcuggaucugguauuaucauuucagauacaccaguccacgauugcaauacaacuugucagacacccaagggugcuauaaacaccagccucccauuucagaauauacauccgaucacaauugggaaauguccaaaauauguaaaaagcacaaaauugagacuggccacaggauugaggaaugucccgucuauucaaucuagaggacuauuuggggccauugccgguuucauugaagggggguggacagggaugguagauggaugguacgguuaucaccaucaaaaugagcaggggucaggauaugcagccgaccugaagagcacacagaaugccauugacaagauuacuaacaaaguaaauucuguuauugaaaagaugaauacacaguucacagcaguagguaaagaguucaaccaccuggaaaaaagaauagagaauuuaaauaaaaaaguugaugaugguuuccuggacauuuggacuuacaaugccgaacuguugguucuauuggaaaaugaaagaacuuuggacuaccacgauucaaaugugaagaacuuauaugaaaagguaagaagccaguuaaaaaacaaugccaaggaaauuggaaacggcugcuuugaauuuuaccacaaaugcgauaacacgugcauggaaagugucaaaaaugggacuuaugacuacccaaaauacucagaggaagcaaaauuaaacagagaagaaauagaugggguaaagcuggaaucaacaaggauuuaccagauuuuggcgaucuauucaacugucgccaguucauugguacugguagucucccugggggcaaucaguuucuggaugugcucuaaugggucucuacaguguagaauauguauuuaa

SEQ ID NO: 37163 - RNA, 1701 nt, Artificial Sequence
  derived and/or modified CDS sequence (wt) from hemagglutinin__InfluenzaA__ADJ18175
augaaggcaauacuaguaguucugcuauauacauuugcaaccgcaaaugcagacacauuauguauagguuaucaugcgaacaauucaacagacacuguagacacaguacuagaaaagaauguaacaguaacacacucuguuaaccuucuagaagacaagcauaacgggaaacuaugcaaacuaagagggguagccccauugcauuuggguaaauguaacauugcuggcuggauccugggaaauccagagugugaaucacucuccacagcaagcucaugguccuacauuguggaaacaucuaguucagacaauggaacguguuacccaggagauuucaucgauuaugaggaacuaagagagcaauugagcucagugucaucauuugaaagguuugagauauuccccaagacaaguucauggcccaaucaugacucgaacaaagguguaacggcagcauguccucaugcuggagcaaaaagcuucuacaaaaauuuaauauggcuaguuaaaaaaggaaauucauacccaaagcucagcaaauccuacauuaaugauaaagggaaagaaguccucgugcuauggggcauucaccauccaucuacuagugcugaccaacaaagucuuuaucagaaugcagaugcauauguuuuuguggggacaucaagauacagcaagaaguucaagccggaaauagcaauaagacccaaagugagggaucaagaagggagaaugaacuauuacuggacacuaguagagccgggagacaaaauaacauucgaagcaacuggaaaucuagugguaccgagauaugcauucgcaauggaaagaaaugcuggaucugguauuaucauuucagauacaccaguccacgauugcaauacaacuugucagacacccaagggugcuauaaacaccagccucccauuucagaauauacauccgaucacaauuggaaaauguccaaaauauguaaaaagcacaaaauugagacuggccacaggauugaggaaugucccgucuauucaaucuagaggacuauuuggggccauugccgguuucauugaagggggguggacagggaugguagauggaugguacgguuaucaccaucaaaaugagcaggggucaggauaugcagccgaccugaagagcacacagaaugccauugacaagauuacuaacaaaguaaauucuguuauugaaaagaugaauacacaguucacagcaguagguaaagaguucaaccaccuggaaaaaagaauagagaauuuaaauaaaaaaguugaugaugguuuccuggacauuuggacuuacaaugccgaacuguugguucuauuggaaaaugaaagaacuuuggacuaccacgauucaaaugugaagaacuuauaugaaaagguaagaagccaguuaaaaaacaaugccaaggaaauuggaaacggcugcuuugaauuuuaccacaaaugcgauaacacgugcauggaaagugucaaaaaugggacuuaugacuacccaaaauacucagaggaagcaaaauuaaacagagaagaaauagaugggguaaagcuggaaucaacaaggauuuaccagauuuuggcgaucuauucaacugucgccaguucauugguacugguagucucccugggggcaaucaguuucuggaugugcucuaaugggucucuacaguguagaauauguauuuaa

SEQ ID NO: 37164 - RNA, 1701 nt, Artificial Sequence
  derived and/or modified CDS sequence (wt) from hemagglutinin__InfluenzaA__ADJ18177
augaaggcaauacuaguaguucugcuauauacauuugcaaccgcaaaugcagacacauuauguauagguuaucaugcgaacaauucaacagacacuguagacacaguacuagaaaagaauguaacaguaacacacucuguuaaccuucuagaagacaagcauaacgggaaacuaugcaaacuaagagggguagccccauugcauuuggguaaauguaacauugcuggcuggauccugggaaauccagagugugaaucacucuccacagcaagcucaugguccuacauuguggaaacaucuaguucagacaauggaacguguuacccaggagauuucaucgauuaugaggagcuaagagagcaauugagcucagugucaucauuugaaagguuugagauauuccccaagacaaguucauggcccaaucaugacucgaacaaagguguaacggcagcauguccucaugcuggagcaaaaagcuucuacaaaaauuuaauauggcuaguuaaaaaaggaaauucauacccaaagcucagcaaauccuacauuaaugauaaagggaaagaaguccucgugcuauggggcauucaccauccaucuaccagugcugaccaacaaagucuuuaucagaaugcagaugcauauguuuuuguggggacaucaagauacagcaagaaguucaagccggaaauagcaauaagacccaaagugaggggucaagaagggagaaugaacuauuacuggacacuaguagagccgggagacaaaauaacauucgaagcaacuggaaaucuagugguaccgagauaugcauucgcaauggaaagaaaugcuggaucugguauuaucauuucagauacaccaguccacgauugcaauacaacuugucagacacccaagggugcuauaaacaccagccucccauuucagaauauacauccgaucacaauuggaaaauguccaaaauauguaaaaagcacaaaauugagacuggccacaggauugaggaauaucccgucuguucaaucuagaggccuauuuggggccauugccgguuucauugaagggggguggacagggaugguagauggaugguacgguuaucaccaucaaaaugagcaggggucaggauaugcagccgaucugaagagcacacagaaugcaauugacaagauuacuaacaaaguaaauucuguuauugaaaagaugaauacacaguucacagcaguagguaaagaguucaaccaccuggaaaaaagaauagagaauuuaaauaaaaaaguugaugaugguuuccuggacauuuggacuuacaaugccgaacuguugguucuauuggaaaaugaaagaacuuuggacuaccacgauucaaaugugaagaacuuauaugaaaagguaagaagccaguuaaaaaacaaugccaaggaaauuggaaacggcugcuuugaauuuuaccacaaaugcgauaacacgugcauggaaagugucaaaaaugggacuuaugacuacccaaaauacucagaggaagcaaaauuaaacagagaagaaauagaugggguaaagcuggaaucaacaaggauuuaccagauuuuggcgaucuauucaacugucgccaguucauugguacugguagucucccugggggcaaucaguuucuggaugugcucuaaugggucucuacaguguagaauauguauuuaa

SEQ ID NO: 37165 - RNA, 1701 nt, Artificial Sequence
  derived and/or modified CDS sequence (wt) from hemagglutinin__InfluenzaA__ADJ40444
augaaggcaauacuaguaguucugcuauauacauuugcaaccgcaaaugcagacacauuauguauagguuaucaugcgaacaauucaacagacacuguagacacaguacuaaaaaagaauguaacaguaacacacucuguuaaccuucuagaagacaagcauaacgggaaacuaugcaaacuaagagggguagccccauugcauuuggguaaauguaacauugcuggcuggauccugggaaauccagagugugaaucacucuccacagcaagcucaugguccuacauuguggaaacaucuaguucagacaauggaacguguuacccaggagauuucaucgauuaugaggagcuaagagagcaauugagcucagugucaucauuugaaagguuugagauauuccccaagacaaguucauggcccaaucaugacucgaacaaagguguaacggcagcauguccucaugcuggagcaaaaagcuucuacaaaaauuuaauauggcuaguuaaaaaaggaaauucauacccaaagcucagcaaauccuacauuaaugacaaagggaaagaaguccucgugcuauggggcauucaccauccaucuacuagugcugaccaacaaagucucuaucagaaugcagaugcauauguuuuuguggggacaucaagauacagcaagaaguucaagccggaaauagcaauaagacccaaagugagggaucaagaagggagaaugaacuauuacuggacacuaguagagccgggagacaaaauaacauucgaagcaacuggaaaucuagugguaccgagauaugcauucgcaauggaaagaaaugcuggaucugguauuaucauuucagauacaccaguccacgauugcaauacaacuugucagacacccaagggugcuauaaacaccagccucccauuucagaauauacauccgaucacaauuggaaaauguccaaaauauguaaaaagcacaaaauugagacuggccacaggauugaggaaugucccgucuauucaaucuagaggccuauuuggggccauugccgguuucauugaagggggguggacagggaugguagauggaugguacgguuaucaccaucaaaaugagcaggggucaggauaugcagccgaccugaagagcacacagaaugccauugacgagauuacuaacaaaguaaauucuguuauugaaaagaugaauacacaguucacagcaguagguaaagaguucaaccaccuggaaaaaagaauagagaauuuaaauaaaaaaguugaugaugguuuccuggacauuuggacuuacaaugccgaacuguugguucuauuggaaaaugaaagaacuuuggacuaccacgauucaaaugugaagaacuuauaugaaaagguaagaagccaguuaaaaaacaaugccaaggaaauuggaaacggcugcuuugaauuuuaccacaaaugcgauaacacgugcauggaaagugucaaaaaugggacuuaugacuacccaaaauacucagaggaagcaaaauuaaacagagaagaaauagaugggguaaagcuggaaucaacaaggauuuaccagauuuuggcgaucuauucaacugucgccaguucauugguacugguagucucccugggggcaaucaguuucuggaugugcucuaaugggucucuacaguguagaauauguauuuaa

SEQ ID NO: 37166 - RNA, 1701 nt, Artificial Sequence
  derived and/or modified CDS sequence (wt) from hemagglutinin__InfluenzaA__ADJ40454
augaaggcaauacuaguaguucugcuauauacauuugcaaccgcaaaugcagacacauuauguauagguuaucaugcgaacaauucaacagacacuguagacacaguacuagaaaagaauguaacaguaacacacucuguuaaccuucuagaagacaagcauaacgggaaacuaugcaaacuaagagggguagccccauugcauuuggguaaaugcaacauugcuggcuggauccugggaaauccagagugugaaucacucuccacagcaagcucaugguccuacauuguggaaacaucuaguucagacaauggaacguguuacccaggagauuucaucgauuaugaggagcuaagagagcaauugagcucagugucaucauuugaaagguuugagauauuccccaagacaaguucauggcccaaucaugacucgaacaaagguguaacggcagcauguccucaugcuggagcaaaaagcuucuacaaaaauuuaauauggcuaguuaaaaaaggaaauucauacccaaagcucagcaaauccuacauuaaugauaaagggaaagaaguccucgugcuauggggcauucaccauccaucuacuagugcugaccaacaaagucucuaucagaaugcagaugcauauguuuuuguggggacaucaagauacagcaagaaguucaagccggaaauagcaauaagacccaaagugaggaaucaagaagggagaaugaacuauuauuggacacuaguagaaccgggagacaaaauaacauucgaagcaacuggaaaucuagugguaccgagauaugcauucgcaauggaaagaaaugcuggaucugguauuaucauuucagauacaccaguccacgauugcaauacaacuugucagacacccaagggugcuauaaacaccagccucccauuucagaauauacauccgaucacaauuggaaaauguccaaaauauguaaaaagcacaaaauugagacuggccacaggauugaggaauaucccgucuauucaaucuagaggccuauuuggggccauugccgguuucauugaagggggguggacagggaugguagauggaugguacgguuaucaccaucaaaaugagcaggggucaggauaugcagccgaccugaagagcacacagaaugccauugacaagauuacuaacaaaguaaauucuguuauugaaaagaugaauacacaguucacagcaguagguaaagaguucaaccaccuggaaaaaagaauagagaauuuaaauaaaaagguugaugaugguuuccuggacauuuggacuuacaaugccgaacuguugguucuauuggaaaaugaaagaacuuuggacuaccacgauucaaaugugaagaacuuauaugaaaagguaagaagccaguuaaaaaacaaugccaaggaaauuggaaacggcugcuuugaauuuuaccacaaaugcgauaacacgugcauggaaagugucaaaaaugggacuuaugacuacccaaaauacucagaggaagcaaaauuaaacagagaagaaauagaugggguagagcuggaaucaacaaggauuuaccagauuuuggcgaucuauucaacugucgccaguucauugguacugguagucucccugggggcaaucaguuucuggaugugcucuaaugggucucuacaguguagaauauguauuuaa

SEQ ID NO: 37167 - RNA, 1701 nt, Artificial Sequence
  derived and/or modified CDS sequence (wt) from hemagglutinin__InfluenzaA__ADJ40464
augaaggcaauacuaguaguucugcuauauacauuugcaaccgcaaauacagacacauuauguauagguuaucaugcgaacaauucaacagacacuguagacacaguacuagaaaagaauguaacaguaacacacucuguuaaccuucuagaagacaagcauaacgggaaacuaugcaaacuaagagggguagccccauugcauuuggguaaauguaacauugcuggcuggauccugggaaauccagagugugaaucacucuccacagcaagcucaugguccuacauuguggaaacaucuaguucagacaauggaacguguuacccaggagauuucaucgauuaugaggagcuaagagagcaauugagcucagugucaucauuugaaagguuugagauauuccccaagacaaguucauggcccaaucaugacucgaacaaagguguaacggcagcauguccucaugcuggagcaaaaagcuucuacaaaaauuuaauauggcuaguuaaaaaaggaaauucauacccaaagcucagcaaauccuacauuaaugauaaagggaaagaaguccucgugcuauggggcauucaccauccaucuacuagugcugaccaacaaagucucuaucagaaugcagaugcauauguuuuuguggggacaucaagauacagcaagaaguucaagccggaaauagcaauaagacccaaagugagggaucaagaagggagaaugaacuauuacuggacacuaguagagccgggagacaaaauaacauucgaagcaacuggaaaucuagugguaccgagauaugcauucgcaauggaaagaaaugcuggaucugguauuaucauuucagauacaccaguccacgauugcaauacaacuugucagacacccaagggugcuauaaacaccagccucccauuucagaauauacauccgaucacaauuggaaaauguccaaaauauguaaaaagcacaaaauugagacuggccacaggauugaggaaugucccgucuauucaaucuagaggccuauuuggggccauugccgguuucauugaagggggguggacagggaugguagauggaugguacgguuaucaccaucaaaaugagcaggggucaggauaugcagccgaccugaagagcacacagaaugccauugacgagauuacuaacaaaguaaauucuguuauugaaaagaugaauacacaguucacagcaguagguaaagaguucaaccaccuggaaaaaagaauagagaauuuaaauaaaaaaguugaugaugguuuccuggacauuuggacuuacaaugccgaacuguugauucuauuggaaaaugaaagaacuuuggacuaccacgauucaaaugugaagaacuuauaugaaaagguaagaagccaguuaaaaaacaaugccaaggaaauuggaaacggcugcuuugaauuuuaccacaaaugcgauaacacgugcauggaaagugucaaaaaugggacuuaugacuacccaaaauacucagaggaagcaaaauuaaacagagaagaaauagaugggguaaagcuggaaucaacaaggauuuaccagauuuuggcgaucuauucaacugucgccaguucauugguacugguagucucccugggggcaaucaguuucuggaugugcucuaaugggucucuacaguguagaauauguauuuaa

SEQ ID NO: 37168 - RNA, 1701 nt, Artificial Sequence
  derived and/or modified CDS sequence (wt) from hemagglutinin__InfluenzaA__ADJ40474
augaaggcaauacuaguaguucugcuauauacauuugcaaccgcaaaugcagacacauuauguauagguuaucaugcgaacaauucaacagacacuguagacacaguacuagaaaagaauguaacaguaacacacucuguuaaccuucuagaagacaagcauaacgggaaacuaugcaaacuaagagggguagccccauugcauuuggguaaauguaacauugcuggcuggauccugggaaauccagagugugaaucacucuccacagcaagcucaugguccuacauuguggaaacaucuaguucagacaauggaacguguuacccaggagauuucaucgauuaugaggagcuaagagagcaauugagcucagugucaucauuugaaagguuugagauauuccccaagacaaguucauggcccaaucaugacucgaacaaagguguaacggcagcauguccucaugcuggagcaaaaagcuucuacaaaaauuugauauggcuaguuaaaaaaggaaauucauacccaaagcucagcaaauccuacauuaaugauaaagggaaagaaguccucgugcuauggggcauucaccauccaucuacuagugcugaccaacaaagucucuaucagaaugcagaugcauauguuuuuguggggacaucaagauacagcaagaaguucaagccggaaauagcaauaagacccaaagugagggaacaagaagggagaaugaacuauuacuggacacuaguagagccgggagacaaaauaacauucgaagcaacuggaaaucuagugguaccgagauaugcauucgcaauggaaagaaaugcuggaucugguauuaucauuucagauacaccaguccacgauugcaauacaacuugucagacacccaaaggugcuauaaacaccagccucccauuucagaauauacauccgaucacaauuggaaaauguccaaaauauguaaaaagcacaaaauugagacuggccacaggauugaggaaugucccgucuauucaaucuagaggccuauuuggggccauugccgguuucauugaagggggguggacagggaugguagauggaugguacgguuaucaccaucaaaaugagcaggggucaggauaugcagccgaccugaagagcacacagaaugccauugacgagauuacuaacaaaguaaauucuguuauugaaaagaugaauacacaguucacagcaguagguaaagaguucaaccaccuggaaaaaagaauagagaauuuaaauaaaaaaguugaugaugguuuccuggacauuuggacuuacaaugccgaacuguugguucuauuggaaaaugaaagaacuuuggacuaccacgauucaaaugugaagaacuuauaugaaaagguaagaagacaguuaaaaaacaaugccaaggaaauuggaaacggaugcuuugaauuuuaccacaaaugcgauaacacgugcauggaaagugucaaaaaugggacuuaugacuacccaaaauacucagaggaagcaaaauuaaacagagaagaaauagaugggguaaagcuggaaucaacaaggauuuaccagauuuuggcgaucuauucaacugucgccaguucauugguacugguagucucccugggggcaaucaguuucuggaugugcucuaaugggucucuacaguguagaauauguauuuaa

SEQ ID NO: 37169 - RNA, 1701 nt, Artificial Sequence
  derived and/or modified CDS sequence (wt) from hemagglutinin__InfluenzaA__ADJ40494
augaaggcaauacuaguaguucugcuauauacauuugcaaccgcaaaugcagacacauuauguauagguuaucaugcgaacaauucaacagacacuguagacacaguacuagaaaagaauguaacaguaacacacucuguugaccuucuagaagacaagcauaacgggaaacuaugcaaacuaagagggguagccccauugcauuuggguaaauguaacauugcuggcuggauccugggaaauccagagugugaaucacucuccacagcaagcucaugguccuacauuguggaaacaucuaguucagacaauggaacguguuacccaggagauuucaucgauuaugaggagcuaagagagcaauugagcucagugucaucauuugaaagguuugagauauuccccaagacaaguucauggcccaaucaugacucgaacaaagguguaacggcagcauguccucaugcuggagcaaaaagcuucuacaaaacuuuaauauggcuaguuaaaaaaggaaauucauacccaaagcucagcaaauccuacauuaaugauaaagggaaagaaguccucgugcuauggggcauucaccauccaucuacuagugcugaccaacaaagucucuaucagaaugcagaugcauauguuuuuguggggacaucaagauacagcaagaaguucaagccggaaauagcaauaagacccaaagugagggaucaagaagggagaaugaacuauuacuggacacuaguagagccgggagacaaaauaacauucgaagcaacuggaaaucuagugguaccgagauaugcauucgcaauggaaagaaaugcuggaucugguauuaucauuucagauacaccaguccacgauugcaauacaacuugucagacacccaagggugcuauaaacaccagccucccauuucagaauauacauccgaucacaauuggaaaauguccaaaauauguaaaaagcacaaaauugagacuggccacaggauugaggaaugucccgucuauucaaucuagaggccuauuuggggccauugccgguuucauugaagggggguggacagggaugguagauggaugguacgguuaucaccaucaaaaugagcaggggucaggauaugcagccgaccugaagagcacacagaaugccauugacgagauuacuaacaaaguaaauucuguuauugaaaagaugaauacacaguucacagcaguagguaaagaguucaaccaccuggaaaaaagaauagagaauuuaaauaaaaaaguugaugaugguuuccuggacauuuggacuuacaaugccgaacuguugguucuauuggaaaaugaaagaacuuuggacuaccacgauucaaaugugaagaacuuauaugaaaagguaagaagccaguuaaaaaacaaugccaaggaaauuggaaacggcugcuuugaauuuuaccacaaaugcgauaacacgugcauggaaagugucaaaaaugggacuuaugacuacccaaaauacucagaggaagcaaaauuaaacagagaagaaauagaugggguaaagcuggaaucaacaaggauuuaccagauuuuggcgaucuauucaacugucgccaguucauugguacugguagucucccugggggcaaucaguuucuggaugugcucuaaugggucucuacaguguagaauauguauuuaa

SEQ ID NO: 37170 - RNA, 1701 nt, Artificial Sequence
  derived and/or modified CDS sequence (wt) from hemagglutinin__InfluenzaA__ADJ40514
augaaggcaguacuaguaguucugcuauauacauuugcaaccacaaaugcagacacauuauguauagguuaucaugcgaacaauucaacagacacuguagacacaguacuagaaaagaauguaacaguaacacacucuguuaaccuucuagaagacaagcauaacgggaaacuaugcaaacuaagagggguagccccauugcauuuggguaaauguaacauugcuggcuggauccugggaaauccagagugugaaucacucuccacagcaagcucaugguccuacauuguggaaacaucuaguucagacaauggaacguguuacccaggagauuucaucgauuaugaggagcuaagagagcaauugagcucagugucaucauuugaaagguuugagauauuccccaagacaaguucauggcccaaucaugacucgaacaaagguguaacggcagcauguccucaugcuggagcaaaaagcuucuacaaaaauuuaauauggcuaguuaaaaaaggaaauucauacccaaagcucagcaaauccuacauuaaugauaaagggaaagaaguccucgugcuauggggcauucaccauccaucuacuagugcugaccaacaaagucucuaucagaaugcagaugcauauguuuuuguggggacaucaagauacagcaagaaguucaagccggaaauagcaauaagacccaaagugaggaaucaagaagggagaaugaacuauuacuggacacuaguagagccgggagacaaaauaacauucgaagcaacuggaaaucuagugguaccgagauaugcauucgcaauggaaagaaaugcuggaucugguauuaucauuucagauacaccaguccacgauugcaauacaacuugucagacacccaagggugcuauaaacaccagccucccauuucagaauauacauccgaucacaauuggaaaauguccaaaauauguaaaaagcacaaaauugagacuggccacaggauugaggaaugucccgucuauucaaucuagaggccuauuuggggccauugccgguuucauugaagggggguggacagggaugguagauggaugguacgguuaucaccaucaaaaugagcaggggucaggauaugcagccgaccugaagagcacacagaaugccauugacgagauuacuaacaaaguaaauucuguuauugaaaagaugaauacacaguucacagcaguagguaaagaguucaaccaccuggaaaaaagaauagagaauuuaaauaaaaagguugaugaugguuuccuggacauuuggacuuacaaugccgaacuguugguucuauuggaaaaugaaagaacuuuggacuaccacgauucaaaugugaagaacuuauaugaaaagguaagaagccaguuaaaaaacaaugccaaggaaauuggaaacggcugcuuugaauuuuaccacaaaugcgauaacacgugcauggaaagugucaaaaaugggacuuaugacuacccaaaauacucagaggaagcaaaauuaaacagagaagaaauagaugggguaaagcuggaaucaacaaggauuuaccagauuuuggcgaucuauucaacugucgccaguucauugguacugguagucucccugggggcaaucaguuucuggaugugcucuaaugggucucuacaguguagaauauguauuuaa

SEQ ID NO: 37171 - RNA, 1701 nt, Artificial Sequence; identical to SEQ ID NO: 34714
  derived and/or modified CDS sequence (wt) from hemagglutinin__InfluenzaA__ADJ40524

SEQ ID NO: 37172 - RNA, 1701 nt, Artificial Sequence
  derived and/or modified CDS sequence (wt) from hemagglutinin__InfluenzaA__ADJ40534
augaaggcaauacuaguaguucugcuauauacauuugcaaccgcaaaugcagacacauuauguauagguuaucaugcgaacaauucaacagacacuguagacacaguacuagaaaagaauguaacaguaacacacucuguuaaccuucuagaagacaagcauaacgggaaacuaugcaaacuaagagggguagccccauugcauuuggguaaauguaacauugcuggcuggauccugggaaauccagagugugagucacucuccaccgcaagcucaugguccuacauuguggaaacaucuaguucagacaauggaacguguuacccaggagauuucaucgauuaugaggagcuaagagagcaauugagcucagugucaucauuugaaagguuugagauauuccccaagacaaguucauggcccaaucaugacucgaacaaagguguaacggcagcauguccucaugcuggagcaaaaagcuucuacaaaaauuuaauauggcuaguuaaaaaaggaaauucauacccaaagcucagcaaauccuacauuaaugauaaagggaaagaaguccucgugcuauggggcauucaccauccaucuacuagugcugaccaacaaagucucuaucagaaugcagaugcauauguuuuuguggggacaucaagauacagcaagaaguucaagccggaaauagcaauaagacccaaagugagggaacaagaagggagaaugaacuauuacuggacacuaguagagccgggagacaaaauaacauucgaagcaacuggaaaucuagugguaccgagauaugcauucgcaauggaaagaaaugcuggaucugguauuaucauuucagauacaccaguccacgauugcaauacaacuugucagacacccaaaggugcuauaaacaccagccucccauuucagaauauacauccgaucacaauuggaaaauguccaaaauauguaaaaagcacaaaauugagacuggccacaggauugaggaaugucccgucuauucaaucuagaggccuauuuggggccauugccgguuucauugaagggggguggacagggaugguagauggaugguacgguuaucaccaucaaaaugagcaggggucaggauaugcagccgaccugaagagcacacagaaugccauugacgagauuacuaacaaaguaaauucuguuauugaaaagaugaauacacaguucacagcaguagguaaagaguucaaccaccuggaaaaaagaauagagaauuuaaauaaaaaaguugaugaugguuuccuggacauuuggacuuacaaugccgaacuguugguucuauuggaaaaugaaagaacuuuggacuaccacgauucaaaugugaagaacuuauaugaaaagguaagaagccaguuaaaaaacaaugccaaggaaauuggaaacggcugcuuugaauuuuaccacaaaugcgauaacacgugcauggaaagugucaaaaaugggacuuaugacuacccaaaauacucagaggaagcaaaauuaaacagagaagaaauagaugggguaaagcuggaaucaacaaggauuuaccagauuuuggcgaucuauucaacugucgccaguucauugguacugguagucucccugggggcaaucaguuucuggaugugcucuaaugggucucuacaguguagaauauguauuuaa

SEQ ID NO: 37173 - RNA, 1701 nt, Artificial Sequence
  derived and/or modified CDS sequence (wt) from hemagglutinin__InfluenzaA__ADJ40554
augaaggcaauacuaguaguucugcuauauacauuugcaaccgcaaaugcagacacauuauguauagguuaucaugcgaacaauucaacagacacuguagacacaguacuagaaaagaauguaacaguaacacacucuguuaaccuucuagaagacaagcauaacgggaaacuaugcaaacuaagagggguagccccauugcauuuggguaaauguaacauugcuggcuggauccugggaaauccagagugugaaucacucuccacagcaagcucaugguccuacauuguggaaacaucuaguucagacaauggaacguguuacccaggagauuucaucgauuaugaggagcuaagagagcaauugagcucagugucaucauuugaaagguuugagauauuccccaauacaaguucauggcccaaucaugacucgaacaaagguguaacggcagcauguccucaugcuggagcaaaaagcuucuacaaaaauuuaauauggcuaguuaaaaaaggaaauucauacccaaagcucagcaaauccuacauuaaugauaaagggaaagaaguccucgugcuauggggcauucaccauccaucuacuagugcugaccaacaaagucucuaucagaaugcagaugcauauguuuuuguggggacaucaagauacagcaagaaguucaagccggaaauagcaauaagacccaaagugagggaucaagaagggagaaugaacuauuacuggacacuaguagagccgggagacaaaauaacauucgaagcaacuggaaaucuagugguaccgagauaugcauucgcaauggaaagaaaugcuggaucugguauuaucauuucagauacaccaguccacgauugcaauacaacuugucagacacccaagggugcuauaaacaccagccucccauuucagaauauacauccgaucacaauuggaaaauguccaaaauauguaaaaagcacaaaauugagacuggccacaggauugaggaaugucccgucuauucaaucuagaggccuauuuggggccauugccgguuucauugaagggggguggacagggaugguagauggaugguacgguuaucaccaucaaaaugagcaggggucaggauaugcagccgaccugaagagcacacagaaugccauugacgagauuacuaacaaaguaaauucuguuauugaaaagaugaauacacaguucacagcaguagguaaagaguucaaccaccuggaaaaaagaauagagaauuuaaauaaaaagguugaugaugguuuccuggacauuuggacuuacaaugccgaacuguugguucuauuggaaaaugaaagaacuuuggacuaccacgauucaaaugugaagaacuuauaugaaaagguaagaagccaguuaaaaaacaaugccaaggaaauuggaaacggcugcuuugaauuuuaccacaaaugcgauaacacgugcauggaaagugucaaaaaugggacuuaugacuacccaaaauacucagaggaagcaaaauuaaacagagaagaaauagaugggguaaagcuggaaucaacaaggauuuaccagauuuuggcgaucuauucaacugucgccaguucauugguacugguagucucccugggggcaaucaguuucuggaugugcucuaaugggucucuacaguguagaauauguauuuaa

SEQ ID NO: 37174 - RNA, 1701 nt, Artificial Sequence
  derived and/or modified CDS sequence (wt) from hemagglutinin__InfluenzaA__ADJ40564
augaaggcaauacuaguaguucugcuguauacauuugcaaccgcaaaugcagacacauuauguauagguuaucaugcgaacaauucaacagacacuguagacacaguacuagaaaagaauguaacaguaacacacucuguuaaccuucuagaagacaagcauaacgggaaacuaugcaaacuaagagggguagccccauugcauuuggguaaauguaacauugcuggcuggauccugggaaauccagagugugaaucacucuccacagcaagcucaugguccuacauuguggaaacaucuaguucagacaauggaacguguuacccaggagauuucaucgauuaugaggagcuaagagagcaauugagcucagugucaucauuugaaagguuugagauauuccccaagacaaguucauggcccaaucaugacucgaacaaagguguaacggcagcauguccucaugcuggagcaaaaagcuucuacaaaaauuuaauauggcuaguuaaaaaaggaaauucauacccaaagcucagcaaauccuacauuaaugauaaagggaaagaaguccucgugcuauggggcauucaccauccaucuacuagugcugaccaacaaagucucuaucagaaugcagaugcauauguuuuuguggggacaucaagauacagcaagaaguucaagccggaaauagcaauaagacccaaagugagggaucaagaagggagaaugaacuauuacuggacacuaguagagccgggagacaaaauaacauucgaagcaacuggaaaucuagugguaccgagauaugcauucgcaauggaaagaaaugcuggaucugguauuaucauuucagauacaccaguccacgauugcaauacaacuugucagacacccaagggugcuauaaacaccagccuaccauuucagaauauacauccgaucacaauuggaaaauguccaaaauauguaaaaagcacaaaauugagacuggccacaggauugaggaaugucccuucuauucaaucuagaggccuauuuggggccauugccgguuucauugaagggggguggacagggaugguagauggaugguacgguuaucaccaucaaaaugagcaggggucaggauaugcagccgaccugaagagcacacagaaugccauugacgagauuacuaacaaaguaaauucuguuauugaaaagaugaauacacaguucacagcaguagguaaagaguucaaccaccuggaaaaaagaauagagaauuuaaauaaaaaaguugaugaugguuuccuggacauuuggacuuacaaugccgaacuguugguucuauuggaaaaugaaagaacuuuggacuaccacgauucaaaugugaagaacuuauaugaaaagguaagaagccaguuaaaaaacaaugccaaggaaauuggaaacggcugcuuugaauuuuaccacaaaugcgauaacacgugcauggaaagugucaaaaaugggacuuaugacuacccaaaauacucagaggaagcaaaauuaaacagagaagaaauagaugggguaaagcuggaaucaacaaggauuuaccagaucuuggcgaucuauucaacugucgccaguucauugguacugguagucucccugggggcaaucaguuucuggaugugcucuaaugggucucuacaguguagaauauguauuuaa

SEQ ID NO: 37175 - RNA, 1701 nt, Artificial Sequence
  derived and/or modified CDS sequence (wt) from hemagglutinin__InfluenzaA__ADJ40574
augaaggcaauacuaguaguucugcuauauacauuugcaaccgcaaaugcagacacauuauguauagguuaucaugcgaacaauucaacagacacuguagacacaguacuagaaaagaauguaacaguaacacacucuguuaaccuucuagaagacaagcauaacgggaaacuaugcaaacuaagagggguagccccauugcauuuggguaaauguaacauugcuggcuggauccugggaaauccagagugugaaucacucuccacagcaagcucaugguccuacauuguggaaacaucuaguucagacaauggaacguguuacccaggagauuucaucgauuaugaggagcuaagagagcaauugagcucagugucaucauuugaaagguuugagauauuccccaagacaaguucauggcccaaucaugacucgaacaaagguguaacggcagcauguccucaugcuggagcaaaaagcuucuacaaaaauuuaauauggcuaguuaaaaaaggaaauucauacccaaagcucagcaaauccuacauuaaugauaaagggaaagaaguccucgugcuauggggcauucaccauccaucuacuagugcugaccaacaaagucucuaucagaaugcagaugcauauguuuuuguggggacaucaagauacagcaagaaguucaagccggaaauagcaauaagacccaaagugagggaucaagaagggagaaugaacuauuacuggacacuaguagagccgggagacaaaauaacauucgaagcaacuggaaaucuugugguaccgagauaugcauucgcaauggaaagaaaugcuggaucugguauuaucauuucagauacaccaguccacgauugcaauacaacuugucagacacccaagggugcuauaaacaccagccucccauuucagaauauacauccgaucacaauuggaaaauguccaaaauauguaaaaagcacaaaauugagacuggccacaggauugaggaaugucccgucuauucaaucuagaggccuauuuggggccauugccgguuucauugaagggggguggacagggaugguagauggaugguacgguuaucaccaucaaaaugagcaggggucaggauaugcagccgaccugaagagcacacagaaugccauugacgagauuacuaacaaaguaaauucuguuauugaaaagaugaauacacaguucacagcaguagguaaagaguucaaccaccuggaaaaaagaauagagaauuuaaauaaaaaaguugaugaugguuuccuggacauuuggacuuacaaugccgaacuguugguucuauuggaaaaugaaagaacuuuggacuaccacgauucaaaugugaagaacuuauaugaaaagguaagaagccaguuaaaaaacaaugccaaggaaauuggaaacggcugcuuugaauuuuaccacaaaugcgauaacacgugcauggaaagugucaaaaaugggacuuaugacuacccaaaauacucagaggaagcaaaauuaaacagagaagaaauagaugggguaaagcuggaaucaacaaggauuuaccagauuuuggcgaucuauucaacugucgccaguucauugguacugguagucucccugggggcaaucaguuucuggaugugcucuaaugggucucuacaguguagaauauguauuuaa

SEQ ID NO: 37176 - RNA, 1701 nt, Artificial Sequence
  derived and/or modified CDS sequence (wt) from hemagglutinin__InfluenzaA__ADJ40584
augaaggcaauacuaguaguucugcuauauacauuugcaaccgcaaaugcagacacauuauguauagguuaucaugcgaacaauucaacagacacuguagacacaguacuagaaaagaauguaacaguaacacacucuguuaaccuucuagaagacaagcauaacgggaaacuaugcaaacuaagagggguagccccauugcauuuggguaaauguaacauugcuggcuggauccugggaaauccagagugugaaucacucuccacagcaagcucaugguccuacauuguggaaacaucuaguucagacaauggaacguguuacccaggagauuucaucgauuaugaggagcuaagagagcaauugagcucagugucaucauuugaaagguuugagauauuccccaagacaaguucauggcccaaucaugacucgaacaaagguguaacggcagcauguccucaugcuggagcaaaaagcuucuacaaaaauuuaauauggcuaguuaaaaaaggaaauucauacccaaagcucagcaaauccuacauuaaugauaaagggaaagaaguccucguacuauggggaauucaccauccaucuacuagugcugaccaacaaagucucuaucagaaugcagaugcauauguuuuuguggggacaucaagauacagcaagaaguucaagccggaaauagcaauaagacccaaagugagggaucaagaagggagaaugaacuauuacuggacacuaguagagccgggagacaaaauaacauucgaagcaacuggaaaucuagugguaccgagauaugcauucgcaauggaaagaaaugcuggaucugguauuaucauuucagauacaccaguccacgauugcaauacaacuugucagacacccaagggugcuauaaacaccagccucccauuucagaauauacauccgaucacaauuggaaaauguccaaaauauguaaaaagcacaaaauugagacuggccacaggauugaggaaugucccgucuauucaaucuagaggccuauuuggggccauugccgguuucauugaagggggguggacagggaugguagauggaugguacgguuaucaccaucaaaaugagcaggggucaggauaugcagccgaccugaagagcacacagcaugccauugacgagauuacuaacaaaguaaauucuguuauugaaaagaugaauacacaguucacagcaguagguaaagaguucaaccaccuggaaaaaagaauagagaauuuaaauaaaaaaguugaugaugguuuccuggacauuuggacuuacaaugccgaacuguugguucuauuggaaaaugaaagaacuuuggacuaccacgauucaaaugugaagaacuuauaugaaaagguaagaagccaguuaaaaaacaaugccaaggaaauuggaaacggcugcuuugaauuuuaccacaaaugcgauaacacgugcauggaaagugucaaaaaugggacuuaugacuacccaaaauacucagaggaagcaaaauuaaacagagaagaaauagaugggguaaagcuggaaucaacaaggauuuaccagauuuuggcgaucuauucaacugucgccaguucauugguacugguagucucccugggggcaaucaguuucuggaugugcucuaaugggucucuacaguguagaauauguauuuaa

SEQ ID NO: 37177 - RNA, 1701 nt, Artificial Sequence; identical to SEQ ID NO: 34714
  derived and/or modified CDS sequence (wt) from hemagglutinin__InfluenzaA__ADJ40594

SEQ ID NO: 37178 - RNA, 1701 nt, Artificial Sequence
  derived and/or modified CDS sequence (wt) from hemagglutinin__InfluenzaA__ADJ40604
augaaggcaauacuaguaguucugcuauauacauuugcaaccgcaaaugcagacacauuauguauagguuaucaugcgaacaauucaacagacacuguagacacaguacuagaaaagaauguaacaguaacacacucuguuaaccuucuagaagacaagcauaacgggaaacuaugcaaacuaagagggguagccccauugcauuuggguaaauguaacauugcuggcuggauccugggaaauccagagugugaaucacucuccacagcaagcucaugguccuacauuguggaaacaucuaguucagacaauggaacguguuacccaggagauuucaucgauuaugaggagcuaagagagcaauugagcucagugucaucauuugaaagguuugagauauuccccaagacaaguucauggcccaaucaugacucgaacaaagguguaacggcagcauguccucaugcuggagcaaaaagcuucuacaaaaauuuaauauggcuaguuaaaaaaggaaauucauacccaaagcucagcaaauccuacauuaaugauaaagggaaagaaguccucgugcuauggggcauucaccauccaucuacuagugcugaccaacaaagucucuaucagaaugcagaugcauauguuuuuguggggacaucaagauacagcaagaaguucaagccggaaauagcaauaagacccaaagugagggaucaagaagggagaaugaacuauuacuggacacuaguagagccgggagacaaaauaacauucgaagcaacuggaaaucuagugguaccgagauaugcauucgcaauggaaagaaaugcuggaucugguauuaucauuucagauacaccaguccacaauugcaauacaacuugucagacacccaagggugcuauaaacaccagccucccauuucagaauauacauccgaucacaauuggaaaauguccaaaauauguaaaaagcacaaaauugagacuggccacaggauugaggaaugucccgucuauucaaucuagaggccuauuuggggccauugccgguuucauugaagggggguggacagggaugguagauggaugguacgguuaucaccaucaaaaugagcaggggucaggauaugcagccgaccugaagagcacacagaaugccauugacgagauuacuaacaaaguaaauucuguuauugaaaagaugaauacacaguucacagcaguagguaaagaguucaaccaccuggaaaaaagaauagagaauuuaaauaaaaagguugaugaugguuuccuggacauuuggacuuacaaugccgaacuguugguucuauuggaaaaugaaagaacuuuggacuaccacgauucaaaugugaagaacuuauaugaaaagguaagaagccaguuaaaaaacaaugccaaggaaauuggaaacggcugcuuugaauuuuaccacaaaugcgauaacacgugcauggaaagugucaaaaaugggacuuaugacuacccaaaauacucagaggaagcaaaauuaaacagagaagaaauagaugggguaaagcuggaaucaacaaggauuuaccagauuuuggcgaucuauucaacugucgccaguucauugguacugguagucucccugggggcaaucaguuucuggaugugcucuaaugggucucuacaguguagaauauguauuuaa

SEQ ID NO: 37179 - RNA, 1701 nt, Artificial Sequence; identical to SEQ ID NO: 37178
  derived and/or modified CDS sequence (wt) from hemagglutinin__InfluenzaA__ADJ40614

SEQ ID NO: 37180 - RNA, 1701 nt, Artificial Sequence; identical to SEQ ID NO: 36001
  derived and/or modified CDS sequence (wt) from hemagglutinin__InfluenzaA__ADJ40634

SEQ ID NO: 37181 - RNA, 1701 nt, Artificial Sequence
  derived and/or modified CDS sequence (wt) from hemagglutinin__InfluenzaA__ADJ40644
augaaggcaauacuaguaguucugcuauauacauuugcaaccgcaaaugcagacacauuauguauagguuaucaugcgaacaauucaacagacacuguagacacaguacuagaaaagaauguaacaguaacacacucuguuaaccuucuagaagacaagcauaacgggaaacuaugcaaacuaagagggguagccccauugcauuuggguaaauguaacauugcuggcuggauccugggaaauccagagugugaaucacucuccacagcaagcucaugguccuacauuguggaaacaucuaguucagacaauggaacguguuacccaggagauuucaucgauuaugaggagcuaagagagcaauugagcucagugucaucauuugaaagguuugagauauuccccaagacaaguucauggcccaaucaugacucgaacaaagguguaacggcagcauguccucaugcuggagcaaaaagcuucuacaaaaauuuaauauggcuaguuaaaaaaggaaauucauacccaaagcucagcaaauccuacauuaaugauaaagggaaagaaguccucgugcuauggggcauucaccauccaucuacuagugcugaccaacaaagucucuaucagaaugcagaugcauauguuuuuguggggacaucaagauacagcaagaaguucaagccggaaauagcaauaagacccaaagugagggaucaagaagggagaaugaauuauuacuggacacuaguagagccgggagacaaaauaacauucgaagcaacuggaaaucuagugguaccgagauaugcauucgcaauggaaagaaaugcuggaucugguauuaucauuucagauacaccaguccacgauugcaauacaacuugucagacacccaagggugcuauaaacaccagccucccauuucagaauauacauccgaucacaauuggaaaauguccaaaauauguaaaaagcacaaaauugagacuggccacaggauugaggaaugucccgucuauucaaucuagaggccuauuuggggccauugccgguuucauugaagggggguggacagggaugguagauggaugguacgguuaucaccaucaaaaugagcaggggucaggauaugcagccgaccugaagagcacacagaaugccauugacgagauuacuaacaaaguaaauucuguuauugaaaagaugaauacacaguucacagcaguagguaaagaguucaaccaccuggaaaaaagaauagagaauuuaaauaaaaaaguugaugaugguuuccuggacauuuggacuuacaaugccgaacuguugguucuauuggaaaaugaaagaacuuuggacuaccacgauucaaaugugaagaacuuauaugaaaagguaagaagccaguuaaaaaacaaugccaaggaaauuggaaacggcugcuuugaauuuuaccacaaaugcgauaacacgugcauggaaagugucaaaaaugggacuuaugacuacccaaaauacucagaggaagcaaaauuaaacagagaagaaauagaugggguaaagcuggaaucaacaaggauuuaccagauuuuggcgaucuauucaacugucgccaguucauugguacugguagucucccugggggcaaucaguuuuuggaugugcucuaaugggucucuacaguguagaauauguauuuaa

SEQ ID NO: 37182 - RNA, 1701 nt, Artificial Sequence; identical to SEQ ID NO: 35463
  derived and/or modified CDS sequence (wt) from hemagglutinin__InfluenzaA__ADJ40654

SEQ ID NO: 37183 - RNA, 1701 nt, Artificial Sequence; identical to SEQ ID NO: 34714
  derived and/or modified CDS sequence (wt) from hemagglutinin__InfluenzaA__ADJ40664

SEQ ID NO: 37184 - RNA, 1701 nt, Artificial Sequence; identical to SEQ ID NO: 34714
  derived and/or modified CDS sequence (wt) from hemagglutinin__InfluenzaA__ADJ40674

SEQ ID NO: 37185 - RNA, 1701 nt, Artificial Sequence
  derived and/or modified CDS sequence (wt) from hemagglutinin__InfluenzaA__ADJ41816
augaagacuaucauugcuuugagcuacauguucugucugguuuucgcccaaaaccuucccggaaaugacaacagcacagcaacgcugugccugggacaucaugcagugccaaacggaacgcuagugaaaacaaucacgaaugaucagauugaagugacuaaugcuacugagcugguucagaguuccucaacagguaggauaugcgacaguccucaccgaauccuugaugggaaaaacugcacacugauagaugcucuauugggagacccucauugugauggcuuccaaaaugagaaaugggaccuuuuuguugaacgcagcaaagcuuucagcaacuguuacccuuaugaugugccagauuaugccucccuuaggucacuaguugccucaucaggcacccuggaguuuaucaaugaaggcuucaauuggacuggagucacucagagugggggaagcuguacuugcaaaaggggaucuaaugacaguuucuucaguagacugaacugguuguacgaaucagaaagcaaauauccagugcugaacgugacuaugccaaacaauggcaaauuugacaaauuguacauuugggggauucaccacccgagcacggacaaagaacaaaccaaccuauauauucgagcaucagggagagucacagucucuaccaagagaagccagcaaacuguaaucccgaauaucgggucuagacccuggguaaggggucugucuaguagaauaaguaucuauuggacaauaguaaaaccgggagacauacuguuaauuaguagcacugggaaccuaauugcuccucgggguuacuucaaaauacgcacugggaaaagcucaauaaugaggucagaugcaccuauuggcaccugcaguucugaaugcaucacuccaaauggaagcauucccaaugacaagcccuuucaaaacguaaacaagaucacauauggggcaugucccagguauguuaagcaaaacacucugaaguuggcaacagggaugcggaauguaccagagaaacaaacuagaggcauauucggcgcaauagcagguuucauagaaaaugguugggagggaaugguagacgguugguacgguuucaggcaucaaaauucugagggcacaggacaagcagcagaucuuaaaagcacucaagcagcaaucgaccaaaucaaugggaaacugaauaggguaaucgagaaaacgaacgagaaauuccaucaaaucgaaaaggaauucucagaaguagaagggagaauucaggaccucgagaaauauguugaagacacuaaaauagaucucuggucuuacaacgcggagcuucuugucgcucuggagaaccaacauacaauugaucugacugacucagaaaugaacaaacuguuugaaaaaacaaggaaacaacugagggaaaaugcugaggacaugggcaaugguugcuucaaaauauaccacaaaugugacaaugcuugcauagggucaaucagaaauggaacuuaugaccaugauguauacagagacgaagcauuaaacaaccgguuucagaucaaagguguugagcugaagucaggauacaaagacuggauccuauggauuuccuuugccauaucaugcuuuuugcuuuguguuguuuugcugggguucaucaugugggccugccaaaaaggcaacauuaggugcaacauuugcauuuga

SEQ ID NO: 37186 - RNA, 1701 nt, Artificial Sequence; identical to SEQ ID NO: 35767
  derived and/or modified CDS sequence (wt) from hemagglutinin__InfluenzaA__ADJ56640

SEQ ID NO: 37187 - RNA, 1701 nt, Artificial Sequence
  derived and/or modified CDS sequence (wt) from hemagglutinin__InfluenzaA__ADJ56650
augaaggcaauacuaguaguucugcuauauacauuugcaaccgcaaaugcagacacauuauguauagguuaucaugcgaacaauucaacagacacuguagacacaguacuagaaaagaauguaacaguaacacacucuguuaaccuucuagaagacaagcauaacgggaaacuaugcaaacuaagagggguagccccauugcauuuggguaaauguaacauugcuggcuggauccugggaaauccagagugugaaucacucuccacagcaagcucaugguccuacauuguggaaacaucuaguucagacaauggaacguguuacccaggagauuucaucgauuaugaggagcuaagagagcaauugagcucagugucaucauuugaaagguuugagauauuccccaagacaaguucauggcccaaucaugacccgaacaaagguguaacggcagcauguccucaugcuggagcaaaaagcuucuacaaaaauuuaauauggcuaguuaaaaaaggaaauucauacccaaagcucagcaaauccuacauuaaugauaaagggaaagaaguccucgugcuauggggcauucaccauccaucuacuagugcugaccaacaaagucucuaucagaaugcagaugcauauguuuuuguggggacaucaagauacagcaagaaguucaagccggaaauagcaauaagacccaaagugagggaucaagaagggagaaugaacuauuacuggacacuaguagagccgggagacaaaauaacauucgaagcaacuggaaaucuagugguaccgagauaugcauucgcaauggaaagaaaugcuggaucugguauuaucauuucagauacaccaguccacgauugcaauacaacuugucagacacccaagggugcuauaaacaccagccucccauuucagaauauacauccgaucacaauuggaaaauguccaaaauauguaaaaagcacaaaauugagacuggccacaggauugaggaaugucccgucuauucaaucuagaggccuauuuggggccauugccgguuucauugaagggggauggacagggaugguagauggaugguacgguuaucaccaucaaaaugagcaggggucaggauaugcagccgaccugaagagcacacagaaugccauugacgagauuacuaacaaaguaaauucuguuauugaaaagaugaauacacaguucacagcaguagguaaagaguucaaccaccuggaaaaaagaauagagaauuuaaauaaaaaaguugaugaugguuuccuggacauauggacuuacaaugccgaacuguugguucuauuggaaaaugaaagaacuuuggacuaccacgauucaaaugugaagaacuuauaugaaaagguaagaagccaguuaaaaaacaaugccaaggaaauuggaaacggcugcuuugaauuuuaccacaaaugcgauaacacgugcauggaaagugucaaaaaugggacuuaugacuacccaaaauacucagaggaagcaaaauuaaacagagaagaaauagaugggguaaagcuggaaucaacaaggauuuaccagauuuuggcgaucuauucaacugucgccaguucauugguacugguagucucccugggggcaaucaguuucuggaugugcucuaaugggucucuacaguguagaauauguauuuaa

SEQ ID NO: 37188 - RNA, 1701 nt, Artificial Sequence; identical to SEQ ID NO: 34772
  derived and/or modified CDS sequence (wt) from hemagglutinin__InfluenzaA__ADJ67983

SEQ ID NO: 37189 - RNA, 1701 nt, Artificial Sequence
  derived and/or modified CDS sequence (wt) from hemagglutinin__InfluenzaA__ADJ67984
augaaggcaauacuaguaguucugcuauauacauuugcaaccgcaaaugcagacacauuauguauagguuaucaugcgaacaauucaacagacacuguagacacaguacuagaaaagaauguaacaguaacacacucuguuaaccuucuagaagacaagcauaacgggaaacuaugcaaacuaagagggguagccccauugcauuuggguaaauguaacauugcuggcuggauccugggaaacccagagugugaaucacucuccacagcaagcucaugguccuacauuguggaaacaucuaguucagacaauggaacguguuacccaggagauuucaucgauuaugaggagcuaagagagcaauugagcucagugucaucauuugaaagguuugagauauuccccaaaacaaguucauggcccaaucaugacucgaacaaagguguaacggcagcauguccucaugcuggagcaaaaagcuucuacaaaaauuuaauauggcuaguuaaaaaaggaaauucauacccaaagcucagcaaauccuacauuaaugauaaagggaaagaaguccucgugcuauggggcauucaccauccaucuacuagugcugaccaacaaagucucuaucagaaugcagaugcauauguuuuuguggggacaucaagauacagcaagaaguucaagccggaaauagcaauaagacccaaagugagggaucaagaagggagaaugaacuauuacuggacacuaguagagccgggagacaaaauaacauucgaagcaacuggaaaucuagugguaccgagauaugcauucgcaauggaaagaaaugcuggaucugguauuaucauuucagauacaccaguccacgauugcaauacaacuugucagacacccaagggugcuauaaacaccagccucccauuucagaauauacauccgaucacaauuggaaaauguccaaaauauguaaaaagcacaaaauugagacuggccacaggauugaggaaugucccgucuauucaaucuagaggccuauuuggggccauugccgguuucauugaagggggguggacagggaugguagauggaugguacgguuaucaccaucaaaaugagcaggggucaggauaugcagccgaccugaagagcacacagaaugccauugacgagauuacuaacaaaguaaauucuguuauugaaaagaugaauacacaguucacagcaguagguaaagaguucaaccaccuggaaaaaagaauagagaauuuaaauaaaaaaauugaugaugguuuccuggacauuuggacuuacaaugcagaacuguugguucuauuggaaaaugaaagaacuuuggacuaccacgauucaaaugugaagaacuuauaugaaaagguaagaagccaguuaaaaaacaaugccaaggaaauuggaaacggcugcuuugaauuuuaccacaaaugcgauaacacgugcauggaaagugucaaaaaugggacuuaugacuacccaaaauacucagaggaagcaaaauuaaacagagaagaaauagaugggguaaagcuggaaucaacaaggauuuaccagauuuuggcgaucuauucaacugucgccaguucauugguacugguagucucccugggggcaaucaguuucuggaugugcucuaaugggucucuacaguguagaauauguauuuaa

SEQ ID NO: 37190 - RNA, 1701 nt, Artificial Sequence; identical to SEQ ID NO: 34772
  derived and/or modified CDS sequence (wt) from hemagglutinin__InfluenzaA__ADJ67985

SEQ ID NO: 37191 - RNA, 1701 nt, Artificial Sequence
  derived and/or modified CDS sequence (wt) from hemagglutinin__InfluenzaA__ADJ80241
augaaggcaauacuaguaguucugcuauauacauuugcaaccgcaaaugcagacacauuauguauagguuaucaugcgaacaauucaacagacacuguagacacaguacuagaaaagaauguaacaguaacacacucuguuaaccuucuagaagacaagcauaacgggaaacuaugcaaacuaagagggguagccccauugcauuuggguaaauguaacauugcuggcuggauccugggaaauccagagugugaaucacucuccacagcaagcucaugguccuacauuguggaaacaucuaguucagacaauggaacguguuacccaggagauuucaucgauuaugaggagcuaagagagcaauugagcucagugucaucauuugaaagguuugagauauuccccaagacaaguucauggcccaaucaugacucgaacaaagguguaacggcagcauguccucaugcuggagcaaaaagcuucuacaaaaauuuaauauggcuaguuaaaaaaggaaauucauacccaaagcucagcaaauccuacauuaaugauaaagggaaagaaguccucgugcuauggggcauucaccauccaucuacuagugcugaccaacaaagucucuaucagaaugcagaugcauauguuuuuguggggacaucaagauacagcaagaaguucaagccggaaauagcaauaagacccaaagugaggaaucaagaagggagaaugaacuauuacuggacacuaguagagccgggagacaaaauaacauucgaagcaacuggaaaucuagugguaccgagauaugcauucgcaauggaaagaaaugcuggaucugguauuaucauuucagauacaccaguccacgauugcaauacaacuugucagacacccaagggugcuauaaacaccagccucccauuucagaauauacauccgaucacaauuggaaaauguccaaaauauguaaaaagcacaaaauugagacuggccacaggauugaggaaugucccgucuauucaaucuagaggccuauuuggggccauugccgguuucauugaagggggguggacagggaugguagauggaugguacgguuaucaccaucaaaaugagcaggggucaggauaugcagccgaccugaagagcacacagaaugccauugacaagauuacuaacaaaguaaauucuguuauugaaaagaugaauacacaguucacagcaguagguaaagaguucaaccaccuggaaaaaagaauagagaauuuaaauaaaaaaguugaugaugguuuccuggacauuuggacuuacaaugccgaacuguugguucuauuggaaaaugaaagaacuuuggacuaccacgauucaaaugugaagaacuuauaugaaaagguaagaagccaguuaaaaaacaaugccaaggaaauuggaaacggcugcuuugaauuuuaccacaaaugcgauaacacgugcauggaaagugucaaaaaugggacuuaugacuacccaaaauacucagaggaagcaaaauuaaacagagaagaaauagaugggguaaagcuggaaucaacaaggauuuaccagauuuuggcgaucuauucaacugucgccaguucauugguacugguagucucccugggggcaaucaguuucuggaugugcucuaaugggucucuacaguguagaauauguauuuaa

SEQ ID NO: 37192 - RNA, 1701 nt, Artificial Sequence
  derived and/or modified CDS sequence (wt) from hemagglutinin__InfluenzaA__ADJ80242
augaaggcaauacuaguaguucugcuauauacauuugcaaccgcaaaugcagacacauuauguauagguuaucaugcgaacaauucaacagacacuguagacacaguacuagaaaagaauguaacaguaacacacucuguuaaccuucuagaagacaagcauaacgggaaacuaugcaaacuaagagggguagccccauugcauuuggguaaauguaacauugcuggcuggauccugggaaauccagagugugaaucacucuccacagcaagcucaugguccuacauuguggaaacaucuaguucagacaauggaacguguuacccaggagauuucauugauuaugaggagcuaagagagcaauugagcucagugucaucauuugaaagguuugagauauuccccaagacaaguucauggcccaaucaugacucgaacaaagguguaacggcagcauguccucaugcuggagcaaaaagcuucuacaaaaauuuaauauggcuaguuaaaaaaggaaauucauacccaaagcucagcaaauccuacauuaaugauaaagggaaagaaguccucgugcuauggggcauucaccauccaucuacuagugcugaccaacaaagucucuaucagaaugcagaugcauauguuuuuguggggacaucaagauacagcaagaaguucaagccggaaauagcaauaagacccaaagugagggaucaagaagggagaaugaacuauuacuggacacuaguagagccgggagacaaaauaacauucgaagcaacuggaaaucuagugguaccgagauaugcauucgcaauggaaagaaaugcuggaucugguauuaucauuucagauacaccaguccacgauugcaauacaacuugucagacacccaagggugcuauaaacaccagccucccauuucagaauauacauccgaucacaauuggaaaauguccaaaauauguaaaaagcacaaaauugagacuggccacaggauugaggaaugucccgucuauucaaucuagaggccuauuuggggccauugccgguuucauugaagggggguggacagggaugguagauggaugguacgguuaucaccaucaaaaugagcaggggucaggauaugcagccgaccugaagagcacacagaaugccauugacgagauuacuaacaaaguaaauucuguuauugaaaagaugaauacacaguucacagcaguagguaaagaguucaaccaccuggaaaaaagaauagagaauuuaaauaaaaaaguugaugaugguuuccuggacauuuggacuuacaaugccgaacuguugguucuauuggaaaaugaaagaacuuuggacuaccacgauucaaaugugaagaacuuauaugaaaagguaagaagccaguuaaaaaacaaugccaaggaaauuggaaacggcugcuuugaauuuuaccacaaaugcgauaacacgugcauggaaagugucaaaaaugggacuuaugacuacccaaaauacucagaggaagcaaaacuaaacagagaagaaauagaugggguaaagcuggaaucaacaaggauuuaccagauuuuggcgaucuauucaacugccgccaguucauugguacugguagucucccugggggcaaucaguuucuggaugugcucuaaugggucucuacaguguagaauauguauuuaa

SEQ ID NO: 37193 - RNA, 1701 nt, Artificial Sequence
  derived and/or modified CDS sequence (wt) from hemagglutinin__InfluenzaA__ADJ80243
augaaggcaauacuaguaguucugcuauauacauuugcaaccgcaaaugcagacacauuauguauagguuaucaugcgaacaauucaacagacacuguagacacaguacuagaaaagaauguaacaguaacacacucuguuaaccuucuagaagacaagcauaacgggaaacuaugcaaacuaagagggguagccccauugcauuuggguaaauguaacauugcuggcuggauccugggaaauccagagugugaaucacucuccacagcaagcucaugguccuacauuguggaaacaucuaguucagacaauggaacguguuacccaggagauuucaucaauuaugaggagcuaagagagcaauugagcucagugucaucauuugaaagguuugagauauuccccaagacaaguucauggcccaaucaugacucgaacaaagguguaacggcagcauguccucaugcuggagcaaaaagcuucuacaaaaauuuaauauggcuaguuaaaaaaggaaauucauacccaaagcucagcaaauccuacauuaaugauaaagggaaagaaguccucgugcuguggggcauucaccauccaucuacuagugcugaccaacaaagucucuaucagaaugcagaugcauauguuuuuguggggacaucaagauacagcaagaaguucaagccggaaauagcaauaagacccaaagugagggaucaagaagggagaaugaacuauuacuggacacuaguagagccgggagacaaaauaacauucgaagcaacuggaaaucuagugguaccgagauaugcauucgcaauggaaagaaaugcuggaucugguauuaucaucucagauacaccaguccacgauugcaauacaacuugucagacacccaagggugcuauaaacaccagccucccauuucagaauauacauccgaucacaauuggaaaauguccaaaauauguaaaaagcacaaaauugagacuggccacaggauuaaggaaugucccgucuauucaaucuagaggccuauuuggggccauugccgguuucauugaagggggguggacagggaugguagauggaugguacgguuaucaccaucaaaaugagcaggggucaggauaugcagccgaccugaaaagcacacagaaugccauugacaagauuacuaacaaaguaaauucuguuauugaaaagaugaauacacaguucacagcaguagguaaagaguucaaccaccuggaaaaaagaauagagaauuuaaauaaaaaaguugaugaugguuuccuggacauuuggacuuacaaugccgaacuguugguucuauuggaaaaugaaagaacuuuggacuaccacgauucaaaugugaagaacuuauaugaaaagguaagaagccaguuaaaaaacaaugccaaggaaauuggaaacggcugcuuugaauuuuaccacaaaugcgauaacacgugcauggaaagugucaaaaaugggacuuaugacuacccaaaauacucagaggaagcaaaauuaaacagagaagaaauagaugggguaaagcuggaaucaacaaggauuuaccagauuuuggcgaucuauucaacugucgccaguucauugguacugguagucucccugggggcaaucaguuucuggaugugcucuaaugggucucuacaguguagaauauguauuuaa

SEQ ID NO: 37194 - RNA, 1701 nt, Artificial Sequence; identical to SEQ ID NO: 34681
  derived and/or modified CDS sequence (wt) from hemagglutinin__InfluenzaA__ADJ80634

SEQ ID NO: 37195 - RNA, 1701 nt, Artificial Sequence
  derived and/or modified CDS sequence (wt) from hemagglutinin__InfluenzaA__ADJ80644
augaaggcaauacuaguaguucugcuauauacauuugcaaccgcaaaugcagacacauuauguauagguuaucaugcgaacaauucaacagacacuguagacacaguacuagaaaagaauguaacaguaacacacucuguuaaccuucuagaagacaagcauaacgggaaacuaugcaaacuaagagggguagccccauugcauuuggguaaauguaacauugcuggcuggauccugggaaauccagagugugacucacucuccacagcaagcucaugguccuacauuguggaaacaucuaguucagacaauggaacguguuacccaggagauuucaucgauuaugaggagcuaagagagcaauugagcucagugucaucauuugaaagguuugagauguuccccaagacaaguucauggcccaaucaugacucgaacaaagguguaacggcagcauguccucaugcuggagcaaaaagcuucuacaaaaauuuaauauggcuaguuaaaaaaggaaauucauacccaaagcucagcaaauccuacauuaaugauaaagggaaagaaguccucgugcuauggggcauucaccauccaucuacuagugcugaccaacaaagucucuaucagaaugcagaugcauauguuuuuguggggacaucaagauacagcaagaaguucaagccggaaauagcaauaagacccaaagugagggaucaagaagggagaaugaacuauuacuggacacuaguagagccgggagacaaaauaacauucgaagcaacuggaaaucuagugguaccgagauaugcauucgcaauggaaagaaaugcuggaucugguauuaucauuucagauacaccaguccacgauugcaauacaacuugucagacacccaagggugcuauaaacaccagccucccauuucagaauauacauccgaucacaauuggaaaauguccaaaauauguaaaaagcacaaaauugagacuggccacaggauugaggaaugucccgucuauucaaucuagaggccuauuuggggccauugccgguuucauugaagggggguggacagggaugguagauggaugguacgguuaucaccaucaaaaugagcaggggucaggauaugcagccgaccugaagagcacacagaaugccauugacgagauuacuaacaaaguaaauucuguuauugaaaagaugaauacacaguucacagcaguagguaaagaguucaaccaccuggaaaaaagaauagagaauuuaaauaaaaaaguugaugaugguuuccuggacauuuggacuuacaaugccgaacuguugguucuauuggaaaaugaaagaacuuuggacuaccacgauucaaaugugaagaacuuauaugaaaagguaagaagccaguuaaaaaacaaugccaaggaaauuggaaacggcugcuuugaauuuuaccacaaaugcgauaacacgugcauggaaagugucaaaaaugggacuuaugacuacccaaaauacucagaggaagcaaaauuaaacagagaagaaauagaugggguaaagcuggaaucaacaaggauuuaccagauuuuggcgaucuauucaacugucgccaguucauugguacugguagucucccugggggcaaucaguuucuggaugugcucuaaugggucucuacaguguagaauauguauuuaa

SEQ ID NO: 37196 - RNA, 1701 nt, Artificial Sequence
  derived and/or modified CDS sequence (wt) from hemagglutinin__InfluenzaA__ADJ80654
augaaggcaauacuaguaguucugcuauauacauuugcaaccgcaaaugcagacacauuauguauagguuaucaugcgaacaauucaacagacacuguagacacaguacuagaaaagaauguaacaguaacacacucuguuaaccuucuagaagacaagcauaacgggaaacuaugcaaacuaagagggguagccccauugcauuuggguaaauguaacauugcuggcuggauccugggaaauccagagugugacucacucuccacagcaagcucaugguccuacauuguggaaacaucuaguucagacaauggaacguguuacccaggagauuucaucgauuaugaggagcuaagagagcaauugagcucagugucaucauuugaaagguuugagauguuccccaagacaaguucauggcccaaucaugacucgaacaaagguguaacggcagcauguccucaugcuggagcaaaaagcuucuacaaaaauuuaauauggcuaguuaaaaaaggaaauucauacccaaagcucagcaaauccuacauuaaugauaaagggaaagaaguccucgugcuauggggcauucaccauccaucuacuagugcugaccaacaaagucucuaucagaaugcagaugcauauguuuuuguggggacaucaagauacagcaagaaguucaagccggaaauagcaauaagacccaaagugagggaucaagaagggagaaugaacuauuacuggacacuaguagagccgggagacaaaauaacauucgaagcaacuggaaaucuagugguaccgagauaugcauucgcaauggaaagaaaugcuggaucugguauuaucauuucagauacaccaguccacgauugcaauacaacuugucagacacccaagggugcuauaaacaccagccucccauuucagaauauacauccgaucacaauuggaaaauguccaaaauauguaaaaagcacaaaauugagacuggccacaggauugaggaaugucccgucuauucaaucuagaggccuauuuggggccauugccgguuucauugaagggggguggacagggaugguagauggaugguacgguuaucaccaucaaaaugagcaggggucaggauaugcagccgaccugaagagcacacagaaugccauugacgagauuacuaacaaaguaaauucuguuauugaaaagaugaauacacaguucacagcaguagguaaagaguucaaccaccuggaaaaaagaauagagaauuuaaauaaaaaaguugaugaugguuuccuggacauuuggacuuacaaugccgaacuguugguucuauuggaaaaugaaagaacuuuggacuaccacgauucaaaugugaagaacuuauaugaaaagguaagaagccaguuaaaaaacaaugccaaggaaauuggaaacggcugcuuugaauuuuaccacaaaugcgauaacacgugcauggaaagugucaaaaaugggacuuaugauuacccaaaauacucagaggaagcaaaauuaaacagagaagaaauagaugggguaaagcuggaaucaacaaggauuuaccagauuuuggcgaucuauucaacugucgccaguucauugguacugguagucucccugggggcaaucaguuucuggaugugcucuaaugggucucuacaguguagaauauguauuuaa

SEQ ID NO: 37197 - RNA, 1701 nt, Artificial Sequence
  derived and/or modified CDS sequence (wt) from hemagglutinin__InfluenzaA__ADJ80674
augaaggcaauacuaguaguucugcuauauacauuugcaaccgcaaaugcagacacauuauguauagguuaucaugcgaacaauucaacagacacuguagacacaguacuagaaaagaauguaacaguaacacacucuguuaaccuucuagaagacaagcauaacgggaaacuaugcaaacuaagagggguagccccauugcauuuggguaaauguaacauugcuggcuggauccugggaaauccagagugugaaucacucuccacagcaagcucaugguccuacauuguggaaacaucuaguucagacaauggaacguguuacccaggagauuucaucgauuaugaggagcuaagagagcaauugagcucagugucaucauuugaaagguuugagauauuccccaagacaaguucauggcccaaucaugacucgaacaaagguguaacggcagcauguccucaugcuggagcaaaaagcuucuacaaaaauuuaauauggcuaguuaaaaaaggaaauucauacccaaaacucagcaaauccuacauuaaugauaaagggaaagaaguccucgugcuauggggcauucaccauccaucuacuagugcugaccaacaaagucucuaucagaaugcagaugcauauguuuuuguggggacaucaagauacagcaagaaguucaagccggaaauagcaauaagacccaaagugagggaucaagaagggagaaugaacuauuacuggacacuaguagagccgggagacaaaauaacauucgaagcaacuggaaaucuagugguaccgagauaugcauucgcaauggaaagaaaugcuggaucugguauuaucauuucagauacaccaguccacgauugcaauacaacuugucagacacccaagggugcuauaaacaccagccucccauuucagaauauacauccgaucacaauuggaaaauguccaaaauauguaaaaagcacaaaauugagacuggccacaggauugaggaaugucccgucuauucaaucuagaggccuauuuggggccauugccggcuucauugaagggggguggacagggaugguagauggaugguacgguuaucaccaucaaaaugagcaggggucaggauaugcagccgaccugaagagcacacagaaugccauugacaagauuacuaacaaaguaaauucuguuauugaaaagaugaauacacaguucacagcaguagguaaagaguucaaccaccuggaaaaaagaauagagaauuuaaauaaaaaaguugaugaugguuuccuggacauuuggacuuacaaugccgaacuguugguucuauuggaaaaugaaagaacuuuggacuaccacgauucaaaugugaagaacuuauaugaaaagguaagaagccaguuaaaaaacaaugccaaggaaauuggaaacggcugcuuugaauuuuaccacaaaugcgauaacacgugcauggaaagugucaaaaaugggacuuaugacuacccaaaauacucagaggaagcaaaauuaaacagagaagaaauagaugggguaaagcuggaaucaacaaggauuuaccagauuuuggcgaucuauucaacugucgccaguucauugguacugguagucucccugggggcaaucaguuucuggaugugcucuaaugggucucuacaguguagaauauguauuuaa

SEQ ID NO: 37198 - RNA, 1701 nt, Artificial Sequence
  derived and/or modified CDS sequence (wt) from hemagglutinin__InfluenzaA__ADJ80684
augaaggcaauacuaguaguucugcuauauacauuugcaaccgcaaaugcagacacauuauguauagguuaucaugcgaacaauucaacagacacuguagacacaguacuagaaaagaauguaacaguaacacacucuguuaaccuucuagaagacaagcauaacgggaaacuaugcaaacuaagagggguagccccauugcauuuggguaaauguaacauugcuggcuggauccugggaaauccagagugugaaucacucuccacagcaagcucaugguccuacauuguggaaacaucuaguucagacaauggaacguguuacccaggagauuucaucgauuaugaggaacuaagagagcaauugagcucagugucaucauuugaaagguuugagauauuccccaagacaaguucauggcccaaucaugacucgaacaaagguguaacggcagcauguccucaugcuggagcaaaaagcuucuacaaaaauuuaauauggcuaguuaaaaaaggaaauucauacccaaagcucagcaaauccuacauuaaugauaaagggaaagaaguccucgugcuauggggcauucaccauccaucuacuagugcugaccaacaaagucucuaucagaaugcagaugcauauguuuuuguggggacaucaagauacagcaagaaguucaagccggaaauagcaauaagacccaaagugagggaucaagaagggagaaugaacuauuacuggacacuaguagagccgggagacaaaauaacauucgaagcaacuggaaaucuagugguaccgagauaugcauucgcaauggaaagaaaugcuggaucugguauuaucauuucagauacaccaguccacgauugcaauacaacuugucagacacccaagggugcuauaaacaccagccucccauuucagaauauacauccgaucacaauuggaaaauguccaaaauauguaaaaagcacaaaauugagacuggccacaggauugaggaaugucccgucuauucaaucuagaggccuauuuggggccauugccgguuucauugaagggggguggacagggaugguagauggaugguacgguuaucaccaucaaaaugagcaggggucaggauaugcagccgaccugaagagcacacagaaugccauugacaagauuacuaacaaaguaaauucuguuauugaaaagaugaauacacaguucacagcaguagguaaagaguucaaccaccuggaaaaaagaauagagaauuuaaauaaaaaaguugaugaugguuuccuggacauuuggacuuacaaugccgaacuguugguucuauuggaaaaugaaagaacuuuggacuaccacgauucaaaugugaagaacuuauaugaaaagguaagaagccaguuaaaaaacaaugccaaggaaauuggaaacggcugcuuugaauuuuaccacaaaugcgauaacacgugcauggaaagugucaaaaaugggacuuaugacuacccaaaauacucagaggaagcaaaauuaaacagagaagaaauagaugggguaaagcuggaaucaacaaggauuuaccagauuuuggcgaucuauucaacugucgccaguucauugguacugguagucucccugggggcaaucaguuucuggaugugcucuaaugggucucuacaguguagaauauguauuuaa

SEQ ID NO: 37199 - RNA, 1701 nt, Artificial Sequence
  derived and/or modified CDS sequence (wt) from hemagglutinin__InfluenzaA__ADJ80694
augaaggcaauacuaguaguucugcuauauacauuugcaaccgcaaaugcagacacauuauguauagguuaucaugcgaacaauucaacagacacuguagacacaguacuagaaaagaauguaacaguaacacacucuguuaacauucuagaagacaaucauaacgggaaacuaugcaaacuaagagggguagccccauugcauuuggguaaauguaacauugcuggcuggauccugggaaauccagagugugaaucacucuccacagcaagcucaugguccuacauuguggaaacaucuaguucagacaauggaacguguuacccaggagauuucaucgauuaugaggagcuaagagagcaauugagcucagugucaucauuugaaagguuugagauauuccccaagacaaguucauggcccaaucaugacucgaacaaagguguaacggcagcauguccucaugcuggagcaaaaagcuucuacaaaaauuuaauuuggcuaguuaaaaaaggaaauucauacccaaagcucagcaaauccuacauuaaugauaaagggaaagaaguccucgugcuauggggcauucaccauccaucuacuagugcugaccaacaaagucucuaucagaaugcagaugcauauguuuuuguggggucaucaagauacagcaagaaguucaagccggaaauagcaauuagacccaaagugagggaucaagaagggagaaugaacuauuacuggacacuaguagagccgggagacaaaauaacauucgaagcaacuggaaaucuagugguaccgagauaugcauucgcaauggaaagaaaugcuggaucugguauuaucauuucagauacaccaguccaugauugcaauacaacuugucagacacccaagggugcuauaaacaccagccucccauuucagaauauacauccgaucacaauuggaaaauguccaaaauauguaaaaagcacaaaauugagacuggccacaggauugaggaaugucccgucuauucaaucuagaggccuauuuggggccauugccgguuucauugaagggggguggacagggaugguagauggaugguacgguuaucaccaucaaaaugagcaggggucaggauaugcagccgaccugaagagcacacagaaugccauugacgagauuacuaacaaaguaaauucuguuauugaaaagaugaauacacaguucacagcaguagguaaagaguucaaccaccuggaaaaaagaauagagaauuuaaauaaaaaaguugaugaugguuuccuggacauuuggacuuacaaugccgaacuguugguucuauuggaaaaugaaagaacuuuggacuaccacgauucaaaugugaagaacuuauaugaaaagguaagaagccagcuaaaaaacaaugccaaggaaguuggaaacggcugcuuugaauuuuaccacaaaugcgauaacacgugcauggaaagugucaaaaaugggacuuaugacuacccaaaauacucagaggaagcaaaauuaaacagagaagaaauagaugggguaaagcuggaaucaacaaggauuuaccagauuuuggcgaucuauucaacugccgccaguucauugguacugguagucucccugggggcaaucaguuucuggaugugcucuaaugggucucuacaguguagaauauguauuuaa

SEQ ID NO: 37200 - RNA, 1701 nt, Artificial Sequence; identical to SEQ ID NO: 35845
  derived and/or modified CDS sequence (wt) from hemagglutinin__InfluenzaA__ADJ80704

SEQ ID NO: 37201 - RNA, 1701 nt, Artificial Sequence
  derived and/or modified CDS sequence (wt) from hemagglutinin__InfluenzaA__ADJ80714
augaaggcaauacuaguaguucugcuauauacauuugcaaccgcaaaugcagacacauuauguauagguuaucaugcgaacaauucaacagacacuguagacacaguacuagaaaagaauguaacaguaacacacucuguuaaccuucuagaagacaagcauaacgggaaacuaugcaaacuaagaggggcagccccauugcauuuggguaaauguaacauugcuggcuggauccugggaaauccagagugugaaucacucuccacagcaagcucaugguccuacauuguggaaacaucuaguucagacaauggaacguguuacccaggagauuucaucgauuaugaggagcuaagagagcaauugagcucagugucaucauuugaaagguuugagauauuccccaagacaaguucauggcccaaucaugacucgaacaaagguguaacggcagcauguccucaugcuggagcaaaaagcuucuacaaaaauuuaauauggcuaguuaaaaaaggaaauucauacccaaagcucagcaaauccuacauuaaugauaaagggaaagaaguccucgugcuauggggcauucaccauccaucuacuagugcugaccaacaaagucucuaucagaaugcagaugcauauguuuuuguggggacaucaagauacagcaagaaguucaagccggaaauagcaauaagacccaaagugagggaucaagaagggagaaugaacuauuacuggacacuaguagagccgggagacaaaauaacauucgaagcaacuggaaaucuagugguaccgagauaugcauucgcaauggaaagaaaugcuggaucugguauuaucauuucagauacaccaguccacgauugcaauacaacuugucagacacccaagggugcuauaaacaccagccucccauuucagaauauacauccgaucacaauuggaaaauguccaaaauauguaaaaagcacaaaauugagacuggccacaggauugaggaaugucccgucuauucaaucuagaggccuauuuggggccauugccgguuucauugaagggggguggacagggaugguagauggaugguacgguuaucaccaucaaaaugagcaggggucaggauaugcagccgaccugaagagcacacagaaugccauugacaagauuacuaacaaaguaaauucuguuauugaaaagaugaauacacaguucacagcaguagguaaagaguucaaccaccuggaaaaaagaauagagaauuuaaauaaaaaaguugaugaugguuuccuggacauuuggacuuacaaugccgaacuguugguucuauuggaaaaugaaagaacuuuggacuaccacgauucaaaugugaagaacuuauaugaaaagguaagaagccaguuaaaaaacaaugccaaggaaauuggaaacggaugcuuugaauuuuaccacaaaugcgauaacacgugcauggaaagugucaaaaaugggacuuaugacuacccaaaauacucagaggaagcaaaauuaaacagagaagaaauagaugggguaaagcuagaaucaacaaggauuuaccagauuuuggcgaucuauucaacugucgccaguuccuugguacugguagucucccugggggcaaucaguuucuggaugugcucuaaugggucucuacaguguagaauauguauuuaa

SEQ ID NO: 37202 - RNA, 1701 nt, Artificial Sequence
  derived and/or modified CDS sequence (wt) from hemagglutinin__InfluenzaA__ADJ80724
augaaggcaauacuaguaguucugcuauauacauuugcaaccgcaaaugcagacacauuauguauagguuaucaugcgaacaauucaacagacacuguagacacaguacuagaaaagaauguaacaguaacacacucuguuaaccuucuagaagacaagcauaacgggaaacuaugcaaacuaagagggguagccccauugcauuuggguaaauguaacauugcuggcuggauccugggaaauccagagugugaaucacucuccacagcaagcucaugguccuacauuguggaaacaucuaguucagacaauggaacguguuacccaggagauuucaucgauuaugaggagcuaagagagcaauugagcucagugucaucauuugaaagguuugagauauuccccaagacaaguucauggcccaaucaugacucgaacaaagguguaacggcagcauguccucaugcuggagcaaaaagcuucuacaaaaauuuaauauggcuaguuaaaaaaggaaauucauacccaaagcucagcaaauccuacauuaaugauaaagggaaagaaguccucgugcuauggggcauucaccauccaucuacuagugcugaccaacaaagucucuaucagaaugcagaugcauauguuuuuguggggacaucaagauacagcaagaaguucaagccggaaauagcaauaagacccaaagugagggaucaagaagggagaaugaacuauuacuggacacuaguagagccgggagacaaaauaacauucgaagcaacuggaaaucuagugguaccgagauaugcauucgcaauggaaagaaaugcuggaucugguauuaucauuucagauacaccaguucacgauugcaauacaacuugucagacacccaagggugcuauaaacaccagccucccauuucagaauauacauccgaucacaauuggaaaauguccaaaauaugugaaaagcacaaaauugagacuggccacaggauugaggaaugucccgucuauucaaucuagaggccuauuuggggccauugccgguuucauugaagggggguggacagggaugguagauggaugguacgguuaucaccaucaaaaugagcaggggucaggauaugcagccgaccugaagagcacacagaaugccauugacgagauuacuaauaaaguaaauucuguuauugaaaagaugaauacacaguucacagcaguagguaaagaguucaaccaccuggaaaaaagaauagagaauuuaaauaaaaaaguugaugaugguuuccuggacauuuggacuuacaaugccgaacuguugguucuauuggaaaaugaaagaacuuuggacuaccacgauucaaaugugaagaacuuauaugaaaagguaagaagccaguuaaaaaacaaugccaaggaaauuggaaacggcugcuuugaauuuuaccacaaaugcgauaacacgugcauggaaagugucaaaaaugggacuuaugacuacccaaaauacucagaggaagcaaaauuaaacagagaagaaauagaugggguaaagcuggaaucaacaaggauuuaccagauuuuggcgaucuauucaacugucgccaguucauugguacugguagucucccugggggcaaucaguuucuggaugugcucuaaugggucucuacaguguagaauauguauuuaa

SEQ ID NO: 37203 - RNA, 1701 nt, Artificial Sequence
  derived and/or modified CDS sequence (wt) from hemagglutinin__InfluenzaA__ADJ80734
augaaggcaauacuaguaguucugcuauauacauuugcaaccgcaaaugcagacacauuauguauagguuaucaugcgaacaauucaacagacacuguagacacaguacuagaaaagaauguaacaguaacacacucuguuaaccuucuagaagacaagcauaacgggaaacuaugcaaauuaagagggguagccccauugcauuuggguaaauguaacauugcuggcuggauccugggaaauccagagugugaaucacucuccacagcaagcucaugguccuacauuguggaaacaucuaguucagacaauggaacguguuacccaggagauuucaucgauuaugaggagcuaagagagcaauugagcucagugucaucauuugaaagguuugagauauuccccaagacaaguucauggcccaaucaugacucgaacaaagguguaacggccgcauguccucaugcuggagcaaaaagcuucuacaaaaauuuaauauggcuaguuaaaaaaggaaauucauacccaaagcucagcaaauccuacauuaaugauaaagggaaagaaguccucgugcuauggggcauucaccauccaucuacuagugcugaccaacaaagucucuaucagaaugcagaugcauauguuuuuguggggacaucaagauacagcaagaaguucaagccggaaauagcaauaagacccaaagugagggaucaagaagggagaaugaacuauuacuggacacuaguagagccgggagacaaaauaacauucgaagcaacuggaaaucuagugguaccgagauaugcauucgcaauggaaagaaaugcuggaucugguauuaucauuucagauacaccaguccacgauugcaauacaacuugucagacacccaagggugcuauaaacaccagccucccauuucagaauauacauccgaucacaauuggaaaauguccaaaauauguaaaaagcacaaaauugagacuggccacaggauugaggaaugucccgucuauucaaucuagaggccuauuuggggccauugccgguuucauugaagggggguggacagggaugguagauggaugguacgguuaucaccaucaaaaugagcaggggucaggauaugcagccgaccugaagagcacacagaaugccauugacaagauuacuaacaaaguaaauucuguuauugaaaagaugaauacacaguucacagcaguagguaaagaauucaaccaccuggaaaaaagaauagagaauuuaaauaaaaaaguugaugaugguuuccuggacauuuggacuuacaaugccgaacuguugguucuauuggaaaaugaaagaacuuuggacuaccacgauucaaaugugaagaacuuauaugaaaagguaagaagccaguuaaaaaacaaugccaaggaaauuggaaacggcugcuuugaauuuuaccacaaaugcgauaacacgugcauggaaagugucaaaaaugggacuuaugacuacccaaaauacucagaggaagcaaaauuaaacagagaagaaauagaugggguaaagcuggaaucaacaaggauuuaccagauuuuggcgaucuauucaacugucgccaguucauugguacugguagucucccugggggcaaucaguuucuggaugugcucuaaugggucucuacaguguagaauauguauuuaa

SEQ ID NO: 37204 - RNA, 1701 nt, Artificial Sequence
  derived and/or modified CDS sequence (wt) from hemagglutinin__InfluenzaA__ADJ80744
augaaggcaauacuaguaguucugcuauauacauuugcaaccgcaaaugcagacacauuauguauagguuaucaugcgaacaauucaacagacacuguagacacaguacuagaaaagaauguaacaguaacacacucuguuaaccuucuagaagacaagcauaacgggaaacuaugcaaacuaagagggguagccccauugcauuuggguaaauguaacauugcuggcuggauccugggaaauccagagugugaaucacucuccacagcaagcucaugguccuacauuguggaaacaucgaguucagacaauggaacguguuacccaggagauuucaucgauuaugaggagcuaagagagcaauugagcucagugucaucauuugaaagguuugagauauuccccaagacaaguucauggcccaaucaugacucgaacaaagguguaacggcagcauguccucaugcuggagcaaaaagcuucuacaaaaauuuaauauggcuaguuaaaaaaggaaauucauacccaaagcucagcaaauccuacauuaaugauaaagggaaagaaguccucgugcuauggggcauucaccauccaucuacuagugcugaccaacaaagucucuaucagaaugcagaugcauauguuuuuguggggacaucaagauacagcaagaaguucaagccggaaauagcaauaagacccaaagugagggaucaagaagggagaaugaacuauuacuggacacuaguagagccgggagacaaaauaacauucgaagcaacuggaaaucuagugguaccgagauaugcauucgcaauggaaagaaaugcuggaucugguauuaucauuucagauacaccaguccacgauugcaauacaacuugucagacacccaagggugcuauaaacaccagccucccauuucagaauauacauccgaucacaauuggaaaauguccaaaauauguaaaaagcacaaaauugagacuggccacaggauugaggaaugucccgucuauucaaucuagaggccuauuuggggccauugccgguuucauugaagggggguggacagggaugguagauggaugguacgguuaucaccaucaaaaugagcaggggucaggauaugcagccgaccugaagagcacacagaaugccauugacaagauuacuaacaaaguaaauucuguuauugaaaagaugaauacacaguucacagcaguagguaaagaguucaaccaccuggaaaaaagaauagagaauuuaaauaaaaaaguugaugaugguuuccuggacauuuggacuuacaaugccgaacuguugguucuauuggaaaaugaaagaacuuuggacuaccacgauucaaaugugaagaacuuauaugaaaagguaagaagccaguuaaaaaacaaugccaaggaaauuggaaacggcugcuuugaauuuuaccacaaaugcgauaacacgugcauggaaagugucaaaaaugggacuuaugacuacccaaaauacucagaggaagcaaaauuaaacagagaagaaauagaugggguaaagcuggaaucaacaaggauuuaccagauuuuggcgaucuauucaacugucgccaguucauugguacugguagucucccugggggcaaucaguuucuggaugugcucuaaugggucucuacaguguagaauauguauuuaa

SEQ ID NO: 37205 - RNA, 1701 nt, Artificial Sequence
  derived and/or modified CDS sequence (wt) from hemagglutinin__InfluenzaA__ADJ80754
augaaggcaauacuaguaguucugcuauauacauuugcaaccgcaaaugcagacacauuauguauagguuaucaugcgaacaauucaacagacacuguagacacaguacuagaaaagaauguaacaguaacacacucuguuaaccuucuagaagacaagcauaacgggaaacuaugcaaacuaagagggguagccccauugcauuuggguaaauguaacauugcuggcuggauccugggaaauccagagugugaaucacucuccacagcaagcucaugguccuacauuguggaaacaucuaguucagacaauggaacguguuacccaggagauuucaucgauuaugaggagcuaagagagcaauugagcucagugucaucauuugaaagguuugagauauuccccaagacaaguucauggcccaaucaugacucgaacaaagguguaacggcagcauguccucaugcuggagcaaaaagcuucuacaaaaauuuaauauggcuaguuaaaaaaggaaauucauacccaaagcucagcaaauccuacauuaaugauaaagggaaagaaguccucgugcuauggggcauucaccauccaucuacuagugcugaccaacaaagucucuaucagaaugcagaugcauauguuuuuguggggacaucaagauacagcaagaaguucaagccggaaauagcaauaagacccaaagugagggaucaagaagggagaaugaacuauuacuggacacuaguagagccgggagacaaaauaacauucgaagcaacuggaaaucuagugguaccgagauaugcauucgcaauggaaagaaaugcuggaucugguauuaucauuucagauacaccaguccacgauugcaauacaacuugucagacacccaagggugcuauaaacaccagccucccauuucagaauauacauccgaucacaauuggaaaauguccaaaauauguaaaaagcacaaaauugagacuggccacaggauugaggaaugucccgucuauucaaucuagaggccuauuuggggccauugccgguuucauugaagggggguggacagggaugguagauggaugguacgguuaucaccaucaaaaugagcaggggucaggauaugcagccgaccuaaagagcacacagaaugccauugacaagauuacuaacaaaguaaauucuguuauugaaaagaugaauacacaguucacagcaguagguaaagaguucaaccaccuggaaaaaagaauagagaauuuaaauaaaaaaguugaugaugguuuccuggacauuuggacuuacaaugccgaacuguugguucuauuggaaaaugaaagaacuuuggacuaccacgauucaaaugugaagaacuuauaugaaaagguaagaagccaguuaaaaaacaaugccaaggaaauuggaaacggcugcuuugaauuuuaccacaaaugcgauaacacgugcauggaaagugucaaaaaugggacuuaugacuacccaaaauacucagaggaagcaaaauuaaacagagaagaaauagaugggguaaagcuggaaucaacaaggauuuaccagauuuuggcgaucuauucaacugucgccaguucauugguacugguagucucccugggggcaaucaguuucuggaugugcucuaaugggucucuacaguguagaauauguauuuaa

SEQ ID NO: 37206 - RNA, 1701 nt, Artificial Sequence
  derived and/or modified CDS sequence (wt) from hemagglutinin__InfluenzaA__ADJ80774
augaaggcaauacuaguaguucugcuauauacauuugcaaccgcaaaugcagacacauuauguauagguuaucaugcgaacaauucaacagacacuguagacacaguacuagaaaagaauguaacaguaacacacucuguuaacauucuagaagacaagcauaacgggaaacuaugcaaacuaagagggguagccccauugcauuuggguaaauguaacauugcuggcuggauccugggaaauccagagugugaaucacucuccacagcaaacucaugguccuacauuguggaaacaucuaguucagacaauggaacguguuacccaggagauuucaucgauuaugaggagcuaagagagcaauugagcucagugucaucauuugaaagguuugagauauuccccaagacaaguucauggcccaaucaugacucgaacaaagguguaacggcagcauguccucaugcuggagcaaaaagcuucuacaaaaauuuaauuuggcuaguuaaaaaaggaaauucauacccaaagcucagcaaauccuacauuaaugauaaagggaaagaaguccucgugcuauggggcauucaccauccaucuacuagugcugaccaacaaagucucuaucagaaugcagaugcauauguuuuuguggggucaucaagauacagcaagaaguucaagccggaaauagcaauuagacccaaagugagggaucaagaagggagaaugaacuauuacuggacacuaguagagccgggagacaaaauaacauucgaagcaacuggaaaucuagugguaccgagauaugcauucgcaauggaaagaaaugcuggaucugguauuaucauuucagauacaccaguccaugauugcaauacaacuugucagacacccaagggugcuauaaacaccagccucccauuucagaauauacauccgaucacaauuggaaaauguccaaaauauguaaaaagcacaaaauugagacuggccacaggauugaggaaugucccgucuauucaaucuagaggccuauuuggggccauugccgguuucauugaagggggguggacagggaugguagauggaugguacgguuaucaccaucaaaaugagcaggggucaggauaugcagccgaccugaagagcacacagaaugccauugacgagauuacuaacaaaguaaauucuguuauugaaaagaugaauacacaguucacagcaguagguaaagaguucaaccaccuggaaaaaagaauagagaauuuaaauaaaaaaguugaugaugguuuccuggacauuuggacuuacaaugccgaacuguugguucuauuggaaaaugaaagaacuuuggacuaccacgauucaaaugugaagaacuuauaugaaaagguaagaagccagcuaaaaaacaaugccaaggaaguuggaaacggcugcuuugaauuuuaccacaaaugcgauaacacgugcauggaaagugucaaaaaugggacuuaugacuacccaaaauacucagaggaagcaaaauuaaacagagaagaaauagaugggguaaagcuggaaucaacaaggauuuaccagauuuuggcgaucuauucaacugccgccaguucauugguacugguagucucccugggggcaaucaguuucuggaugugcucuaaugggucucuacaguguagaauauguauuuaa

SEQ ID NO: 37207 - RNA, 1701 nt, Artificial Sequence
  derived and/or modified CDS sequence (wt) from hemagglutinin__InfluenzaA__ADJ80784
augaaggcaauacuaguaguucugcuauauacauuugcaaccgcaaaugcagacacauuauguauagguuaucaugcgaacaauucaacagacacuguagacacaguacuagaaaagaauguaacaguaacacacucuguuaaccuucuagaagacaagcauaacgggaaacuaugcaaacuaagagggguagccccauugcauuuggguaaauguaacauugcuggcuggauccugggaaauccagagugugaaucacucuccacagcaagcucaugguccuacauuguggaaacaucuaguucagacaauggaacguguuacccaggagauuucaucgauuaugaggagcuaagagagcaauugagcucagugucaucauuugaaagguuugagauauuccccaagacaaguucauggcccaaucaugacucgaacaaagguguaacggcagcauguccucaugcuggagcaaaaagcuucuacaaaaauuuaauauggcuaguuaaaaaaggaaauucauacccaaagcucagcaaauccuacauuaaugauaaagggaaagaaguccucgugcuauggggcauucaccauccaucuacuagugcugaccaacaaagucucuaucagaaugcagaugcauauguuuuuguggggacaucaagauacagcaagaaguucaaaccggaaauagcaauaagacccaaagugagggaucaagaagggagaaugaacuauuacuggacacuaguagagccgggagacaaaauaacauucgaagcaacuggaaaucuagugguaccgagauaugcauucgcaauggaaagaaaugcuggaucugguauuaucauuucagauacaccaguccacgauugcaauacaacuugucagacacccaagggugcuauaaacaccagccucccauuucauaauauacauccgaucacaauuggaaaauguccaaaauauguaaaaagcacaaaauugagacuggccacaggauugaggaaugucccgucuauucaaucuagaggccuauuuggggccauugccgguuucauugaagggggguggacagggaugguagauggaugguacgguuaucaccaucaaaaugagcaggggucaggauaugcagccgaccugaagagcacacagaaugccauugacaagauuacuaacaaaguaaauucuguuauugaaaagaugaauacacaguucacagcaguagguaaagaguucaaccaccuggaaaaaagaauagagaauuuaaauaaaaagguugaugaugguuuccuggacauuuggacuuacaaugccgaacuguugguucuauuggaaaaugaaagaacuuuggacuaccacgauucaaaugugaagaacuuauaugaaaagguaagaagccaguuaaaaaacaaugccaaggaaauuggaaacggcugcuuugaauuuuaccacaaaugcgauaacacgugcauggaaagugucaaaaaugggacuuaugacuacccaaaauacucagaggaagcaaaauuaaacagagaagaaauagaugggguaaagcuggaaucaacaaggauuuaccagauuuuggcgaucuauucaacugucgccaguucauugguacugguagucucccugggggcaaucaguuucuggaugugcucuaaugggucucuacaguguagaauauguauuuaa

SEQ ID NO: 37208 - RNA, 1701 nt, Artificial Sequence; identical to SEQ ID NO: 35845
  derived and/or modified CDS sequence (wt) from hemagglutinin__InfluenzaA__ADJ80794

SEQ ID NO: 37209 - RNA, 1701 nt, Artificial Sequence; identical to SEQ ID NO: 37196
  derived and/or modified CDS sequence (wt) from hemagglutinin__InfluenzaA__ADJ80804

SEQ ID NO: 37210 - RNA, 1701 nt, Artificial Sequence
  derived and/or modified CDS sequence (wt) from hemagglutinin__InfluenzaA__ADJ80814
augaaggcaauacuaguaguucugcuauauacauuugcaaccgcaaaugcagacacauuauguauagguuaucaugcgaacaauucaacagacacuguagacacaguacuagaaaagaauguaacaguaacacacucuguuaaccuucuagaagacaagcauaacgggaaacuaugcaaacuaagagggguagccccauugcauuuggguaaauguaacauugcuggcuggauccugggaaauccagagugugaaucacucuccacagcaagcucaugguccuacauuguggaaacaucuaguucagacaauggaacguguuacccaggagauuucaucgauuaugaggagcuaagagagcaauugagcucagugucaucauuugaaagguuugagauauuccccaagacaaguucauggcccaaucaugacucgaacaaggguguaacggcagcauguccucgugcuggagcaaaaagcuucuacaaaaauuuaauauggcuaguuaaaaaaggaaauucauacccaaagcucagcaaauccuacauuaaugauaaagggaaagaaguccucgugcuauggggcauucaccauccaucuacuagugcugaccaacaaagucucuaucagaaugcagaugcauauguuuuuguggggacaucaagauacagcaagaaguucaaaccggaaauagcaauaagacccaaagugagggaucaagaagggagaaugaacuauuacuggacacuaguagagccgggagacaaaauaacauucgaagcaacuggaaaucuagugguaccgagauaugcauucgcaauagaaagaaaugcuggaucugguauuaucauuucagauacaccaguccacgauugcaauacaacuugucagacacccaagggugcuauaaacaccagccucccauuucagaauauacauccgaucacaauuggaaaauguccaaaauauguaaaaagcacaaaauugagacuggccacaggauugaggaaugucccgucuauucaaucuagaggccuauuuggggccauugccgguuucauugaagggggguggacagggaugguagauggaugguacgguuaucaccaucaaaaugagcaggggucaggauaugcagccgaccugaagagcacacagaaugccauugacaagauuacuaacaaaguaaauucuguuauugaaaagaugaauacacaguucacagcaguagguaaagaguucaaccaccuggaaaaaagaauagagaauuuaaauaaaaaaguugaugaugguuuccuggacauuuggacuuacaaugccgaacuguugguucuauuggaaaaugaaagaacuuuggacuaccacgauucaaaugugaagaacuuauaugaaaagguaagaagccaguuaaaaaacaaugccaaggaaauuggaaacggcugcuuugaauuuuaccacaaaugcgauaacacgugcauggaaagugucaaaaaugggacuuaugacuacccaaaauacucagaggaagcaaaauuaaacagagaagaaauagaugggguaaagcuggaaucaacaaggauuuaccagauuuuggcgaucuauucaacugucgccaguucauugguacugguagucucccugggggcaaucaguuucuggaugugcucuaaugggucucuacaguguagaauauguauuuaa

SEQ ID NO: 37211 - RNA, 1701 nt, Artificial Sequence
  derived and/or modified CDS sequence (wt) from hemagglutinin__InfluenzaA__ADJ80834
augaaggcaauacuaguaguucugcuauauacauuugcaaccgcaaaugcagacacauuauguauagguuaucaugcgaacaauucaacagacacuguagacacaguacuagaaaagaauguaacaguaacacacucuguuaaccuucuagaagacaagcauaacgggaaacuaugcaaacuaagagggguagccccauugcauuuggguaaauguaacauugcuggcuggauccugggaaauccagagugugaaucacucuccacagcaagcucaugguccuacauuguggaaacaucuaguucagacaauggaacguguuacccaggagauuucaucgauuaugaggagcuaagagagcaauugagcucagugucaucauuugaaagguuugagauauuccccaagacaaguucauggcccaaucaugacucgaacaaagguguaacggcagcauguccucaugcuggagcaaaaagcuucuacaaaaauuuaauauggcuaguuaaaaaaggaaauucauacccaaagcucagcaaauccuacauuaaugauaaagggaaagaaguccucgugcuauggggcauucaccauccaucuacuaguacugaccaacaaagucucuaucagaaugcagaugcauauguuuuuguggggacaucaagauacagcaagaaguucaagccggaaauagcaauaagacccaaagugagggaucaagaagggagaaugaacuauuacuggacacuaguagagccgggagacaaaauaacauucgaagcaacuggaaaucuagugguaccgagauaugcauucgcaauggaaagaaauucuggaucugguauuaucauuucagacacaccaguccacuauugcaauacaacuugucagacacccaagggugcuauaaacaccagccucccauuucagaauauacauccgaucacaauuggaaaauguccaaaauauguaaaaagcacaaaauugagacuggccacaggauugaggaaugucccgucuauucaaucuagaggccuauuuggggccauugccgguuucauugaagggggguggacagggaugguagauggaugguacgguuaucaccaucaaaaugagcaggggucaggauaugcagccgaccugaagagcacacagaaugccauugacgagauuacuaacaaaguaaauucuguuauugaaaagaugaauacacaguucacagcaguagguaaagaguucaaccaccuggaaaaaagaauagagaauuuaaauaaaaagguugaugaugguuuccuugacauuuggacuuacaaugccgaacuguugguucuauuggaaaaugaaagaacuuuggacuaccacgauucaaaugugaagaacuuauaugaaaagguaagaagccaguuaaaaaacaaugccaaggaaauuggaaacggcugcuuugaauuuuaccacaaaugcgauaacacgugcauggaaagugucaaaaaugggacuuaugacuacccaaaauacucagaggaagcaaaauuaaacagagaagaaauagaugggguaaagcuggaaucaacaaggauuuaccagauuuuggcgaucuauucaacugucgccaguucauugguacugguagucucccugggggcaaucaguuucuggaugugcucuaaugggucucuacaguguagaauauguauuuaa

SEQ ID NO: 37212 - RNA, 1701 nt, Artificial Sequence
  derived and/or modified CDS sequence (wt) from hemagglutinin__InfluenzaA__ADJ80848
augaaggcaauacuaguaguucugcuauauacauuugcaaccgcaaaugcagacacauuauguauagguuaucaugcgaacaauucaacagacacuguagacacaguacuagaaaagaauguaacaguaacacacucuguuaaccuucuagaagacaagcauaacgggaaacuaugcaaacuaagagggguagccccauugcauuuggguaaauguaacauugcuggcuggauccugggaaauccagagugugaaucacucuccacagcaagcucaugguccuacauuguggaaacaucuaguucagacaauggaacguguuacccaggagauuucaucgauuaugaggagcuaagagagcaauugagcucagugucaucauuugaaagguuugagauguuccccaagacaaguucauggcccaaucaugacucgaacaaagguguaacggcagcauguccucaugcuggagcaaaaagcuucuacaaaaauuuaauauggcuaguuaaaaaaggaaauucauacccaaagcucagcaaauccuacauuaaugauaaagggaaagaaguccucgugcuauggggcauucaccauccaucuacuaguacugaccaacaaagucucuaucagaaugcagaugcauauguuuuuguggggacaucgagauacagcaagaaguucaagccggaaauagcaauaagacccaaagugagggaucaagaagggagaaugaacuauuacuggacacuaguagagccgggagacaaaauaacauucgaagcaacuggaaaucuagugguaccgagauaugcauucgcaauggaaagaaaugcuggaucugguauuaucauuucagauacaccaguccacgauugcaauacaacuugucagacacccaagggugcuauaaacaccagccucccauuucagaauauacauccgaucacaauuggaaaauguccaaaauauguaaaaagcacaaaauugagacuggccacaggauugaggaaugucccgucuauucaaucuagaggccuauuuggggccauugccgguuucauugaagggggguggacagggaugguagauggaugguacgguuaucaccaucaaaaugagcaggggucaggauaugcagccgaccugaagagcacacagaaugccauugacaagauuacuaacaaaguaaauucuguuauugaaaagaugaauacacaguucacagcaguagguaaagaguucaaccaccuggaaaaaagaauagagaauuuaaauaaaaaaguugaugaugguuuccuggacauuuggacuuacaaugccgaacuguugguucuauuggaaaaugaaagaacuuuggacuaccacgauucaaaugugaagaacuuauaugaaaagguaagaagccaguuaaaaaacaaugccaaggaaauuggaaacggcugcuuugaauuuuaccacaaaugcgauaacacgugcauggaaagugucaaaaaugggacuuaugacuacccaaaauacucagaggaagcaaaauuaaacagagaagaaauagaugggguaaagcuggaaucaacaaggauuuaccagauuuuggcgaucuauucaacugucgccaguucauugguacugguagucucccugggggcaaucaguuucuggaugugcucuaaugggucucuacaguguagaauauguauuuaa

SEQ ID NO: 37213 - RNA, 1701 nt, Artificial Sequence
  derived and/or modified CDS sequence (wt) from hemagglutinin__InfluenzaA__ADJ80858
augaagacaauacuaguaguucugcuauauacauuugcaaccgcaaaugcagacacauuauguauagguuaucaugcgaacaauucaacagacacuguagacacaguacuagaaaagaauguaacaguaacacacucuguuaaccuucuagaagacaagcauaacgggaaacuaugcaaacuaagagggguagccccauugcauuuggguaaauguaacauugcuggcuggauccugggaaauccagagugugaaucacucuccacagcaagcucaugguccuacauuguggaaacaucuaguucagacaauggaacguguuacccaggagauuucaucgauuaugaggagcuaagagagcaauugagcucagugucaucauuugaaagguuugagauauuccccaagacaaguucauggcccaaucaugacucaaacaaagguguaacggcagcauguccucaugcuggagcaaaaagcuucuacaaaaauuuaauauggcuaguuaaaaaaggaaauucauacccaaagcucagcaaauccuacauuaaugauaaagggaaagaaguccucgugcuauggggcauucaccauccaucuacuagugcugaccaacaaagucucuaucagaaugcagaugcauauguuuuuguggggacaucaagauacagcaagaaguucaagccggaaauagcaauaagacccaaagugagggaucaagaagggagaaugaacuauuacuggacacuaguagagccgggagacaaaauaacauucgaagcaacuggaaaucuagugguaccgagauaugcauucgcaauggaaagaaaugcuggaucugguauuaucauuucagauacaccaguccacgauugcaauacaacuugucagacacccaagggugcuauaaacaccagccucccauuucagaauauacauccgaucacaauuggaaaauguccaaaauauguaaaaagcacaaaauugagacuggccacaggauugaggaaugucccgucuauucaaucuagaggccuauuuggggccauugccgguuucauugaagggggguggacagggaugguagauggaugguacgguuaucaccaucaaaaugagcaggggucaggauaugcagccgaccugaagagcacacagaaugccauugacaagauuacuaacaaaguaaauucuguuauugaaaagaugaauacacaguucacagcaguagguaaagaguucaaccaccuggaaaaaagaauagagaauuuaaauaaaaaaguugaugaugguuuccuggacauuuggacuuacaaugccgaacuguugguucuauuggaaaaugaaagaacuuuggacuaccacgauucaaaugugaagaacuuauaugaaaagguaagaagccaguuaaaaaacaaugccaaggaaauuggaaacggcugcuuugaauuuuaccacaaaugcgauaacacgugcauggaaagugucaaaaaugggacuuaugacuacccaaaauacucagaggaagcaaaauuaaacagagaagaaauagaugggguaaagcuggaaucaacaaggauuuaccagauuuuggcgaucuauucaacugucgccaguucauugguacugguagucucccugggggcaaucaguuucuggaugugcucuaaugggucucuacaguguagaauauguauuuaa

SEQ ID NO: 37214 - RNA, 1701 nt, Artificial Sequence
  derived and/or modified CDS sequence (wt) from hemagglutinin__InfluenzaA__ADJ80868
augaaggcaauacuaguaguucugcuauauacauuugcaaccgcaaaugcagacacauuauguauagguuaucaugcgaacaauucaacagacacuguagacacaguacuagaaaagaauguaacaguaacacacucuguuaaccuucuagaagacaagcauaacgggaaacuaugcaaacuaagagggguagccccauugcauuuggguaaauguaacauugcuggcuggauccugggaaauccagagugugaaucacucuccacagcaagcucaugguccuacauuguggaaacaucuaguucagacaauggaacguguuacccaggagauuucaucgauuaugaggagcuaagagagcaauugagcucagugucaucauuugaaagguuugagauauuccccaagacaaguucauggcccaaucaugacucgaacaaagguguaacggcagcauguccuaaugcuggagcaaaaagcuucuacaaaaauuuaauauggcuaguuaaaaaaggaaauucauacccaaagcucagcaaauccuacauuaaugauaaagggaaagaaguccucgugcuauggggcauucaccauccaucuacuagugcugaccaacaaagucucuaucagaaugcagaugcauauguuuuuguggggacaucaagauacagcaagaaguucaagccggaaauagcaauaagacccaaagugagggaucaagaagggagaaugaacuauuacuggacacuaguagagccgggaggcaaaauaacauucgaagcaacuggaaaucuagugguaccgagauaugcauucgcaauggaaagaaaugcuggaucugguauuaucauuucagauacaccaguccacgauugcaauacaacuugucagacacccaagggugcuauaaacaccagccucccauuucagaauauacauccgaucacaauuggaaaauguccaaaauauguaaaaagcacaaaauugagacuggccacaggauugaggaaugucccgucuauucaaucuagaggccuauuuggggccauugccgguuucauugaagggggguggacagggaugguagauggaugguacgguuaucaccaucaaaaugagcaggggucaggauaugcagccgaccugaagagcacacagaaugccauugacaagauuacuaacaaaguaaauucuguuauugaaaagaugaauacacaguucacagcaguagguaaagaguucaaccaccuggaaaaaagaauagagaauuuaaauaaaaaaguugaugaugguuuccuggacauuuggacuuacaaugccgaacuguugguucuauuggaaaaugaaagaacuuuggacuaccacgauucaaaugugaagaacuuauaugaaaagguaagaagccaguuaaaaaacaaugccaaggaaauuggaaacggcugcuuugaauuuuaccacaaaugcgauaacacgugcauggaaagugucaaaaaugggacuuaugacuacccaaaauacucagaggaagcaaaauuaaacagagaagaaauagaugggguaaagcuggaaucaacaaggauuuaccagauuuuggcgaucuauucaacugucgccaguucauugguacugguagucucccugggggcaaucaguuucuggaugugcucuaaugggucucuacaguguagaauauguauuuaa

SEQ ID NO: 37215 - RNA, 1701 nt, Artificial Sequence
  derived and/or modified CDS sequence (wt) from hemagglutinin__InfluenzaA__ADJ80883
augaaggcaauacuaguaguucugcuauauacauuugcaaccgcaaaugcagacacauuauguauagguuaucaugcgaacaauucaacagacaccguagacacagugcuagaaaagaauguaacaguaacacacucuguuaaccuucuagaagauaaacauaacgggaaacuaugcaaacuaagagggguagccccauugcauuuggguaaauguaacauugcuggcuggauccugggaaauccagagugugaaucacucuccacagcaagcucaugguccuacauuguggaaacaucuaguucagacaauggaacguguuacccaggagauuucaucgauuaugaggagcuaagagagcaauugagcucagugucaucauuugaaagguuugagauauuccccaagacaaguucauggcccaaucaugacucgaacaaagguguaacggcagcauguccucaugcuggagcaaaaagcuucuacaaaaauuuaauauggcuaguuaaaaaaggaaauucauacccaaagcucagcaaauccuacauuaaugauaaagggaaagaaguccucgugcuauggggcauucaccauccaucuacuagugcugaccaacaaagucucuaucagaaugcagaugcauauguuuuuguggggacaucaagauacagcaagaaguucaagccggaaauagcaauaagacccaaagugagggaucaagaagggagaaugaacuauuacuggacacuaguagagccgggagacaaaauaacauucgaagcaacuggaaaucuagugguaccgagguaugcauucgcaauggaaagaaaugcuggaucugguauuaucauuucagauacaccaguccacgauugcaauacaacuugucagacacccaagggugcuauaaacaccagccucccauuucagaauauacauccgaucacaauuggaaaauguccaaaauauguaaaaagcacaaaauugagacuggccacaggauugaggaaugucccgucuauucaaucuagaggccuauuuggggccauugccgguuucauugaagggggguggacaggaaugguagauggaugguacgguuaucaccaucaaaaugagcaggggucaggauaugcagccgaccugaagagcacacagaaugccauugacaagauuacuaacaaaguaaauucuguuauugaaaagaugaauacacaguucacagcaguagguaaagaguucaaccaccuggaaaaaagaauagagaauuuaaauaaaaaaguugaugaugguuuccuggacauuuggacuuacaaugccgaacuguugguucuauuggaaaaugaaagaacuuuggacuaccacgauucaaaugugaagaacuuauaugaaaagguaagaagccaguuaaaaaacaaugccaaggaaauuggaaacggcugcuuugaauuuuaccacaaaugcgauaacacgugcauggaaagugucaaaaaugggacuuaugacuacccaaaauacucagaggaagcaaaauuaaacagagaagaaauagaugggguaaagcuggaaucaacaaggauuuaccagauuuuggcgaucuauucaacugucgccaguucauugguacugguagucucccugggggcaaucaguuucuggaugugcucuaaugggucucuacaguguagaauauguauuuaa

SEQ ID NO: 37216 - RNA, 1701 nt, Artificial Sequence; identical to SEQ ID NO: 37197
  derived and/or modified CDS sequence (wt) from hemagglutinin__InfluenzaA__ADJ80893

SEQ ID NO: 37217 - RNA, 1701 nt, Artificial Sequence; identical to SEQ ID NO: 35845
  derived and/or modified CDS sequence (wt) from hemagglutinin__InfluenzaA__ADJ80910

SEQ ID NO: 37218 - RNA, 1701 nt, Artificial Sequence
  derived and/or modified CDS sequence (wt) from hemagglutinin__InfluenzaA__ADJ80927
augaaggcaauacuaguaguucugcuauauacauuugcaaccgcaaaugcagacacauuauguauagguuaucaugcgaacaauucaacagacacuguagacacaguacuagaaaagaauguaacaguaacacacucuguuaaccuucuagaagacaagcauaacgggaaacuaugcaaacuaagagggguagccccauugcauuuggguaaauguaacauugcuggcuggauccugggaaauccagagugugaaucacucuccacagcaagcucaugguccuacauuguggaaacaucuaguucagacaauggaacguguuacccaggagauuucaucgauuaugaggagcuaagagagcaauugagcucagugucaucauuugaaagguuugagauauuccccaagacaaguucauggcccaaucaugacucgaacaaagguguaacggcagcauguccucaugcuggagcaaaaagcuucuacaaaaauuuaauauggcuaguuaaaaaaggaaauucauacccaaagcucagcaaauccuacauuaaugauaaagggaaagaaguccucgugcuauggggcauucaccauccaucuacuagugcugaccaacaaagucucuaucagaaugcagaugcauauguuuuuguggggacaucaagauacagcaagaaguucaagccggaaauagcaauaagacccaaagugagggaucaagaagggagaaugaacuauuacuggacacuaguagagccgggagacaaaauaacauucgaggcaacuggaaaucuagugguaccgagauaugcauucgcaauggaaagaaaugcuggaucugguauuaucauuucagauacaccaguucacgauugcaauacaacuugucagacacccaagggugcuauaaacaccagccucccauuucagaauauacauccgaucacaauuggaaaauguccaaaauauguaaaaagcacaaaauugagacuggccacaggauugaggaaugucccgucuauucaaucuagaggucuauuuggggccauugccgguuucauugaagggggguggacagggaugguagauggaugguacgguuaucaccaucaaaaugagcaggggucaggauaugcagccgaccugaagagcacacagaaugccauugacgagauuacuaauaaaguaaauucuguuauugaaaagaugaauacacaguucacagcaguagguaaagaguucaaccaccuggaaaaaagaauagagaauuuaaauaaaaaaguugaugaugguuuccuggacauuuggacuuacaaugccgaacuguugguucuauuggaaaaugaaagaacuuuggacuaccacgauucaaaugugaagaacuuauaugaaaagguaagaagccaguuaaaaaacaaugccaaggaaauuggaaacggcugcuuugaauuuuaccacaaaugcgauaacacgugcauggaaagugucaaaaaugggacuuaugacuacccaaaauacucagaggaagcaaaauuaaacagagaagaaauagaugggguaaagcuggaaucaacaaggauuuaccagauuuuggcgaucuauucaacugucgccaguucauugguacugguagucucccugggggcaaucaguuucuggaugugcucuaaugggucucuacaguguagaauauguauuuaa

SEQ ID NO: 37219 - RNA, 1701 nt, Artificial Sequence
  derived and/or modified CDS sequence (wt) from hemagglutinin__InfluenzaA__ADJ80937
augaaggcaauacuaguaguucugcuauauacauuugcaaccgcaaaugcagacacauuauguauagguuaucaugcgaacaauucaacagacacuguagacacaguacuagaaaagaauguaacaguaacacacucuguuaaccuucuagaagacaagcauaacgggaaacuaugcaaacuaagagggguagccccauugcauuuggguaaauguaacauugcuggcuggauccugggaaauccagagugugaaucacucuccacagcaagcucaugguccuacauuguggaaacaucuaguucagacaauggaacguguuacccaggagauuucaucgauuaugaggagcuaagagagcaauugagcucagugucaucauuugaaagguuugagauauuccccaagacaaguucauggcccaaucaugacucgaacaaagguguaacggcagcauguccucaugcuggagcaaaaagcuucuacaaaaauuuaauauggcuaguuaaaaaaggaaauucauacccaaagcucagcaaauccuacauuaaugauaaagggaaagaaguccucgugcuauggggcauucaccauccaucuacuagugcugaccaacaaagucucuaucagaaugcagaugcauaugcuuuuguggggacaucaagauacagcaagaaguucaagccggaaauagcaauaagacccaaagugagggaucaagaagggagaaugaacuauuacuggacacuaguagagccgggagacaaaauaacauucgaagcaacuggaaaucuagugguaccgagauaugcauucgcaauggaaagaaaugcuggaucugguauuaucauuucagauacaccaguccacaauugcaauacaacuugucagacacccaagggugcuauaaacaccagccucccauuucagaauauacauccgaucacaauuggaaaauguccaaaauauguaaaaagcacaaaauugagacuggccacaggauugaggaaugucccgucuauucaaucuagaggccuauuuggggccauugccgguuucauugaagggggguggacagggaugguagauggaugguacgguuaucaccaucaaaaugagcaggggucaggauaugcagccgaccugaagagcacacagaaugccauugacgagauuacuaacaaaguaaauucuguuauugaaaagaugaauacacaguucacagcaguagguaaagaguucaaccaccuggaaaaaagaauagagaauuuaaauaaaaaaguugaugaugguuuccuggacauuuggacuuacaaugccgaacuguugguucuauuggaaaaugaaagaacuuuggacuaccacgauucaaaugugaagagcuuauaugaaaagguaagaagccaguuaaaaaacaaugccaaggaaauuggaaacggcugcuuugaauuuuaccacaaaugcgauaacacgugcauggaaagugucaaaaaugggacuuaugacuacccaaaauacucagaggaagcaaaauuaaacagagaagaaauagaugggguaaagcuggaaucaacaaggauuuaccagauuuuggcgaucuauucaacugucgccaguucauugguacugguagucucccugggggcaaucaguuucuggaugugcucuaaugggucucuacaguguagaauauguauuuaa

SEQ ID NO: 37220 - RNA, 1701 nt, Artificial Sequence
  derived and/or modified CDS sequence (wt) from hemagglutinin__InfluenzaA__ADJ80947
augaaggcaauacuaguaguucugcuauauacauuugcaaccgcaaaugcagacacauuauguauagguuaucaugcgaacaauucaacagacacuguagacacaguacuagaaaagaauguaacaguaacacacucuguuaaccuucuagaagacaagcauaacgggaaacuaugcaaacuaagagggguagccccauugcauuuggguaaauguaacauugcuggcuggauccugggaaauccagagugugaaucacucuccacagcaagcucaugguccuacauuguggaaacaucuaguucagacaauggaacguguuacccaggagauuucaucgauuaugaggagcuaagagagcaauugagcucagugucaucauuugaaagguuugagauauuccccaagacaaguucauggcccaaucaugacucgaacaaagguguaacggcagcauguccucaugcuggagcaaaaagcuucuacaaaaauuuaauauggcuaguuaaaaaaggaaauucauacccaaagcucagcaaauccuacauuaaugauaaagggaaagaaguccuugugcuauggggcauucaccauccaucuacuagugcugaccaacaaagucucuaucagaaugcagaugcauauguuuuuguggggacaucaagauacagcaagaaguucaagccggaaauagcaauaagacccaaagugagggaucaagaagggagaaugaacuauuacuggacacuaguagagccgggagacaaaauaacauucgaagcaacuggaaaucuagugguaccgagauaugcauucgcaauggaaagaaaugcuggaucugguauuaucauuucagauacaccaguccacgauugcaauacaacuugucagacacccaagggugcuauaaacaccagccucccauuucagaauauacauccgaucacaauuggaaaauguccaaaauauguaaaaagcacaaaauugagacuggccacaggauugaggaaugucccgucuauucaaucuagaggccuauuuggggccauugccgguuucauugaagggggguggacagggaugguagauggaugguacgguuaucaccaucaaaaugagcaggggucaggauaugcagccgaccugaagagcacacagaaugccauugacaagauuacuaacaaaguaaauucuguuauugaaaagaugaauacacaguucacagcaguagguaaagaguucaaccaccuggaaaaaagaauagagaauuuaaauaaaaaaguugaugaugguuuccuggacauuuggacuuacaaugccgaacuguugguucuauuggaaaaugaaagaacuuuggacuaccacgauucaaaugugaagaacuuauaugaaaagguaagaagccaguuaaaaaacaaugccaaggaaauuggaaacggcugcuuugaauuuuaccacaaaugcgauaacacgugcauggaaagugucaaaaaugggacuuaugacuacccaaaauacucagaggaagcaaaauuaaacagagaagaaauagaugggguaaagcuggaaucaacaaggauuuaccagauuuuggcgaucuauucaacugucgccaguucauugguacugguagucucccugggggcaaucaguuucuggaugugcucuaaugggucucuacaguguagaauauguauuuaa

SEQ ID NO: 37221 - RNA, 1701 nt, Artificial Sequence
  derived and/or modified CDS sequence (wt) from hemagglutinin__InfluenzaA__ADJ80967
augaaggcaauacuaguaguucugcuauauacauuugcaaccgcaaaugcagacacauuauguauagguuaucaugcgaacaauucaacagacacuguagacacaguacuagaaaagaauguaacaguaacacacucuguuaaccuucuagaagacaagcauaacgggaaacuaugcaaacuaagagggguagccccauugcauuuggguaaauguaacauugcuggcuggauccugggaaauccagagugugaaucacucuccacagcaagcucaugguccuacauuguggaaacaucuaguucagacaauggaacguguuacccaggagauuucaucgauuaugaggagcugagagagcaauugagcucagugucaucauuugaaagguuugagauauuccccaagacaaguucauggcccaaucaugacucgaacaaagguguaacggcagcauguccucaugcuggagcaaaaagcuucuacaaaaauuuaauauggcuaguuaaaaaaggaaauucauacccaaagcucagcaaauccuacauuaaugauaaagggaaagaaguccucgugcuauggggcauucaccauccaucuacuagugcugaccaacaaagucucuaucagaaugcagaugcauauguuuuuguggggacaucaagauacagcaagaaguucaagccggaaauagcaauaagacccaaagugagggaucaagaagggagaaugaacuauuacuggacacuaguagagccgggagacaaaauaacauucgaagcaacuggaaaucuagugguaccgagauaugcauucgcaauggaaagaaaugcuggaucugguauuaucauuucagauacaccaguccacgauugcaauacaacuugucagacacccaagggugcuauaaacaccagccucccauuucagaauauacauccgaucacaauuggaaaauguccaaaauauguaaaaagcacaaaauugagacuggccacaggauugaggaaugucccgucuauucaaucuagaggccuauuuggggccauugccgguuucauugaagggggguggacagggaugguagauggaugguacgguuaucaccaucaaaaugagcaggggucaggauaugcagccgaccugaagagcacacagaaugccauugacaagauuacuaacaaaguaaauucuguuauugaaaagaugaauacacaguucacagcaguagguaaagaguucaaccaccuggaaaaaagaauagagaauuuaaauaaaaaaguugaugaugguuuccuggacauuuggacuuacaaugccgaacuguugguucuauuggaaaaugaaagaacuuuggacuaccacgauucaaaugugaagaacuuauaugaaaagguaagaagccaguuaaaaaacaaugccaaggaaauuggaaacggcugcuuugaauuuuaccacaaaugcgauaacacgugcauggaaagugucaaaaaugggacuuaugacuacccaaaauacucagaggaagcaaaauuaaacagagaagaaauagaugggguaaagcuggaaucaacaaggauuuaccagauuuuggcgaucuauucaacugucgccaguucauugguacugguagucucccugggggcaaucaguuucuggaugugcucuaaugggucucuacaguguagaauauguauuuaa

SEQ ID NO: 37222 - RNA, 1701 nt, Artificial Sequence
  derived and/or modified CDS sequence (wt) from hemagglutinin__InfluenzaA__ADJ80977
augaaggcaauacuaguaguucugcuauauacauuugcaaccgcaaaugcagacacauuauguauagguuaucaugcgaacaauucaacagacacuguagacacaguacuagaaaagaauguaacaguaacacacucuguuaaccuucuagaagacaagcauaacgggaaacuaugcaaacuaagagggguagccccauugcauuuggguaaauguaacauugcuggcuggauccugggaaauccagagugugaaucacucuccacagcaagcucaugguccuacauuguggaaacaucuaguucagacaauggaacguguuacccaggagauuucauugauuaugaggagcuaagagagcaauugagcucagugucaucauuugaaagguuugagauauuccccaagacaaguucauggcccaaucaugacucgaacaaagguguaacggcagcauguccucaugcuggagcaaaaagcuucuacaaaaauuuaauauggcuaguuaaaaaaggaaauucauacccaaagcucagcaaauccuacauuaaugauaaagggaaagaaguccucgugcuauggggcauucaccauccaucuacuagugcugaccaacaaagucucuaucagaaugcagaugcauauguuuuuguggggacaucaagauacagcaagaaguucaagccggaaauagcaauaagacccaaagugagggaucaagaagggagaaugaacuauuacuggacacuaguagagccgggagacaaaauaacauucgaagcaacuggaaaucuagugguaccgagauaugcauucgcaauggaaagaaaugcuggaucugguauuaucauuucagauacaccaguccacgauugcaauacaacuugucagacacccaagggugcuauaaacaccagccucccauuucagaauauacauccgaucacaauuggaaaauguccaaaauauguaaaaagcacaaaauugagacuggccacaggauugaggaaugucccgucuauucaaucuagaggccuauuuggggccauugccgguuucauugaagggggguggacagggaugguagauggaugguacgguuaucaccaucaaaaugagcaggggucaggauaugcagccgaccugaagagcacacagaaugccauugacaagauuacuaacaaaguaaauucuguuauugaaaagaugaauacacaguucacagcaguagguaaagaguucaaccaccuggaaaaaagaauagagaauuuaaauaaaaaaguugaugaugguuuccuggacauuuggacuuacaaugccgaacuguugguucuauuggaaaaugaaagaacuuuggacuaccacgauucaaaugugaagaacuuauaugaaaagguaagaagccaguuaaaaaacaaugccaaggaaauuggaaacggcugcuuugaauuuuaccacaaaugcgauaacacgugcauggaaagugucaaaaaugggacuuaugacuacccaaaauacucagaggaagcaaaauuaaacagagaagaaauagaugggguaaagcuggaaucaacaaggauuuaccagauuuuggcgaucuauucaacugucgccaguucauugguacugguagucucccugggggcaaucaguuucuggaugugcucuaaugggucucuacaguguagaauauguauuuaa

SEQ ID NO: 37223 - RNA, 1701 nt, Artificial Sequence
  derived and/or modified CDS sequence (wt) from hemagglutinin__InfluenzaA__ADJ80993
augaaggcaauacuaguaguucugcuauauacauuugcaaccgcaaaugcagacacauuauguauagguuaucaugcgaacaauucaacagacacuguagacacaguacuagaaaagaauguaacaguaacacacucuguuaaccuucuagaagacaagcauaacgggaaacuaugcaaacuaagagggguagccccauugcauuuggguaaauguaacauugcuggcuggauccugggaaauccagagugugaaucacucuccacagcaagcucaugguccuacauuguggaaacaucuaguucagacaauggaacguguuacccaggagauuucaucgauuaugaggagcuaagagagcaauugagcucagugucaucauuugaaagguuugagauauuccccaagacaaguucauggcccaaucaugacucgaacaaagguguaacggcagcauguccuaaugcuggagcaaaaagcuucuacaaaaauuuaauauggcuaguuaaaaaaggaaauucauacccaaagcucagcaaaucuuacauuaaugauaaagggaaagaaguccucgugcuauggggcauucaccauccaucuacuagugcugaccaacaaagucucuaucagaaugcagaugcauauguuuuuguggggacaucaagauacagcaagaaguucaagccggaaauagcaauaagacccaaagugagggaucaagaagggagaaugaacuauuacuggacacuaguagagccgggagacaaaauaacauucgaagcaacuggaaaucuagugguaccgagauaugcauucgcaauggaaagaaaugcuggaucugguauuaucauuucagauacaccaguccacgauugcaauacaacuugucagacacccaagggugcuauaaacaccagccucccauuucagaauauacauccgaucacaauuggaaaauguccaaaauauguaaaaagcacaaaauugagacuggccacaggauugaggaaugucccgucuauucaaucuagaggccuauuuggggccauugccgguuucauugaagggggguggacagggaugguagauggaugguacgguuaucaccaucaaaaugagcaggggucaggauaugcagccgaccugaagagcacacagaaugccauugacaagauuacuaacaaaguaaauucuguuauugaaaagaugaauacacaguucacagcaguagguaaagaguucaaccaccuggaaaaaagaauagagaauuuaaauaaaaaaguugaugaugguuuccuggacauuuggacuuacaaugccgaacuguugguucuauuggaaaaugaaagaacuuuggacuaccacgauucaaaugugaagaacuuauaugaaaagguaagaagccaguuaaaaaacaaugccaaggaaauuggaaacggcugcuuugaauuuuaccacaaaugcgauaacacgugcauggaaagugucaaaaaugggacuuaugacuacccaaaauacucagaggaagcaaaauuaaacagagaagaaauagaugggguaaagcuggaaucaacaaggauuuaccagauuuuggcgaucuauucaacugucgccaguucauugguacugguagucucccugggggcaaucaguuucuggaugugcucuaaugggucucuacaguguagaauauguauuuaa

SEQ ID NO: 37224 - RNA, 1701 nt, Artificial Sequence
  derived and/or modified CDS sequence (wt) from hemagglutinin__InfluenzaA__ADJ81003
augaaggcaauacuaguaguucugcuauauacauuugcaaccgcaaaugcagacacauuauguauagguuaucaugcgaacaauucaacagacacuguagacacaguacuagaaaagaauguaacaguaacacacucuguuaaccuucuagaagacaagcauaacgggaaacuaugcaaacuaagagggguagccccauugcauuuggguaaauguaacauugcuggcuggauccugggaaauccagagugugaaucacucuccacagcaagcucaugguccuacauuguggaaacaucuaguucagacaauggaacguguuacccaggagauuucaucgauuaugaggagcuaagagagcaauugagcucagugucaucauuugaaagguuugagauauucccaaagacaaguucauggcccaaucaugacucgaacaaagguguaacggcagcauguccucaugcuggagcaaaaagcuucuacaaaaauuuaauauggcuaguuaaaaaaggaaauucauacccaaagcucagcaaauccuacauuaaugauaaagggaaagaaguccucgugcuauggggcauucaccauccaucuacuagugcugaccaacaaagccucuaucagaaugcagaugcauauguuuuuguggggacaucaagauacagcaagaaguucaagccggaaauagcaauaagacccaaagugagggaucaagaagggagaaugaacuauuacuggacacuaguagagccgggagacaaaauaacauucgaagcaacuggaaaucuagugguaccgagauaugcauucgcaauggaaagaaaugcuggaucugguauuaucauuucagauacaccaguccacgauugcaauacaacuugucagacacccaagggugcuauaaacaccagccucccauuucagaacauacauccgaucacaauuggaaaauguccaaaauauguaaaaagcacaaaauugagacuggccacaggauugaggaaugucccgucuauucaaucuagaggccuauuuggggccauugccgguuucauugaagggggguggacagggaugguagauggaugguacgguuaucaccaucaaaaugagcaggggucaggauaugcagccgaccugaagagcacacagaaugccauugacaagauuacuaacaaaguaaauucuguuauugaaaagaugaauacacaguucacagcaguagguaaagaguucaaccaccuggaaaaaagaauagagaauuuaaauaaaaaaguugaugaugguuuccuggacauuuggacuuacaaugccgaacuguugguucuauuggaaaaugaaagaacuuuggacuaccacgauucaaaugugaagaacuuauaugaaaagguaagaagccaguuaaaaaacaaugccaaggaaauuggaaacggcugcuuugaauuuuaccacaaaugcgauaacacgugcauggaaagugucaaaaaugggacuuaugacuacccaaaauacucagaggaagcaaaauuaaacagagaaaaaauagaugggguaaagcuggaaucaacaaggauuuaccagauuuuggcgaucuauucaacugucgccaguucauugguacugguagucucccugggggcaaucaguuucuggaugugcucuaaugggucucuacaguguagaauauguauuuaa

SEQ ID NO: 37225 - RNA, 1701 nt, Artificial Sequence; identical to SEQ ID NO: 36883
  derived and/or modified CDS sequence (wt) from hemagglutinin__InfluenzaA__ADJ81013

SEQ ID NO: 37226 - RNA, 1701 nt, Artificial Sequence
  derived and/or modified CDS sequence (wt) from hemagglutinin__InfluenzaA__ADJ81023
augaaggcaauacuaguaguucugcuauauacauuugcaaccgcaaaugcagacacauuauguauagguuaucaugcgaacaauucaacagacacuguagacacaguacuagaaaagaauguaacaguaacacacucuguuaaccuucuagaagacaagcauaacgggaaacuaugcaaacuaagagggguagccccauugcauuuggguaaauguaacauugcuggcuggauccugggaaacccagagugugaaucacucuccacagcaagcucaugguccuacauuguggaaacaucuaguucagacaauggaacguguuacccaggagauuucaucgauuaugaggagcuaagagagcaauugagcucagugucaucauuugaaagguuugagauguuccccaagacaaguucauggcccaaucaugacucgaacaaagguguaacggcagcauguccucaugcuggagcaaaaagcuucuacaaaaauuuaauauggcuaguuaaaaaaggaaauucauacccaaagcucaacaaauccuacauuaaugauaaaggaaaagaaguccucgugcuauggggcauucaccauccaucuacuagugcugaccaacaaagucucuaucagaaugcagaugcauauguuuuuguggggacaucaagauacagcaagaaguucaagccggaaauagcaauaagacccaaagugagggaucaagaagggagaaugaacuauuacuggacacuaguagagccgggagacaaaauaacauucgaagcaacuggaaaucuagugguaccgagauaugcauucgcaauggaaagaaaugcuggaucugguauuaucauuucagauacaccaguccacgauugcaauacaacuugccagacacccaagggugcuauaaacaccagccucccauuucagaauauacauccgaucacaauuggaaaauguccaaaauauguaaaaagcacaaaauugagacuggccacaggguugaggaaugucccgucuauucaaucuagaggccuauuuggagccauugccgguuucauugaagggggguggacagggaugguagauggaugguacgguuaccaccaucaaaaugagcaggggucaggauaugcagccgaccugaagagcacacagaaugccauugacgagauuacuaacaaaguaaauucuguuauugaaaagaugaauacacaguucacagcaguagguaaagaguucaaccaccuggaaaaaagaauagagaauuuaaauaaaaaaguugaugaugguuuccuggacauuuggacuuacaaugccgaacuguugguucuauuggaaaaugaaagaacuuuggacuaccacgauucaaaugugaagaacuuauaugaaaagguaagaagccaguuaaaaaacaaugccaaggaaauuggaaacggcugcuuugaauuuuaccacaaaugcgauaacacgugcauggaaagugucaaaaaugggacuuaugacuacccaaaauacucagaggaagcaaaauuaaacagagaagaaauagaugggguaaagcuggaaucaacaaggauuuaccagauuuuggcgaucuauucaacugucgccaguucauugguacugguagucucccugggggcaaucaguuucuggaugugcucuaaugggucucuacaguguagaauauguauuuaa

SEQ ID NO: 37227 - RNA, 1701 nt, Artificial Sequence
  derived and/or modified CDS sequence (wt) from hemagglutinin__InfluenzaA__ADJ81033
augaaggcaauacuaguaguucugcuauauacauuugcaaccgcaaaugcagacacauuauguauagguuaucaugcgaacaauucaacagacacuguagacacaguacuagaaaagaauguaacaguaacacacucuguuaaccuucuagaagacaagcauaacgggaaacuaugcaaacuaagagggguagccccauugcauuuggguaaauguaacauugcuggcuggauccugggaaauccagagugugaaucacucuccacagcaagcucaugguccuacauuguggaaacaucuaguucagacaauggaacguguuacccaggagauuucaucgauuaugaggagcuaagagagcaauugagcucagugucaucauuugaaagguuugagauauuccccaagacaaguucauggcccaaucaugacucgaacaaagguguaacggcagcauguccucaugcuggagcaaaaagcuucuacaaaaauuuaauauggcuaguuaaaaaaggaaauucauacccaaagcucagcaaauccuacauuaaugauaaagggaaagaaguccucgugcuauggggcauucaccauccaucuacuagugcugaccaacaaagucucuaucagaaugcagaugcauauguuuuuguggggacaucaagauacagcaagaaguucaagccggaaauagcaauaagacccaaagugagggaucaagaagggagaaugaacuauuacuggacacuaguagagccgggagacaaaauaacauucgaagcaacuggaaaucuggugguaccgagauaugcauucgcaauggaaagaaaugcuggaucugguauuaucauuucagauacaccaguccacgauugcaauacaacuugucagacacccaagggugcuauaaacaccagccucccauuucagaauauacauccgaucacaauuggaaaauguccaaaauauguaaaaagcacaaaauugagacuggccacaggauugaggaaugucccgucuauucaaucuagaggccuauuuggggccauugccgguuucauugaagggggguggacagggaugguagauggaugguacgguuaucaccaucaaaaugagcaggggucaggauaugcagccgaccugaagagcacacagaaugccauugacaagauuacuaacaaaguaaauucuguuauugaaaagaugaauacacaguucacagcaguagguaaagaguucaaccaccuggaaaaaagaauagagaauuuaaauaaaaaaguugaugaugguuuccuggacauuuggacuuacaaugccgaacuguugguucuauuggaaaaugaaagaacuuuggacuaccacgauucaaaugugaagaacuuauaugaaaagguaagaagccaguuaaaaaacaaugccaaggaaauuggaaacggcugcuuugaauuuuaccacaaaugcgauaacacgugcauggaaaguguaaaaaaugggacuuaugacuacccaaaauacucagaggaagcaaaauuaaacagagaagaaauagauggaguaaagcuggaaucaacaaggauuuaccagauuuuggcgaucuauucaacugucgccaguucauugguacugguagucucccugggggcaaucaguuucuggaugugcucuaaugggucucuacaguguagaauauguauuuaa

SEQ ID NO: 37228 - RNA, 1701 nt, Artificial Sequence
  derived and/or modified CDS sequence (wt) from hemagglutinin__InfluenzaA__ADJ81043
augaaggcaauacuaguaguucugcuauauacauuugcaaccgcaaaugcagacacauuauguauagguuaucaugcgaacaauucaacagacacuguagacacaguacuagaaaagaauguaacaguaacacacucuguuaaccuucuagaagacaagcauaacgggaaacuaugcaaacuaagagggguagccccauugcauuuggguaaauguaacauugcuggcuggauccugggaaauccagagugugaaucacucuccacagcaagcucaugguccuacauuguggaaacaucuaguucagacaauggaacguguuacccaggagauuucaucgauuaugaggagcuaagagagcaauugagcucagugucaucauuugaaagguuugagauauuccccaagacaaguucauggcccaaucaugacucgaacaaaggaguaacggcagcauguccucaugcuggagcaaaaagcuucuacaaaaaucuaauauggcuaguuaaaaaaggaaauucauacccaaagcucagcaaauccuacauuaaugauaaagggaaagaaguccucgugcuauggggcauucaccauccaucuacuagugcugaccaacaaagucucuaucagaaugcagaugcauauguuuuuguggggacaucaagauacagcaagaaguucaagccggaaauagcaauaagacccaaagugagggaucaagaagggagaaugaacuauuacuggacacuaguagagccgggagacaaaauaacauucgaagcaacuggaaaucuagugguaccgagauaugcauucgcaauggaaagaaaugcuggaucugguauuaucauuucagauacaccaguccacgauugcaauacaacuugucagacacccaagggugcuauaaacaccagccucccauuucagaauauacauccgaucacaauuggaaaauguccaaaauauguaaaaagcacaaaauugagacuggccacaggauugaggaaugucccgucuauucaaucuagaggccuauuuggggccauugccgguuucauugaagggggguggacagggaugguagauggaugguacgguuaucaccaucaaaaugagcaggggucaggauaugcagccgaccugaagagcacacagaaugccauugacgagauuacuaacaaaguaaauucuguuauugaaaagaugaauacacaguucacagcaguagguaaagaguucaaccaccuggaaaaaagaauagagaauuuaaauaaaaaaguugaugaugguuuccuggacauuuggacuuacaaugccgaacuguugguucuauuggaaaaugaaagaacuuuggacuaccacgauucaaaugugaagaacuuauaugaaaagguaagaagccaguuaaaaaacaaugccaaggaaauuggaaacggcugcuuugaauuuuaccacaaaugcgauaacacgugcauggaaagugucaaaaaugggacuuaugacuacccaaaauacucagaggaagcaaaauuaaacagagaagaaauagaugggguaaagcuggaaucaacaaggauuuaccagauuuuggcgaucuauucaacugucgccaguucauugguacugguagucucccugggggcaaucaguuucuggaugugcucuaaugggucucuacaguguagaauauguauuuaa

SEQ ID NO: 37229 - RNA, 1701 nt, Artificial Sequence
  derived and/or modified CDS sequence (wt) from hemagglutinin__InfluenzaA__ADJ81053
augaaggcaauacuaguaguucugcuauauacauuuacaaccgcaaaugcagacacauuauguauagguuaucaugcgaacaauucaacagacacuguagacacaguacuagaaaagaauguaacaguaacacacucuguuaaccuucuagaagacaagcauaacgggaaacuaugcaaauuaagagggguagccccauugcauuuggguaaauguaacauugcuggcuggauccugggaaauccagagugugaaucacucuccacagcaagcucaugguccuacauuguggaaacaucuaguucagacaauggaacguguuacccaggagauuucaucgauuaugaggagcuaagagagcaauugagcucagugucaucauuugaaagguuugagauauuccccaagacaaguucauggcccaaucaugacucgaacaaagguguaacggcagcauguccucaugcuggagcaaaaagcuucuacaaaaauuuaauauggcuaguuaaaaagggaaauucauacccaaagcucagcaaauccuacaucaaugauaaagggaaagaaguucucgugcuauggggcauucaccauccaucuacuagugcugaccaacaaagucucuaucagaaugcagaugcauauguuuuuguggggacaucaagauacagcaagaaguucaagccggaaauagcaauaagacccaaagugagggaucaagaagggagaaugaacuauuacuggacacuaguagagccgggagacaaaauaacauucgaagcaacuggaaaucuagugguaccgagauaugcauucgcaauggaaagaaaugcuggaucugguauuaucauuucagauacaccaguccacgauugcaauacaacuugucagacacccaagggugcuauaaacaccagccucccauuucagaauauacauccgaucacaauugggaaauguccaaaauauguaaaaagcacaaaauugagacuggccacaggauugaggaaugucccgucuauucaaucuagaggccuauuuggggccauugccgguuucauugaagggggguggacagggaugguagauggaugguacgguuaucaccaucaaaaugagcaggggucaggauaugcagccgaccugaagagcacacagaaugccauugacaagauuacuaacaaaguaaauucuguuauugaaaagaugaacacacaguucacagcaguagguaaagaguucaaccaccuggaaaaaagaauagagaauuuaaauaaaaaaguugaugaugguuuccuggacauuuggacuuacaaugccgaacuguugguucuauuggaaaaugaaagaacuuuggacuaccacgauucaaaugugaagaacuuauaugaaaagguaagaagccaguuaaaaaacaaugccaaggaaauuggaaacggcugcuuugaauuuuaccacaaaugcgauaacacgugcauggaaagugucaaaaaugggacuuaugacuacccaaaauacucagaggaagcaaaauuaaacagagaagaaauagaugggguaaagcuggaaucaacaaggauuuaccagauuuuggcgaucuauucaacugucgccaguucauugguacugguagucucccugggggcaaucaguuucuggaugugcucuaaugggucucuacaguguagaauauguauuuaa

SEQ ID NO: 37230 - RNA, 1701 nt, Artificial Sequence
  derived and/or modified CDS sequence (wt) from hemagglutinin__InfluenzaA__ADJ81063
augaaggcaauacuaguaguucugcuauauacauuugcaaccgcaaaugcagacacauuauguauagguuaucaugcgaacaauucaacagacacuguagacacaguacuagaaaagaauguaacaguaacacacucgguuaaccuucuagaagacaagcauaacgggaaacuaugcaaacuaagagggguagccccauugcauuuggguaaauguaacauugcuggcuggauccugggaaauccagagugugaaucacucuccacagcaagcucaugguccuacauuguggaaacaucuaguucagacaauggaacguguuacccaggagauuucaucgauuaugaggagcuaagagagcaauugagcucagugucaucauuugaaagguuugagauauuccccaagacaaguucauggcccaaucaugacucgaacaaagguguaacggcagcguguccucaugcuggagcaaaaagcuucuacaaaaauuuaauauggcuaguuaaaaaaggaaauucauacccaaagcucagcaaauccuacauuaaugauaaagggaaagaaguccucgugcuauggggcauucaccauccaucuacuagugcugaccaacaaagccucuaucagaaugcagaugcauauguuuuuguggggacaucaagauacagcaagaaguucaagccggaaauagcaauaagacccaaagugagggaucaagaagggagaaugaacuauuacuggacacuaguagagccgggagacaaaauaacauucgaagcaacuggaaaucuagugguaccgagauacgcauucgcaauggaaagaaaugcuggaucugguauuaucauuucagauacaccaguccacgauugcaauacaacuugucaaacacccaagggugcuauaaacaccagccucccauuucagaauauacauccgaucacaauuggaaaauguccaaaauauguaaaaagcacaaaauugagacuggccacaggauugaggaaugucccgucuauucaaucuagaggccuauuuggggccauugccggcuucauugaagggggguggacagggaugguagauggaugguacgguuaucaccaucaaaaugagcaggggucaggauaugcagccgaccugaagagcacacagaaugccauugacaagauuacuaacaaaguaaauucuguuauugaaaagaugaauacacaguucacagcaguagguaaagaguucaaccaccuggaaaaaagaauagagaauuuaaauaaaaaaguugaugaugguuuccuggacauuuggacuuacaaugccgaacuguugguucuauuggaaaaugaaagaacuuuggacuaccacgauucaaaugugaagaacuuauaugaaaagguaagaagccaguuaaaaaacaaugccaaggaaauuggaaacggcugcuuugaauuuuaccacaaaugcgauaacacgugcauggaaagugucaaaaaugggacuuaugacuacccaaaauacucagaggaagcaaaauuaaacagagaagaaauagaugggguaaagcuggaaucaacaaggauuuaccagauuuuggcgaucuauucaacugucgccaguucauugguacugguagucucccugggggcaaucaguuucuggaugugcucuaaugggucucuacaguguagaauauguauuuaa

SEQ ID NO: 37231 - RNA, 1701 nt, Artificial Sequence
  derived and/or modified CDS sequence (wt) from hemagglutinin__InfluenzaA__ADJ84772
augaaaacuaucauugcuuugagcuacauucuaugucugguuuucgcucaaaaacuuccuggaaaugacaacagcacggcaacgcugugccuugggcaccaugcaguaccaaacggaacgauagugaaaacaaucacgaaugaccaaauugaaguuacuaaugcuacugagcugguucagaguuccucaacaggugaaauaugcgacaguccucaucagauccuugauggaaaaaacugcacacuaauagaugcucuauugggagacccucagugugauggcuuccaaaauaagaaaugggaccuuuuuguugaacgcagcaaagccuacagcaacuguuacccuuaugaugugccggauuaugccucccuuaggucacuaguugccucauccggcacacuggaguuuaacaaugaaagcuucaauuggacuggagucacucaaaacggaacaagcucugcuugcauaaggagaucuaaaaacaguuucuuuaguagauugaauugguugacccacuuaaacuucaaauacccagcauugaacgugacuaugccaaacaaugaacaauuugacaaauuguacauuugggggguucaccacccggguacggacaaagaccaaaucuuccuguaugcucaagcaucaggaagaaucacagucucuaccaaaagaagccaacaaacugcaaucccgaauaucggaucuagacccagaguaaggaauaucccuagcagaauaagcaucuauuggacaauaguaaaaccgggagacauacuuuugauuaacagcacagggaaucuaauugcuccuagggguuacuucaaaauacgaagugggaaaagcucaauaaugagaucagaugcacccauuggcaaaugcaauucugaaugcaucacuccaaauggaagcauucccaaugacaaaccauuccaaaauguaaacaggaucacauacggggccugucccagauauguuaagcaaaacacucugaaauuggcaacagggaugcgaaauguaccagagaaacaaacuagaggcauauuuggcgcaaucgcggguuucauagaaaaugguugggagggaaugguggaugguugguacgguuucaggcaucaaaauucugagggaagaggacaagcagcagaucucaaaagcacucaagcagcaaucgaucaaaucaaugggaagcugaauagauugaucgggaaaaccaacgagaaauuccaucagauugaaaaagaauucucagaagucgaagggagaauucaggaccuugagaaauauguugaggacacuaaaauagaucucuggucauacaacgcggagcuucuuguugcccuggagaaccaacauacaauugaucuaacugacucagaaaugaacaaacuguuugaaaaaacaaagaagcaacugagggaaaaugcugaggauaugggcaaugguuguuucaaaauauaccacaaaugugacaaugccugcauaggaucaaucagaaauggaacuuaugaccacgauguauacagagaugaagcauuaaacaaccgguuucagaucaagggaguugagcugaagucaggguacaaagauuggauccuauggauuuccuuugccauaucauguuuuuugcuuuguguugcuuuguugggguucaucaugugggccugccaaaaaggcaacauuaggugcaacauuugcauuuga

SEQ ID NO: 37232 - RNA, 1701 nt, Artificial Sequence
  derived and/or modified CDS sequence (wt) from hemagglutinin__InfluenzaA__ADJ88782
augaagacuaucauugcuuugagcuacaugcuaugucugguuuucgcucaaaaacuuccuggaaaugacaacagcacggcaacgcugugccuugggcaccaugcaguaccaaacggaacgauagugaaaacaaucacgaaugaccaaauugaaguuacuaaugcuacggagcugguucagaguuccucaacaggugaaauaugcgacaguccucaucagauccuugauggagaaaacugcacacuaauagaugcucuauugggagacccucagugugauggcuuccaaaauaagaaaugggaccuuuuuguugaacgcagcaaagccuacagcaacuguuacccuuaugaugugccggauuaugccucccuuaggucacuaauugccucauccggcacacuggaguuuaacaaugaaagcuucaauuggacuggagucacucaaaacggaacaagcucugcuugcauaaggagaucuaauaacaguuucuuuaguagauugaauugguugacccacuuaaaauucaaauacccagcauuaaacgugacuaugccaaacaaugaacaauuugacaaauuguacauuugggggguucaccacccggguacggacaaugaccaaaucuuccuguaugcucaagcaucaggaagaaucacagucucuaccaaaagaagccaacaaacuguaaucccgaauaucggaucuagacccagaguaaggaauaucccuagcagaauaagcaucuauuggacaauaguaaaaccgggagacauacuuuugauuaacagcacagggaaucuaauugcuccuagggguuacuucaaaauacgaagugggaaaagcucaauaaugagaucagaugcacccauuggcaaaugcaauucugaaugcaucacuccaaauggaagcauucccaaugacaaaccauuccaaaauguaaacaggaucacauacggggccugucccagauauguuaagcaaaacacucugaaauuggcaacagggaugcgaaauguaccagagaaacaaacuagaggcauauuuggcgcaaucgcggguuucauagaaaaugguugggagggaaugguggaugguugguacgguuucagacaucaaaauucugagggaagaggacaagcagcagaucucaaaagcacucaagcagcaaucgaucaaaucaaugggaagcugaauagauugaucgggaaaaccaacgagaaauuccaucagauugaaaaagaauucucagaagucgaagggagaauucaggaccuugagaaauauguugaggacaccaaaauagaucucuggucauacaacgcggagcuucuuguugcccuggagaaccaacauacaauugaucuaacugacucagaaaugaacaaacuguuugaaaaaacaaagaagcaacugggggaaaaugcugaggauaugggcaaugguuguuucaaaauauaccacaaaugugacaaugccugcauaggaucaaucagaaauggaacuuaugaccacgauguauacagagaugaagcauuaaacaaccgguuccagaucaagggaguugagcugaagucaggguacaaagauuggauccuauggauuuccuuugccauaucauguuuuuugcuuuguguugcuuuguugggguucaucaugugggccugccaaaaaggcaacauuaggugcaacauuugcauuuga

SEQ ID NO: 37233 - RNA, 1701 nt, Artificial Sequence
  derived and/or modified CDS sequence (wt) from hemagglutinin__InfluenzaA__ADK21733
augaaggcaauacuaguaguucugcuauauacauuugcaaccgcaaaugcagacacauuauguauagguuaucaugcgaacaauucaacagacacuguagacacaguacuagaaaagaauguaacaguaacacacucuguuaaccuucuagaagacaagcauaacgggaaacuaugcaaacuaagagggguagccccauugcauuuggguaaauguaacauugcuggcuggauccugggaaauccagagugugaaucacucuccacagcaagcucaugguccuacauuguggaaacaucuaguucagacaauggaacguguuacccaggagauuucaucgauuaugaggagcuaagagagcaauugagcucagugucaucauuugaaagguuugagauauuccccaagacaaguucauggcccaaucaugacucgaacaaagguguaacggcagcauguccucaugcuggagcaaaaagcuucuacaaaaauuuaauauggcuaguuaaaaaaggaaauucauacccaaagcucagcaaauccuacauuaaugauaaagggaaagaaguccucgugcuauggggcauucaccauccaucuacuaguacugaccaacaaagucucuaucagaaugcagaugcauauguuuuuguggggacaucaagauacagcaagaaguucaagccggaaauagcaauaagacccaaagugagggaucaagaagggagaaugaacuauuacuggacacuaguagagccgggagacaaaauaacauucgaagcaacuggaaaucuagugguaccgagauaugcauucgcaauggaaagaaaugcuggaucugguauuaucauuucagauacaccagcccacgauugcaauacaacuugucagacacccaagggugcuauaaacaccagccucccauuucagaauauacauccgaucacaauuggaaaauguccaaaauauguaaaaagcacaaaauugagacuggccacaggauugaggaaugucccgucuauucaaucuagaggccuauuuggggccauugccgguuucauugaagggggguggacagggaugguagauggaugguacgguuaucaccaucaaaaugagcaggggucaggauaugcagccgaccugaagagcacacagaaugccauugacaagauuacuaacaaaguaaauucuguuauugaaaagaugaauacacaguucacagcaguagguaaagaguucaaccaccuggaaaaaagaauagagaauuuaaauaaaaaaguugaugaugguuuccuggacauuuggacuuacaaugccgaacuguugguucuauuggaaaaugaaagaacuuuggacuaccacgauucaaaugugaagaacuuauaugaaaagguaagaagccaguuaaaaaacaaugccaaggaaauuggaaacggcugcuuugaauuuuaccacaaaugcgauaacacgugcauggaaagugucaaaaaugggacuuaugacuacccaaaauacucagaggaagcaaaauuaaacagagaagaaauagaugggguaaagcuggaaucaacaaggauuuaccagauuuuggcgaucuauucaacugucgccaguucauugguacugguagucucccugggggcaaucaguuucuggaugugcucuaaugggucucuacaguguagaauauguauuuaa

SEQ ID NO: 37234 - RNA, 1701 nt, Artificial Sequence
  derived and/or modified CDS sequence (wt) from hemagglutinin__InfluenzaA__ADK21743
augaaggcaauacuaguaguucugcuauauacauuugcaaccgcaaaugcagacacauuauguauagguuaucaugcgaacaauucaacagacacuguagacacaguacuagaaaagaauguaacaguaacacacucuguuaaccuucuagaagacaagcauaacgggaaacuaugcaaacuaagagggguagccccauugcauuuggguaaauguaacaucgcuggcuggauccugggaaauccagagugugaaucacucuccacagcaagcucaugguccuacauuguggaaacaucuaguucagacaauggaacguguuacccaggagauuucaucgauuaugaggagcuaagagagcaauugagcucagugucaucauuugaaagguuugagauauuccccaagacaaguucauggcccaaucaugacucgaacaaagguguaacggcagcauguccucaugcuggagcaaaaagcuucuacaaaaauuuaauauggcuaguuaaaaaaggaaauucauacccaaagaucagcaacuccuacauuaaugauaaagggaaagaaguucucgugcuauggggcauucaccauccaucuacuagugcugaccaacaaagucucuaucagaaugcagaugcauauguuuuuguggggacaucaagauacagcaagaaguucaagccggaaauagcaauaagacccaaagugagggaucaagaagggagaaugaacuauuacuggacacuaguagagccgggagacaaaauaacauucgaagcaacuggaaaucuagugguaccgagauaugcauucgcaauggaaagaaaugcuggaucugguauuaucauuucagauacaccagcccacgauugcaauacaacuugucagacacccaagggugcuauaaacaccagccucccauuucagaauauacauccgaucacaauuggaaaauguccaaaauauguaaaaagcacaaaauugagacuggccacaggauugaggaaugucccgucuauucaaucuagaggccuauuuggggccauugccgguuucauugaagggggguggacagggaugguagauggaugguacgguuaucaccaucaaaaugagcaggggucaggauaugcagccgaccugaagagcacacagaaugccauugacgagauuacuaacaaaguaaauucuguuauugaaaagaugaauacacaguucacagcaguagguaaagaguucaaccaccuggaaaaaagaauagagaauuuaaauaaaaaaguugaugaugguuuccuggacauuuggacuuacaaugccgaacuguugguucuauuggaaaaugaaagaacuuuggacuaccacgauucaaaugugaagaacuuauaugaaaagguaagaagccaguuaaaaaacaaugccaaggaaauuggaaacggcugcuuugaauuuuaccacaaaugcgauaacacgugcauggaaagugucaaaaaugggacuuaugacuacccaaaauacucagaggaagcaaaauuaaacagagaagaaauagaugggguaaagcuggaaucaacaaggauuuaccagauuuuggcgaucuauucaacugucgccaguucauugguacugguagucucccugggggcaaucaguuucuggaugugcucuaaugggucucuacaguguagaauauguauuuaa

SEQ ID NO: 37235 - RNA, 1701 nt, Artificial Sequence
  derived and/or modified CDS sequence (wt) from hemagglutinin__InfluenzaA__ADK21753
augaaggcaauacuaguaguucugcuauauacauuugcaaccgcaaaugcagacacauuauguauagguuaucaugcgaacaauucaacagacacuguagacacaguacuagaaaagaauguaacaguaacacacucuguuaaccuucuagaagacaagcauaacgggaaacuaugcaaacuaagagggguagccccauugcauuuggguaaauguaacauugcuggcuggauccugggaaauccagagugugaaucacucuccacagcaagcucaugguccuacauuguggaaacaucuaguucagacaauggaacguguuacccaggagauuucaucgauuaugaagagcuaagagagcaauugagcucagugucaucauuugaaagguuugagauauuccccaagacaaguucauggcccaaucaugacucuaacaaagguguaacggcagcauguccucaugcuggagcaaaaagcuucuacaaaaauuuaauauggcuaguuaaaaaaggaaauucauacccaaagcucagcaaauccuacauuaaugauaaagggaaagaaguccucgugcuauggggcauucaccauccaucuacuagugcugaccaacaaagucucuaucagaaugcagaugcauauguuuuuguggggacaucaagauacagcaagaaguucaagccggaaauagcaauaagacccaaagugagggaucaagaagggagaaugaacuauuacuggacacuaguagagccgggagacaaaauaacauucgaagcaacuggaaaucuagugguaccgagauaugcauucgcaauggaaggaaaugcuggaucugguauuaucauuucagauacaccaguccacgauugcaauacaacuugucagacacccaagggugcuauaaacaccagccucccauuucagaauauacauccgaucacaauuggaaaauguccaaaauauguaaaaagcacaaaauugagacuggccacaggauugaggaaugucccgucuauucaaucuagaggccuauuuggggccauugccgguuucauugaagggggguggacagggaugguagauggaugguacgguuaucaccaucaaaaugagcaggggucaggauaugcagccgaccugaagagcacacagaaugccauugacaagauuacuaacaaaguaaauucuguuauugaaaagaugaauacacaguucacagcaguagguaaagaguucaaccaccuggaaaaaagaauagagaauuuaaauaaaaaaguugaugaugguuuccuggacauuuggacuuacaaugccgaacuguugguucuauuggaaaaugaaagaacuuuggacuaccacgauucaaaugugaagaacuuauaugaaaagguaagaagccaguuaaaaaacaaugccaaggaaauuggaaacggcugcuuugaauuuuaccacaaaugcgauaacacgugcauggaaagugucaaaaaugggacuuaugacuacccaaaauacucagaggaagcaaaauuaaacagagaagaaauagaugggguaaagcuggaaucaacaaggauuuaccagauuuuggcgaucuauucaacugucgccaguucauugguacugguagucucccugggggcaaucaguuucuggaugugcucuaaugggucucuacaguguagaauauguauuuaa

SEQ ID NO: 37236 - RNA, 1701 nt, Artificial Sequence
  derived and/or modified CDS sequence (wt) from hemagglutinin__InfluenzaA__ADK21763
augaaggcaauacuaguaguucugcuauauacauuugcaaccgcaaaugcagacacauuauguauagguuaucaugcgaacaauucaacagacacuguagacacaguacuagaaaagaauguaacaguaacacacucuguuaaccuucuagaagacaagcauaacgggaaacuaugcaaacuaagagggguagccccauugcauuuggguaaauguaacauugcuggcuggauccugggaaauccagagugugaaucacucuccacagcaagcucaugguccuacauuguggaaacaucuaguucagacaauggaacguguuacccaggagauuucaucgauuaugaggagcuaagagagcaauugagcucagugucaucauuugaaagguuugagauauuccccaagacaaguucauggcccaaucaugacucgaacaaagguguaacggcagcauguccucaugcuggagcaaaaagcuucuacaaaaauuuaauauggcuaguuaaaaaaggaaauucauacccaaagcucagcaaauccuacauuaaugauaaagggaaagaaguccucgugcuauggggcauucaccauccaucuacuagugcugaccaacaaagucucuaucagaaugcagaugcauauguuuuuguggggacaucaaaauacagcaagaaguucaagccggaaauagcaauaagacccaaagugagggaucaagaagggagaaugaacuauuacuggacacuaguagagccgggagacaaaauaacauucgaagcaacuggaaaucuagugguaccgagauaugcauucgcaauggaaagaaaugcuggaucugguauuaucauuucagauacaccaguccacgauugcaauacaacuugucagacacccaagggugcuauaaacaccagccucccauuucagaauauacauccgaucacaauuggaaaauguccaaaauauguaaaaagcacaaaauugagacuggccacaggauugaggaaugucccgucuauucaaucuagaggccuauuuggggccauugccgguuucauugaagggggguggacagggaugguagauggaugguacgguuaucaccaucaaaaugagcaggggucaggauaugcagccgaccugaagagcacacagaaugccauugacgagauuacuaacaaaguaaauucuguuauugaaaagaugaauacacaguucacagcaguagguaaagaguucaaccaccuggaaaaaagaauagagaauuuaaauaaaaaaguugaugaugguuuccuggacauuuggacuuacaaugccgaacuguugguucuauuggaaaaugaaagaacuuuggacuaccacgauucaaaugugaagaacuuauaugaaaagguaagaagccaguuaaaaaacaaugccaaggaaauuggaaacggcugcuuugaauuuuaccacaaaugugauaacacgugcauggaaagugucaaaaaugggacuuaugacuacccaaaauacucagaggaagcaaaauuaaacagagaagaaauagaugggguaaagcuggaaucaacaaggauuuaccagauuuuggcgaucuauucaacugucgccaguucauugguacugguagucucccugggggcaaucaguuucuggaugugcucuaaugggucucuacaguguagaauauguauuuaa

SEQ ID NO: 37237 - RNA, 1701 nt, Artificial Sequence; identical to SEQ ID NO: 35845
  derived and/or modified CDS sequence (wt) from hemagglutinin__InfluenzaA__ADK21773

SEQ ID NO: 37238 - RNA, 1701 nt, Artificial Sequence
  derived and/or modified CDS sequence (wt) from hemagglutinin__InfluenzaA__ADK21783
augaaggcaauacuaguaguucugcuauauacauuugcaaccgcaaaugcagacacauuauguauagguuaucaugcgaacaauucaacagacacuguagacacaguacuagaaaagaauguaacaguaacacacucuguuaaccuucuagaagacaagcauaacgggaaacuaugcaaacuaagagggguagccccauugcauuuggguaaauguaacauugcuggcuggauccugggaaauccagagugugaaucacucuccacagcaagcucaugguccuacauuguggaaacaucuaguucagacaauggaacguguuacccaggagauuucaucgauuaugaggagcuaagagagcaauugagcucagugucaucauuugaaagguuugagauauuccccaagacaaguucauggcccaaucaugacucgaacaaagguguaacggcagcauguccucaugcuggagcaaaaagcuucuacaaaaauuuaauauggcuaguuaaaaaaggaaauucauacccaaagcucagcaaauccuacauuaaugauaaagggaaagaaguccucgugcuauggggcauucaccauccaucuacuagugcugaccaacaaagucucuaucagaaugcagaugcauauguuuuuguggggacaucaagauacagcaagaaguucaagccggaaauagcaauaagacccaaagugagggaucaagaagggagaaugaacuauuacuggacacuaguagagccgggagacaaaauaacauucgaagcaacuggaaaucuggugguaccgagauaugcauucgcaauggaaagaaaugcuggaucugguauuaucauuucagauacaccaguccacgauugcaauacaacuugucagacacccaagggugcuauaaacaccagccucccauuucagaauauacauccgaucacaauuggaaaauguccaaaauauguaaaaagcacaaaauugagacuggccacaggauugaggaaugucccgucuauucaaucuagaggccuauuuggggccauugccgguuucauugaagggggguggacagggaugguagauggaugguacgguuaucaccaucaaaaugagcaggggucaggauaugcagccgaccugaagagcacacagaaugccauugacaagauuacuaacaaaguaaauucuguuauugaaaagaugaauacacaguucacagcaguagguaaagaguucaaccaccuggaaaaaagaauagagaauuuaaauaaaaaaguugaugaugguuuccuggacauuuggacuuacaaugccgaacuguugguucuauuggaaaaugaaagaacuuuggacuaccacgauucaaaugugaagaacuuauaugaaaagguaagaagccaguuaaaaaacaaugccaaggaaauuggaaacggcugcuuugaauuuuaccacaaaugcgauaacacgugcauggaaagugucaaaaaugggacuuaugacuacccaaaauacucagaggaagcaaaauuaaacagagaagaaauagaugggguaaagcuggaaucaacaaggauuuaccagauuuuggcgaucuauucaacugucgccaguucauugguacugguagucucccugggggcaaucaguuucuggaugugcucuaaugggucucuacaguguagaauauguauuuaa

SEQ ID NO: 37239 - RNA, 1701 nt, Artificial Sequence
  derived and/or modified CDS sequence (wt) from hemagglutinin__InfluenzaA__ADK21813
augaaggcaauacuaguaguucugcuauauacauuugcaaccgcaaaugcagacacauuauguauagguuaucaugcgaacaauucaacagacacuguagacacaguacuagaaaagaauguaacaguaacacacucuguuaaccuucuagaagacaagcauaacgggaaacuaugcaaacuaagagggguagccccauugcauuuggguaaauguaacauugcuggcuggauccugggaaauccagagugugaaucacucuccacagcaagcucaugguccuacauuguggaaacaucuaguucagacaauggaacguguuacccaggagauuucaucgauuaugaggagcuaagagagcaauugagcucagugucaucauuugaaagguuugagauauuccccaagacaaguucauggcccaaucaugacucgaacaaagguguaacggcagcauguccucaugcuggagcaaaaagcuucuacaaaaauuuaauauggcuaguuaaaaaaggaaauucauacccaaagcucagcaaauccuacauuaaugauaaagggaaagaaguccucgugcuauggggcauucaccauccaucuacuagugcugaccaacaaagucucuaucagaaugcagaugcauauguuuuuguggggacaucaagauacagcaagaaguucaagccggaaauagcaauaagacccaaagugagggaucaagaagggagaaugaacuauuacuggacacuaguagagccgggagacaaaauaacauucgaagcaacuggaaaucuagugguaccgagauaugcauucgcaauggaaagaaaugcuggaucugguauuaucauuucagauacaccaguccacgauugcaauacaacuugucagacacccaaaggugcuauaaacaccagccucccauuucagaauauacauccgaucacaauuggaaaauguccaaaauauguaaaaagcacaaaauugagacuggccacaggauugcggaaugucccgucuauucaaucuagaggccuauuuggggccauugccgguuucauugaagggggguggacagggaugguagauggaugguacgguuaucaccaucaaaaugagcaggggucaggauaugcagccgaccugaagagcacacagaaugccauugacgagauuacuaacaaaguaaauucuguuauugaaaagaugaauacacaguucacagcaguagguaaagaguucaaccaccuggaaaaaagaauagagaauuuaaauaaaaagguugaugaugguuuccuggacauuuggacuuacaaugccgaacuguugguucuauuggaaaaugaaagaacuuuggacuaccacgauucaaaugugaagaacuuauaugaaaagguaagaagccaguuaaaaaacaaugccaaggaaauuggaaacggcugcuuugaauuuuaccacaaaugcgauaacacgugcauggaaagugucaaaaaugggacuuaugacuacccaaaauacucagaggaagcaaaauuaaacagagaagaaauagaugggguaaagcuggaaucaacaaggauuuaccagauuuuggcgaucuauucaacugucgccaguucauugguacugguagucucccugggggcaaucaguuucuggaugugcucuaaugggucucuacaguguagaauauguauuuaa

SEQ ID NO: 37240 - RNA, 1701 nt, Artificial Sequence
  derived and/or modified CDS sequence (wt) from hemagglutinin__InfluenzaA__ADK21823
augaaggcaauacuaguaguucugcuauauacauuugcaaccgcaaaugcagacacauuauguauagguuaucaugcgaacaauucaacagacacuguagacacaguacuagaaaagaauguaacaguaacacacucuguuaaccuucuagaagacaagcauaacgggaaacuaugcaaacuaagagggguagccccauugcauuuggguaaauguaacauugcuggcuggauccugggaaauccagagugugaaucacucuccacagcaagcucaugguccuacauuguggaaacaucuaguucagacaauggaacguguuacccaggagauuucaucgauuaugaggagcuaagagagcaauugagcucagugucaucauuugaaagguuugagauauuccccaagacaaguucauggcccaaucaugacucgaacaaagguguaacggcggcauguccucaugcuggagcaaaaagcuucuacaaaaauuuaauauggcuaguuaaaaaaggaaauucauacccaaagcucagcaaauccuacauuaaugauaaagggaaagaaguccucgugcuauggggaauucaccauccaucuacuagugcugaccaacaaagucucuaucagaaugcagaugcauauguuuuuguggggacaucaagauacagcaagaaguucaagccggaaauagcaauaagacccaaagugagggaucaagaagggagaaugaacuauuacuggacacuaguagagccgggagacaaaauaacauucgaagcaacuggaaaucuagugguaccgagauaugcauucgcaauggaaagaaaugcuggaucugguauuaucauuucagauacaccaguccacgauugcaauacaacuugucagacacccaagggugcuauaaacaccagccucccauuucagaauauacauccgaucacaauuggaaaauguccaaaauauguaaaaagcacaaaauugagacuggccacaggauugaggaaugucccgucuauucaaucuagaggccuauuuggggccauugccgguuucauugaagggggguggacagggaugguagauggaugguacgguuaucaccaucaaaaugagcaggggucaggauaugcagccgaccugaagagcacacagcaugccauugacgagauuacuaacaaaguaaauucuguuauugaaaagaugaauacacaguucacagcaguagguaaagaguucaaccaccuggaaaaaagaauagagaauuuaaauaaaaaaguugaugaugguuuccuggacauuuggacuuacaaugccgagcuguugguucuauuggaaaaugaaagaacuuuggacuaccacgauucaaaugugaagaacuuauaugaaaagguaagaagccaguuaaaaaacaaugccaaggaaauuggaaacggcugcuuugaauuuuaccacaaaugcgauaacacgugcauggaaagugucaaaaaugggacuuaugacuacccaaaauacucagaggaagcaaaauuaaacagagaagaaauagaugggguaaagcuggaaucaacaaggauuuaccagauuuuggcgaucuauucaacugucgccaguucauugguacugguagucucccugggggcaaucaguuucuggaugugcucuaaugggucucuacaguguagaauauguauuuaa

SEQ ID NO: 37241 - RNA, 1701 nt, Artificial Sequence
  derived and/or modified CDS sequence (wt) from hemagglutinin__InfluenzaA__ADK21833
augaaggcaauacuaguaguucugcuauauacauuugcaaccgcaaaugcagacacauuauguauagguuaucaugcgaacaauucaacagacacuguagacacaguacuagaaaagaauguaacaguaacacacucuguuaaccuucuagaagacaagcauaacgggaaacuaugcaaacuaagagggguagccccauugcauuuggguaaauguaacauugcuggcuggauccugggaaauccagagugugaaucacucuccacagcaagcucaugguccuacauuguggaaacaucuaguucagacaauggaacguguuacccaggagauuucaucgauuaugaggagcuaagagagcaauugagcucagugucaucauuugaaagguuugagauauuccccaagacaaguucauggcccaaucaugacucgaacaaagguguaacggcagcauguccucaugcuggagcaaaaagcuucuacaaaaauuuaauauggcuaguuaaaaaaggaaauucauacccaaagcucagcaaauccuacauuaaugauaaagggaaagaaguccucgugcuauggggcauucaccauccaucuacuagugcugaccaacaaagucucuaucagaaugcagaugcauauguuuuuguggggacaucaagauacagcaagaaguucaagccggaaauagcaauaagacccaaagugagggaucaagaagggagaaugaacuauuacuggacacuaguagagccgggagacaaaauaacauucgaagcaacuggaaaucuagugguaccgagauaugcauucgcaauggaaagaaaugcuggaucugguauuaucauuucagauacaccaguucgcgauugcaauacaacuugucagacacccaagggugcuauaaacaccagccucccauuucagaauauacauccgaucacaauuggaaaauguccaaaauauguaaaaagcacaaaauugagacuggccacaggauugaggaaugucccgucuauucaaucuagaggccuauuuggggccauugccgguuucauugaagggggguggacagggaugguagauggaugguacgguuaucaccaucaaaaugagcaggggucaggauaugcagccgaccugaagagcacacagaaugccauugacgagauuacuaauaaaguaaauucuguuauugaaaagaugaauacacaguucacagcaguagguaaagaguucaaccaccuggaaaaaagaauagagaauuuaaauaaaaaaguugaugaugguuuccuggacauuuggacuuacaaugccgaacuguugguucuauuggaaaaugaaagaacuuuggacuaccacgauucaaaugugaagaacuuauaugaaaagguaagaagccaguuaaaaaacaaugccaaggaaauuggaaacggcugcuuugaauuuuaccacaaaugcgauaacacgugcauggaaagugucaaaaaugggacuuaugacuacccaaaauacucagaggaagcaaaauuaaacagagaagaaauagaugggguaaagcuggaaucaacaaggauuuaccagauuuuggcgaucuauucaacugucgccaguucauugguacugguagucucccugggggcaaucaguuucuggaugugcucuaaugggucucuacaguguagaauauguauuuaa

SEQ ID NO: 37242 - RNA, 1701 nt, Artificial Sequence
  derived and/or modified CDS sequence (wt) from hemagglutinin__InfluenzaA__ADK21843
augaaggcaauacuaguaguucugcuauauacauuugcaaccgcaaaugcagacacauuauguauagguuaucaugcgaacaauucaacagacacuguagacacaguacuagaaaagaauguaacaguaacacacucuguuaaccuucuagaagacaagcauaacgggaaacuaugcaaacuaagagggguagccccauugcauuuggguaaauguaacauugcuggcuggauccugggaaauccagagugugaaucacucuccacagcaagcucaugguccuacauuguggaaacaucuaguucagacaauggaacguguuacccaggagauuucaucgauuaugaggagcuaagagagcaauugagcucagugucaucauuugaaagguuugagauauuccccaagacaaguucauggcccaaucaugacucgaacaaagguguaacggcagcauguccucaugcuggagcaaaaagcuucuacaaaaauuuaauauggcuaguuaaaaaaggaaauucauacccaaagcucagcaaaucauacauuaaugauaaagggaaagaaguccucgugcuauggggcauucaccauccaucuacuagugcugaccaacagagucucuaucagaaugcagaugcauauguuuuuguggggacaucaagauacagcaagaaguucaagccggaaauagcaauaagacccaaagugagggaucaagaagggagaaugaacuauuacuggacacuaguagagccgggagacaaaauaacauucgaagcaacuggaaaucuagugguaccgagauaugcauucgcaauggaaagaaaugcuggaucugguauuaucauuucagauacaccaguccacgauugcaauacaacuugucagacacccaagggugcuauaaacaccagccucccauuucagaauauacauccgaucacaauuggaaaauguccaaaauauguaaaaagcacaaaauugagacuggccacaggauugaggaaugucccgucuauucaaucuagaggccuauuuggggccauugccgguuucauugaagggggguggacagggaugguagauggaugguacgguuaucaccaucaaaaugagcaggggucaggauaugcagccgaucugaagagcacacagaaugccauugacaagauuacuaacaaaguaaauucuguuauugaaaagaugaauacacaguucacagcaguagguaaagaguucaaccaccuggaaaaaagaauagagaauuuaaauaaaaaaguugaugaugguuuccuggacauuuggacuuacaaugccgaacuguugguucuauuggaaaaugaaagaacuuuggacuaccacgauucaaaugugaagaacuuauaugaaaagguaagaagccaguuaaaaaacaaugccaaggaaauuggaaacggcugcuuugaauuuuaccacaaaugcgauaacacgugcauggaaagugucaaaaaugggacuuaugacuacccaaaauacucagaggaagcaaaauuaaacagagaagaaauagaugggguaaagcuggaaucaacaaggauuuaccagauuuuggcgaucuauucaacugucgccaguucauugguacugguagucucccugggggcaaucaguuucuggaugugcucuaaugggucucuacaguguagaauauguauuuaa

SEQ ID NO: 37243 - RNA, 1701 nt, Artificial Sequence
  derived and/or modified CDS sequence (wt) from hemagglutinin__InfluenzaA__ADK21853
augaaggcaauacuaguaguucugcuauauacauuugcaaccgcaaaugcagacacauuauguauagguuaucaugcgaacaauucaacagacacuguagacacaguacuagaaaagaauguaacaguaacacacucuguuaaccuucuagaagacaagcauaacgggaaacuaugcaaacuaagagggguagccccauugcauuuggguaaauguaacauugcuggcuggauccugggaaauccagagugugaaucacucuccacagcaagcucaugguccuacauuguggaaacaucuaguucagacaauggaacguguuacccaggagauuucaucgauuaugaggagcuaagagagcaauugagcucagugucaucauuugaaagguuugagauauuccccaagacaaguucauggcccaaucaugacucgaacaaagguguaacggcagcauguccucaugcuggagcaaaaagcuucuacaaaaauuuaauauggcuaguuaaaaaaggaaauucauacccaaagcucagcaaauccuacauuaaugauaaagggaaagaaguccucgugcuauggggcauucaccauccaucuacuagugcugaccaacaaagucucuaucagaaugcagaugcauauguuuuuguggggacaucaagauacagcaagaaguucaagccggaaauagcaauaagacccaaagugagggaacaagaagggagaaugaacuauuacuggacacuaguagagccgggagacaaaauaacauucgaagcaacuggaaaucuagugguaccgagauaugcauucgcaauggaaagaaaugcuggaucugguauuaucauuucagauacaccaguccacgauugcaauacaacuugucagacacccaagggugcuauaaacaccagccucccauuucagaauauacauccgaucacaauuggaaaauguccaaaauauguaaaaagcacaaaauugagacuggccacaggauugaggaaugucccgucuauucaaucuagaggccuauuuggggccauugccgguuucauugaagggggguggacagggaugguagauggaugguacgguuaucaccaucaaaaugagcaggggucaggauaugcagccgaccugaagagcacacagaaugccauugacgagauuacuaacaaaguaaauucuguuauugaaaagaugaauacacaguucacagcaguagguaaagaguucaaccacuuggaaaaaagaauagagaauuuaaauaaaaaaguugaugaugguuuccuggacauuuggacuuacaaugccgaacuguugguucuauuggaaaaugaaagaacuuuggacuaccacgauucaaaugugaagaacuuauaugaaaagguaagaagccaguuaaaaaacaaugccaaggaaauuggaaacggcugcuuugaauuuuaccacaaaugcgauaacacgugcauggaaagugucaaaaaugggacuuaugacuacccaaaauacucagaggaagcaaaauuaaacagagaagaaauagaugggguaaagcuggaaucaacaaggauuuaccagauuuuggcgaucuauucaacugucgccaguucauugguacugguagucucccugggggcaaucaguuucuggaugugcucuaaugggucucuacaguguagaauauguauuuaa

SEQ ID NO: 37244 - RNA, 1701 nt, Artificial Sequence; identical to SEQ ID NO: 37151
  derived and/or modified CDS sequence (wt) from hemagglutinin__InfluenzaA__ADK21863

SEQ ID NO: 37245 - RNA, 1701 nt, Artificial Sequence
  derived and/or modified CDS sequence (wt) from hemagglutinin__InfluenzaA__ADK21873
augaaggcaauacuaguaguucugcuauauacauuugcaaccgcaaaugcagacacauuauguauagguuaucaugcgaacaauucaacagacacuguagacacaguacuagaaaagaauguaacaguaacacacucuguuaaccuucuagaagacaagcauaacgggaaacuaugcaaacuaagagggguagccccauugcauuuggguaaauguaacauugcuggcuggauccugggaaauccagagugugaaucacucuccacagcaagcucaugguccuacauuguggaaacaucuaguucagacaauggaacguguuacccaggagauuucaucgauuaugaggagcuaagagagcaauugagcucagugucaucauuugaaagguuugagauauuccccaagacaaguucauggcccaaucaugacucgaacaaagguguaacggcagcauguccucaugcuggagcaaaaagcuucuacaaaaauuuaauauggcuaguuaaaaaaggaaauucauacccaaagcucagcaaauccuacauuaaugauaaaggaaaagaaguccucgugcuauggggcauucaccauccaucuacuagugcugaccaacaaagucucuaucagaaugcagaugcauauguuuuuguggggacaucaagauacagcaagaaguucaagccggaaauagcaauaagacccaaagugagggaacaagaagggagaaugaacuauuacuggacacuaguagagccgggagacaaaauaacauucgaagcaacuggaaaucuagugguaccgagauaugcauucgcaauggaaagaaaugcuggaucugguauuaucauuucagauacaccaguccacgauugcaauacaacuugucagacacccaagggugcuauaaacaccagccucccauuucagaauauacauucgaucacaauuggaaaauguccaaaauauguaaaaagcacaaaauugagacuggccacaggauugaggaaugucccgucuauucaaucuagaggccuauuuggggccauugccgguuucauugaagggggguggacagggaugguagauggaugguacgguuaucaccaucaaaaugagcaggggucaggauaugcagccgaccugaagagcacacagaaugccauugacgagauuacuaacaaaguaaauucuguuauugaaaagaugaauacacaguucacagcaguagguaaagaguucaaccaccuggaaaaaagaauagagaauuuaaauaaaaaaguugaugaugguuuccuggacauuuggacuuacaaugccgaacuguugguucuauuggaaaaugaaagaacuuuggacuaccacgauucaaaugugaagaacuuauaugaaaagguaagaagccaguuaaaaaacaaugccaaggaaauuggaaacggcugcuuugaauuuuaccacaaaugcgauaacacgugcauggaaagugucaaaaaugggacuuaugacuacccaaaauacucagaggaagcaaaauuaaacagagaagaaauagaugggguaaagcuggaaucaacaaggauuuaccagauuuuggcgaucuauucaacugucgccaguucauugguacugguagucucccugggggcaaucaguuucuggaugugcucuaaugggucucuacaguguagaauauguauuuaa

SEQ ID NO: 37246 - RNA, 1701 nt, Artificial Sequence
  derived and/or modified CDS sequence (wt) from hemagglutinin__InfluenzaA__ADK21883
augaaggcaauacuaguaguucugcuauauacauuugcaaccgcaaaugcagacacauuauguauagguuaucaugcgaacaauucaacagacacuguagacacaguacuagaaaagaauguaacaguaacacacucuguuaaccuucuagaagacaagcauaacgggaaacuaugcaaacuaagagggguagccccauugcauuuggguaaauguaacauugcuggcuggauccugggaaauccagagugugaaucacucuccacagcaagcucaugguccuacauuguggaaacaucuaguucagacaauggaacguguuacccaggagauuucaucgauuaugaggagcuaagagagcaauugagcucagugucaucauuugaaagguuugagauauuccccaagacaaguucauggcccaaucaugacucgaacaaagguguaacggcagcauguccucaugcuggagcaaaaagcuucuacaaaaauuuaauauggcuaguuaaaaaaggaaauucauacccaaagcucagcaaauccuacauuaaugauaaagggaaagaaguccucgugcuauggggcauucaccauccaucuacuagugcugaccaacaaagucucuaucagaaugcagaugcauauguuuuuguggggacaucaagauacagcaagaaguucaagccggaaauagcaauaagacccaaagugagggaucaagaagggagaaugaacuauuacuggacacuaguagagccgggagacaaaauaacauucgaagcaacuggaaaucuagugguaccgaaauaugcauucgcaauggaaagaaaugcuggaucugguauuaucauuucagauacaccaguccacgauugcaauacaacuugucagacacccaagggugcuauaaacaccagccucccauuucagaauauacauccgaucacaauuggaaaauguccaaaauauguaaaaagcacaaaauugagacuggccacaggauugaggaauaucccgucuauucaaucuagaggccuauuuggggccauugccgguuucauugaagggggguggacagggaugguagauggaugguacgguuaucaccaucaaaaugagcaggggucaggauaugcagccgaccugaagagcacacagaaugccauugacgagauuacuaacaaaguaaauucuguuauugaaaagaugaauacacaguucacagcaguagguaaagaguucaaccaccuggaaaaaagaauagagaauuuaaauaaaaagguugaugaugguuuccuggacauuuggacuuacaaugccgaacuguugguucuauuggaaaaugaaagaacuuuggacuaccacgauucaaaugugaagaacuuauaugaaaagguaagaagccaguuaaaaaacaaugccaaggaaauuggaaacggcugcuuugaauuuuaccacaaaugcgauaacacgugcauggaaagugucaaaaaugggacuuaugacuacccaaaauacucagaggaagcaaaauuaaacagagaagaaauagaugggguaaagcuggaaucaacaaggauuuaccagauuuuggcgaucuauucaacugucgccaguucauugguacugguagucucccugggggcaaucaguuucuggaugugcucuaaugggucucuacaguguagaauauguauuuaa

SEQ ID NO: 37247 - RNA, 1701 nt, Artificial Sequence; identical to SEQ ID NO: 34714
  derived and/or modified CDS sequence (wt) from hemagglutinin__InfluenzaA__ADK21893

SEQ ID NO: 37248 - RNA, 1701 nt, Artificial Sequence; identical to SEQ ID NO: 36866
  derived and/or modified CDS sequence (wt) from hemagglutinin__InfluenzaA__ADK21903

SEQ ID NO: 37249 - RNA, 1701 nt, Artificial Sequence; identical to SEQ ID NO: 36844
  derived and/or modified CDS sequence (wt) from hemagglutinin__InfluenzaA__ADK21913

SEQ ID NO: 37250 - RNA, 1701 nt, Artificial Sequence
  derived and/or modified CDS sequence (wt) from hemagglutinin__InfluenzaA__ADK21923
augaaggcaauacuaguaguucugcuauauacauuugcaacagcaaaugcagacacauuauguauagguuaucaugcgaacaauucaacagacacuguagacacaguacuagaaaagaauguaacaguaacacacucuguuaacauucuagaagacaagcauaacgggaaacuaugcaaacuaagagggguagccccauugcauuuggguaaauguaacauugcuggcuggauccugggaaauccagagugugaaucacucuccacagcaagcucaugguccuacauuguggaaacaucuaguucagacaauggaacguguuacccaggagauuucaucgauuaugaggagcuaagagagcaauugagcucagugucaucauuugaaagguuugagauauuccccaagacaaguucauggcccaaucaugacucgaacaaagguguaacggcagcauguccucaugcuggagcaaaaagcuucuacaaaaauuuaauauggcuaguuaaaaaaggaaauucauacccaaagcucagcaaauccuacauuaaugauaaagggaaagaaguccucgugcuauggggcauucaccauccaucuacuagugcugaccaacaaagucucuaucagaaugcagaugcauauguuuuuguggggacaucaagauacagcaagaaguucaagccggaaauagcaauaagacccaaagugagggaucaagaagggagaaugaacuauuacuggacacuaguagagccgggagacaaaauaacauucgaagcaacuggaaaucuagugguaccgagauaugcauucgcaauggaaagaaaugcuggaucugguauuaucauuucagauacaccaguccacgauugcaauacaacuugucagacacccaagggugcuauaaacaccagccucccauuucagaauauacauccgaucacaauuggaaaauguccaaaauauguaaaaagcacaaaauugagacuggccacaggauugaggaaugucccgucuauucaaucuagaggccuauuuggggccauugccgguuucauugaagggggguggacagggaugguagauggaugguacgguuaucaccaucaaaaugagcaggggucaggauaugcagccgaccugaagagcacacagaaugccauugacgagauuacuaacaaaguaaauucuguuauugaaaagaugaauacacaguucacagcaguagguaaagaguucaaccaccuggaaaaaagaauagagaauuuaaauaaaaaaguugaugaugguuuccuggacauuuggacuuacaaugccgaacuguugguucuauuggaaaaugaaagaacuuuggacuaccacgauucaaaugugaagaacuuauaugaaaaggcaagaagccaguuaaaaaacaaugccaaggaaauuggaaacggcugcuuugaauuuuaccacaaaugcgauaacacgugcauggaaagugucaaaaaugggacuuaugacuaccccaaauacucagaggaagcaaaauuaaacagagaaaaaauagaugggguaaagcuggaaucaacaaggauuuaccagauuuuggcgaucuauucaacugucgccaguacauugguacugguagucucccugggggcaaucaguuucuggaugugcucuaaugggucucuacaguguagaauauguauuuaa

SEQ ID NO: 37251 - RNA, 1701 nt, Artificial Sequence
  derived and/or modified CDS sequence (wt) from hemagglutinin__InfluenzaA__ADK21933
augaaggcaauacuaguaguucugcuauauacauuugcaaccgcaaaugcagacacauuauguauagguuaucaugcgaacaauucaacagacacuguagacacaguacuagaaaagaauguaacaguaacacacucuguugaccuucuagaagacaagcauaacgggaaacuaugcaaacuaagagggguagccccauugcauuuggguaaauguaacauugcuggcuggauccugggaaauccagagugugaaucacucuccacagcaagcucaugguccuacauuguggaaacaucuaguucagacaauggaacguguuacccaggagauuucaucgauuaugaggagcuaagagagcaauugagcucagugucaucauuugaaagguuugagauauuccccaagacaaguucauggcccaaucaugacucgaacaaagguguaacggcagcauguccuaaugcuggagcaaaaagcuucuacaaaaauuuaauauggcuaguuaaaaaaggaaauucauacccaaagcucagcaaauccuacauuaaugauaaagggaaagaaguccucgugcuauggggcauucaccauccaucuacuagugcugaccaacaaagucucuaucagaaugcagaugcauauguuuuuguggggacaucaagguacagcaagaaguucaagccggaaauagcaauaagacccaaagugagggaucaagaagggagaaugaacuauuacuggacacuaguagagccgggagacaaaauaacauucgaagcaacuggaaaucuagugguaccgagauaugcauucgcaauggaaagaaaugcuggaucugguauuaucauuucagauacaccaguccacgauugcaauacaacuugucagacacccaagggugcuauaaacaccagccucccauuucagaauauacauccgaucacaauuggaaaauguccaaaauauguaaaaagcacaaaauugagacuggccacaggauugaggaaugucccgucuauccaaucuagaggccuauuuggggccauugccggcuucauugaagggggguggacagggaugguagauggaugguacgguuaucaccaucaaaaugagcaggggucaggauaugcagccgaccugaagagcacacagaaugccauugacgagauuacuaacaaaguaaauucuguuauugaaaagaugaauacacaguucacagcaguagguaaagaguucaaccaccuggaaaaaagaauagagaauuuaaauaaaaaaguugaugaugguuuccuggacauuuggacuuacaaugccgaacuguugguucuauuggaaaaugaaagaacuuuggacuaccacgauucaaaugugaagaacuuauaugaaaagguaagaagccaguuaaaaaacaaugccaaggaaauuggaaacggcugcuuugaauuuuaccacaaaugcgauaacacgugcauggaaagugucaaaaaugggacuuaugacuacccaaaauacucagaggaagcaaaauuaaacagagaagaaauagaugggguaaagcuggaaucaacaaggauuuaccagauuuuggcgaucuauucaacugucgccaguucauugguacugguagucucccugggggcaaucaguuucuggaugugcucuaaugggucucuacaguguagaauauguauuuaa

SEQ ID NO: 37252 - RNA, 1701 nt, Artificial Sequence
  derived and/or modified CDS sequence (wt) from hemagglutinin__InfluenzaA__ADK21943
augaaggcaauacuaguaguucugcuauauacauuugcaaccgcaaaugcagacacauuauguauagguuaucaugcgaacaauucaacagacacuguagacacaguacuagaaaagaauguaacaguaacacacucuguuaaccuccuagaagacaagcauaacgggaaacuaugcaaacuaagagggguagccccauugcauuuggguaaauguaacauugcuggcuggauccugggaaauccagagugugaaucacucuccacagcaagcucaugguccuacauuguggaaacaucuaguucagacaauggaacguguuacccaggagauuucaucgauuaugaggagcuaagagagcaauugagcucagugucaucauuugaaagguuugagauauuccccaagacaaguucauggcccaaucaugacucgaacaaagguguaacggcagcauguccucaugcuggagcaaaaagcuucuacaaaaauuuaauauggcuaguuaaaaaaggaaauucauacccaaagcucagcaaauccuacauuaaugauaaagggaaagagguccucgugcuauggggcauucaccauccaucuacuagugcugaccaacaaagucucuaucagaaugcagaugcauauguuuuuguggggacaucaagauacagcaagaaguucaagccggaaauagcaauaagacccaaagugagggaucaagaagggagaaugaacuauuacuggacacuaguagagccgggagacaaaauaacauucgaagcaacuggaaaucuagugguaccgagauaugcauucgcaauggaaagaaaugcuggaucugguauuaucauuucagauacaccaguccacgauugcaauacaacuugucagacacccaagggugcuauaaacaccagccucccauuucagaauauacauccgaucacaauuggaaaauguccaaaauauguaaaaagcacaaaauugagacuggccacaggauugaggaaugucccgucuauucaaucuagaggccuauuuggggccauugccgguuucauugaagggggguggacagggaugguagauggaugguacgguuaucaccaucaaaaugagcaggggucaggauaugcagccgaccugaagagcacacagaaugccauugacgagauuacuaacaaaguaaauucuguuauugaaaagaugaauacacaguucacagcaguagguaaagaguucaaccaccuggaaaaaagaauagagaauuuaaauaaaaaaguugaugaugguuuccuggacauuuggacuuacaaugccgaacuguugguucuauuggaaaaugaaagaacuuuggacuaccacgauucaaaugugaagaacuuauaugaaaagguaagaagccaguuaaaaaacaaugccaaggaaauuggaaacggcugcuuugaauuuuaccacaaaugcgauaacacgugcauggaaagugucaaaaaugggacuuaugacuacccaaaauacucagaggaagcaaaauuaaacagagaagaaauagaugggguaaagcuggaaucaacaaggauuuaccagauuuuggcgaucuauucaacugucgccaguucauugguacugguagucucccugggggcaaucaguuucuggauguguucuaaugggucucuacaguguagaauauguauuuaa

SEQ ID NO: 37253 - RNA, 1701 nt, Artificial Sequence
  derived and/or modified CDS sequence (wt) from hemagglutinin__InfluenzaA__ADK21953
augaaggcaauacuaguaguucugcuauauacauuugcaaccgcaaaugcagacacauuauguauagguuaucaugcgaacaauucaacagacacuguagacacaguacuagaaaagaauguaacaguaacacacucuguuaaccuucuagaagacaagcauaacgggaaacuaugcaaacuaagagggguagccccauugcauuuggguaaauguaacauugcuggcuggauccugggaaauccagagugugaaucacucuccacagcaagcucaugguccuacauuguggaaacaucuaguucagacaauggaacguguuacccaggagauuucaucgaucaugaggagcuaagagagcaauugagcucagugucaucauuugaaagguuugagauauuccccaagacaaguucauggcccaaucaugacucgaacaaagguguaacggcagcaugcccucaugcuggagcaaaaagcuucuacaaaaauuuaauauggcuaguuaaaaaaggaaauucauacccaaagcucagcaaauccuacauuaaugauaaagggaaagaaguccucgugcuaugggccauucaccauccaucuacuagugcugaccaacaaagucucuaucagaaugcagaugcauauguuuuuguggggacaucaagauacagcaagaaguucaagccggaaauagcaauaagacccaaagugagggaucaagaagggagaaugaacuauuacuggacacuaguagagccgggagacaaaauaacauucgaagcaacuggaaaucuagugguaccgagauaugcauucgcaauggaaagaaaugcuggaucugguauuaucauuucagauacaccaguccacgauugcaauacaacuugucagacacccaagggugcuauaaacaccagccucccauuucagaauauacauccgaucacaauuggaaaauguccaaaauauguaaaaagcacaaaauugagacuggccacaggauugaggaaugucccgucuauucaaucuagaggccuauuuggggccauugccgguuucauugaagggggguggacagggaugguagauggaugguacgguuaucaccaucaaaaugagcaggggucaggauaugcagccgaccugaagagcacacagaaugccauugacgagauuacuaacaaaguaaauucuguuauugaaaagaugaauacacaguucacagcaguagguaaagaguucaaccaccuggaaaaaagaauagagaauuuaaauaaaaaaguugaugaugguuuccuggacauuuggacuuacaaugccgaacuguugguucuauuggaaaaugaaagaacuuuggacuaccacgauucaaaugugaagaacuuauaugaaaagguaagaagccaguuaaaaaacaaugccaaggaaauuggaaacggcugcuuugaauuuuaccacaaaugcgauaacacgugcauggaaagugucaaaaaugggacuuaugacuacccaaaauacucagaggaagcaaaauuaaacagagaagaaauagaugggguaaagcuggaaucaacaaggauuuaccagauuuuggcgaucuauucaacugucgccaguucauugguacugguagucucccugggggcaaucaguuucuggaugugcucuaaugggucucuacaguguagaauauguauuuaa

SEQ ID NO: 37254 - RNA, 1701 nt, Artificial Sequence; identical to SEQ ID NO: 36868
  derived and/or modified CDS sequence (wt) from hemagglutinin__InfluenzaA__ADK32390

SEQ ID NO: 37255 - RNA, 1701 nt, Artificial Sequence
  derived and/or modified CDS sequence (wt) from hemagglutinin__InfluenzaA__ADK32400
augaaggcaauacuaguaguucugcuauauacauuugcaaccgcaaaugcagacacauuauguauagguuaucaugcgaacaauucaacagacacuguagacacaguacuagaaaagaauguaacaguaacacacucuguuaacauucuagaagacaagcauaacgggaaacuaugcaaacuaagagggguagccccauugcauuuggguaaauguaacauugcuggcuggauccugggaaauccagagugugaaucacucuccacagcaagcucaugguccuacauuguggaaacaucuaguucagacaauggaacguguuacccaggagauuucaucgauuaugaggagcuaagagagcaauugagcucagugucaucauuugaaagguuugagauauuccccaagacaaguucauggcccaaucaugacucgaacaaagguguaacggcagcauguccucaugcuggagcaaaaagcuucuacaaaaauuuaauauggcuaguuaaaaaaggaaauucauacccaaagcucagcaaauccuacauuaaugauaaagggaaagaaguccucgugcuauggggcauucaccauccaucuacuagugcugaccaacaaagucucuaucagaaugcagaugcauauguuuuuguggggacaucaagauacagcaagaaguucaagccggaaauagcaauaagacccaaagugagggaucaagaagggagaaugaacuauuacuggacacuaguagagccgggagacaaaauaacauucgaagcaacuggaaaucuagugguaccgagauaugcauucgcaauggaaagaaaugcuggaucugguauuaucauuucagauacaccaguccacgauugcaauacaacuugccagacacccaagggugcuauaaacaccagccucccauuucagaauauacauccgaucacaauuggaaaauguccaaaauauguaaaaagcacaaaauugagacuggccacaggauugaggaaugucccgucuauucaaucuagaggccuauuuggggccauugccgguuucauugaagggggguggacagggaugguagauggaugguacgguuaucaccaucaaaaugagcaggggucaggauaugcagccgaccugaagagcacacagaaugccauugacgagauuacuaacaaaguaaauucuguuauugaaaagaugaauacacaguucacagcaguagguaaagaguucaaccaccuggaaaaaagaauagagaauuuaaauaaaaaaguugaugaugguuuccuggacauuuggacuuacaaugccgaacuguugguucuauuggaaaaugaaagaacuuuggacuaccacgauucaaaugugaagaacuuauaugaaaagguaagaagccaguuaaaaaacaaugccaaggaaauuggaaacggcugcuuugaauuuuaccacaaaugcgauaacacgugcauggaaagugucaaaaaugggacuuaugacuaccccaaauacucagaggaagcaaaauuaaacagagaaaaaauagaugggguaaagcuggaaucaacaaggauuuaccagauuuuggcgaucuauucaacugucgccaguucauugguacugguagucucccugggggcaaucaguuucuggaugugcucuaaugggucucuacaguguagaauauguauuuaa

SEQ ID NO: 37256 - RNA, 1701 nt, Artificial Sequence
  derived and/or modified CDS sequence (wt) from hemagglutinin__InfluenzaA__ADK32420
augaaggcaauacuaguaguucugcuauauacauuugcaaccgcaaaugcagacacauuauguauagguuaucaugcgaacaauucaacagacacuguagacacaguacuagaaaagaauguaacaguaacacacucuguuaaccuucuagaagacaagcauaacgggaaacuaugcaaacuaagagggguagccccauugcauuuggguaaauguaacauugcuggcuggauccugggaaauccagagugugaaucacucuccacagcaagcucaugguccuacauuguggaaacaucuaguucagacaauggaacguguuacccaggagauuucaucgauuaugaggagcuaagagagcaauugagcucagugucaucauuugaaagguuugagauauuccccaagacaaguucauggcccaaucaugacucgaacaaagguguaacggcagcauguccucaugcuggggcaaaaagcuucuacaaaaauuuaauauggcuaguuaaaaaaggaaauucauacccaaagcucagcaaauccuacauuaaugauaaagggaaagaaguccucgugcuauggggcauucaccauccaucuacuagugcugaccaacaaagucucuaucagaaugcagaugcauauguuuuuguggggacaucaagauacagcaagaaguucaagccggaaauagcaauaagacccaaagugagggaacaagaagggagaaugaacuauuacuggacacuaguagagccgggagacaaaauaacauucgaagcaacuggaaaucuagugguaccgagauaugcauucgcaauggaaagaaaugcuggaucugguauuaucauuucagauacaccaguccacgauugcaauacaacuugucagacacccaagggugcuauaaacaccagccucccauuucagaauauacauucgaucacaauuggaaaauguccaaaauauguaaaaagcacaaaauugagacuggccacaggauugaggaaugucccgucuauucaaucuagaggccuauuuggggccauugccgguuucauugaagggggguggacagggaugguagauggaugguacgguuaucaccaucaaaaugaacaggggucaggauaugcagccgaccugaagagcacacagaaugccauugacgagauuacuaacaaaguaaauucuguuauugaaaagaugaauacacaguucacagcaguagguaaagaguucaaccaccuggaaaaaagaauagagaauuuaaauaaaaaaguugaugaugguuuccuggacauuuggacuuacaaugccgaacuguugguucuauuggaaaaugaaagaacuuuggacuaccacgauucaaaugugaagaacuuauaugaaaagguaagaaaccaguuaaaaaacaaugccaaggaaauuggaaacggcugcuuugaauuuuaccacaaaugcgauaacacgugcauggaaagugucaaaaaugggacuuaugacuacccaaaauacucagaggaagcaaaauuaaacagagaagaaauagaugggguaaagcuggaaucaacaaggauuuaccagauuuuggcgaucuauucaacugucgccaguucauugguacugguagucucccugggggcaaucaguuucuggaugugcucuaaugggucucuacaguguagaauauguauuuaa

SEQ ID NO: 37257 - RNA, 1701 nt, Artificial Sequence; identical to SEQ ID NO: 36626
  derived and/or modified CDS sequence (wt) from hemagglutinin__InfluenzaA__ADK32430

SEQ ID NO: 37258 - RNA, 1701 nt, Artificial Sequence
  derived and/or modified CDS sequence (wt) from hemagglutinin__InfluenzaA__ADK32440
augaaggcaauacuaguaguucugcuauauacauuugcaaccgcaaaugcagacacauuauguauagguuaucaugcgaacaauucaacagacacuguagacacaguacuagaaaagaauguaacaguaacacacucuguuaaccuucuagaagacaagcauaacgggaaacuaugcaaacuaagagggguagccccauugcauuuggguaaauguaacauugcuggcuggauccugggaaauccagagugugaaucacucuccacagcaagcucaugguccuacauuguggaaacaucuaguucagacaauggaacguguuacccaggagauuucaucgauuaugaggagcuaagagagcaauugagcucagugucaucauuugaaagguuugagauauuccccaagacaaguucauggcccaaucaugacucgaacaaagguguaacggcagcauguccucaugcuggagcaaaaagcuucuacaaaaauuuaauauggcuaguuaaaaaaggaaauucauacccaaagcucagcaaauccuacauuaaugauaaagggaaagaaguccucgugcuauggggcauucaccauccaucuacuagugcugaccaacaaagucucuaucagaaugcagaugcauauguuuuuguggggacaucaagauacagcaagaaguucaagccggaaauagcaauaagacccaaagugagggaucaagaagggagaaugaacuauuacuggacacuaguagagccgggagacaaaauaacauucgaagcaacuggaaaucuagugguaccgagauaugcauucgcaauggaaagaaaugcuggaucugguauuaucauuucagauacaccaguccacgauugcaauacaacuugucagacacccaagggugcuauaaacaccagccucccauuucagaauauacauccgaucacaauuggaaaauguccaaaauauguaaaaagcacaaaauugagacuggccacaggauugaggaaugucccgucuauucaaucuagaggccuauuuggggccauugccgguuucauugaagggggguggacagggaugguagauggaugguacgguuaucaccaucaaaaugagcaggggucaggauaugcagccgaccugaagagcacacagaaugccauugacgggauuacuaacaaaguaaauucuguuauugaaaagaugaauacacaguucacagcaguagguaaagaguucaaccaccuggaaaaaagaauagagaauuuaaauaaaaaaguugaugaugguuuccuggacauuuggacuuacaaugccgaacuguugguucuauuggaaaaugaaagaacuuuggacuaccacgauucaaaugugaagaacuuauaugaaaagguaagaagccaguuaaaaaacaaugccaaggaaauuggaaacggcugcuuugaauuuuaccacaaaugcgauaacacgugcauggaaagugucaaaaaugggacuuaugacuacccaaaauacucagaggaagcaaaauuaaacagagaagaaauagaugggguaaagcuggaaucaacaaggauuuaccagauuuuggcgaucuauucaacugucgccaguucauugguacugguagucucccugggggcaaucaguuucuggaugugcucuaaugggucucuacaguguagaauauguauuuaa

SEQ ID NO: 37259 - RNA, 1701 nt, Artificial Sequence
  derived and/or modified CDS sequence (wt) from hemagglutinin__InfluenzaA__ADK32450
augaaggcaauacuaguaguucugcuauauacauuugcaaccgcaaaugcagacacauuauguauagguuaucaugcgaacaauucaacagacacuguagacacaguacuagaaaagaauguaacaguaacacacucuguuaacauucuagaagacaagcauaacgggaaacuaugcaaacuaagagggguagccccauugcauuuggguaaauguaacauugcuggcuggauccugggaaauccagagugugaaucacucuccacagcaagcucaugguccuacauuguggaaacaucuaguucagacaauggaacguguuacccaggagauuucaucgauuaugaggagcuaagagagcaauugagcucagugucaucauuugaaagguuugagauauuccccaagacaaguucauggcccaaucaugacucgaacaaagguguaacggcagcauguccucaugcuggagcaaaaagcuucuacaaaaauuuaauuuggcuaguuaaaaaaggaaauucauacccaaagcucagcaaauccuacauuaaugauaaagggaaagaaguccucgugcuauggggcauucaccauccaucuacuagugcugaccaacaaagucucuaucagaaugcagaugcauauguuuuuguggggucaucaagauacagcaagaaguucaagccggaaauagcaauuagacccaaagugagggaucaagaagggagaaugaacuauuacuggacacuaguagagccgggagacaaaauaacauucgaagcaacuggaaaucuagugguaccgagauaugcauucgcaauggaaagaaaugcuggaucugguauuaucauuucagaugcaccaguccaugauugcaauacaacuugucagacacccaagggugcuauaaacaccagccucccauuucagaauauacauccgaucacaauuggaaaauguccaaaauauguaaaaagcacaaaauugagacuggccacaggauugaggaaugucccgucuauucaaucuagaggccuauuuggggccauugccgguuucauugaagggggguggacagggaugguagauggaugguacgguuaucaccaucaaaaugagcaggggucaggauaugcagccgaccugaagagcacacagaaugccauugacgagauuacuaacaaaguaaauucuguuauugaaaagaugaauacacaguucacagcaguagguaaagaguucaaccaccuggaaaaaagaauagagaauuuaaauaaaaaaguugaugaugguuuccuggacauuuggacuuacaaugccgaacuguugguucuauuggaaaaugaaagaacuuuggacuaccacgauucaaaugugaagaacuuauaugaaaagguaagaagccagcuaaaaaacaaugccaaggaaguuggaaacggcugcuuugaauuuuaccacaaaugcgauaacacgugcauggaaagugucaaaaaugggacuuaugacuacccaaaauacucagaggaagcaaaauuaaacagagaagaaauagaugggguaaagcuggaaucaacaaggauuuaccagauuuuggcgaucuauucaacugccgccaguucauugguacugguagucucccugggggcaaucaguuucuggaugugcucuaaugggucucuacaguguagaauauguauuuaa

SEQ ID NO: 37260 - RNA, 1701 nt, Artificial Sequence
  derived and/or modified CDS sequence (wt) from hemagglutinin__InfluenzaA__ADK32460
augaaggcaauacuaguaguucugcuauauacauuugcaaccgcaaaugcagacacauuauguauagguuaucaugcgaacaauucaacagacacuguagacacaguacuagaaaagaauguaacaguaacacacucuguuaaccuucuagaagacaagcauaacgggaaacuaugcaaacuaagagggguagccccauugcauuuggguaaauguaacauugcuggcuggauccugggaaauccagagugugaaucacucuccacagcaagcucaugguccuacauuguggaaacaucuaguucagacaauggaacguguuacccaggagauuucaucgauuaugaggagcuaagagagcaauugagcucagugucaucauuugaaagguuugagauauuccccaagacaaguucauggcccaaucaugacucgaacaaagguguaacggcagcauguccucaugcuggagcaaaaagcuucuacaaaaauuuaauauggcuaguuaaaaaaggaaauucauacccaaagcucagcaaauccuacauuaaugauaaagggaaagaaguccucgugcuauggggcauucaccauccaucuacuagugcugaccaacaaagucucuaucagaaugcagaugcauaugcuuuuguggggacaucaagauacagcaagaaguucaagccggaaauagcaauaagacccaaagugagggaucaagaagggagaaugaacuauuacuggacacuaguagagccgggagacaaaauaacauucgaagcaacuggaaaucuagugguaccgagauaugcauucgcaauggaaagaaaugcuggaucugguauuaucauuucagauacaccaguccacgauugcaauacaacuugucagacacccaagggugcuauaaacaccagccucccauuucagaauauacauccgaucacaauuggaaaauguccaaaauauguaaaaagcacaaaauugagacuggccacaggauugaggaaugucccgucuauucaaucuagaggccuauuuggggccauugccgguuucauugaagggggguggacagggaugguagauggaugguacgguuaucaccaucaaaaugagcaggggucaggauaugcagccgaccugaagagcacacagaaugccauugacgagauuacuaacaaaguaaauucuguuauugaaaagaugaauacacaguucacagcaguagguaaagaguucaaccaccuggaaaaaagaauagagaauuuaaauaaaaaaguugaugaugguuuccuggacauuuggacuuacaaugccgaacuguugguucuauuggaaaaugaaagaacuuuggacuaccacgauucaaaugugaagaacuuauaugaaaagguaagaagccaguuaaaaaacaaugccaaggaaauuggaaacggcugcuuugaauuuuaccacaaaugcgauaacacgugcauggaaagugucaaaaaugggacuuaugacuacccaaaauacucagaggaagcaaaauuaaacagagaagaaauagaugggguaaagcuggaaucaacaaggauuuaccagauuuuggcgaucuauucaacugucgccaguucauugguacugguagucucccugggggcaaucaguuucuggaugugcucuaaugggucucuacaguguagaauauguauuuaa

SEQ ID NO: 37261 - RNA, 1701 nt, Artificial Sequence; identical to SEQ ID NO: 35845
  derived and/or modified CDS sequence (wt) from hemagglutinin__InfluenzaA__ADK32470

SEQ ID NO: 37262 - RNA, 1701 nt, Artificial Sequence
  derived and/or modified CDS sequence (wt) from hemagglutinin__InfluenzaA__ADK32480
augaaggcaauacuaguaguucugcuauauacauuugcaaccgcaaaugcagacacauuauguauagguuaucaugcgaacaauucaacagacacuguagacacaguacuagaaaagaauguaacaguaacacacucuguuaaccuucuagaagacaagcauaacgggaaacuaugcaaacuaagagggguagccccauugcauuuggguaaauguaacauugcuggcuggauccugggaaauccagagugugaaucacucuccacagcaagcucaugguccuacauuguggaaacaucuaguucagacaauggaacguguuacccaggagauuucaucgauuaugaggagcuaagagagcaauugagcucagugucaucauuugaaagguuugagauauuccccaagacaaguucauggcccaaucaugacucgaacaaagguguaacggcagcauguccucaugcuggagcaaaaagcuucuacaaaaauuuaauauggcuaguuaaaaaaggaaauucauacccaaagcucagcaaauccuacauuaaugauaaagggaaagaaguccucgugcuauggggcauucaccauccaucuacuagugcugaccaacaaagucucuaucagaaugcagaugcauauguuuuuguggggacaucaagauacagcaagaaguucaagccggaaauagcaauaagacccaaagugagggaucaagaagggagaaugaacuauuacuggacacuaguagagccgggagacaaaauaacauucgaagcaacuggaaaucuagugguaccgagauaugcauucgcaauggaaagaaaugcuggaucugguauuaucauuucagauacaccagcccacgauugcaauacaacuugucagacacccaagggugcuauaaacaccagccucccauuucagaauauacauccgaucacaauuggaaaauguccaaaauauguaaaaagcacaaaauugagacuggccacaggauugaggaaugucccgucuauucaaucuagaggccuauuuggggccauugccgguuucauugaagggggguggacagggaugguagauggaugguacgguuaucaccaucaaaaugagcaggggucaggauaugcagccgaucugaagagcacacagaaugccauugacaagauuacuaacaaaguaaauucuguuauugaaaagaugaauacacaguucacagcaguagguaaagaguucaaccaccuggaaaaaagaauagagaauuuaaauaaaaaaguugaugaugguuuccuggacauuuggacuuacaaugccgaacuguugguucuauuggaaaaugaaagaacuuuggacuaccacgauucaaaugugaagaacuuauaugaaaagguaagaagccaguuaaaaaacaaugccaaggaaauuggaaacggcugcuuugaauuuuaccacaaaugcgauaacacgugcauggaaagugucaaaaaugggacuuaugacuacccaaaauacucagaggaagcaaaauuaaacagagaagaaauagaugggguaaagcuggaaucaacaaggauuuaccagauuuuggcgaucuauucaacugucgccaguucauugguacugguagucucccugggggcaaucaguuucuggaugugcucuaaugggucucuacaguguagaauauguauuuaa

SEQ ID NO: 37263 - RNA, 1701 nt, Artificial Sequence
  derived and/or modified CDS sequence (wt) from hemagglutinin__InfluenzaA__ADK32490
augaaggcaauacuaguaguucugcuauauacauuugcaaccgcaaaugcagacacauuauguauagguuaucaugcgaacaauucaacagacacuguagacacaguacuagaaaagaauguaacaguaacacacucuguuaaccuucuagaagacaagcauaacgggaaacuaugcaaacuaagagggguagccccauugcauuuggguaaauguaacauugcuggcuggauccugggaaauccagagugugaaucacucuccacagcaagcucaugguccuacauuguggaaacaucuaguucagacaauggaacguguuacccaggagauuucaucgauuaugaggagcuaagagagcaauugagcucagugucaucauuugaaagguuugagauauuccccaagacaaguucauggcccaaucaugacucgaacaaaggugugacggcagcauguccucaugcuggagcaaaaagcuucuacaaaaauuuaauauggcuaguuaaaaaaggaaauucauacccaaagcucagcaaauccuacauuaaugauaaagggaaagaaguccucgugcuauggggcauucaccauccaucuacuagugcugaccaacaaagucucuaucagaaugcagaugcauauguuuuuguggggacaucaagauacagcaagaaguucaagccggaaauagcaauaagacccaaagugagggaucaagaagggagaaugaacuauuacuggacacuaguagagccgggagacaaaauaacauuugaagcaacuggaaaucuagugguaccgagauaugcauucgcaauggaaagaaaugcuggaucugguauuaucauuucagauacaccaguccacgauugcaauacaacuugucagacacccaagggugcuauaaacaccagccucccauuucagaauauacauccgaucacaauuggaaaauguccaaaauauguaaaaagcacaaaauugagacuggccacaggauugaggaaugucccgucuauucaaucuagaggccuauuuggggccauugccgguuucauugaagggggguggacagggaugguagauggaugguacgguuaucaccaucaaaaugagcaggggucaggauaugcagccgaccugaagagcacacagaaugccauugacaagauuacuaacaaaguaaauucuguuauugaaaagaugaauacacaguucacagcaguagguaaagaguucaaccaccuggaaaaaagaauagagaauuuaaauaaaaaaguugaugaugguuuccuggacauuuggacuuacaaugccgaacuguugguucuauuggaaaaugaaagaacuuuggacuaccacgauucaaaugugaagaacuuauaugaaaagguaagaagccaguuaaaaaacaaugccaaggaaauuggaaacggcugcuuugaauuuuaccacaaaugcgauaacacgugcauggaaagugucaaaaaugggacuuaugacuacccaaaauacucagaggaagcaaaauuaaacagagaagaaauagaugggguaaagcuggaaucgacaaggauuuaccagauuuuggcgaucuauucaacugucgccaguucauugguacugguagucucccugggggcaaucaguuucuggaugugcucuaaugggucucuacaguguagaauauguauuuaa

SEQ ID NO: 37264 - RNA, 1701 nt, Artificial Sequence
  derived and/or modified CDS sequence (wt) from hemagglutinin__InfluenzaA__ADK32502
augaaggcaauacuaguaguucugcuauauacauuugcaaccgcaaaugcagacacauuauguauagguuaucaugcgaacaauucaacagacacuguagacacaguacuagaaaagaauguaacaguaacacacucuguuaaccuucuagaagacaagcauaacgggaaacuaugcaaacuaagagggguagccccauugcauuuggguaaauguaacauugcuggcuggauccugggaaauccagagugugaaucacucuccacagcaagcucaugguccuacauuguggaaacaucuaguucagacaauggaacguguuacccaggagauuucaucgauuaugaggagcuaagagagcaauugagcucagugucaucauuugaaagguuugagauauuccccaagacaaguucauggcccaaucaugacucuaacaaagguguaacggcagcauguccucaugcuggagcaaaaagcuucuacaaaaauuuaauauggcuaguuaaaaaaggaaauucauacccaaagcucagcaaauccuacauuaaugauaaagggaaagaaguccucgugcuauggggcauucaccauccaucuacuagugcugaccaacaaagucucuaucagaaugcagaugcauauguuuuugugggaacaucaagauacagcaagaaguucaagccggaaauagcaauaagacccaaagugagggaucaagaagggagaaugaacuauuacuggacacuaguagagccgggagacaaaauaacauucgaagcaacuggaaaucuagugguaccgagauaugcauucgcaauggaaagaaaugcuggaucugguauuaucauuucagauacaccaguccacgauugcaauacaacuugucagacacccaagggugcuauaaacaccagccucccauuucagaauauacauccgaucacaauuggaaaauguccaaaauauguaaaaagcacaaaauugagacuggccacaggauugaggaaugucccgucuauucaaucuagaggccuauuuggggccauugccgguuucauugaagggggguggacagggaugguagauggaugguacgguuaucaccaucaaaaugagcaggggucaggauaugcagccgaccugaagagcacacagaaugccauugacaagauuacuaacaaaguaaauucuguuauugaaaagaugaauacacaguucacagcaguagguaaagaguucaaccaccuggaaaaaagaauagagaauuuaaauaaaaaaguugaugaugguuuccuggacauuuggacuuacaaugccgaacuguugguucuauuggaaaaugaaagaacuuuggacuaccacgauucaaaugugaagaacuuauaugaaaagguaagaagccaguuaaaaaacaaugccaaggaaauuggaaacggcugcuuugaauuuuaccacaaaugcgauaacacgugcauggaaagugucaaaaaugggacuuaugacuacccaaaauacucagaggaagcaaaauuaaacagagaagaaauagaugggguaaagcuggaaucaacaaggauuuaccagauuuuggcgaucuauucaacugucgccaguucauugguacugguagucucccugggggcaaucaguuucuggaugugcucuaaugggucucuacaguguagaauauguauuuaa

SEQ ID NO: 37265 - RNA, 1701 nt, Artificial Sequence
  derived and/or modified CDS sequence (wt) from hemagglutinin__InfluenzaA__ADK32637
augaaggcaauacuaguaguucugcuauauacauuugcaaccgcaaaugcagacacauuauguauagguuaucaugcgaacaauucaacagacacuguagacacaguacuagaaaagaauguaacaguaacacacucuguuaaccuucuagaagacaagcauaacgggaaacuaugcaaacuaagagggguagccccauugcauuuggguaaauguaacauugcuggcuggauccugggaaauccagagugugaaucacucuccacagcaagcucaugguccuacauuguggaaacaucuaguucagacaauggaacguguuacccaggagauuucaucgauuaugaggagcuaagagagcaauugagcucagugucaucauuugaaagguuugagauauuccccaagacaaguucauggcccaaucaugacucgaacaaagguguaacggcagcauguccucaugcuggagcaaaaagcuucuacaaaaauuuaauauggcuaguuaaaaaaggaaauucauacccaaagcucagcaaauccuacauuaaugauaaagggaaagaaguccucguguuauggggcauucaccauccaucuacuagugcugaccaacaaagucucuaucagaaugcagaugcauauguuuuuguggggacaucaagauacagcaagaaguucaagccggaaauagcaauaagacccaaagugagggaucaagaagggagaaugaacuauuacuggacacuaguagagccgggagacaaaauaacauucgaagcaacuggaaaucuagugguaccgagauaugcauucacaauggaaagaaaugcuggaucugguauuaucauuucagauacaccaguccacgauugcaauacaacuugucagacacccaagggugcuauaaacaccagccucccauuucagaauauacauccgaucacaauuggaaaauguccaaaauauguaaaaagcacaaaauugagacuggccacaggauugaggaaugucccgucuauucaaucuagaggccuauuuggggccauugccgguuucauugaagggggguggacagggaugguagauggaugguacgguuaucaccaucaaaaugagcaggggucaggauaugcagccgaccugaagagcacacagaaugccauugacgagauuacuaacaaaguaaauucuguuauugaaaagaugaauacacaguucacagcaguagguaaagaguucaaccaccuggaaaaaagaauagagaauuuaaauaaaaaaguugaugaugguuuccuggacauuuggacuuacaaugccgaacuguugguucuauuggaaaaugaaagaacuuuggacuaccacgauucaaaugugaagaacuuguaugaaaagguaagaagccaguuaaaaaacaaugccaaggaaauuggaaacggcugcuuugaauuuuaccacaaaugcgauaacacgugcauggaaagugucaaaaaugggacuuaugacuacccaaaauacucagaggaagcaaaauuaaacagagaagaaauagaugggguaaagcuggaaucaacaaggauuuaccagauuuuggcgaucuauucaacugucgccaguucauugguacugguagucucccugggggcaaucaguuucuggaugugcucuaaugggucucuacaguguagaauauguauuuaa

SEQ ID NO: 37266 - RNA, 1701 nt, Artificial Sequence; identical to SEQ ID NO: 36285
  derived and/or modified CDS sequence (wt) from hemagglutinin__InfluenzaA__ADK32647

SEQ ID NO: 37267 - RNA, 1701 nt, Artificial Sequence
  derived and/or modified CDS sequence (wt) from hemagglutinin__InfluenzaA__ADK32657
augaaggcaauacuaguaguucugcuauauacauuugcaaccgcaaaugcagacacauuauguauagguuaucaugcgaacaauucaacagacacuguagacacaguacuagaaaagaacguaacaguaacacacucuguuaaccuucuagaagacaagcauaacgggaaacuaugcaaacuaagagggguagccccauugcauuuggguaaauguaacauugcuggcuggauccugggaaauccagagugugaaucacucuccacagcaagcucaugguccuacauuguggaaacaucuaguucagacaauggaacguguuacccaggagauuucaucaauuaugaggagcuaagagagcaauugagcucagugucaucauuugaaagguuugagauauuccccaagacaaguucauggcccaaucaugacucgaacaaagguguaacggcagcauguccucaugcuggagcaaaaagcuucuacaaaaauuuaauauggcuaguuaaaaaaggaaauucauacccaaagcucagcaaauccuacauuaaugauaaagggaaagaaguccucgugcuauggggcauucaccauccaucuacuagugcugaccaacaaagucucuaucagaaugcagaugcauauguuuuuguggggacaucaagauacagcaagaaguucaagccggaaauagcaauaagacccaaagugagggaucaagaagggagaaugaacuauuacuggacacuaguagagccgggagacaaaauaacauucgaagcaacuggaaaucuagugguaccgagauaugcauucgcaauggaaagaaaugcuggaucugguauuaucaucucagauacaccaguccacgauugcaauacaacuugucagacacccaauggugcuauaaacaccagccucccauuucagaauauacauccgaucacaauuggaaaauguccaaaauauguaaaaagcacaaaauugagacuggccacaggauugaggaaugucccgucuauucaaucuagaggccuauuuggggccauugccgguuucauugaagggggguggacagggaugguagauggaugguacgguuaucaccaucaaaaugagcaggggucaggauaugcagccgaccugaagagcacacagaaugccauugacaagauuacuaacaaaguaaauucuguuauugaaaagaugaauacacaguucacagcaguagguaaagaguucaaccaccuggaaaaaagaauagagaauuuaaauaaaaaaguugaugaugguuuccuggacauuuggacuuacaaugccgaacuguugguucuauuggaaaaugaaagaacuuuggacuaccacgauucaaaugugaagaacuuauaugaaaaaguaagaagccaguuaaaaaacaaugccaaggaaauuggaaacggcugcuuugaauuuuaccacaaaugcgauaacacgugcauggaaagugucaaaaaugggacuuaugacuacccaaaauacucagaggaagcaaaauuaaacagagaagaaauagaugggguaaagcuggaaucaacaaggauuuaccagauuuuggcgaucuauucaacugucgccaguucauugguacugguagucucccugggggcaaucaguuucuggaugugcucuaaugggucucuacaguguagaauauguauuuaa

SEQ ID NO: 37268 - RNA, 1701 nt, Artificial Sequence
  derived and/or modified CDS sequence (wt) from hemagglutinin__InfluenzaA__ADK32677
augaaggcaauacuaguaguucugcuauauacauuugcaaccgcaaaugcagacacauuauguauagguuaucaugcgaacaauucaacagacacuguagacacaguacuagaaaagaauguaacaguaacacacucuguuaaccuucuagaagacaagcauaacgggaaacuaugcaaacuaagagggguagccccauugcauuuggguaaauguaacauugcuggcuggauccugggaaauccagagugugaaucacucuccacagcaagcucaugguccuacauuguggaaacaucuaguucagacaauggaacguguuacccaggagauuucaucaauuaugaggagcuaagagagcaauugagcucagugucaucauuugaaagguuugagauauuccccaagacaaguucauggcccaaucaugacucgaacaaagguguaacggcagcauguccucaugcuggagcaaaaagcuucuacaaaaauuuaauauggcuaguuaaaaaaggaaauucauacccaaagcucagcaaauccuacauuaaugauaaagggaaagaaguccucgugcuauggggcauucaccauccaucuacuagugcugaccaacaaagucucuaucagaaugcagaugcauauguuuuuguggggacaucaagauacagcaagaaguucaagccggaaauagcaauaagacccaaagugagggaucaagaagggagaaugaacuauuacuggacacuaguagagccgggagacaaaauaacauucgaagcaacuggaaaucuagugguaccgagauaugcauucgcaauggaaagaaaugcuggaucugguauuaucaucucagauacaccaguccacgauugcaauacaacuugucagacacccaagggugcuauaaacaccagccucccauuucagaauauacauccgaucacaauuggaaaauguccaaaauauguaaaaagcacaaaauugagacuggccacaggauugaggaaugucccgucuauucaaucuagaggccuauuuggggccauugccgguuucauugaagggggguggacagggaugguagauggaugguacgguuaucaccaucaaaaugagcaagggucaggauaugcagccgaccugaagagcacacagaaugccauugacaagauuacuaacaaaguaaauucuguuauugaaaagaugaauacacaguucacagcaguagguaaagaguucaaccaccuggaaaaaagaauagagaauuuaaauaaaaaaguugaugaugguuuccuggacauuuggacuuacaaugccgaacuguugguucuauuggaaaaugaaagaacuuuggacuaccacgauucaaaugugaagaacuuauaugaaaagguaagaagccaguuaaaaaacaaugccaaggaaauuggaaacggcugcuuugaauuuuaccacaaaugcgauaacacgugcauggaaagugucaaaaaugggacuuaugacuacccaaaauacucagaggaagcaaaauuaaacagagaagaaauagaugggguaaagcuggaaucaacaaggauuuaccagauuuuggcgaucuauucaacugucgccaguucauugguacugguagucucccugggggcaaucaguuucuggaugugcucuaaugggucucuacaguguagaauauguauuuaa

SEQ ID NO: 37269 - RNA, 1701 nt, Artificial Sequence
  derived and/or modified CDS sequence (wt) from hemagglutinin__InfluenzaA__ADK32687
augaaggcaauacuaguaguucugcuauauacauuugcaaccgcaaaugcagacacauuauguauagguuaucaugcgaacaauucaacagacacuguagacacaguacuagaaaagaauguaacaguaacacacucuguuaaccuucuagaagacaagcauaacgggaaacuaugcaaacuaagagggguagccccauugcauuuggguaaauguaacauugcuggcuggauccugggaaauccagagugugaaucacucuccacagcaagcucaugguccuacauuguggaaacaucuaguucagacaauggaacguguuacccaggagauuucaucgauuaugaggagcuaagagagcaauugagcucagugucaucauuugaaagguuugagauauuccccaagacaaguucauggcccaaucaugacucgaacaaagguguaacggcagcauguccucaugcuggagcaaaaaacuucuacaaaaauuuaauauggcuaguuaaaaaaggaaauucauacccaaagcucagcaaauccuacauaaaugauaaagggaaagaaguccucgugcuauggggcauucaccauccaucuacuagugcugaccaacaaagucucuaucagaaugcagaugcauauguuuuuguggggacaucaagauacagcaagaaguucaagccggaaauagcaauaagacccaaagugagggaucaagaagggagaaugaacuauuacuggacacuaguagagccgggagacaaaauaacauucgaagcaacuggaaaucuagugguaccgagauaugcauucgcaauggaaagaaaugcuggaucugguauuaucauuucagauacaccaguccacgauugcaauacaacuugucagacacccaagggugcuauaaacaccagccucccauuucagaauauacauccgaucacaauuggaaaauguccaaaauauguaaaaagcacaaaauugagacuggccacaggauugaggaaugucccgucuauucaaucuagaggccuauuuggggccauugccgguuucauugaagggggguggacagggaugguagauggaugguacgguuaucaccaucaaaaugagcaggggucaggauaugcagccgaccugaagagcacacagaaugccauugacaagauuacuaacaaaguaaauucuguuauugaaaagaugaauacacaguucacagcaguagguaaagaguucaaccaccuggaaaaaagaauagagaauuuaaauaaaaaaguugaugaugguuuccuggacauuuggacuuacaaugccgaacuguugguucuauuggaaaaugaaagaacuuuggacuaccacgauucaaaugugaagaacuuauaugaaaagguaagaagccaguuaaaaaacaaugccaaggaaauuggaaacggcugcuuugaauuuuaccacaaaugcgauaacacgugcauggaaagugucaaaaaugggacuuaugacuacccaaaauacucagaggaagcaaaauuaaacagagaagaaauagaugggguaaagcuggaaucaacaaggauuuaccagauuuuggcgaucuauucaacugucgccaguucuuugguacugguagucucccugggggcaaucaguuucuggaugugcucuaaugggucucuacaguguagaauauguauuuaa

SEQ ID NO: 37270 - RNA, 1701 nt, Artificial Sequence
  derived and/or modified CDS sequence (wt) from hemagglutinin__InfluenzaA__ADK32697
augaaggcaauacuaguaguucugcuauauacauuugcaaccgcaaaugcagacacauuauguauagguuaucaugcgaacaauucaacagacacuguagacacaguacuagaaaagaauguaacaguaacacacucuguuaaccuucuagaagacaagcauaacgggaaacuaugcaaacuaagagggguagccccauugcauuuggguaaauguaacauugcuggcuggauccugggaaauccagagugugaaucacucuccacagcaagcucaugguccuacauuguggaaacaucuaguucagacaauggaacguguuacccaggagauuucaucaauuaugaggagcuaagagagcaauugagcucagugucaucauuugaaagguuugagauauuccccaagacaaguucauggcccaaucaugacucgaacaaagguguaacggcagcauguccucaugcuggagcaaaaagcuucuacaaaaauuuaauauggcuaguuaaaaaaggaaauucauacccaaagcucagcaaauccuacauuaaugauaaagggaaagaaguccucgugcuauggggcauucaccauccaucuacuagugcugaccaacaaagucucuaucagaaugcagauucauauguuuuuguggggacaucaagauacagcaagaaguucaagccggaaauagcaauaagacccaaagugagggaucaagaagggagaaugaacuauuacuggacacuaguagagccgggagacaaaauaacauucgaagcaacuggaaaucuagugguaccgagauaugcauucgcaauggaaagaaaugcuggaucugguauuaucaucucagauacaccaguccacgauugcaauacaacuugucagacacccaagggugcuauaaacaccagccucccauuucagaauauacauccgaucacaauuggaaaauguccaaaauauguaaaaagcacaaaauugagacuggccacaggauugaggaaugucccgucuauucaaucuagaggccuauuuggggccauugccgguuucauugaagggggguggacagggaugguagauggaugguacgguuaucaccaucaaaaugagcaggggucaggauaugcagccgaccugaagagcacacagaaugccauugacaagauuacuaacaaaguaaauucuguuauugaaaagaugaauacacaguucacagcaguagguaaagaguucaaccaccuggaaaaaagaauagagaauuuaaauaaaaaaguugaugaugguuuccuggacauuuggacuuacaaugccgaacuguugguucuauuggaaaaugaaagaacuuuggacuaccacgauucaaaugugaagaacuuauaugaaaagguaagaagccaguuaaaaaacaaugccaaggaaauuggaaacggcugcuuugaauuuuaccacaaaugcgauaacacgugcauggaaagugucaaaaaugggacuuaugacuacccaaaauacucagaggaagcaaaauuaaacagagaagaaauagaugggguaaagcuggaaucaacaaggauuuaccagauuuuggcgaucuauucaacugucgccaguucauugguacugguagucucccugggggcaaucaguuucuggaugugcucuaaugggucucuacaguguagaauauguauuuaa

SEQ ID NO: 37271 - RNA, 1701 nt, Artificial Sequence; identical to SEQ ID NO: 36303
  derived and/or modified CDS sequence (wt) from hemagglutinin__InfluenzaA__ADK32776

SEQ ID NO: 37272 - RNA, 1701 nt, Artificial Sequence; identical to SEQ ID NO: 36239
  derived and/or modified CDS sequence (wt) from hemagglutinin__InfluenzaA__ADK33621

SEQ ID NO: 37273 - RNA, 1701 nt, Artificial Sequence
  derived and/or modified CDS sequence (wt) from hemagglutinin__InfluenzaA__ADK33631
augaaggcaauacuaguaguucugcuauauacauuugcaaccgcaaaugcagacacauuauguauagguuaucaugcgaacaauucaacagacacuguagacacaguacuagaaaagaauguaacaguaacacacucuguuaaccuucuagaagucaagcauaacgggaaacuaugcaaacuaagagggguagccccauugcauuuggguaaauguaacauugcuggcuggauccugggaaauccagagugugaaucacucuccacagcaagcucaugguccuacauuguggaaacaucuaguucagacaauggaacguguuacccaggagauuucaucaauuaugaggagcuaagagagcaauugagcucagugucaucauuugaaagguuugagauauuccccaagacaaguucauggcccaaucaugacucgaacaaagguguaacggcugcauguccucaugcuggagcaaaaagcuucuacaaaaauuuaauauggcuaguuaaaaaaggaaauucauacccaaagcucagcaaauccuacauuaaugauaaagggaaagaaguccucgugcuauggggcauucaccauccaucuacuagugcugaccaacaaagucucuaucagaaugcagaugcauauguuuuuguggggacaucaagauacagcaagaaguucaagccggaaauagcaauaagacccaaagugagggaucaagaagggagaaugaacuauuacuggacacuaguagagccgggagacaaaauaacauucgaagcaacuggaaaucuagugguaccgagauaugcauucgcaauggaaagaaaugcuggaucugguauuaucaucucagauacaccaguccacgauugcaauacaacuugucagacacccaagggugcuauaaacaccagccucccauuucagaauauacauccgaucacaauuggaaaauguccaaaauauguaaaaagcacaaaauugagacuggccacaggauugaggaaugucccgucuauucaaucuagaggccuauuuggggccauugccgguuucauugaagggggguggacagggaugguagauggaugguacgguuaucaccaucaaaaugagcaggggucaggauaugcagccgaccugaagagcacacagaaugccauugacaagauuacuaacaaaguaaauucuguuauugaaaagaugaauacacaguucacagcaguagguaaagaguucaaccaccuggaaaaaagaauagagaauuugaauaaaaaaguugaugaugguuuccuggacauuuggacuuacaaugccgaacuguugguucuauuggaaaaugaaagaacuuuggacuaccacgauucaaaugugaagaacuuauaugaaaagguaagaagccaguuaaaaaacaaugccaaggaaauuggaaacggcugcuuugaauuuuaccacaaaugcgauaacacgugcauggaaagugucaaaaaugggacuuaugacuacccaaaauacucagaggaagcaaaauuaaacagagaagaaauagaugggguaaagcuggaaucaacaaggauuuaccagauuuuggcgaucuauucaacugucgccaguucauugguacugguagucucccugggggcaaucaguuucuggaugugcucuaaugggucucuacaguguagaauauguauuuaa

SEQ ID NO: 37274 - RNA, 1701 nt, Artificial Sequence; identical to SEQ ID NO: 36626
  derived and/or modified CDS sequence (wt) from hemagglutinin__InfluenzaA__ADK33641

SEQ ID NO: 37275 - RNA, 1701 nt, Artificial Sequence
  derived and/or modified CDS sequence (wt) from hemagglutinin__InfluenzaA__ADK33651
augaaggcaauacuaguaguucugcuauauacauuugcaaccgcaaaugcagacacauuauguauagguuaucaugcgaacaauucaacagacacuguagacacaguacuagaaaagaauguaacaguaacacacucuguuaaccuucuagaagacaagcauaacgggaaacuaugcaaacuaagagggguagccccauugcauuuggguaaauguaacauugcuggcuggauccugggaaauccagagugugaaucacucuccacagcaagcucaugguccuacauuguggaaacaucuaguucagacaauggaacguguuacccaggagauuucaucgauuaugaggagcuaagagagcaauugagcucagugucaucauuugaaagguuugagauauuccccaagacaaguucauggcccaaucaugacucgaacaaagguguaacggcagcauguccucaugcuggagcaaagagcuucuacaaaaauuuaauauggcuaguuaaaaaaggaaauucauacccaaagcucagcaaauccuacauuaaugauaaagggaaagaaguccucgugcuauggggcauucaccauccaucuacuagugcugaccaacaaagucucuaucagaaugcagaugcauauguuuuuguggggacaucaagauacagcaagaaguucaagccggaaauagcaauaagacccaaagugagggaucaagaagggagaaugaacuauuacuggacacuaguagagccgggagacaaaauaacauucgaagcaacuggaaaucuagugguaccgagauaugcauucgcaauggaaagaaaugcuggaucugguauuaucauuucagauacaccaguccacgauugcaauacaacuugucagacacccaagggugcuauaaacaccagccucccauuucagaauauacauccgaucacaauuggaaaauguccaaaauauguaaaaagcacaaaauugagacuggccacaggauugaggaaugucccgucuauucaaucuagaggccuauuuggggccauugccgguuucauugaagggggguggacagggaugguagauggaugguacgguuaucaccaucaaaaugagcaggggucaggauaugcagccgaccugaagagcacacagaaugccauugacaagauuacuaacaaaguaaauucuguuauugaaaagaugaauacacaguucacagcaguagguaaagaguucaaccaccuggaaaaaagaauagagaauuuaaauaaaaaaguugaugaugguuuccuggacauuuggacuuacaaugccgaacuguugguucuauuggaaaaugaaagaacuuuggacuaccacgauucaaaugugaagaacuuauaugaaaagguaagaagccaguuaaaaaacaaugccaaggaaauuggaaacggcugcuuugaauuuuaccacaaaugcgauaacacgugcauggaaagugucaaaaaugggacuuaugacuacccaaaauacucagaggaagcaaaauuaaacagagaagaaauagaugggguaaagcuggaaucaacaaggauuuaccagauuuuggcgaucuauucaacugucgccaguucauugguacuaguagucucccugggggcaaucaguuucuggaugugcucuaaugggucacuacaguguagaauauguauuuaa

SEQ ID NO: 37276 - RNA, 1701 nt, Artificial Sequence; identical to SEQ ID NO: 37275
  derived and/or modified CDS sequence (wt) from hemagglutinin__InfluenzaA__ADK33661

SEQ ID NO: 37277 - RNA, 1701 nt, Artificial Sequence
  derived and/or modified CDS sequence (wt) from hemagglutinin__InfluenzaA__ADK33671
augaaggcaauacuaguaguucugcuauauacauuugcaaccgcaaaugcagacacauuauguauagguuaucaugcgaacaauucaacagacacuguagacacaguacuagaaaagaauguaacaguaacacacucuguuaaccuucuagaagacaagcauaacgggaaacuaugcaaacuaagagggguagccccauugcauuuggguaaauguaacauugcuggcuggauccugggaaauccagagugugaaucacucuccacagcaagcucaugguccuacauuguggaaacaucuaguucagacaauggaacguguuacccaggagauuucaucgauuaugaggagcuaagagagcaauugagcucagugucaucauuugaaagguuugagauauuccccaagacaaguucauggcccaaucaugacucgaacaaagguguaacggcagcauguccucaugcuggagcaaaaagcuucuacaaaaauuuaauauggcuaguuaaaaaaggaaauucauacccaaagcucagcaaauccuacauuaaugauaaagggaaagaaguccucgugcuauggggcauucaccauccaucuacuagugcugaccaacaaagucucuaucagaaugcagaugcauauguuuuuguggggacaucaagauacagcaagaaguucaagccggaaauagcaauaagacccaaagugagggaucaagaagggagaaugaacuauuacuggacacuaguagagccgggagacaaaauaacauucgaagcaacuggaaaucuagugguaccgagauaugcauucgcaauggaaagaaaugcuggaucugguauuaucauuucagauacaccaguccacgauugcaauacaacuugucagacacccaagggugcuauaaacaccagccucccauuucagaauauacauccgaucacaauuggaaaauguccaaaauauguaaaaagcacaaaauugagacuggccacaggauugaggaaugucccgucuauucaaucuagaggccuauuuggggccauugccgguuucauugaagggggguggacagggaugguagauggaugguacgguuaucaccaucaaaaugagcaggggucaggauaugcagccgaccuuaagagcacacagaaugccauugacaagauuacuaacaaaguaaauucuguuauugaaaagaugaauacacaguucacagcaguagguaaagaguucaaccaccuggaaaaaagaauagagaauuuaaauaaaaaaguugaugaugguuuccuggacauuuggacuuacaaugccgaacuguugguucuauuggaaaaugaaagaacuuuggacuaccacgauucaaaugugaagaacuuauaugaaaagguaagaagccaguuaaaaaacaaugccaaggaaauuggaaacggcugcuuugaauuuuaccacaaaugcgauaacacgugcauggaaagugucaaaaaugggacuuaugacuacccaaaauacucagaggaagcaaaauuaaacagagaagaaauagaugggguaaagcuggaaucaacaaggauuuaccagauuuuggcgaucuauucaacugucgccaguucauugguacugguagucucccugggggcaaucaguuucuggaugugcucuaaugggucucuacaguguagaauauguauuuaa

SEQ ID NO: 37278 - RNA, 1701 nt, Artificial Sequence
  derived and/or modified CDS sequence (wt) from hemagglutinin__InfluenzaA__ADK33681
augaaggcaauacuaguaguucugcuauauacauuugcaaccgcaaaugcagacacauuauguauagguuaucaugcgaacaauucaacagacacuguagacacaguacuagaaaagaauguaacaguaacacacucuguuaaccuucuagaagacaagcauaacgggaaacuaugcaaacuaagagggguagccccauugcauuuggguaaauguaacauugcuggcuggauccugggaaauccagagugugaaucacucuccacagcaagcucaugguccuacauuguggaaacaucuaguucagacaauggaacguguuacccaggagauuucaucgauuaugaggagcuaagagagcaauugagcucagugucaucauuugaaagguuugagauauuccccaagacaaguucauggcccaaucaugacucgaacaaagguguaacggcagcauguccucaugcuggagcaaaaagcuucuacaaaaauuuaauauggcuagucaaaaaaggaaauucauacccaaagcucagcaaauccuacauuaaugauaaagggaaagaaguccucgugcuauggggcauucaccauccaucuacuagugcugaccaacaaagucucuaucagaaugcagaugcauauguuuuuguggggacaucaagauacagcaagaaguucaagccggaaauagcaauaagacccaaagugagggaucaagaagggagaaugaacuauuacuggacacuaguagagccgggagacaaaauaacauucgaagcaacuggaaaucuagugguaccgagauaugcauucgcaauggaaagaaaugcuggaucugguauuaucauuucagauacaccaguccacgauugcaauacaacuugucagacacccaagggugcuauaaacaccagccucccauuucagaauauacauccgaucacaauuggaaaauguccaaaauauguaaaaagcacaaaauugagacuggccacaggauugaggaaugucccgucuauucaaucuagaggccuauuuggggccauugccgguuucauugaagggggguggacagggaugguagauggaugguacgguuaucaccaucaaaaugagcaggggucaggauaugcagccgaccugaagagcacacagaaugccauugacgagauuacuaacaaaguaaauucuguuauugaaaagaugaauacacaguucacagcaguagguaaagaguucaaccaccuggaaaaaagaauagagaauuuaaauaaaaaaguugaugaugguuuccuggacauuuggacuuacaaugccgaacuguugguucuauuggaaaaugaaagaacuuuggacuaccacgauucaaaugugaagaaauuauaugaaaagguaagaagccaguuaaaaaacaaugccaaggaaauuggaaacggcugcuuugaauuuuaccacaaaugcgauaacacgugcauggaaagugucaaaaaugggacuuaugacuacccaaaauacucagaggaagcaaaauuaaacagagaagaaauagaugggguaaagcuggaaucaacaaggauuuaccagauuuuggcgaucuauucaacugucgccaguucauugguacugguagucucccugggggcaaucaguuucuggaugugcucuaaugggucucuacaguguagaauauguauuuaa

SEQ ID NO: 37279 - RNA, 1701 nt, Artificial Sequence
  derived and/or modified CDS sequence (wt) from hemagglutinin__InfluenzaA__ADK33691
augaaggcaauacuaguaguucugcuauauacauuugcaaccgcaaaugcagacacauuauguauagguuaucaugcgaacaauucaacagacacuguagacacaguacuagaaaagaauguaacaguaacacacucuguuaaccuucuagaagacaagcauaacgggaaacuaugcaaacuaagagggguagccccauugcauuuggguaaauguaacauugcuggcuggauccugggaaauccagagugugaaucacucuccacagcaagcucaugguccuacauuguggaaacaucuaguucagacaauggaacguguuacccaggagauuucaucgauuaugaggagcuaagagagcaauugagcucagugucaucauuugaaagguuugagauauuccccaagacaaguucauggcccaaucaugacucgaacaaagguguaacggcagcauguccucaugcuggagcaaaaagcuucuacaaaaauuuaauauggcuaguuaaaaaaggaaauucauacccaaagcucagcaaauccuacaucaaugauaaagggaaagaaguccucgugcuauggggcauucaccauccaucuacuagugcugaccaacaaagucucuaucagaaugcagauucauauguuuuuguggggacaucaagauacagcaagaaguucaagccggaaauagcaauaagacccaaagugagggaucaagaagggagaaugaacuauuacuggacacuaguagagccgggagacaaaauaacauucgaagcaacuggaaaucuagugguaccgagauaugcauucgcaauggaaagaaaugcuggaucugguauuaucauuucagauacaccaguccacgauugcaauacaacuugucagacacccgagggugcuauaaacaccagccucccauuucagaauauacauccgaucacaauuggaaaauguccaaaauauguaaaaagcacaaaauugagacuggccacaggauugaggaaugucccgucuauucaaucuagaggccuauuuggggccauugccgguuucauugaagggggguggacagggaugguagauggaugguacgguuaucaccaucaaaaugagcaggggucaggauaugcagccgaccugaagagcacacagaaugccauugacgagauuacuaacaaaguaaauucuguuauugaaaagaugaauacacaguucacagcaguagguaaagaguucaaccaccuggaaaaaagaauagagaauuuaaauaaaaaaguugaugaugguuuccuggacauuuggacuuacaaugccgaacuguugguucuauuggaaaaugaaagaacuuuggacuaccacgauucaaaugugaagaacuuauaugaaaagguaagaagccaguuaaaaaacaaugccaaggaaauuggaaacggcugcuuugaauuuuaccacaaaugcgauaacacgugcauggaaagugucaaaaaugggacuuaugacuacccaaaauacucagaggaagcaaaauuaaacagagaagaaauagaugggguaaagcuggaaucaacaaggauuuaccagauuuuggcgaucuauucaacugucgccaguucauugguacugguagucucccugggggcaaucaguuucuggaugugcucuaaugggucucuacaguguagaauauguauuuaa

SEQ ID NO: 37280 - RNA, 1701 nt, Artificial Sequence
  derived and/or modified CDS sequence (wt) from hemagglutinin__InfluenzaA__ADK33701
augaaggcaauacuaguaguucugcuauauacauuugcaaccgcaaaugcagacacauuauguauagguuaucaugcgaacaauucaacagacacuguagacacaguacuagaaaagaauguaacaguaacacacucuguuaaccuucuagaagacaagcauaacgggaaacuaugcaaacuaagagggguagccccauugcauuuggguaaauguaacauugcuggcuggauccugggaaauccagagugugaaucacucuccacagcaagcucaugguccuacauuguggaaacaucuaguucagacaauggaacguguuacccaggagauuucaucgauuaugaggagcuaagagagcaauugagcucagugucaucauuugaaagguuugagauauuccccaagacaaguucauggcccaaucaugacucgaacaaagguguaacggcagcauguccucaugcuggagcaaaaagcuucuacaaaaauuuaauauggcuaguuaaaaaaggaaauucauacccaaagcucagcaaauccuacauuaaugauaaagggaaagaaguccucgugcuauggggcauucaccauccaucuacuagugcugaccaacaaagucucuaucagaaugcagaugcauauguuuuuguggggacaucaagauacagcaagaaguucaagccggaaauagcaauaagacccaaagugagggaucaagaagggagaaugaacuauuacuggacacuaguagagccgggagacaaaauaacauucgaagcaacuggaaaucuagugguaccgagauaugcauucgcaauggaaagaaaugcuggaucugguauuaucauuucagauacaccaguccacgauugcaauacaacuugucagacacccaagggugcuauaaacaccagccucccauuucagaauauacauccgaucacaauuggaaaauguccaaaauauguaaaaagcacaaaauugagacuggccacaggauugaggaaugucccgucuauucaaucuagaggccuauuuggggccauugccgguuucauugaagggggguggacagggaugguagauggaugguacgguuaucaccaucaaaaugagcaggggucaggauaugcagccgaccugaagagcacacagaaugccauugacaagauuacuaacaaaguaaauucuguuauugaaaagaugaauacacaguucacagcaguagguaaagaguucaaccaccuggaaaaaagaauagagaauuuaaauaaaaaaguugaugaugguuuccuggacauuuggacuuacaaugcagaacuguugguucuauuggaaaaugaaagaacuuuggacuaccacgauucaaaugugaagaacuuauaugaaaagguaagaagccaguuaaaaaacaaugccaaggaaauuggaaacggcugcuuugaauuuuaccacaaaugcgauaacacgugcauggaaagugucaaaaaugggacuuaugacuacccaaaauacucagaggaagcaaaauuaaacagagaagaaauagaugggguaaagcuggaaucaacaaggguuuaccagauuuuggcgaucuauucaacugucgccaguucauugguacugguagucucccugggggcaaucaguuucuggaugugcucuaaugggucucuacaguguagaauauguauuuaa

SEQ ID NO: 37281 - RNA, 1701 nt, Artificial Sequence
  derived and/or modified CDS sequence (wt) from hemagglutinin__InfluenzaA__ADK33711
augaaggcaauacuaguaguucugcuauauacauuugcaaccgcaaaugcagacacauuauguauagguuaucaugcgaacaauucaacagacacuguagacacaguacuagaaaagaauguaacaguaacacacucuguuaaccuucuagaagacaagcauaacgggaaacuaugcaaacuaagagggguagccccauugcauuuggguaaauguaacauugcuggcuggauccugggaaauccagagugugaaucacucuccacagcaagcucaugguccuacauuguggaaacaucuaguucagacaauggaacguguuacccaggagauuucaucgauuaugaggagcuaagagagcaauugagcucagugucaucauuugaaagguuugagauauuccccaagacaaguucauggcccaaucaugacucgaacaaagguguaacggcagcauguccucaugcuggagcaaaaagcuucuacaaaaauuuaauauggcuaguuaaaaaaggaaauucauacccaaagcucagcaaauccuacauuaaugauaaagggaaagaaauccuagugcuauggggcauucaccauccaucuacuagugcugaccaacaaagucucuaucagaaugcagaugcauauguuuuuguggggacaucaagauacagcaagaaguucaagccggaaauagcaauaagacccaaagugagggaucaagaagggagaaugaacuauuacuggacacuaguagagccgggagacaaaauaacauucgaagcaacuggaaaucuagugguaccgagauaugcauucgcaauggaaagaaaugcuggaucugguauuaucauuucagauacaccaguccacgauugcaauacaacuugucagacacccaagggugcuauaaacaccagccucccauuucagaauauacauccgaucacaauuggaaaauguccaaaauauguaaaaagcacaaaauugagacuggccacaggauugaggaauaucccgucuauucaaucuagaggccuauuuggggccauugccgguuucauugaagggggguggacagggaugguagauggaugguacgguuaucaccaucaaaaugagcaggggucaggauaugcagccgaccugaagagcacacagaaugccauugacgagauuacuaacaaaguaaacucuguuauugaaaagaugaauacacaguucacagcaguagguaaagaguucaaccaccuggaaaaaagaauagagaauuuaaauaaaaagguugaugaugguuuccuggacauuuggacuuacaaugccgaacuguugguucuauuggaaaaugaaagaacuuuggacuaccacgauucaaaugugaagaacuuauaugaaaagguaagaagccaguuaaaaaacaaugccaaggaaauuggaaacggcugcuuugaauuuuaccacaaaugcgauaacacgugcauggaaagugucaaaaaugggacuuaugacuacccaaaauacucagaggaagcaaaauuaaacagagaagaaauagaugggguaaagcuggaaucaacaaggauuuaccagauuuuggcgaucuauucaacugucgccaguucauugguacugguagucucccugggggcaaucaguuucuggaugugcucuaaugggucucuacaguguagaauauguauuuaa

SEQ ID NO: 37282 - RNA, 1701 nt, Artificial Sequence
  derived and/or modified CDS sequence (wt) from hemagglutinin__InfluenzaA__ADK33721
augaaggcaauacuaguaguucugcuauauacauuuguaaccgcaaaugcagacacauuauguauagguuaucaugcgaacaauucaacagacacuguagacacaguacuagaaaagaauguaacaguaacacacucuguuaaccuucuagaagacaagcauaacgggaaacuaugcaaacuaagagggguagccccauugcauuuggguaaauguaacauugcuggcuggauccugggaaauccagagugugaaucacucuccacagcaagcucaugguccuacauuguggaaacaucuaguucagacaauggaacguguuacccaggagauuucaucgauuaugaggagcuaagagagcaauugagcucagugucaucauuugaaagguuugagauauuccccaagacaaguucauggcccaaucaugacucgaacaaagguguaacggcagcauguccucaugcuggagcaaaaagcuucuacaaaaauuuaauauggcuaguuaaaaaaggaaauucauacccaaagcucagcaaauccuacauuaaugauaaagggaaagaaguccucgugcuauggggaauucaccauccaucuacuagugcugaccaacaaagucucuaucagaaugcagaugcauauguuuuuguggggacaucaagauacagcaagaaguucaagccggaaauagcaauaagacccaaagugagggaucaagaagggagaaugaacuauuacuggacacuaguagagccgggagacaaaauaacauucgaagcaacuggaaaucuagugguaccgagauaugcauucgcaauggaaagaaaugcuggaucugguauuaucauuucagauacaccaguccacgauugcaauacaacuugucagacacccaagggugcuauaaacaccagccucccauuucagaauauacauccgaucacaauuggaaaauguccaaaauauguaaaaagcacaaaauugagacuggccacaggauugaggaaugucccgucuauucaaucuagaggccuauuuggggccauugccgguuucauugaagggggguggacagggaugguagauggaugguacgguuaucaccaucaaaaugagcaggggucaggauaugcagccgaccugaagagcacacagcaugccauugacgagauuacuaacaaaguaaauucuguuauugaaaagaugaauacacaguucacagcaguagguaaagaguucaaccaccuggaaaaaagaauagagaauuuaaauaaaaaaguugaugaugguuuccuggacauuuggacuuacaaugccgaacuguugguucuauuggaaaaugaaagaacuuuggacuaccacgauucaaaugugaagaacuuauaugaaaagguaagaagccaguuaaaaaacaaugccaaggaaauuggaaacggcugcuuugaauuuuaccacaaaugcgauaacacgugcauggaaagugucaaaaaugggacuuaugacuacccaaaauacucagaggaagcaaaauuaaacagagaagaaauagaugggguaaagcuggaaucaacaaggauuuaccagauuuuggcgaucuauucaacugucgccaguucauugguacugguagucucccugggggcaaucaguuucuggaugugcucuaaugggucucuacaguguagaauauguauuuaa

SEQ ID NO: 37283 - RNA, 1701 nt, Artificial Sequence
  derived and/or modified CDS sequence (wt) from hemagglutinin__InfluenzaA__ADK33731
augaaggcaacacuaguaguucugcuauauacauuugcaaccgcaaaugcagacacauuauguauagguuaucaugcgaacaauucaacagacacuguagacacaguacuagaaaagaauguaacaguaacacacucuguuaaccuucuagaagacaagcauaacgggaaauuaugcaaacuaagagggguagccccauugcauuuggguaaauguaacauugcuggcuggauccugggaaauccagagugugaaucacucuccacagcaagcucaugguccuacauuguggaaacaucuaguucaggcaauggaacguguuacccaggagauuucaucgauuaugaagagcuaagagagcaauugagcucagugucaucauuugaaagguuugagauauuccccaagacaaguucauggcccaaucaugacucgaacaaagguguaacggcagcauguccucaugcuggagcaaaaagcuucuacaaaaauuuaauauggcuaguuaaaaaaggaaacucauacccaaagcucagcaaauccuacauuaaugauaaagggaaagaaguccucgugcuauggggcauucaccauccaucuacuagugcugaccaacaaagucucuaucagaaugcagaugcauaugcuuuuguggggacaucaagauacagcaagaaguucaagccggaaauagcaauaagacccaaagugagggaucaagaagggagaaugaacuauuacuggacacuaguagagccgggagacaaaauaacauucgaagcaacuggaaaucuauugguaccgagauaugcauucgcaauggaaagaaaugcuggaucugguauuaucauuucagauacaccaguccacgauugcaauacaacuugucagacacccaagggugcuauaaacaccagccucccauuucagaacauacauccgaucacaauuggaaaauguccaaaauauguaaaaagcacaaaauugagacuggccacaggauugaggaacgucccgucuauucaaucuagaggccuauuuggggccauugccgguuucauugaagggggguggacagggaugguagauggaugguacgguuaucaccaucaaaaugagcaggggucaggauaugcagccgaccugaagagcacacagaaugccauugacgagauuacuaacaaaguaaauucuguuauugaaaagaugaauacacaguucacagcaguagguaaagaguucaaccaccuggaaaaaagaauagagaauuuaaauaaaaagguugaugaugguuuccuggacauuuggacuuacaaugccgaacuguugguucuauuggaaaaugaaagaacuuuggacuaccacgauucaaaugugaagaacuuauaugaaaagguaagaagccaguuaaaaaacaaugccaaggaaauuggaaacggcugcuuugaauuuuaccacaaaugcgauaacacgugcauggaaagugucaaaaaugggacuuaugacuacccgaaauacucagaggaagcaaaauuaaacagagaagaaauagaugggguaaagcuggaaucaacaaggauuuaccagauuuuggcgaucuauucaacugucgccaguucauugguacugguagucucccugggggcaaucaguuucuggaugugcucuaaugggucucuacaguguagaauauguauuuaa

SEQ ID NO: 37284 - RNA, 1701 nt, Artificial Sequence
  derived and/or modified CDS sequence (wt) from hemagglutinin__InfluenzaA__ADK33741
augaaggcaauacuaguaguucugcuauauacauuugcaaccgcaaaugcagacacauuauguauagguuaucaugcgaacaauucaacagacacuguagacacaguacuagaaaagaauguaacaguaacacacucuguuaaccuucuagaagacaagcauaacgggaaacuaugcaaacuaagagggauagccccauugcauuuggguaaauguaacauugcuggcuggauccugggaaauccagagugugaaucacucuccacagcaagcucaugguccuacauuguggaaacaucuaguucagacaauggaacguguuacccaggagauuucaucgauuaugaggagcuaagagagcaauugagcucagugucaucauuugaaagguuugagauauuccccaagacaaguucauggcccaaucaugacucgaacaaagguguaacggcagcauguccucaugcuggagcaaaaagcuucuacaaaaauuuaauauggcuaguuaaaaaaggaaauucauacccaaagcucagcaaauccuacauuaaugauaaagggaaagaaguccucgugcuauggggcauucaccauccaucuacuagugcugaccaacaaagucucuaucagaaugcagaugcauauguuuuuguggggacaucaagauacagcaagaaguucaagccggaaauagcaauaagacccaaagugagggaucaagaagggagaaugaacuauuacuggacacuaguagagccgggagacaaaauaacauucgaagcaacuggaaaucuagugguaccgagauaugcauucgcaauggaaagaaaugcuggaucugguauuaucauuucagauacaccaguccacgauugcaauacaacuugucagacacccaagggugcuauaaacaccagccucccauuucagaauauacauccgaucacaauuggaaaauguccaaaauauguaaaaagcacaaaauugagacuggccacaggauugaggaaugucccgucuauucaaucuagaggccuauuuggggccauugccgguuucauugaagggggguggacagggaugguagauggaugguacgguuaucaccaucaaaaugagcaggggucaggauaugcagccgaccugaagagcacacagaaugccauugacgagauuacuaacaaaguaaauucuguuauugaaaagaugaauacacaguucacagcaguagguaaagaguucaaccaccuggaaaaaagaauagagaauuuaaauaaaaagguugaugaugguuuccuggacauuuggacuuacaaugccgaacuguugguucuauuggaaaaugaaagaacuuuggacuaccacgauucaaaugugaagaacuuauaugaaaagguaagaagccaguuaaaaaacaaugccaaggaaauuggaaacggcugcuuugaauuuuaccacaaaugcgauaacacgugcauggaaagugucaaaaaugggacuuaugacuacccaaaauacucagaggaagcaaaauuaaacagagaagaaauagaugggguaaagcuggaaucaacaaggauuuaccagauuuuggcgaucuauucaacugucgccaguucauugguacugguagucucccugggggcaaucaguuucuggaugugcucuaaugggucucuacaguguagaauauguauuuaa

SEQ ID NO: 37285 - RNA, 1701 nt, Artificial Sequence
  derived and/or modified CDS sequence (wt) from hemagglutinin__InfluenzaA__ADK33751
augaaggcaauacuaguaguucugcuauauacauuugcaaccgcaaaugcagacacauuauguauagguuaucaugcgaacaauucaacagacacuguagacacaguacuagaaaagaauguaacaguaacacacucuguuaaccuucuagaagacaagcauaacgggaaacuaugcaaacuaagagggguagccccauugcauuuggguaaauguaacauugcuggcuggauccugggaaauccagagugugaaucacucuccacagcaagcucaugguccuacauuguggaaacaucuaguucagacaauggaacguguuacccaggagauuucaucgauuaugaggagcuaagagagcaauugagcucagugucaucauuugaaagguuugagauauuccccaagacaaguucauggcccaaucaugacucgaacaaagguguaacggcagcauguccucaugcuggagcaaaaagcuucuacaaaaauuuaauauggcuaguuaaaaaaggaaauucauacccaaagcucagcaaauccuacauuaaugauaaagggaaagaaguccucgugcuauggggcauucaccauccaucuacuagugcugaccaacaaagucucuaucagaaugcagaugcauauguuuuuguggggacaucaagauacagcaagaaguucaagccggaaauagcaauaagacccaaagugagggaucaagaagggagaaugaacuacuacuggacacuaguagagccgggagacaaaauaacauucgaagcaacuggaaaucuagugguaccgagauaugcauucgcaauggaaagaaaugcuggaucugguauuaucauuucagauacaccaguccacgauugcaauacaacuugucagacacccaagggugcuauaaacaccagccucccauuucagaauauacauccgaucacaauuggaaaauguccaaaauauguaaaaagcacaaaauugagacuggccacaggauugaggaaugucccgucuauucaaucuagaggccuauuuggggccauugccgguuucauugaagggggguggacagggaugguagauggaugguacgguuaucaccaucaaaaugagcaggggucaggauaugcagccgaccugaagagcacacagaaugccauugacgagauuacuaacaaaguaaauucuguuauugaaaagaugaauacacaguucacagcaguagguaaagaguucaaccaccuggaaaaaagaauagagaauuuaaauaaaaagguugaugaugguuuccuggacauuuggacuuacaaugccgaacuguugguucuauuggaaaaugaaagaacuuuggacuaccacgauucaaaugugaagaacuuauaugaaaagguaagaagccaguuaaaaaacaaugccaaggaaauuggaaacggcugcuuugaauuuuaccacaaaugcgauaacacgugcauggaaagugucaaaaaugggacuuaugacuacccaaaauacucagaggaagcaaaauuaaacagagaagaaauagaugggguaaagcuggaaucaacaaggauuuaccagauuuuggcgaucuauucaacugucgccaguucauugguacugguagucucccugggggcaaucaguuucuggaugugcucuaaugggucucuacaguguagaauauguauuuaa

SEQ ID NO: 37286 - RNA, 1701 nt, Artificial Sequence
  derived and/or modified CDS sequence (wt) from hemagglutinin__InfluenzaA__ADK33761
augaaggcaauacuaguaguucugcuauauacauuugcaaccgcaaaugcagacacauuauguauagguuaucaugcgaacaauucaacagacacuguagacacaguacuagaaaagaauguaacaguaacacacucuguuaaccuucuagaagacaagcauaacgggaaacuaugcaaacuaagagggguagccccauugcauuuggguaaauguaacauugcuggcuggauccugggaaauccagagugugaaucacucuccacagcaagcucaugguccuacauuguggaaacaucuaguucagacaauggaacguguuacccaggagauuucaucgauuaugaggagcuaagagagcaauugagcucagugucaucauuugaaagguuugagauauuccccaagacaaguucauggcccaaucaugacucgaacaaagguguaacggcagcauguccucaugcuggagcaaaaagcuucuacaaaaauuuaauauggcuaguuaaaaaaggaaauucauacccaaagcucagcaaauccuacauuaaugauaaagggaaagaaguccucgugcuauggggcauucaccauccaucuacuagugcugaccaacaaagucucuaucagaaugcagaugcauauguuuuuguggggacaucaagauacagcaagaaguucaagccggaaauagcaauaagacccaaagugagggaucaagaagggagaaugaacuacuacuggacacuaguagagccgggagacaaaauaacauucgaagcaacuggaaaucuagugguaccgagauaugcauucgcaauggaaagaaaugcuggaucugguauuaucauuucagauacaccaguccacgauugcaauacaacuugucagacacccaagggugcuauaaacaccagccucccauuucagaauauacauccgaucacaauuggaaaauguccaaaauauguaaaaagcacaaaauugagccuggccacaggauugaggaaugucccgucuauucaaucuagaggccuauuuggggccauugccgguuucauugaagggggguggacagggaugguagauggaugguacgguuaucaccaucaaaaugagcaggggucaggauaugcagccgaccugaagagcacacagaaugccauugacgagauuacuaacaaaguaaauucuguuauugaaaagaugaauacacaguucacagcaguagguaaagaguucaaccaccuggaaaaaagaauagagaauuuaaauaaaaagguugaugaugguuuccuggacauuuggacuuacaaugccgaacuguugguucuauuggaaaaugaaagaacuuuggacuaccacgauucaaaugugaagaacuuauaugaaaagguaagaagccaguuaaaaaacaaugccaaggaaauuggaaacggcugcuuugaauuuuaccacaaaugcgauaacacgugcauggaaagugucaaaaaugggacuuaugacuacccaaaauacucagaggaagcaaaauuaaacagagaagaaauagaugggguaaagcuggaaucaacaaggauuuaccagauuuuggcgaucuauucaacugucgccaguucauugguacugguagucucccugggggcaaucaguuucuggaugugcucuaaugggucucuacaguguagaauauguauuuaa

SEQ ID NO: 37287 - RNA, 1701 nt, Artificial Sequence
  derived and/or modified CDS sequence (wt) from hemagglutinin__InfluenzaA__ADK33771
augaaggcaauacuaguaguucugcuauauacauuugcaaccgcaaaugcagacacauuauguauagguuaucaugcgaacaauucaacagacacuguagacacaguacuagaaaagaauguaacaguaacacacucuguuaaccuucuagaagacaagcauaacgggaaacuaugcaaacuaagagggguagccccauugcauuuggguaaauguaacauugcuggcuggauccugggaaauccagagugugaaucacucuccacagcaagcucaugguccuacauuguggaaacaucuaguucagacaauggaacguguuacccaggagauuucaucgauuaugaggagcuaagagagcaauugagcucagugucaucauuugaaagguuugagauauuccccaagacaaguucauggcccaaucaugacucgaacaaagguguaacggcagcauguccucaugcuggagcaaaaagcuucuacaaaaauuuaauauggcuaguuaaaaaaggaaauucauacccaaagcucagcaaauccuacauuaaugauaaagggaaagaaguccucgugcuauggggcauucaccauccaucuacuagugcugaccaacaaagucucuaucagaaugcagaugcauauguuuuuguagggacaucaagauacagcaagaaguucaagccggaaauagcaauaagacccaaagugagggaucaagaagggagaaugaacuauuacuggacacuaguagagccgggagacaaaauaacauucgaagcaacuggaaaucuagugguaccgagauaugcauucgcaauggaaagaaaugcuggaucugguauuaucauuucagauacaccaguccacgauugcaauacaacuugucagacacccaagggugcuauaaacaccagccucccauuucagaauauacauccgaucacaauuggaaaauguccaaaauauguaaaaagcacaaaauugagacuggccacaggauugaggaaugucccgucuauucaaucuagaggccuauuuggggccauugccgguuucauugaagggggguggacagggaugguagauggaugguacgguuaucaccaucaaaaugagcaggggucaggauaugcagccgaccugaagagcacacagaaugccauugacaagauuacuaacaaaguaaauucuguuauugaaaagaugaauacacaguucacagcaguagguaaagaguucaaccaccuggaaaaaagaauagagaauuuaaauaaaaaaguugaugaugguuuccuggacauuuggacuuacaaugccgaacuguugguucuauuggaaaaugaaagaacuuuggacuaccacgauucaaaugugaagaacuuauaugaaaagguaagaagccaguuaaaaaacaaugccaaggaaauuggaaacggcugcuuugaauuuuaccacaaaugcgauaacacgugcauggaaagugucaaaaaugggacuuaugacuacccaaaauacucagaggaagcaaaauuaaacagagaagaaauagaugggguaaagcuggaaucaacaaggauuuaccagauuuuggcgaucuauucaacugucgccaguucauugguacugguagucucccugggggcaaucaguuucuggaugugcucuaaugggucucuacaguguagaauauguauuuaa

SEQ ID NO: 37288 - RNA, 1701 nt, Artificial Sequence; identical to SEQ ID NO: 36383
  derived and/or modified CDS sequence (wt) from hemagglutinin__InfluenzaA__ADK33781

SEQ ID NO: 37289 - RNA, 1701 nt, Artificial Sequence; identical to SEQ ID NO: 35789
  derived and/or modified CDS sequence (wt) from hemagglutinin__InfluenzaA__ADK33791

SEQ ID NO: 37290 - RNA, 1701 nt, Artificial Sequence; identical to SEQ ID NO: 37280
  derived and/or modified CDS sequence (wt) from hemagglutinin__InfluenzaA__ADK33801

SEQ ID NO: 37291 - RNA, 1701 nt, Artificial Sequence
  derived and/or modified CDS sequence (wt) from hemagglutinin__InfluenzaA__ADK33811
augaaggcaauacuaguaguucugcuauauacauuugcaaccgcaaaugcagacacauuauguauagguuaucaugcgaacaauucaacagacacuguagacacaguacuagaaaagaauguaacaguaacacacucuguuaaccuucuagaagacaagcauaacgggaaacuaugcaaacuaagagggguagccccauugcauuuggguaaauguaacauugcuggcuggauccugggaaauccagagugugaaucacucuccacagcaagcucaugguccuacauuguggaaacaucuaguucagacaauggaacguguuacccaggagauuucaucgauuaugaggagcuaagagagcaauugagcucagugucaucauuugaaagguuugagauauuccccaagacaaguucauggcccaaucaugacucgaacaaagguguaacggcagcauguccucaugcuggagcaaaaagcuucuacaaaaauuuaauauggcuaguuaaaaaaggaaauucauacccaaagcucagcaaauccuacauuaaugauaaagggaaagaaguccucgugcuauggggaauucaccauccaucaacuagugcugaccaacaaagucucuaucagaaugcagaugcauauguuuuuguggggacaucaagauacagcaagaaguucaagccggaaauagcaauaagacccaaagugagggaucaagaagggagaaugaacuauuacuggacacuaguagagccgggagacaaaauaacauucgaagcaacuggaaaucuagugguaccgagauaugcauucgcaauggaaagaaaugcuggaucugguauuaucauuucagauacaccaguccacgauugcaauacaacuugucagacacccaagggugcuauaaacaccagccucccauuucagaauauacauccgaucacaauuggaaaauguccaaaauauguaaaaagcacaaaauugagacuggccacaggauugaggaaugucccgucuauucaaucuagaggccuauuuggggccauugccgguuucauugaagggggguggacagggaugguagauggaugguacgguuaucaccaucaaaaugagcaggggucaggauaugcagccgaccugaagagcacacagcaugccauugacgagauuacuaacaaaguaaauucuguuauugaaaagaugaauacacaguucacagcaguagguaaagaguucaaccaccuggaaaaaagaauagagaauuuaaauaaaaaaguugaugaugguuuccuggacauuuggacuuacaaugccgaacuguugguucuauuggaaaaugaaagaacuuuggacuaccacgauucaaaugugaagaacuuauaugaaaagguaagaagccaguuaaaaaacaaugccaaggaaauuggaaacggcugcuuugaauuuuaccacaaaugcgauaacacgugcauggaaagugucaaaaaugggacuuaugacuacccaaaauacucagaggaagcaaaauuaaacagagaagaaauagaugggauaaagcuggaaucaacaaggauuuaccagauuuuggcgaucuauucaacugucgccaguucauugguacugguagucucccugggggcaaucaguuucuggaugugcucuaaugggucucuacaguguagaauauguauuuaa

SEQ ID NO: 37292 - RNA, 1701 nt, Artificial Sequence
  derived and/or modified CDS sequence (wt) from hemagglutinin__InfluenzaA__ADK33821
augaaggcaauacuaguaguucugcuauauacauuugcaaccgcaaaugcagacacauuauguauagguuaucaugcgaacaauucaacagacacuguagacacaguacuagaaaagaauguaacaguaacacacucuguuaaccuucuagaagacaagcauaacgggaaacuaugcaaacuaagagggguagccccauugcauuuggguaaauguaacauugcuggcuggauccugggaaauccagagugugaaucacucuccacagcaagcucaugguccuacauuguggaaacaucuaguucagacaauggaacguguuacccaggagauuucaucgauuaugaggagcuaagagagcaauugagcucagugucaucauuugaaagguuugagauauuccccaagacaaguucauggcccaaucaugacucgaacaaagguguaacggcagcauguccucaugcuggagcaaaaagcuucuacaaaaauuuaauauggcuaguuaaaaaaggaaauucauacccaaagcucagcaaauccuacauuaaugauaaagggaaagaaguccucgugcuauggggcauucaccauccaucuacuagugcugaccaacaaagucucuaucagaaugcagaugcauauguuuuuguggggacaucaagauacagcaagaaguucaagccggaaauagcaauaagacccaaagugagggaucaagaagggagaaugaacuauuacuggacacuaguagagccgggagacaaaauaacauucgaagcaacuggaaaucuagugguaccgagauaugcauucacaauggaaagaaaugcuggaucugguauuaucauuucagauacaccaguccacgauugcaauacaacuugucagacacccaagggugcuauaaacaccagccucccauuucagaauauacauccgaucacaauuggaaaauguccaaaauauguaaaaagcacaaaauugagacuggccacaggauugaggaaugucccgucuauucaaucuagaggccuauuuggggccauugccgguuucauugaagggggguggacagggaugguagauggaugguacgguuaucaccaucaaaaugagcaggggucaggauaugcagccgaccugaagagcacacagaaugccauugacgagauuacuaacaaaguaaauucuguuauugaaaagaugaauacacaguucacagcaguagguaaagaguucaaccaccuggaaaaaagaauagagaauuuaaauaaaaagguugaugaugguuuccuggacauuuggacuuacaaugccgaacuguugguucuauuggaaaaugaaagaacuuuggacuaccacgauucaaaugugaagaacuuauaugaaaagguaagaaaccaguuaaaaaacaaugccaaggaaauuggaaacggcugcuuugaauuuuaccacaaaugcgauaacacgugcauggaaagugucaaaaaugggacuuaugacuacccaaaauacucagaggaagcaaaauuaaacagagaagaaauagaugggguaaagcuggaaucaacaaggauuuaccagauuuuggcgaucuauucaaccgucgccaguucauugguacuggcagucucccugggggcaaucaguuucuggaugugcucuaaugggucucuacaguguagaauauguauuuaa

SEQ ID NO: 37293 - RNA, 1701 nt, Artificial Sequence
  derived and/or modified CDS sequence (wt) from hemagglutinin__InfluenzaA__ADK33831
augaaggcaauacuaguaguucugcuauauacauuugcaaccgcaaaugcagacacauuauguauagguuaucaugcgaacaauucaacagacacuguagacacaguacuagaaaagaauguaacaguaacacacucuguuaaccuucuagaagacaagcauaacgggaaacuaugcaaacuaagagggauagccccauugcauuuggguaaauguaacauugcuggcuggauccugggaaauccagagugugaaucacucuccacagcaagcucaugguccuacauuguggaaacaucuaguucagacaauggaacguguuacccaggagauuucaucgauuaugaggagcuaagagagcaauugagcucagugucaucauuugaaagguuugagauauuccccaauacaaguucauggcccaaucaugacucgaacaaagguguaacggcagcauguccucaugcuggagcaaaaagcuucuacaaaaauuuaauauggcuaguuaaaaaaggaaauucauacccaaagcucagcaaauccuacauuaaugauaaagggaaagaaguccucgugcuauggggcauucaccauccaucuacuagugcugaccaacaaagucucuaucagaaugcagaugcauauguuuuuguggggacaucaagauacagcaagaaguucaagccggaaauagcaauaagacccaaagugagggaucaagaagggagaaugaacuauuacuggacacuaguagagccgggagacaaaauaacauucgaagcaacuggaaaucuagugguaccgagauaugcauucgcaauggaaagaaaugcuggaucugguauuaucauuucagauacaccaguccacgauugcaauacaacuugucagacacccaagggugcuauaaacaccagccucccauuucagaauauacauccgaucacaauuggaaaauguccaaaauauguaaaaagcacaaaauugagacuggccacaggauugaggaaugucccgucuauucaaucuagaggccuauuuggggccauugccgguuucauugaagggggguggacagggaugguagauggaugguacgguuaucaccaucaaaaugagcaggggucaggauaugcagccgaccugaagagcacacagaaugccauugacgagauuacuaacaaaguaaauucuguuauugaaaagaugaauacacaguucacagcaguagguaaagaguucaaccaccuggaaaaaagaauagagaauuuaaauaaaaaaguugaugaugguuuccuggacauuuggacuuacaaugccgaacuguugguucuauuggaaaaugaaagaacuuuggacuaccacgauucaaaugugaagaacuuauaugaaaagguaagaagccaguuaaaaaacaaugccaaggaaauuggaaacggcugcuuugaauuuuaccacaaaugcgauaacacgugcauggaaagugucaaaaaugggacuuaugacuacccaaaauacucagaggaagcaaaauuaaacagagaagaaauagaugggguaaagcuggaaucaacaaggauuuaccagauuuuggcgaucuauucaacugucgccaguucauugguacugguagucucccugggggcaaucaguuucuggaugugcucuaaugggucucuacaguguagaauauguauuuaa

SEQ ID NO: 37294 - RNA, 1701 nt, Artificial Sequence
  derived and/or modified CDS sequence (wt) from hemagglutinin__InfluenzaA__ADK33841
augaaggcaauacuaguaguucugcuauauacauuugcaaccgcaaaugcagacacauuauguauagguuaucaugcgaacaauucaacagacacuguagacacaguacuagaaaagaauguaacaguaacacacucuguuaaccuucuagaagacaagcauaacgggaaacuaugcaaacuaagagggguagccccauugcauuuggguaaauguaacauugcuggcuggauccugggaaauccagagugugaaucacucuccacagcaagcucaugguccuacauuguggaaacaucuaguucagacaauggaacguguuacccaggagauuucaucgauuaugaggagcuaagagagcaauugagcucagugucaucauuugaaagguuugagauauuccccaagacaaguucauggcccaaucaugacucgaacaaagguguaacggcagcauguccucaugcuggagcaaaaagcuucuacaaaaauuuaauauggcuaguuaaaaaaggaaauucauacccaaagcucagcaaauccuacauuaaugauaaagggaaagaaguccucgugcuauggggaauucaccauccaucuacuagugcugaccaacaaagucucuaucagaaugcagaugcauauguuuuuguggggacaucaagauacagcaagaaguucaagccggaaauagcaauaagacccaaagugagggaucaagaagggagaaugaacuauuacuggacacuaguagagccgggagacaaaauaacauucgaagcaacuggaaaucuagugguaccgagauaugcauucgcaauggaaagaaaugcuggaucugguauuaucauuucagauacaccaguccacgauugcaauacaacuugucagacacccaagggugcuauaaacaccagccucccauuucagaauauacauccgaucacaauuggaaaauguccaaaauauguaaaaagcacaaaauugagacuggccacaggauugaggaaugucccgucuauucaaucuagaggccuauuuggggccauugccgguuucauugaagggggguggacagggaugguagauggaugguacgguuaucaccaucaaaaugagcaggggucaggauaugcagccgaccugaagagcacacagcaugccauugacgagauuacuaacaaaguaaauucuguuauugaaaagaugaauacacaguucacagcaguagguaaagaguucaaccaccuggaaaaaagaauagagaauuuaaauaaaaaaguugaugaugguuuccuggacauuuggacuuacaaugccgaacuguugguucuauuggaaaaugaaagaacuuuggacuaccacgauucaaaugugaagaacuuauaugaaaagguaagaagccaguuaaaaaacaaugccaaggaaauuggaaacggcugcuuugaauuuuaccacaaaugcgauaacacgugcauggaaagugucaaaaaugggacuuaugacuacccaaaauacucagaggaagcaaaauuaaacagagaagaaauagaugggguaaagcuggaaucaacaaggauuuaccagauuuuggcgaucuauucaacugucgccaguucauugguacugguagucucccugggggcaaucaguuucuggaugugcucuaaugggucucuacaguguagaauauguauuuaa

SEQ ID NO: 37295 - RNA, 1701 nt, Artificial Sequence; identical to SEQ ID NO: 36848
  derived and/or modified CDS sequence (wt) from hemagglutinin__InfluenzaA__ADK33851

SEQ ID NO: 37296 - RNA, 1701 nt, Artificial Sequence; identical to SEQ ID NO: 36834
  derived and/or modified CDS sequence (wt) from hemagglutinin__InfluenzaA__ADK33861

SEQ ID NO: 37297 - RNA, 1701 nt, Artificial Sequence
  derived and/or modified CDS sequence (wt) from hemagglutinin__InfluenzaA__ADK33871
augaaggcaauacuaguaguucugcuauauacauuugcaaccgcaaaugcagacacauuauguauagguuaucaugcgaacaauucaacagacacuguagacacaguacuagaaaagaauguaacaguaacacacucuguuaaccuucuagaagacaagcauaacgggaaacuaugcaaacuaagagggguagccccauugcauuuggguaaauguaacauugcuggcuggauccugggaaauccagagugugaaucacucuccacagcaagcucaugguccuacauuguggaaacaucuaguucagacaauggaacguguuacccaggagauuucaucgauuaugaggagcuaagagagcaauugagcucagugucaucauuugaaagguuugagauauuccccaagacaaguucauggcccaaucaugacucgaacaaagguguaacggcagcauguccucaugcuggagcaaaaagcuucuacaaaaauuuaauauggcuaguuaaaaaaggaaauucauacccaaagcucagcaaauccuacauuaaugauaaagggaaagaaguccucgugcuauggggcauucaccauccaucuacuagugcugaccaacaaagucucuaucagaaugcagaugcauauguuuuuguggggacaucaagauacagcaagaaguucaagccggaaauagcaauaagacccaaagugagggaacaagaagggagaaugaacuauuacuggacacuaguagagccgggagacaaaauaacauucgaagcaacuggaaaucuagugauaccgagauaugcauucgcaauggaaagaaaugcuggaucugguauuaucauuucagauacaccaguccacgauugcaauacaacuugucagacacccaagggugcuauaaacaccagccucccauuucagaauauacauccgaucacaauuggaaaauguccaaaauauguaaaaagcacaaaauugagacuggccacaggauugaggaaugucccgucuauucaaucuagaggccuauuuggggccauugccgguuucauugaagggggguggacagggaugguagauggaugguacgguuaucaccaucaaaaugagcaggggucaggauaugcagccgaccugaagagcacacagaaugccauugacgagauuacuaacaaaguaaauucuguuauugaaaagaugaauacacaguucacagcaguagguaaagaguucaaccaccuggaaaaaagaauagagaauuuaaauaaaaaaguugaugaugguuuccuggacauuuggacuuacaaugccgaacuguugguucuauuggaaaaugaaagaacuuuggacuaccacgauucaaaugugaagaacuuauaugaaaagguaagaagccaguuaaaaaacaaugccaaggaaauuggaaacggcugcuuugaauuuuaccacaaaugcgauaacacgugcauggaaagugucaaaaaugggacuuaugacuacccaaaauacucagaggaagcaaaauuaaacagagaagaaauagaugggguaaagcuggaaucaacaaggauuuaccagauuuuggcgaucuauucaacugucgccaguucauugguacuguuagucucccugggggcaaucaguuucuggaugugcucuaaugggucucuacaguguagaauauguauuuaa

SEQ ID NO: 37298 - RNA, 1701 nt, Artificial Sequence
  derived and/or modified CDS sequence (wt) from hemagglutinin__InfluenzaA__ADK33881
augaaggcaauacuaguaguucugcuauauacauuugcaaccgcaaaugcagacacauuauguauagguuaucaugcgaacaauucaacagacacuguagacacaguacuagaaaagaauguaacaguaacacacucuguuaacauucuagaagacaagcauaacgggaaacuaugcaaacuaagagggguagccccauugcauuuggguaaauguaacauugcuggcuggauccugggaaauccagagugugaaucacucuccacagcaagcucaugguccuacauuguggaaacaucuaguucagacaauggaacguguuacccaggagauuucaucgauuaugaggagcuaagagagcaauugagcucagugucaucauuugaaagguuugagauauuccccaagacaaguucauggcccaaucaugacucgaacaaagguguaacggcagcauguccucaugcuggagcaaaaagcuucuacaaaaauuuaauauggcuaguuaaaaaaggaaauucauacccaaagcucagcaaauccuacauuaaugauaaagggaaagaaguccucgugcuauggggcauucaccauccaucuacuagugcugaccaacaaagucucuaucagaaugcagaugcauauguuuuuguggggacaucaagauacagcaagaaguucaagccggaaauagcaauaagacccaaagugagggaucaagaagggagaaugaacuauuacuggacacuaguagagccgggagacaaaauaacauucgaagcaacuggaaaucuagugguaccgagauaugcauucgcaauggaaagaaaugcuggaucugguauuaucauuucagauacaccaguccacgauugcaauacaacuugucagacacccaagggugcuauaaacaccagccucccauuucagaauauacauccgaucacaauuggaaaauguccaaaauauguaaaaagcacaaaauugagacuggccacaggauugaggaaugucccgucuauucaaucuagaggccuauuuggggccauugccgguuucauugaagggggguggacagggaugguagauggaugguacgguuaucaccaucaaaaugagcaggggucaggauaugcagccgaucugaagagcacacagaaugccauugacgagauuacuaacaaaguaaauucuguuauugaaaagaugaauacacaguucacagcaguagguaaagaguucaaccaccuggaaaaaagaauagagaauuuaaauaaaaaaguugaugaugguuuccuggacauuuggacuuacaaugccgaacuguugguucuauuggaaaaugaaagaacuuuggacuaccacgauucaaaugugaagaacuuauaugaaaagguaagaagccaguuaaaaaacaaugccaaggaaauuggaaacggcugcuuugaauuuuaccacaaaugcgauaacacgugcauggaaagugucaaaaaugggacuuaugacuaccccaaauacucagaggaggcaaaauuaaacagagaagaaauagaugggguaaagcuggaaucaacaaagauuuaccagauuuuggcgaucuauucaacugucgccaguucauugguacugguagucucccugggggcaaucaguuucuggaugugcucuaaugggucucuacaguguagaauauguauuuaa

SEQ ID NO: 37299 - RNA, 1701 nt, Artificial Sequence
  derived and/or modified CDS sequence (wt) from hemagglutinin__InfluenzaA__ADK33891
augaaggcaauacuaguaguucugcuauauacauuugcaaccgcaaaugcagacacauuauguauagguuaucaugcgaacaauucaacagacacuguagacacaguacuagaaaagaauguaacaguaacacacucuguuaaccuucuagaagacaagcauaacgggaaacuaugcaaacuaagagggauagccccauugcauuuggguaaauguaacauugcuggcuggauccugggaaauccagagugugaaucacucuccacagcaagcucaugguccuacauuguggaaacaucuaguucagacaauggaacguguuacccaggagauuucaucgauuaugaggagcuaagagagcaauugagcucagugucaucauuugaaagguuugagauauuccccaagacaaguucauggcccaaucaugacucgaacaaagguguaacggcagcauguccucaugcuggagcaaaaagcuucuacaaaaauuuaauauggcuaguuaaaaaaggaaauucauacccaaagcucagcaaauccuacauuaaugauaaagggaaagaaguccucgugcuauggggcauucaccauccaucuacuagugcugaccaacaaagucucuaucagaaugcagaugcauauguuuuuguggggacaucaagauacagcaagaaguucaagccggaaauagcaauaagacccaaagugagggaucaagaagggagaaugaacuauuacuggacacuaguagagccgggagacaaaauaacauucgaagcaacuggaaaucuagugguaccgagauaugcauucgcaauggaaagaaaugcuggaucugguauuaucauuucagauacaccaguccacgauugcaauacaacuugucagacacccaagggugcuauaaacaccagccucccauuucagaauauacauccgaucacaauuggaaaauguccaaaauauguaaaaagcacaaaauugagacuggccacaggauugaggaaugucccgucuauucaaucuagaggccuauuuggggccauugccgguuucauugaagggggguggacagggaugguagauggaugguacgguuaucaccaucaaaaugagcaggggucaggauaugcagccgaccugaagagcacacagaaugccauugacgagauuacuaacaaaguaaauucuguuauugaaaagaugaauacacaguucacagcaguagguaaagaguucaaccaccuggaaaaaagaauagagaauuuaaauaaaaaaguugaugaugguuuccuggacauuuggacuuacaaugccgaacuguugguucuauuggaaaaugaaagaacuuuggacuaccacgauucaaaugugaagaacuuauaugaaaagguaagaaaccaguuaaaaaacaaugccaaggaaauuggaaacggcugcuuugaauuuuaccacaaaugcgauaacacgugcauggaaagugucaaaaaugggacuuaugacuacccaaaauacucagaggaagcaaaauuaaacagagaagaaauagaugggguaaagcuggaaucaacaaggauuuaccagauuuuggcgaucuauucaacugucgccaguucauugguacugguagucucccugggggcaaucaguuucuggaugugcucuaaugggucucuacaguguagaauauguauuuaa

SEQ ID NO: 37300 - RNA, 1701 nt, Artificial Sequence
  derived and/or modified CDS sequence (wt) from hemagglutinin__InfluenzaA__ADK33901
augaaggcaauacuaguaguucugcuauauacauuugcaaccgcaaaugcagacacauuauguauagguuaucaugcgaacaauucaacagacacuguagacacaguacuagaaaagaauguaacaguaacacacucuguuaaccuucuagaagacaagcauaacgggaaacuaugcaaacuaagagggauagccccauugcauuuggguaaauguaacauugcuggcuggauccugggaaauccagagugugaaucacucuccacagcaagcucaugguccuacauuguggaaacaucuaguucagacaauggaacguguuacccaggagauuucaucgauuaugaggagcuaagagagcaauugagcucagugucaucauuugaaagguuugagauauuccccaagacaaguucauggcccaaucaugacucgaacaaagguguaacggcagcauguccucaugcuggagcaaaaagcuucuacaaaaauuuaauauggcuaguuaaaaaaggaaauucauacccaaagcucagcaaauccuacauuaaugauaaagggaaagaaguccucgugcuauggggcauucaccauccaucuacuagugcugaccaacaaagucucuaucagaaugcagaugcauauguuuuuguggggacaucaagauacagcaagaaguucaagccggaaauagcaauaagacccaaagugagggaucaagaagggagaaugaacuauuacuggacacuaguagagccgggagacaaaauaacauucgaagcaacuggaaaucuagugguaccgagauaugcauucgcaauggaaagaaaugcuggaucugguauuaucauuucagauacaccaguccacgauugcaauacaacuugucagacacccaagggugcuauaaacaccagccucccauuucagaauauacauccgaucacaauuggaaaauguccaaaauauguaaaaagcacaaaauugagacuggccacaggauugaggaaugucccguccauucaaucuagaggccuauuuggggccauugccgguuucauugaagggggguggacagggaugguagauggaugguacgguuaucaccaucaaaaugagcaggggucaggauaugcagccgaccugaagagcacacagaaugccauugacgagauuacuaacaaaguaaauucuguuauugaaaagaugaauacacaguucacagcaguagguaaagaguucaaccaccuggaaaaaagaauagagaauuuaaauaaaaaaguugaugaugguuuccuggacauuuggacuuacaaugccgaacuguugguucuauuggaaaaugaaagaacuuuggacuaccacgauucaaaugugaagaacuuauaugaaaagguaagaagccaguuaaaaaacaaugccaaggaaauuggaaacggcugcuuugaauuuuaccacaaaugcgauaacacgugcauggaaagugucaaaaaugggacuuaugacuacccaaaauacucagaggaagcaaaauuaaacagagaagaaauagaugggguaaagcuggaaucaacaaggauuuaccagauuuuggcgaucuauucaacugucgccaguucauugguacugguagucucccugggggcaaucaguuucuggaugugcucuaaugggucucuacaguguagaauauguauuuaa

SEQ ID NO: 37301 - RNA, 1701 nt, Artificial Sequence
  derived and/or modified CDS sequence (wt) from hemagglutinin__InfluenzaA__ADK33911
augaaggcaauacuaguaguucugcuauauacauuugcaaccgcaaaugcagacacauuauguauagguuaucaugcgaacaauucaacagacacuguagacacaguacuagaaaagaauguaacaguaacacacucuguuaaccuucuagaaggcaagcauaacgggaaacuaugcaaacuaagagggguagccccauugcauuuggguaaauguaacauugcuggcuggauccugggaaauccagagugugaaucacucuccacagcaagcucaugguccuacauuguggaaacaucuaguucagacaauggaacguguuacccaggagauuucaucgauuaugaggagcuaagagagcaauugagcucagugucaucauuugaaagguuugagauauuccccaagacaaguucauggcccaaucaugacucgaacaaagguguaacggcagcauguccucaugcuggagcaaaaagcuucuacaaaaauuuaauauggcuaauuaaaaaaggaaauucauacccaaagcucagcaaauccuacauuaaugauaaagggaaagaaguccucgugcuauggggcauucaccauccaucuacuagugcugaccaacaaagucucuaucagaaugcagaugcauauguuuuuguggggacaucaagauacagcaagaaguucaagccggaaauagcaauaagacccaaagugagggaucaagaagggagaaugaacuauuacuggacacuaguagagccgggagacaaaauaacauucgaagcaacuggaaaucuagugguaccgagauaugcauucgcaauggaaagaaaugcuggaucugguauuaucauuucagauacaccaguccacgauugcaauacaacuugucagacacccaagggugcuauaaacaccagccucccauuucagaauauacauccgaucacaauuggaaaauguccaaaauauguaaaaagcacaaaauugagacuggccacaggauugaggaauaucccgucuauucaaucuagaggccuauuuggggccauugccgguuucauugaagggggguggacagggaugguagauggaugguacgguuaucaccaucaaaaugagcaggggucaggauaugcagccgaccugaagagcacacagaaugccauugacgagauuacuaacaaaguaaauucuguuauugaaaagaugaauacacaguucacagcaguagguaaagaguucaaccaccuggaaaaaagaauagagaauuuaaauaaaaagguugaugaugguuuccuggacauuuggacuuacaaugccgaacuguugguucuauuggaaaaugaaagaacuuuggacuaccacgauucaaaugugaagaacuuauaugaaaagguaagaagccaguuaaaaaacaaugccaaggaaauuggaaacggcugcuuugaauuuuaccacaaaugcgauaacacgugcauggaaagugucaaaaaugggacuuaugacuacccaaaauacucagaggaagcaaaauuaaacagagaagaaauagaugggguaaagcuggaaucaacaaggauuuaccagauuuuggcgaucuauucaacugucgccaguucauugguacugguagucucccugggggcaaucaguuucuggaugugcucuaaugggucucuacaguguagaauauguauuuaa

SEQ ID NO: 37302 - RNA, 1701 nt, Artificial Sequence
  derived and/or modified CDS sequence (wt) from hemagglutinin__InfluenzaA__ADK33931
augaaggcaauacuaguaguucugcuauauacauuugcaaccgcaaaugcagacacauuauguauagguuaucaugcgaacaauucaacagacacuguagacacaguacuagaaaagaauguaacaguaacacacucuguuaaccuucuagaagacaagcauaacgggaaacuaugcaaacuaagagggguagccccauugcauuuggguaaauguaacauugcuggcuggauccugggaaauccagagugugaaucacucuccacagcaagcucaugguccuacauuguggaaacaucuaguucagacaauggaacguguuacccaggagauuucaucgauuaugaggagcuaagagagcaauugagcucagugucaucauuugaaagguuugagauauuccccaagacaaguucauggcccaaucaugacucgaacaaagguguaacggcagcauguccucaugcuggagcaaaaagcuucuacaaaaauuuaauauggcuaguuaaaaaaggaaauucauacccaaagcucagcaaauccuacauuaaugauaaagggaaagaaguccucgugcuauggggcauucaccauccaucuacuagugcugaccaacaaagucucuaucagaaugcagaugcauauguuuuuguggggacaucaagauacagcaagaaguucaagccggaaauagcaauaagacccaaagugagggaacaagaagggagaaugaacuauuacuggacacuaguagagccgggagacaaaauaacauucgaagcaacuggaaaucuagugguaccgagauaugcauucgcaauggaaagaaaugcuggaucugguauuaucauuucagauacaccaguccacgauugcaauacaacuugucagacacccaagggugcuauaaacaccagccucccauuucagaauauacauccgaucacaauuggaaaauguccaaaauauguaaaaagcacaaaauugagacuggccacaggauugaggaaugucccgucuauucaaucuagaggccuauuuggggccauugccgguuucauugaagggggguggacagggaugguagauggaugguacgguuaucaccaucaaaaugagcaggggucaggauaugcagccgaccugaagagcacacagaaugccauugacgagauuacuaacaaaguaaauucuguuauugaaaagaugaauacacaguucacagcaguagguaaagaguucaaccaccuggaaaaaagaauagagaauuuaaauaaaaaaguugaugaugguuuccuggacauuuggacuuacaaugccgaacuguugguucuauuggaaaaugaaagaacuuuggacuaccacgauucaaaugugaagaacuuauaugaaaagguaagaagccaguuaaaaaacaaugccaaggaaauuggaaacggcugcuuugaauuuuaccacaaaugcgauaacacgugcauggaaagugucaaaaaugggacuuaugacuacccaaaauacucagaggaagcaaaauuaaacagagaagaaauagaugggguaaagcuggaaucaacaaggauuuaccagauuuuggcgaucuauucaacugucgccaguucauugguacuguuagucucccugggggcaaucaguuucuggaugugcucuaaugggucucuacaguguagaauauguauuuaa

SEQ ID NO: 37303 - RNA, 1701 nt, Artificial Sequence
  derived and/or modified CDS sequence (wt) from hemagglutinin__InfluenzaA__ADK33941
augaaggcaauacuaguaguucugcuauauacauuugcaaccgcaaaugcagacacauuauguauagguuaucaugcgaacaauucaacagacacuguagacacaguacuagaaaagaauguaacaguaacacacucuguuaaccuucuagaagacaagcauaacgggaaacuaugcaaacuaagagggguagccccauugcauuuggguaaaugcaacauugcuggcuggauccugggaaauccagagugugaaucacucuccacagcaagcucaugguccuacauuguggaaacaucuaguucagacaauggaacguguuacccaggagauuucaucgauuaugaggagcuaagagagcaauugagcucagugucaucauuugaaagguuugagauauuccccaagacaaguucauggcccaaucaugacucgaacaaagguguaacggcagcauguccucaugcuggagcaaaaagcuucuacaaaaauuuaauauggcuaguuaaaaaaggaaauucauacccaaagcucagcaaauccuacauuaaugauaaagggaaagaaguccucgugcuauggggcauucaccauccaucuacuagugcugaccaacaaagucucuaucagaaugcagaugcauauguuuuuguggggacaucaagauacagcaagaaguucaagccggaaauagcaauaagacccaaagugagggaucaagaagggagaaugaacuauuauuggacacuaguagagccgggagacaaaauaacauucgaagcaacuggaaaucuagugguaccgagauaugcauucgcaauggaaagaaaugcuggaucugguauugucauuucagauacaccaguccacgauugcaauacaacuugucagacacccaagggugcuauaaacaccagccucccauuucagaauauacauccgaucacaauuggaaaauguccaaaauauguaaaaagcacaaaauugagacuggccacaggauugaggaauaucccgucuauucaaucuagaggccuauuuggggccauugccgguuucauugaagggggguggacagggaugguagauggaugguacgguuaucaccaucaaaaugagcaggggucaggauaugcagccgaccugaagagcacacagaaugccauugacaagauuacuaacaaaguaaauucuguuauugaaaagaugaauacacaguucacagcaguagguaaagaguucaaccaccuggaaaaaagaauagagaauuuaaauaaaaagguugaugaugguuuccuggacauuuggacuuacaaugccgaacuauugguucuauuggaaaaugaaagaacuuuggacuaccacgauucaaaugugaagaacuuauaugaaaagguaagaagccaguuaaaaaacaaugccaaggaaauuggaaacggcugcuuugaauuuuaccacaaaugcgauaacacgugcauggaaagugucaaaaaugggacuuaugacuacccaaaauacucagaggaagcaaaauuaaacagagaagaaauagaugggguaaagcuggaaucaacaaggauuuaccagauuuuggcgaucuauucaacugucgccaguucauugguacugguagucucccugggggcaaucaguuucuggaugugcucuaaugggucucuacaguguagaauauguauuuaa

SEQ ID NO: 37304 - RNA, 1701 nt, Artificial Sequence; identical to SEQ ID NO: 37301
  derived and/or modified CDS sequence (wt) from hemagglutinin__InfluenzaA__ADK33951

SEQ ID NO: 37305 - RNA, 1701 nt, Artificial Sequence; identical to SEQ ID NO: 37012
  derived and/or modified CDS sequence (wt) from hemagglutinin__InfluenzaA__ADK33961

SEQ ID NO: 37306 - RNA, 1701 nt, Artificial Sequence; identical to SEQ ID NO: 35625
  derived and/or modified CDS sequence (wt) from hemagglutinin__InfluenzaA__ADK45312

SEQ ID NO: 37307 - RNA, 1701 nt, Artificial Sequence
  derived and/or modified CDS sequence (wt) from hemagglutinin__InfluenzaA__ADK45410
augaagacuaucauugcuuugagcuacauucuaugucugguuuucgcucaaaaacuuccuggaaaugacaacagcacggcaacgcugugccuugggcaccaugcaguaccaaacggaacgauagugaaaacaaucacgaaugaccaaauugaaguuacuaaugcuacugagcugguucagaguuccucaacaggugaaauaugcgacaguccucaucagauccuugauggagaaaacugcacacuaauagaugcucuauugggagacccucagugugauggcuuccaaaauaagaaaugggaccuuuuuguugaacgaagcaaagcccacagcaacuguuacccuuaugaugugccggauuaugccucccuuaggucacuaguugccucauccggcacacuggaguuuaacaaugaaagcuucaauuggacuggagucacucaaaacggaacaagcucugcuugcauaaggagaucuaauaacaguuucuuuaguagauugaauugguugacccacuuaaaauucaaauacccagcauugaacgugacuaugccaaacaaugaacaauuugacaaauuguacauuugggggguucaccacccggguacggacaaugaccaaaucuuccuguaugcucaagcaucaggaagaaucacaguaucuaccaaaagaagccaacaaacuguaaucccgaauaucggaucuagacccagaguaaggaauaucccuagcagaauaagcaucuauuggacaauaguaaaaccgggagacauacuuuugauuaacagcacagggaaucuaauugcuccuagggguuacuucaaaauacgaagugggaaaagcucaauaaugagaucagaugcacccauuggcaaaugcaauucugaaugcaucacuccaaauggaagcauucccaaugacaaaccauuccaaaauguaaacaggaucacauacggggccugucccagauauguuaagcaaaacacucugaaauuggcaacaggaaugcgaaauguaccagagaaacaaacuagaggcauauuuggcgcaaucgcggguuucauagaaaaugguugggagggaaugguggaugguugguacgguuucaggcaucaaaauucugagggaagaggacaagcagcagaucucaaaagcacucaagcagcaaucgaucaaaucaaugggaagcugaauagauugaucgggaaaaccaacgagaaauuccaucagauugaaaaagaauucucagaagucgaagggagaauccaggaccuugagaaauauguugaggacacuaaaauagaucucuggucauacaacgcggagcuucuuguugcccuggagaaccaacauacaauugaucuaacugacucagaaaugaacaaacuguuugaaaaaacaaagaagcaacugagggaaaaugcugaggauaugggcaaugguuguuucaaaauauaccacaaaugugacaauaccugcauaggaucaaucagaaauggaacuuaugaccacgauguauacagagaugaagcauuaaacaaccgguuccagaucaagggaguugagcugaagucaggguacaaagauuggauccuauggauuuccuuugccauaucauguuuuuugcuuuguguugcuuuguugggguucaucaugugggccugccaaaaaggcaacauuaggugcaacauuugcauuuga

SEQ ID NO: 37308 - RNA, 1701 nt, Artificial Sequence
  derived and/or modified CDS sequence (wt) from hemagglutinin__InfluenzaA__ADK45421
augaagacuaucauugcuuugagcuacauucuaugucugguuuucgcucaaaaacuuccuggaaaugacaacagcacggcaacgcugugccuugggcaccaugcaguaccaaacggaacgauagugaaaacaaucacgaaugaccaaauugaaguuacuaaugcuacugagcugguucagaguuccucaacaggugaaauaugcgacaguccucaucagauccuugauggaaaaaacugcacacuaauagaugcucuauugggagacccucagugugauggcuuccaaaauaagaaaugggaccuuuuuguugaacgcagcaaagccuacagcaacuguuacccuuaugaugugccggauuaugccucccuuaggucacuaguugccucauccggcacacuggaguuuaacaaugaaagcuucaauuggacuggagucacucaaaacggaacaagcucugcuugcauaaggagaucuaaaaacaguuucuuuaguagauugaauugguugacccacuuaaacuucaaauacccagcauugaacgugacuaugccaaacaaugaacaauuugacaaauuguacauuugggggguucaccacccggguacggacaaagaccaaaucuuccuguaugcucaagcaucaggaagaaucacagucucuaccaaaagaagccaacaaacuguaaucccgaauaucggaucuagacccagaauaaggaauaucccuagcagaauaagcaucuauuggacaauaguaaaaccgggagacauacuuuugauuaacagcacagggaaucuaauugcuccuagggguuacuucaaaauacgaagugggaaaagcucaauaaugagaucagaugcacccauuggcaaaugcaauucugaaugcaucacuccaaauggaagcauucccaaugacaaaccauuccaaaauguaaacaggaucacauacggggccugucccagauauguuaagcaaagcacucugaaauuggcaacagggaugcgaaauguaccagagaaacaaacuagaggcauauuuggcgcaaucgcggguuucauagaaaaugguugggagggaaugguggaugguugguacgguuucaggcaucaaaauucugagggaagaggacaagcagcagaucucaaaagcacucaagcagcaaucgaucaaaucaaugggaagcugaauagauugaucgggaaaaccaacgagaaauuccaucagauugaaaaagaauucucagaagucgaagggagaauucaggaccuugagaaauauguugaggacacuaaaauagaucucuggucauacaacgcggagcuucuuguugcccuggagaaccaacauacaauugaucuaacugacucagaaaugaacaaacuguuugaaaaaacaaagaagcaacugagggaaaaugcugaggauaugggcaaugguuguuucaaaauauaccacaaaugugacaaugccugcauaggaucaaucagaaauggaacuuaugaccacgauguauacagagaugaagcauuaaacaaccgguuucagaucaagggaguugagcugaagucaggguacaaggauuggauccuauggauuuccuuugccauaucauguuuuuugcuuuguguugcuuuguugggguucaucaugugggccugccaaaaaggcaacauuaggugcaacauuugcauuuga

SEQ ID NO: 37309 - RNA, 1701 nt, Artificial Sequence
  derived and/or modified CDS sequence (wt) from hemagglutinin__InfluenzaA__ADK45432
augaagacuaucauugcuuugagcuacacucuaugucugguuuucgcucaaaaacuuccuagaaaugacaacagcacggcaacgcugugccuugggcaccaugcaguaccaaacggaacgauagugaaaacaaucacgaaugaccaaauugaaguuacuaaugcuacugagcugguucagaguuccucaacaggugaaauaugcgacaauccucaucagauccuugauggagaaaacugcacacuaauagaugcucuauugggagacccucagugugauggcuuccaaaauaagaaaugggaccuuuuuguugaacgcagcaaagccuacagcaacuguuacccuuaugaugugccggauuaugccucccuuaggucacuaguugccucauccggcacacuggaguuuaacaaugaaagcuucaauuggacuggagucacucaaaacggaacaagcucugcuugcauaaggagaucuaauaacaguuucuuuaguagauugaauugguugacccacuuaaaauucaaauacccagcauuaaacgugacuaugccaaacaaugaacaauuugacaaauuguacauuugggggguucaccacccggguacggacaaugaccaaaucuuccuguaugcucaagcaucaggaagaaucacagucucuaccaaaagaagccaacaaacuguaaucccgaauaucggaucuagacccagaguaaggaauaucccuagcagaauaagcaucuauuggacaauaguaaaaccgggagacauacuuuugauuaacagcacagggaaucuaauugcuccuagggguuacuuuaaaauacgaagugggaaaagcucaauaaugagaucagaugcacccauuggcaaaugcaauucugaaugcaucacuccaaauggaagcauucccaaugacaaaccauuccaaaauguaaacaggaucacauacggggccugucccagauauguuaagcaaaacacucugaaauuggcaacagggaugcgaaauguaccagagaaacaaacuagaggcauauuuggcgcaaucgcggguuucauagaaaaugguugggagggaaugguggaugguugguacgguuucaggcaucaaaauucugagggaagaggacaagcagcagaucucaaaagcacucaagcagcaaucgaucaaaucaaugggaagcugaauagauugaucgggaaaaccaacgagaaauuccaucagauugaaaaagaauucucagaagucgaagggagaauucaggaccuugagaaauauguugaggacaccaaaauagaucucuggucauacaacgcggagcugcuuguugcccuggagaaccaacauacaauugaucuaacugacucagaaaugaacaaacuguuugaaaaaacaaagaagcaacugagggaaaaugcugaggauaugggcaaugguuguuucaaaauauaccacaaaugugacaaugccugcauaggaucaaucagaaauggaacuuaugaccacgauguauacagagaugaagcauuaaacaaccgguuccagaucaagggaguugagcuaaagucaggguacaaagauuggauccuauggauuuccuuugccauaucauguuuuuugcuuuguguugcuuuguugggguucaucaugugggccugccaaaaaggcaacauuagaugcaacauuugcauuuga

SEQ ID NO: 37310 - RNA, 1701 nt, Artificial Sequence; identical to SEQ ID NO: 37133
  derived and/or modified CDS sequence (wt) from hemagglutinin__InfluenzaA__ADK45443

SEQ ID NO: 37311 - RNA, 1701 nt, Artificial Sequence
  derived and/or modified CDS sequence (wt) from hemagglutinin__InfluenzaA__ADK48798
augaaggcaauacuaguaguucugcuauauacauuugcaaccgcaaaugcagacacauuauguauagguuaucaugcgaacaauucaacagacacuguagacacaguacuagaaaagaauguaacaguaacacacucuguuaaccuucuagaagacaagcauaacgggaaacuaugcaaacuaagagggguagccccauugcauuuggguaaauguaacauugcuggcuggauccugggaaauccagagugugaaucacucuccacagcaagcucaugguccuacauuguggaaacaucuaguucagacaauggaacauguuacccaggagauuucaucgauuaugaggagcuaagagagcaauugagcucagugucaucauuugaaagguuugagauguuccccaagacaaguucauggcccaaucaugacucgaacaaagguguaacggcagcauguccucaugcuggagcaaaaagcuucuacaaaaauuuaauauggcuaguuaaaaaaggaaauucauacccaaagcucagcaaauccuacauuaaugauaaagggaaagaaguccucgugcuauggggcauucaccauccauccacuagugcugaccaacaaagucucuaucagaaugcagaugcauauguuuuuguggggacaucaagauacagcaagaaguucaagccggaaauagcaauaagacccaaagugagggaucaagaagggagaaugaacuauuacuggacacuaguagagccgggagacaaaauaacauucgaagcaacuggaaaucuagugguaccgagauacgcauucgcaauggaaagaaaugcuggaucugguauuaucauuucagauacaccaguccacgauugcaauacaaccugucagacacccaagggugcuauaaacaccagccucccauuucagaauauacauccgaucacaauuggaaaauguccaaaauauguaaaaagcacaaaauugagacuggccacaggauugaggaaugucccgucuauucaaucuagaggccuauuuggggccauugccgguuucauugaagggggguggacagggaugguagauggaugguacgguuaucaccaucaaaaugagcaggggucaggauaugcagccgaccugaagagcacacagaaugccauugacgagauuacuaacaaaguaaauucuguuauugaaaagaugaauacacaguucacagcaguagguaaagaguucaaccaccuggaaaaaagaauagagaauuuaaauaaaaaaguugaugaugguuuccuggacauuuggacuuacaaugccgaacuguugguucuauuggaaaaugaaagaacuuuggacuaccacgauucaaaugugaagaacuuauaugaaaagguaagaagccaguuaaaaaacaaugccaaggaaguuggaaacggcugcuuugaauuuuaccacaaaugcgauaacacgugcauggaaagugucaaaaaugggacuuaugacuacccaaaauacucagaggaagcaaaauuaaacagagaagaaauagaugggguaaagcuggaaucaacaaggauuuaccagauuuuggcgaucuauucaacugucgccaguucauugguacugguagucucccugggggcaaucaguuucuggaugugcucuaaugggucucuacaguguaggauauguauuuaa

SEQ ID NO: 37312 - RNA, 1701 nt, Artificial Sequence; identical to SEQ ID NO: 37264
  derived and/or modified CDS sequence (wt) from hemagglutinin__InfluenzaA__ADK62683

SEQ ID NO: 37313 - RNA, 1701 nt, Artificial Sequence
  derived and/or modified CDS sequence (wt) from hemagglutinin__InfluenzaA__ADK62693
augaaggcaauacuaguaguucugcuauauacauuugcaaccgcaaaugcagacacauuauguauagguuaucaugcgaacaauucaacagacacuguagacacaguacuagaaaagaauguaacaguaacacacucuguuaaccuucuagaagacaagcauaacgggaaacuaugcaaacuaagagggguagccccauugcauuuggguaaauguaacauugcuggcuggauccugggaaauccagaguguggaucacucuccacagcaagcucaugguccuacauuguggaaacaucuaguucagacaauggaacguguuacccaggagauuucaucgauuaugaggagcuaagagagcaauugagcucagugucaucauuugaaagguuugagauauuccccaagacaaguucauggcccaaucaugacucgaacaaagguguaacggcagcauguccucaugcuggagcaaaaagcuucuacaaaaauuuaauauggcuaguuaaaaaaggaaauucauacccaaagcucagcaaauccuacauuaaugauaaagggaaagaaguccucgugcuauggggcauucaccauccaucuacuagugcugaccaacaaagucucuaucagaaugcagaugcauauguuuuuguggggacaucaagauacagcaagaaguucaagccggaaauagcaauaagacccaaagugagggaacaagaagggagaaugaacuauuacuggacacuaguagagccgggagacaaaauaacauucgaagcaacuggaaaucuagugguaccgagauaugcauucgcaauggaaagaaaugcuggaucugguauuaucauuucagauacaccaguccacgauugcaauacaacuugucagacacccaaaggugcuauaaacaccagccucccauuucagaauguacauccgaucacaauuggaaaauguccaaaauauguaaaaagcacaaaauugagacuggccacaggauugaggaaugucccgucuauucaaucuagaggccuauuuggggccauugccgguuucauugaagggggguggacagggaugguagauggaugguacgguuaucaccaucaaaaugagcaggggucaggauaugcagccgaccugaagagcacacagaaugccauugacgagauuacuaacaaaguaaauucuguuauugaaaagaugaauacacaguucacagcaguagguaaagaguucaaccaccuggaaaaaagaauagagaauuuaaauaaaaaaguugaugaugguuuccuggacauuuggacuuacaaugccgaacuguugguucuauuggaaaaugaaagaacuuuggacuaccacgauucaaaugugaagaacuuauaugaaaagguaagaagccaguuaaaaaacaaugccaaggaaauuggaaacggcugcuuugaauuuuaccacaaaugcgauaacacgugcauggaaagugucaaaaaugggacuuaugacuacccaaaauacucagaggaagcaaaauuaaacagagaagaaauagaugggguaaagcuggaaucaacaaggauuuaccagauuuuggcgaucuauucaacugucgccaguucauugguacugguagucucccugggggcaaucaguuucuggaugugcucuaaugggucucuacaguguagaauauguauuuaa

SEQ ID NO: 37314 - RNA, 1701 nt, Artificial Sequence
  derived and/or modified CDS sequence (wt) from hemagglutinin__InfluenzaA__ADK62703
augaaggcaauacuaguaguucugcuauauacauuugcaaccgcaaaugcagacacauuauguauagguuaucaugcgaacaauucaacagacacuguagacacaguacuagaaaagaaugugacaguaacacacucuguuaaccuucuagaagacaagcauaacgggaaacuaugcaaacuaagagggguagccccauugcauuuggguaaauguaacauugcuggcuggauccugggaaauccagagugugaaucacucuccacagcaagcucaugguccuacauuguggaaacaucuaguucagacaauggaacguguuacccaggagauuucaucgauuaugaggagcuaagagagcaauugagcucagugucaucauuugaaagguuugagauauuccccaagacaaguucauggcccaaucaugacucgaacaaagguguaacggcagcauguccucaugcuggagcaaaaagcuucuacaaaaauuuaauauggcuaguuaaaaaaggaaauucauacccaaagcucagcaaauccuacauuaaugauaaagggaaagaaguccucgugcuauggggcauucaccauccaucuacuagugcugaccaacaaagucucuaucagaaugcagaugcauauguuuuuguggggacaucaagauacagcaagaaguucaagccggagauagcaauaagacccaaagugagggaucaagaagggagaaugaacuauuacuggacacuaguagagccgggagacaaaauaacauucgaagcaacuggaaaucuagugguaccgagauaugcauucgcaauggaaagaaaugcuggaucugguauuaucauuucagauacaccaguccacgauugcaauacaacuugucagacacccaagggugcuauaaacaccagccucccauuucagaauauacauccgaucacaauuggaaaauguccaaaauauguaaaaagcacaaaauugagacuggccacaggauugaggaauaucccgucuauucaaucuagaggccuauuuggggccauugccgguuucauugaagggggguggacagggaugguagauggaugguacgguuaucaccaucaaaaugagcaggggucaggauaugcagccgaccugaagagcacacagaaugccauugacgagauuacuaacaaaguaaauucuguuauugaaaagaugaauacacaguucacagcaguagguaaagaguucaaccaccuggaaaaaagaauagagaauuuaaauaaaaagguugaugaugguuuccuggacauuuggacuuacaaugccgaacuguugguucuauuggaaaaugaaagaacuuuggacuaccacgauucaaaugugaagaacuuauaugaaaagguaagaagccaguuaaaaaacaaugccaaggaaauuggaaacggcugcuuugaauuuuaccacaaaugcgauaacacgugcauggaaagugucaaaaaugggacuuaugacuacccaaaauacucagaggaagcaaaauuaaacagagaagaaauagaugggguaaagcuggaaucaacaaggauuuaccagauuuuggcgaucuauucaacugucgccaguucauugguacugguagucucccugggggcaaucaguuucuggaugugcucuaaugggucucuacaguguagaauauguauuuaa

SEQ ID NO: 37315 - RNA, 1701 nt, Artificial Sequence
  derived and/or modified CDS sequence (wt) from hemagglutinin__InfluenzaA__ADK64992
augaaggcaauacuaguaguucugcuauauacauuugcaaccgcaaaugcagacacauuauguauagguuaucaugcgaacaauucaacagacacuguagacacaguacuagaaaagaauguaacaguaacacacucuguuaaccuucuagaagacaagcauaacgggaaacuaugcaaacuaagagggguagccccauugcauuuggguaaauguaacauugcuggcuggauccugggaaauccagagugugaaucacucuccacagcaagcucaugguccuacauuguggaaacaucuaguucagacaauggaacguguuacccaggagauuucaucgauuaugaggagcuaagagagcaauugagcucagugucaucauuugaaagguuugagauauuccccaagacaaguucauggcccaaucaugacucgaacaaagguguaacggcagcauguccucaugcuggagcaaaaagcuucuacaaaaauuuaauauggcuaguuaaaaaaggaaauucauacccaaagcucagcaaauccuacauuaaugauaaagggaaagaaguccucgugcuauggggcauucaccauccaucuacuagugcugaccaacaaagucucuaucagaaugcagaugcauauguuuuuguggggacaucaagauacagcaagaaguucaagccggaaauagcaauaagacccaaagugagggaucaagaagggagaaugaacuauuacuggacacuaguagagccgggagacaaaauaacauucgaagcaacuggaaaucuagugguaccgagauaugcauucgcaauggaaagaaaugcuggaucugguauuaucauuucagauacaccaguccacgauugcaauacaacuugucagacacccaagggugcuauaaacaccagccucccauuucagaauauacauccgaucacaauuggaaaauguccaaaauauguaaaaagcacaaaauugagacuggccacaggauugaggaaugucccgucuauucaaucuagaggccuauuuggggccauugccgguuucauugaagggggguggacagggaugguagauggaugguacgguuaucaccaucaaaaugagcaggggucaggauaugcagccgaccugaagagcacacagaaugccauugacgagauuacuaacaaaguaaauucuguuauugaaaagaugaauacacaguucacagcaguagguaaagaguucaaccaccuggaaaaaagaauagagaauuuaaauaaaaaaguugaugaugguuuccuggacauuuggacuuacaaugccgaacuguugguucuauuggaaaaugaaagaacuuuggacuaccacgauucaaaugugaagaacuuauaugaaaagguaagaagccagcuaaaaaacaaugccaaggaaauuggaaacggcugcuuugaauuuuaccacaaaugcgauaacacgugcauggaaagugucaaaaaugggacuuaugacuacccaaaauacucagaggaagcaaaauuaaacagagaagaaauagaugggauaaagcuggaaucaacaaggauuuaccagauuuuggcgaucuauucaacugucgccaguucauugguacugguagucucccugggggcaaucaguuucuggaugugcucuaaugggucucuacaguauagaauauguauuuaa

SEQ ID NO: 37316 - RNA, 1701 nt, Artificial Sequence
  derived and/or modified CDS sequence (wt) from hemagglutinin__InfluenzaA__ADK65001
augaaggcaauacuaguaguucugcuauauacauuugcaaccgcaaaugcagacacauuauguauagguuaucaugcgaacaauucaacagacacuguagacacaguacuagaaaagaauguaacaguaacacacucuguuaaccuucuagaagacaagcauaacgggaaacuaugcaaacuaggagggguagccccauugcauuuggguaaauguaacauugcuggcuggauccugggaaauccagagugugaaucacucuccacagcaagcucaugguccuacauuguggaaacaucuaguucagacaauggaacguguuacccaggagauuucaucgauuaugaggagcuaagagagcaauugagcucagugucaucauuugaaagguuugagauauuccccaagacaaguucauggcccaaucaugacucgaacaaagguguaacggcagcauguccucaugcuggagcaaaaagcuucuacaaaaauuuaauauggcuaguuaaaaaaggaaauucauacccaaagcucagcaaauccuacauuaaugauaaagggaaagaaguccucgugcuauggggcauucaccauccaucuacuagugcugaccaacaaagucucuaucagaaugcagaugcauauguuuuuguggggacaucaagauacagcaagaaguucaagccggaaauagcaauaagacccaaagugagggaucaagaagggagaaugaacuauuacuggacacuaguagagccgggagacaaaauaacauucgaagcaacuggaaaucuagugguaccgagauaugcauucgcaauggaaagaaaugcuggaucugguauuaucauuucagauacaccaguccacgauugcaauacaacuugucagacacccaagggugcuauaaacaccagccucccauuucagaauauacauccgaucacaauuggaaaauguccaaaauauguaaaaagcacaaaauugagacuggccacaggauugaggaaugucccgucuauucaaucuagaggccuauuuggggccauugccgguuucauugaagggggguggacagggaugguagauggaugguacgguuaucaccaucaaaaugagcaggggucaggauaugcagccgaccugaagagcacacagaaugccauugacgagauuacuaacaaaguaaacucuguuauugaaaagaugaauacacaguucacagcaguagguaaagaguucaaccaccuggaaaaaagaauagagaauuuaaauaaaaaaguugaugaugguuuccuggacauuuggacuuacaaugccgaacuguugguucuauuggaaaaugaaagaacuuuggacuaccacgauucaaaugugaagaacuuauaugaaaagguaagaagccaguuaaaaaacaaugccaaggaaauuggaaacggcugcuuugaauuuuaccacaaaugcgauaacacgugccuggaaagugucaaaaaugggacuuaugacuacccaaaauacucagaggaagcaaaauuaaacagagaagaaauagaugggguaaagcuggaaucaacaaggauuuaccagauuuuggcgaucuauucaacugucgccaguucauugguacugguagucucccugggggcaaucaguuucuggauguguucuaaugggucucuacaguguagaauauguauuuaa

SEQ ID NO: 37317 - RNA, 1701 nt, Artificial Sequence
  derived and/or modified CDS sequence (wt) from hemagglutinin__InfluenzaA__ADK65009
augaaggcaauacuaguaguucugcuauauacauuugcaaccgcaaaugcagacacauuauguauagguuaucaugcgaacaauucaacagacacuguagacacaguacuagaaaaaaauguaacaguaacacacucuguuaaccuucuagaagacaagcauaacgggaaacuaugcaaacuaagagggguagccccauugcauuuggguaaauguaacauugcuggcuggauccugggaaauccagagugugaaucacucuccacagcaagcucaugguccuacauuguggaaacaucuaguucagacaauggaacguguuacccaggagauuucaucgauuaugaggagcuaagagagcaauugagcucagugucaucauuugaaagguuugagauauuccccaagacaaguucauggcccaaucaugacccgaacaaagguguaacggcagcauguccucaugcuggagcaaaaagcuucuacaaaaauuuaauauggcuaguuaaaaaaggaaauucauacccaaagcucagcaaauccuacauuaaugauaaagggaaagaaguccucgugcuauggggcauucaccauccaucuacuagugcugaccaacaaagucucuaucagaaugcagaugcauauguuuuuguggggacaucaagauacagcaagaaguucaagccggaaauagcaauaagacccaaagugagggaucaagaagggagaaugaacuauuacuggacacuaguagagccgggagacaaaauaacauucggagcaacuggaaaccuagugguaccgagauaugcauucgcaauggaaagaaaugcuggaucugguauuaucauuucagauacaccaguccacgauugcaauacaacuugucagacacccaagggugcuauaaacaccagccucccauuucagaauauacauccgaucacaauuggaaaauguccaaaauauguaaaaagcacaaaauugagacuggccacaggauugaggaaugucccgucuauucaaucuagaggccuauuuggggccauugccgguuucauugaagggggguggacagggaugguagauggaugguacgguuaucaccaucaaaaugagcaggggucaggauaugcagccgaccugaagagcacacagaaugccauugacgaaauuacuaacaaaguaaauucuguuauugaaaagaugaauacacaguucacagcaguagguaaagaguucaaccaucuggaaaaaagaauagagaauuuaaauaaaaaaguugaugaugguuuccuggacauuuggacuuacaaugccgaacuguugguucuauuggaaaaugaaagaacuuuggacuaccacgauucaaaugugaagaacuuauaugaaaagguaagaagccaguuaaaaaacaaugccaaggaaauuggaaacggcugcuuugaauuuuaccacaaaugcgauaacacgugcauggaaagugucaaaaaugggacuuaugacuacccaaaauacucagaggaagcaaaauuaaacagagaagaaauagaugggguaaagcuggaaucaacaaggauuuaccagauuuuggcgaucuauucaacugucgccaguucauugguacugguagucucccugggggcaaucaguuucuggaugugcucuaaugggucucuacaguguagaauauguauuuaa

SEQ ID NO: 37318 - RNA, 1701 nt, Artificial Sequence
  derived and/or modified CDS sequence (wt) from hemagglutinin__InfluenzaA__ADK87287
augaagacuaucauugcuuugagcuacauucuaugucugguuuucgcucaaaaacuuccuggaaaugacaacagcacggcaacgcugugccuugggcaccaugcaguaccaaacggaacgauagugaaaacaaucacgaaugaccaaauugaaguuacuaaugcuacugagcugguucagaguuccucaacaggugaaauaugcgacaguccucaucagauccuugauggaaaaaacugcacacuaauagaugcucuauugggagacccucagugugauggcuuccaaaauaagaaaugggaccuuuuuguugaacgcagcaaagccuacagcaacuguuacccuuaugaugugccggauuaugccucccuuaggucacuaguugccucauccggcacacuggaguuuaacaaugaaagcuucaauuggacuggagucacucaaaacggaacaagcucugcuugcauaaggagaucuaaaaacaguuucuuuaguagauugaauugguugacccacuuaaacuucaaauacccagcauugaacgugacuaugccaaacaaugaacaauuugacaaauuguacauuugggggguucaccacccggguacggacaaggaccaaaucuuccuguaugcucaagcaucaggaagaaucacagucucuaccaaaagaagccaacaaacugcaaucccgaauaucggaucuagacccagaguaaggaauaucccuagcaggauaagcaucuauuggacaauaguaaaaccgggagacauacuuuugauuaacagcacagggaaucuaauugcuccuagggguuacuucaaaauacgaagugggaaaagcucaauaaugagaucagaugcacucauuggcaaaugcaauucugaaugcaucacuccaaauggaagcauucccaaugacaaaccauuccaaaauguaaacaggaucacauacggggccugucccagauauguuaagcaaaacacucugaaauuggcaacagggaugcgaaauguaccagagaaacaaacuagaggcauauuuggcgcaaucgcggguuucauagaaaaugguugggagggaaugguggaugguugguacgguuucaggcaucaaaauucugagggaagaggacaagcagcagaucucaaaagcacucaagcagcaaucgaucaaaucaaugggaagcugaauagauugaucgggaaaaccaacgagaaauuccaucagauugaaaaggaauucucagaagucgaagggagaauucaggaccuugagaaauauguugaggacacuaaaauagaucucuggucauacaacgcggagcuucuuguugcccuggagaaccaacauacaauugaucuaacugacucagaaaugaacaaacuguuugaaaaaacaaagaagcaacugagggaaaaugcugaggauaugggcaaugguuguuucaaaauauaccacaaaugugacaaugccugcauaggaucaaucagaaauggaacuuaugaccacgauguauacagagaugaagcacuaaacaaccgguuucagaucaagggaguugagcugaagucaggguacaaagauuggauccuauggauuuccuuugccauaucauguuuuuugcuuuguguugcuuuguugggguucaucaugugggccugccaaaaaggcaacauuaggugcaacauuugcauuuga

SEQ ID NO: 37319 - RNA, 1701 nt, Artificial Sequence
  derived and/or modified CDS sequence (wt) from hemagglutinin__InfluenzaA__ADK87288
augaagacuaucauugcuuugagcuacauucuaugucugguuuucgcucaaaaacuuccuggaaaugacaacagcacggcaacgcugugccuugggcaccaugcaguaccaaacggaacgauagugaaaacaaucacgaaugaccaaauugaaguuacuaaugcuacugagcugguucagaguuccucaacaggugaaauaugcgacaguccucaucagauccuugauggaaaaaacugcacacuaauagaugcucuauugggagacccucagugugauggcuuccaaaauaagaaaugggaccuuuuuguugaacgcagcaaagccuacagcaacuguuauccuuaugaugugccggauuaugccucccuuaggucacuaguugccucauccggaacacuggaguuuaacaaugaaagcuucaauuggacuggagucacucaaaacggaacaagcucugcuugcauaaggagaucuaaaaacaguuucuuuaguagauugaauugguugacccacuuaaacuucaaauacccagcauugaacgugacuaugccaaacaaugaacaauuugacaaauuguacauuugggggguucaccacccggguacggacaaagaccaaaucuuccuguaugcucaagcaacaggaagaaucacagucucuaccaaaagaagccaacaaacugcaaucccgaauaucggaucuagacccagaguaaggaauaucccuagcagaauaagcaucuauuggacaauaguaaaaccgggagacauacuuuugauuaacagcacagggaaucuaauugcuccuagggguuacuucaaaauacgaagugggaaaagcucaauaaugagaucagaugcacccauuggcaaaugcaauucugaaugcaucacuccaaauggaagcauucccaaugacaaaccauuccaaaauguaaacaggaucacauacggggccugucccagauauguuaagcaaaacacucugaaauuggcaacagggaugcgaaauguaccagagaaacaaacuagaggcauauuuggcgcaaucgcggguuucauagaaaaugguugggagggaaugguggaugguugguacgguuucaggcaucaaaauucugagggaagaggacaagcagcagaucucaaaagcacucaagcagcaaucgaucaaaucaaugggaagcugaauagauugaucgggaaaaccaacgagaaauuccaucagauugaaaaagaauucucagaagucgaagggagaauucaggaccuugagaaauauguugaggacacuaaaauagaucucuggucauacaacgcggagcuucuuguugcccuggagaaccaacauacaauugaucuaacugacucagaaaugaacaaacuguuugaaaaaacaaagaagcaacugagggaaaaugcugaggauaugggcaaugguuguuucaaaauauaccacaaaugugacaaugccugcauaggaucaaucagaaauggaacuuaugaccacgauguauacagagaugaagcacuaaacaaccgguuucagaucaagggaguugagcugaagucaggguacaaagauuggauccuauggauuuccuuugccauaucauguuuuuugcuuuguguugcuuuguugggguucaucaugugggccugccaaaaaggcaacauuaggugcaacauuugcauuuga

SEQ ID NO: 37320 - RNA, 1701 nt, Artificial Sequence
  derived and/or modified CDS sequence (wt) from hemagglutinin__InfluenzaA__ADK87289
augaagacuaucauugcuuugagcuacauucuaugucugguuuucgcucaaaaacuuccuggaaaugacaacagcacggcaacgcugugccuugggcaccaugcaguaccaaacggaacgauagugaaaacaaucacgaaugaccaaauugaaguuacuaaugcuacugagcugguucagaguuccucaacaggugaaauaugcgacaguccucaucagauccuugauggaaaaaacugcacacuaauagaugcucuauugggagacccucagugugauggcuuccaaaauaagaaaugggaccuuuuuguugaacgcagcaaagccuacagcaacuguuacccuuaugaugugccggauuaugccucccuuaggucacuaguugccucauccggcacacugggguuuaacaaugaaagcuucaauuggacuggagucacucaaaacggaacaagcucugcuugcauaaggagaucuaaaaacaguuucuuuaguagauugaauugguugacccacuuaaacuucaaauacccagcauugaacgugacuaugccaaacaaugaacaauuugacaaauuguacauuugggggguucaccacccggguacggacaaagaccaaaucuuccuguaugcucaagcaucaggaagaaucacagucucuaccaaaagaagccaacaaacugcaaucccuaauaucggaucuagacccagaguaaggaauaucccuagcagaauaagcaucuauuggacaauaguaaaaccgggagacauacuucugauuaacagcacagggaaucuaauugcuccuagggguuacuucaaaauacgaagugggaaaagcucaauaaugagaucagaugcacccauuggcaaaugcaauucugaaugcaucacuccaaauggaagcauucccaaugacaaaccauuccaaaauguaaacaggaucacauacggggccugucccagauauguuaagcaaaacacucugaaauuggcaacagggaugcgaaauguaccagagaaacaaacuagaggcauauuuggcgcaaucgcggguuucauagaaaaugguugggagggaaugguggaugguugguacgguuucaggcaucaaaauucugagggaagaggacaagcagcagaucucaaaagcacucaagcagcaaucgaucaaaucaaugggaagcugaauagauugaucgggaaaaccaacgagaaauuccaucagauugaaaaagaauucucagaagucgaagggagaauucaggaccuugggaaauauguugaggacacuaaaauagaucucuggucauacaacgcggagcuucuuguugcccuggagaaucaacauacaauugaucuaacugacucagaaaugaacaaacuguuugaaaaaacaaagaagcaacugagggaaaaugcugaggauaugggcaaugguuguuucaaaauauaccacaaaugugacaaugccugcauaggaucaaucagaaauggaacuuaugaccacgauguauacagagaugaagcacuaaacaaccgguuucagaucaagggaguugagcugaagucaggguacaaagauuggauccuauggauuuccuuugccauaucauguuuuuugcuuuguguugcuuuguugggguucaucaugugggccugccaaaaaggcaacauuaggugcaacauuugcauuuga

SEQ ID NO: 37321 - RNA, 1701 nt, Artificial Sequence
  derived and/or modified CDS sequence (wt) from hemagglutinin__InfluenzaA__ADK87291
augaagacuaucauugcuuugagcuacauucaaugucugguuuucgcucaaaaacuuccuggaaaugacaacagcacggcaacgcugugccuugggcaccaugcaguaccaaacggaacgauagugaaaacaaucacgaaugaccaaauugaaguuacuaaugcuacugagcugguucagaguuccucaacaggugaaauaugcgacaguccucaucagauccuugauggaaaaaacugcacacuaauagaugcucuauugggagacccucagugugauggcuuccaaaauaagaaaugggaccuuuuuguugaacgcagcaaagccuacagcaacuguuacccuuaugaugugccagauuaugccucccuuaggucacuaguugccucauccggcacacuggaguuuaacaaugaaagcuucaauuggacuggagucacucaaaacggaacaagcucugcuugcauaaggagaucuaaaaacaguuucuuuaguagauugaauugguugacccacuuaaacuucaaauacccagcauugaacgugacuaugccaaacaaugaacaauuugacaaauuguacauuugggggguucaccacccggguacggacaaagaccaaaucucccuguaugcucaagcaucaggaagaaucacagucucuaccaaaagaagccaacaaacugcaaucccgaauaucggaucuagacccagaguaaggaauaucccuagcagaauaagcaucuauuggacaauaguaaaaccgggagacauacuuuugauuaacagcacagggaaucuaauugcuccuagggguuacuucaaaauacgaagugggaaaagcucaauaaugagaucagaugcacccauuggcaaaugcaauucugaaugcaucacuccaaauggaagcauucccaaugacaaaccauuccaaaauguaaacaggaucacauacggggccugucccagauauguuaagcaaaacacucugaaauuggcaacagggaugcgaaauguaccagagaaacaaacuagaggcauauuuggcgcaaucgcggguuucauagaaaaugguugggagggaaugguggaugguugguacgguuucaggcaucaaaauucugagggaagaggacaagcagcagaucucaaaagcacucaagcagcaaucgaucaaaucaaugggaagcugaauagauugaucgggaaaaccaacgagaaauuccaucagauugaaaaagaauucucagaagucgaagggagaauucaggaccuugggaaauauguugaggacacuaaaauagaucucuggucauacaacgcggagcuucuuguugcccuggagaaucaacauacaauugaucuaacugacucagaaaugaacaaacuguuugaaaaaacaaagaagcaacugagggaaaaugcugaggauaugggcaaugguuguuucaaaauauaccacaaaugugacaaugccugcauaggaucaaucagaaauggaacuuaugaccacgauguauacagagaugaagcacuaaacaaccgguuucagaucaagggaguugagcugaagucaggguacaaagauuggauccuauggauuuccuuugccauaucauguuuuuugcuuuguguugcuuuguugggguucaucaugugggccugccaaaaaggcaacauuaggugcaacauuugcauuuga

SEQ ID NO: 37322 - RNA, 1701 nt, Artificial Sequence
  derived and/or modified CDS sequence (wt) from hemagglutinin__InfluenzaA__ADK87293
augaagacuaucauugcuuugagcuacauucuaugucugguuuucgcucaaaaacuuccuggaaaugacaacagcacggcaacgcugugccuugggcaccaugcaguaccaaacggaacgauagugaaaacaaucacgaaugaccaaauugaaguuacuaaugcuacugagcugguucagaguuccucaacaggugaaauaugcgacaguccucaucagauccuugauggaaaaaacugcacacuaauagaugcucuauugggagacccucagugugauggcuuccaaaauaagaaaugggaccuuuuuguugaacgcagcaaagccuacagcaacuguuacccuuaugaugugccggauuaugccucccuuaggucacuaguugccucauccggcacacuggaguuuaacaaugaaagcuucaauuggacuggagucacucaagacggaacaagcucugcuugcauaaggagaucuaaaaacaguuucuuuaguaaauugaauugguugacccacuuaaacuucaaauacccagcauugaacgugacuaugccaaacaaugaacaauuugacaaauuguacauuugggggguucaccacccggguacggacaaggaccaaaccuuccuguaugcucaagcaucaggaagaaucacagucucuaccaaaagaagccaacaaacugcaaucccgaauaucggaucuagacccagaguaaggaauaucccuagcaggauaagcaucuauuggacaauaguaaaaccgggagacauacuuuugauuaacagcacagggaaucuaauugcuccuagggguuacuucaaaauacgaagugggaaaagcucaauaaugagaucagaugcacccauuggcaaaugcaauucugaaugcaucacuccaaauggaagcauucccaaugacaaaccauuccaaaauguaaacaggaucacauacggggccugucccagauauguuaagcaaaacacucugaaauuggcaacagggaugcgaaauguaccagagaaacaaacuagaggcauauuuggcgcaaucgcggguuucauagaaaaugguugggagggaaugguggaugguugguacgguuucaggcaucaaaauucugagggaagaggacaagcagcagaucucaaaagcacucaagcagcaaucgaucaaaucaaugggaagcugaauagauugaucgggaaaaccaacgagaaauuccaucagauugaaaaggaauucucagaagucgaagggagaauucaggaccuugagaaauauguugaggacacuaaaauagaucucuggucauacaacgcggagcuucuuguugcccuggagaaccaacauacaauugaucuaacugacucagaaaugagcaaacuguuugaaaaaacaaagaagcaacugagggaaaaugcugaggauaugggcaaugguuguuucaaaauauaccacaaaugugacaaugccugcauaggaucaaucagaaauggaacuuaugaccacgauguauacagagaugaagcacuaaacaaccgguuucagaucaagggaguugagcugaagucaggguacaaagauuggauccuauggauuuccuuugccauaucauguuuuuugcuuuguguugcuuuguugggguucaucaugugggccugccaaaaaggcaacauuaggugcaacauuugcauuuga
